United States Patent Application Publication US 2014/0057251 A1 - sequence listing, part 94

SEQ ID NO: 167886 - DNA, 1355 bp, Cannabis sativa
actcccaaaagaaatgcacgcttcaaatccaacagaaagaaatgacagaattgcattgcgagctaaataaaagttatggacaaacttaggatccaaccacactccaccattgagtaacctaaaaaatcaatagtgctgaactacaagcgcaattaattaacttcctcagatcctttgtaagaaatctatccaaaacaaccaaagcagcaatagcagcattaacaaatgagctaaaccacttagtttcaaacagaacactaaacctaaaacaactccagaaaatggaaaattatcccagcaacaaaacatgtcaagaaaactatacagaaacaacaaatgaacaaaacagatacttccataaaatcgtagaaacaacaacaataacaaaaccccccaaaatgcccaaaaccaaaaattgcatcggaaaaaaaaaaaacaaagacccatcaattgaaatccacccaaaaagaaatgagaaatttggtaagaaaaaaaggggggtctcaccgttctaccatcaatggtatgagtttcctgaagaaccctatcgaggacagagggatctgaaaaaacaacaaaagcaaatcctctaggtttcccagtgaacttttccctcataacaactgtctgcaacacttcaccatagttctcaaaatactccttgagcttctcctctgtggtttcccatgaaatcccaccaatgaatagctttccttgatctgaatccattttatcttttcaacctatttattccccccccaaaaaaacgtctcttttctccttcccttattggttctgagattttcccacctccgtatttggagttctgggtgttgtgattcgaattatgagtatgaaaaaggaaggaagaagaagaggacgagagggtttgtggccgactttcggtcgagagagagagagacaaatgtgaggaggtgaagtgagagagggcatatacctctgtgctttgacaactcaagttccctttgtgaaaaaaagtattcaatatcaacggctggatttgattgttaataatgcagttgatgttgattagagatggacggctgtgatttcatttttgtttggagtttgtagaagcgttagaacgtggtcgtcaaataaggtacggattggtaatagtgattggctacttatcacgtgacacgcacgagatagtgacattttctttttctattttgtgtttaaaaatataagaatgagaatctagaatctaaatttctaataaacaataaatagggtgattctacaatacactcctcgtaaaggagatgtactcatgcatcctctacttatttcggtctttagaaaaaaaaattagtctaattttttttcat

SEQ ID NO: 167887 - DNA, 623 bp, Cannabis sativa
tctgagaagccaaaacaaccaaaccttctctctccgtcgtacgtcgacccaaccctcaccttcatctttgttgtcaccaccactattgacccactcgttattttctcttgctccaccatcgacatgaacccccgcaatgcgaaaaactgcctgagaagccccaatcttccctacccaagaaggtgaacctccgccttcgtctttgtcatcgccacagccaaatgcccaaactgaaatcgaaaggtacattttttttttttaaaaaaaattacattttaaaaaatattgcttttgttagtgattatttttagattggatgtggatttgtgaatatttttgtgagatttcttttggatttgtgtttgtttaagaccttagatggtggtggttatggtattttctaggattgagcataaacttcagaaaatcaaaaaaatcattcaaactgacctaccgaacactgttagaactgaaatcgacggaaccgaaaatcgaaaaaattgctaacagttaaaattaccattgaacgatcggtttttttttagtaataaactgaccgaaaaaactgaaaccaagtgttatacatatatatatattaatttatcaagttttttttttttttt

SEQ ID NO: 167888 - DNA, 628 bp, Cannabis sativa
ttctttttccattatctattttatttatttaaagtattgtaataagatagcgtacgcgacatatagaataaagagtataattaattaacttataattatatgcaaataataataataataataaagaaattaacctttagatttataatattaagtctaaggaattcggtagtgaagagctcaatcaatatattctatattataattgagttatacatctacgtcatatatatataaatatatatatataatatagcttttgaaaactttgagaaattacgttgaagaattaattaattttattgaggaaatctaccgttaactatacacataatatgacagatgattgtaaacgagtaagataaacacaagtgaatgtcgattaaaataaatcgatcggtttatagaataaaatttaacgatgacaaacaacaaaattttatggtggtttattccctttcagcggtaatatactagtctacttcaagttttattgatcttgatatgcttgagaagagttatgttctctgaaagtcctaattactacaagttctaattgatgattcttaatagagtaattctatgttatgaactgaacataaagtcaatgaacacagaatttacaagc

SEQ ID NO: 167889 - DNA, 900 bp, Cannabis sativa
tttcttaagtttctctctttttctccatcttgtgttctgtgttattgctctgtgtcacagtttttgttttaaggttgtattgttatctggtgttatcctcttcatctggctgcttcccctttgtctttgagtggggtgtgtgtttttccttgttgcatttatttgttttaagtcctgtctgggtggttggtaagattcggtgggtgagtgtgttattgtcttttggagttcatttattcttgtctttttctgttacgtatggcgtcaatcattgcatgcaaatctcctctgaaaggtaaaagcttttcttgcattgaagccacggttaagctttccccgtgcgcatcttctgttaaggtactctcatcttgttgcttgtacgggagagtaatagctcctatgaatgtggatgaggccacggtagtggaatttgtgtctaaaacttggaagaaacagatttcagtggtgcctatggtggatattatgaagactgctaacatcttcaagtttggtttcgactctgcagaagacagagattgggcactcgtcaatggcccctggtgtatccgcggatatacattggttttacaggcttggtctccgagcgtggaagggccgattacacttaatatactccgtgtatggattcaaatccataacctgccccatgaatatttctcgcgtgaaaatggctatctattagggggattggttgggaaggttgtgaggcttgacttggaggaggacaaaccagcaacttggaccacattccttatggttcaggtggacatagatgtgcaaaaaccgctggtctctgggtgcttcttcgatttaatctctggggagaaacaatggttgcaagtgaaatatgtcaagattggaattttctgttacaattgt

SEQ ID NO: 167890 - DNA, 2346 bp, Cannabis sativa
ctttgaaggtatttggagattgggatagtctcagggttgcctgtttcagtcaatggaaaggagctttcccctgcatcactactcaaagagctcaaccaaattggtggaaagcatggaataggccgagttgacatggttgaaaatcgccttgttggcatgaagagccgtggtgtgtatgaaactcctggtggcaccatcctctatgctgctgccctcgagcttgaatcgttgacactagaccgagaaacaatccaagttaaggactctctagcactcaagtatgcagagttggtgtatgcaggaaggtggtttgatccacttagagaatctttagatgctttcatgaagaacataacaaaaactacaacaggttcagtgactctaaaactgtacaaaggctctgtgactgtaacaagtagaagtagtccctttagtctttacagacaagacatttcatcttttgagagtggagacatatatgatcaagctgatgctgctggcttcattcggctctatgggcttccaatgagagttagagcaatgcttgagaagggtatgtgatgtgatatagtacaatagtctttctttccttaaaataacagtgctgtttgcactgagtcagggcatttgaggttgtgttcatgcaattctcatatgatgctttagctttctttctttttacttctgagctttgattactaatggtgtaatgaaggccaggtgtaactctcctttgtttgagaaataaatgcaattagtcttaaaagttgtctaaattaaaatgcattacatgtttttaaatctcttaattcagatcataaaagttagaattgtaagatttattgtaattttttttaataatgaacatatcaattgtacaaataaattcatctaaacaagtttctattccaccctgaatactggaacaccaaatagtgaacagtaagagcatctctaaatgggggcaataccatagctttcaaaatacacacattattttaaaatatatatttttttattttctcttttatctacataaaatttgacacattttcctataaaaattactctaacgtgggcaacttcaaaaattgtccaccataatcttacataccacttttttaattatttttttattaaaggagaaaaatttattaatcatgacagaaaatactacataaatcggtatctacaaaacaacaaaatgcagacttatttacattgttacaaacaaaatcaaagatttgttgatccctcttagaaagatttctcctatttacaagtagtaatctcgctttaagtataactctaatcaaattattcacataagaaatcaaaaaaaaaaaaatatatatattttgctcaaagatacaagcattctgattccaccaaataaaataaactgctatcgcacaaatagccgcaacaaccctatgaagcatgctgtgatctcgattagcattcaactacaaaagtcaattcagataagactccagccaaatagcattaccaagccaaaaatagatagtgtgcatgagatgctggggaaaagaacaatcaaagaaaagatgattatgacagtcaacaccaacctcaaaaactgggtagctagtagatttcatggcaattcctcttgccaagaggtgatttcttgttaataagttattatgagaggcttgccagagaataaatctatgttttggtatggataatctacactaaattattttgtaattatctactttagtataaggagtaagaagagaattgtaaagtttactgacccaaaatcttcccccttttctagcatctagaactgtgtcttgagtgaaaacacttttaagattaagaagtttgcgccagttacaactcacatcacctttcttatcaaccacctaaaaatcttagttttttaaataaatagcattgatccatttaacccacagattatcttgttttgttgaaatagcccaaatgtatctagcaatcgaagctttgttccacttggctccttcccggaaacccaaacctccataattcttaggtttgcaaacaagatcccaagaagctagatgcatcttactagaattacctttcacatcccacaaaaagtctctgcagagtttattaacctccttgactactttctgttgaagcataaagattaggaatgcacatttcccccacgggaatggggttccatggggacccgcccctaatggggtgggaattctccgtctaaatggggaagggggcagggacggagattattttttgtccccgaatgttaaacggggcggggacggggatcacactccccgtcccgacgggaacccgtttagtatt

SEQ ID NO: 167891 - DNA, 522 bp, Cannabis sativa
gattactcttgatagactcacttaattatgtacaaatgtgggagtgtggctacttcctataaaattttggacaaaatttcttgaacgttcactatactaggatagacgtgcatgactattaacacatatgactgcacctttaaaaggttggtgcatgatattagagatgaagttcaagtttatgagttattctagtaaaatttagatcgtagtgaatatgtaaaggttcaagtcgaaagtcacttttatttattcttgatcttatagttgaatgacgttgctcgataaaaatatttttttgaaaaaaataagtgggactattggaacttttatcaaagtaaatgaagttttacaagatagaagagtgtgttaatgtgtgatatgacaatagttccacgtgggatatatgagcccttatttacaagagtatataaggtaatcttaggatttggagttgggctccaaaggttatttgtgaatggacgaggacttacacattttaataagagcatctccaatagt

SEQ ID NO: 167892 - DNA, 635 bp, Cannabis sativa
gaactccttattctggattgtgcatccgggtggcccggccattctaaatgctgttgaggctaagctccatctgaagaaggagaaaatggcagacactcggcatgtgctgagtgagtatgggaacatgtcaagtgtaagcatctttttcataatggataagttaagaaagaggtcattagaggaagggaagtccaccacaggagatggatttcagtggggtgtgctttttgggtttggacctggtttgacagtggagacaattgtcttgcacagccttgcaaactagctaggctttaataacttatttatcctaggctatatatatatacaatattttcataataattgttgttgtaacagttgcatggtactttgtggcaaatggtgaatgatatcttttttatatattcaataacaaattacaagcttggattctcatggtcttgttctttgtgatattgtttttccatttgatattaaaaattataatactaatttgttaggattggtacccttaaaggttatttctaaaataattactaaatatttaaataaaaaaaattatatttactcataattatatttagagtaatttgcggcataatctccttaagtggtcaggtttttgcaactaa

SEQ ID NO: 167893 - DNA, 1243 bp, Cannabis sativa
atttatttatcgttatttttttaattttctaaatttgtaaatatattttagatttataaataatctaaatgaaagaatgaaaactttatttagaaatttattgtcaaaattttatattggtgaaattttaaaattttggagttattatatgctcttaaaaatttagattaattaaacaatattacttttattctagtaaaaataatataatacttttctttttgaattattaaaaactatttgaataatttacagtataaatatttaaatttaaattttaattgtaaataaatactaaagtttaatttttgacgacaataatatctactaattatatcttaatctaatatcattctatatctattccaatccagtctaaataattcatttggctactaaaaaagagattttagtatgaaactcttcaagtatatgaatattctaattacctttaatctaataataatataataatttgaattagtaatgtgaatgatttacgtggtatcatcactaatgtataatcaatagagtaaaagaatgaacaaaatcaataataatcttgtttttttttactttaattaaaaattggtaattttcatcacctaataacaattatataattcatatcatgtaattaaaattaggttacttgaatatatataccaaaaactcataaatgtatctatattagattggttaagctattatacatgtagatagattgaatggtgatgtaaacctaaaagatgatcaaaaatactattacacgtggtatggaacatagcactaattaatgatcaaattaaatacataaaatttttaccttcatatttttattattattataaattatttaaataaatatgtaataatattattaatatattttggcactacttactactaacaactcttccacatggtccaatgaaaaatataccttcccttgttcttagtctctagacaatttcttaaagagttccaataattagtgcatatatctttatcttttattcttttttacatatatcacaaaaactttaagaaaaaagaggcaccttaggttacctattagtaaacactataaaaagtaacatattattatttatacaattaaatattaaattttatatattttaattaaaaaataatataaaaaatgttctacaaaaaaaattacttttagtgatagctttttagtgataatataaattttttgtaattaaatgtgacttttagt

SEQ ID NO: 167894 - DNA, 653 bp, Cannabis sativa
atatttttttaatttaattagtggaataaggtttcaatcaataatgtaaaagttaaatttcaggataaaaataatattaaatgaattatagttaacttctgttcgtagaaaatggtaactttaaagtcaatagactatagtgtagttttatataatttaaacattgtacacattaaaaatataaacttagaatggtatctttaatttggtgtgaaagattaagatatgtaaccaataaagaaaaattattataataactatcttatgcactaattattaaaatattatatttgtatccatagtaataattaatcataacatttcatagaagaatatgctatatcttatttaactttgttcattttagcttaattaattaataattaaaagaagaacattaataaatggataggaattagtagaatgaatggatgtaaaaaatttagattagatggatgaaatcatgacaattataggtaggtcatcaacttgatgttaaattaaatattaataaagttagatttgatcagacgaagaggttaaaaaacattatagttaaactaattaatcccatttcaatcatactcaacatgtcttcttcaagtttggtcgaatatataaatatatatatattttgaaatctatatatatat

SEQ ID NO: 167895 - DNA, 812 bp, Cannabis sativa
ttgcaatttgagtggagttctttctcatttttgaggaacttgtctatatatacatgtgcttcaactttttccaaataatacaaacttattatctatatatatatatatatataatataatgttgattttttttctttttctattgtctagttttttcatttatttactttattataattattaattttttattttaaaaaaataattacaattaacaattacatttcttttattatagttcatattttaataattaattgaacaaaaatatgcaacttaataatcaatactagataaacaaaagattataatttatatttcctgtttgattttagaaacatcccattctcattacaatatttacaataaatattttattataagaaaattagtcttatgaactcctttcatcattacaatttacagtacaaatttcacatttacataatttatttaatttaattaattcttttatttaaacatttcatgtagaaaaattatatcactaatatttttatataatccctcatttgcagttttcaaaataacgttgtgtgagtcatttcacaattgtcatcctatattcacttttgtggaaaggatattccaacattcataaaacgtttataaataacacttaaattatttttgtagttgtttctttttgctgaagaaaatagtctaaatagttttttacattaaaaaattacatcattagtcacaaccagggccggcccaagcattgggcagcttgggccattgcacaaggcctccattttttaaggcccaaattttatttattttttttttta

SEQ ID NO: 167896 - DNA, 732 bp, Cannabis sativa
tcgagatcccaggaaaccaaggttctcggcttctgtggcccctgttcgtggttgacggagtttgaagctcgtccgtggttccagttcgtggtcgcctttgaagttctatggatctcagagtcaatctaaaaaaattaacgcttttctttatctagttaaaattgtttttggatattgttgttagtagtttctagttactacacctgtaaattcaaactcatctcaaggtttttttcatgcccaaattctgaaaatttttgtttattcctatcaattttaaagtcatatatacatatatagtcatatatttattgaaaagttttttttgaaatgttatttatgaaaagatttttctttgtcaataatctgaaataatatatatatatatacacacacatgacagcatcaaccaccacaaccaacatattgaagtcccaaatcatgtcattaccagtacgaaaaagtgggtagacttgatgtcgaacatttgggtctgaaatgggagaatgagtgaattttgtagtcatattttttcattgtattttgtttatgtattttacttaaattatacttgtattttcttaatcacttattttgtattactgctactaattataatataattattttggtgtatttttttggttattaatttagatgtatttatattacttatataaaagaaatttttacatcaaaaatataaaatgataactttattacctaaatacc

SEQ ID NO: 167897 - DNA, 1823 bp, Cannabis sativa
ccattgtccgagacaatcttgtgcagaagtttaaaccgacatatactttcttagatgttatggttgctaagggctcgacttctgtccactttgtgaagtaatccactgtgaccaccgcatattgtactctgcccttgccctttggcaactgttcgatcaggtctattccccatatggcaaagggccatggactttgcatttaaattagctcattgggtggtgcactgaggatctttgaaaatctctggcattctctggcatttgctggcatttgtcggcatttgtcacactttgtcacacttctttacacttctttacatggctttacatgggcctttgaatcttctatcatggttggtcagaaatatccttgccttagtgttttctttgataaactctgccctaccgcatgattaccacaaaatccttcatgtacttttgacaggagccgtacaacctcttcttttgttacacatctaagtaatagcatggagaagcctcttttatatatcacaccttctactatgatattgtatcgccaacttttctcatcatcttttgagcctcgtttctgtcattttggagttcttcagtgttgaggtaaactgttatgggtgtcatccagtttggtgtcgtgtctattattttgacttcttccgtgcagttgatgctgggtttttctaagaatcggattaggagttggccttatctgtcactgcactgctcgcaagtcgagccaaggcatcagtgtagttgtgttttcttcccttggaatctgcctgagggtgtagcccttgaactgtgcaagcatgtcttggatcttgcttggataagccttcatcttttcttcacgagccaggtactctcttgaaacttggtttaccactagctgtgaatcactacagacttcaatgtactcagcgtgtacctcttgagaaagctttaacccaactatgagtgcttcatactctgcttcattattggaggctttgaacccaaatttgattgcgccatgcaggggttgcccccaggtgtgatgagagcaatttttgcactagaaagctggtcggtagttgatcctaccacatgtaatttccaaataggtttgtctttattctcttctggtagagactgctgtactagctcggggctatcctttgtactgtctttctctttacctgtacattccaccataaagtccaccaaagcctgtcctttgatcgttgtgcgggtcggaagattatttcatactgacccaactctatggcccatttaagtaactgtccagaggcatcaggcttctgcgaaacatggcacaagggttgatgggtataaacccgaaaagaatgagcttgaaaataaggtcttaacttccttgaggctaagatcgggcagtaagtaagcttttcaattaaagggtattgaccctctgcttcaccaagtcgcttgctgatatagtaaactggatgttggacattgttttcttctcttatcagcacgacgcttacagcgtattcgatgacagccaagtatattcccaattcttctccgtctaagggttttaagagtacgagaggccttgcaagttatctttttagttgttggaaagcattcttgcattcatttttccgttcaaacttcttatttcctcgaaagatgttgaagaagggaacacacttgtctgtcaactttgaaacgaatttgctgagtgcggctatccgaccagctaagcttttaacttcctttgtttttgttggtgggcttgtattttttctgggttgacttctattccttgagtattaacaataaatccaagaaattta

SEQ ID NO: 167898 - DNA, 854 bp, Cannabis sativa
gagcatgctttggaggggatagattagtatcatccatgatggcatcttggccactaggaagagatgttttgacaatggtcttccttgttgccaccattgttgcagacacaggtagcttggattgtttctaaatctctcaatgaaagtgccaaaatagttaccgagatttttagaaatgagattatgtaagagcttaagaaaaaaaatgagagattaagtaaatgagatggagattttgatgtggttcaggtgttaaagatccctagtccacgagtcaatgtattggcctttagatgctttgaatgtattacaagtgagattttacagcttgaagaaccttagttcttggtatattgtcttcccctctatgtttctcttagtgaagaagaaagcttaaggagtatttcttagaagtgtatctttttttgtcccccttacaaaaagagttacaggagtatatataggcttagacttaggtccgagcatcccgtgacctgctaggatttctgtgcaaagataggcccattattatgtcaagttttgtgtcctaaataaaactcatttcaatataatcaaattttctaattaatataagatcagaaatcgttttatgttgcatagttcacatgatttatttcatgattatgttttatgtataaattctattaagtcaagtgtttggaatattttgcaaggatccaaatttactaacaagtatgctgataactctatggtatggagttatatttttgggttttaaactaaaagtattgtgagaagagtagtgaaaatgtgtttgtttgcttaattttagttagttttagtttcattttctatttagtaagctaactttt

SEQ ID NO: 167899 - DNA, 1239 bp, Cannabis sativa
  modified_base (1200)..(1212): a, c, t, g, unknown or other
actacattgttataagatcattattttcgctgtgttatgatttctaatttgtgttagtttgatcagttttaacatgtttaattaggatgattttataagaagttattgtataatattatattttctttcattctataatggctaaatgaatattgatattgagttatatatgtcataatttggtatattgagttatgttataattgttttctttactaattagtgatttatatttttttaagagctatagttgaataacgagtttgcaattcctaacaaaaatatatctcaagaataagaagtattaatttttatgggattgtttaaattatgctataatatttatgtcattttattgcactttttctgttatgaatttgaaaaaaaaaattggtttatttctttatttttttaggtttttttttttcttttacatgttaatagaagtgaatggttagatatacaatttttaaggaattatactatagtaacacatataatttctatatataagtgtgaattattattattattattggtaccataaataaaagtcttggtaccatatataatgttatcaattgatataaaatattggtaatgttaacttttcaaaaatttacaaaaaatatatatatatatatcttaataatttatgtacattagagataacaatatatttgaatttatgtttcttttatttttttagatctaaaataatatcgtaacaatatatgtaatttaaattttaccttttatcttttttttttttatttttattttttattttaatcgaataataaatataataataatatggtaagaaaaatatatagtgcacattttctaaatattttttgaaaaatcaaataaataataataaatatatagaagaattataattcaaaaactccacacttatttattacttttttaattatttttattttgtatacaaaagtcgtaattaacaataatattatttctttctaaaaaaaaataatttaagtgttagtcttaactacttttaaaaaacatatataaatatctcatcattaataataaattaatatctatctataaataaaataatttaaaaaaataaaagaaatttctacttatggtggatgatatgtaattaattttaggttaatacatttggtacttactaatctgaacttaaatatatatatatatatnnnnnnnnnnnnnaggtgattgttacgtgccaagccacgt

SEQ ID NO: 167900 - DNA, 1042 bp, Cannabis sativa
tctaattagtaatatttattttgaataaattttcatatgggttatttttatcatgtaatttgaaatatctaaagaatactttgacatttcaaaaagaaatatagagagagaatttaagatagcaataagaaagaatttattaataacaataaaaagaaacagaaagcatgtgcagtagaaggtttaaaagaaataaagttcagtgagagtcgttttttttttctttttctttgcttaaacggagtggataattcataattttaacaaacaaattaatgtattctttgaataatttaataactccagttcaaaaaaagaaaaagaataatttaaaactaataataataataataataattttgaaagaagataaaagaaaatgaatatagaattgaggagagttgcacgtgcgattggtggggttggcctagttctctgtgctttggatctgctgcgccctattctattctattattatttggattaatagtaaataaattacacataataaacggttttttaattaattatttttatttaaattgagaatttaagagagagacccattattataacaacagtgtcacgtcactatactatttataaaaataaaaaaaataaaaaaaaaaattgtacaagagtaagaggatggagaaaagttggaagaagggtgcttaattaattttgaagaattttcatttttatagtatttaaagtataaatttataaaaatgtaattttttctcaaagatattattctatgaaaaaaattaaagtacacggttactttttatgataattgattattcctctagttacttaagagtacctagttcttcttctttaatttttccatcaattttcttataaaataattttttaaaaaaattatacttaaaaagtaggaggaaattatgttttgaatttggtgttttggttagttttttatttattatttactcttaacaaatagagcattattattaagcatcagtggtgtctagcactttctcgacatgtcgcgttgcgattggctagcgat

SEQ ID NO: 167901 - DNA, 746 bp, Cannabis sativa
acatataggaattagtgtggtatacaatttttttcatttagttataatatagatatttatgattttaaaaataattgagtgtgatttttataaatatatgccaaccaaatatacggttcactttatattttttctaaatttagtattattttaacatatatgcattaaactattattattgatttcataatttagtatactacttcaacttcttaatttttatgtctctcttactctcttatttaatatttttttttgttgtatttaagtgcttttatacatttttaatgtgctcaataatttgtatattaaaattgatatgtctatacattaattataaataatttttttttcttaacagtgtatatgaaaatgctttttcttcaaacacgtacaaagacgatttggcagtcggcaggagcttctacagcttttaaagtggtgaaatatttttaaaacaatctcacatatgtttattgtttcccttaattttgcccaaaaaacgtggaccaatgcgactgcgacacgtagatttgaaaaatatggttttgagataatttaactaagcctttttggatcaagagtatcaacaagaaaatacctccccgagaagatatgggggctccacgtactccctcttcagcagctaccacgctatgattaataagcctagtgacggctactttatgagggatcacatcagtcaagaagggataaaggattatatccacctaacccctaagata

SEQ ID NO: 167902 - DNA, 519 bp, Cannabis sativa
  modified_base (458)..(465): a, c, t, g, unknown or other
gggcttgcatgcgagcctccccacccatccacacacaaacacacatatgggctcgcatgtcacccacttgctacctccttccatattttgagcataactccctcaatattaactcgattgaggcgattcaagttgttatagaaagatgaaagagagatctacaaaattagtacgtcctttgttgagtgaaatttcattgtctttagcgaatgatctcttaaatggtcatggccaagtaactttaaggtcattatggccaagtgagctcattcttggtgatggttgagtgacttcaaggtcaccatggtcgagtaacttcttaaggctcgtggtcgagtagtctcttataaattgtagcctagtgatcacccgagctaggatttgttcgagcagccccgggtcatatgtgtcgattcggttattgttgggttgtctgccctaaataaaactcatttcannnnnnnnagatttactaattaataaaaagatcagaaattattttatattgcatggttcaca

SEQ ID NO: 167903 - DNA, 662 bp, Cannabis sativa
tgattttagaaagttggaagtctctaaaatctttcagtctataaattctggatagatttgcttaattgattttgaactattaattgtgaaatcttcttctgtgtcagcccggttgattgcatccactggacttctgctgcgcagctatcactgctcgaagatgaaatgcgtagggtagaaagagtaaatgtaagaagaataatcattgttttatctctctctgtcaagttgatcagaaatattatatttagtttactatcttttttcatctgattttcccatgttaatactcaatatacaagcatttttacctcattattgttggaaactatctttgtcttttaactttacattaggtgacaatctaaacaacattcttatatacaatctaatgtgccccttaataaacttgtttgatgctttaaagttagtctttgtttttgaacttggcacaattggtgcctaattgaggtactaaatacaacaattttaagagatactagatttgaacttgggtctcacccatttcccaaactcccctccccactagcagaacctactggcttttattctgtaatctctagtactcctcttggcctctatttttcttattactttggcatctattatctcatgtatctaactcttgatcaatttcctaa

SEQ ID NO: 167904 - DNA, 514 bp, Cannabis sativa
  modified_base (457)..(464): a, c, t, g, unknown or other
cgccttgcaatgtgacgtctcagcatgccttgccacagggtgtcttagaatgccttgcaatgggacgtctcgacatgcctttccacaccctaattgtcatggcaagccctgcaacaagacgtctcaacatgccgtacaacgagacatccacgcatgcctctctacgaaatgtctttgtatgcatgctcgagtgcctaagttgtatgagggaaaccattatgcatggaatcacaaggacaaggtatgcacgtgtatgggtacaggttagagtacgaccacaccttcaagatggtctgctaccgagagaagggtgcgagagtagtggaggcacctcacctacataccctgatatctcaagaataggtaggctacgccactactcctacatgttgctaccacctgcaagggcatgactgttgggaatattttacaaagatctagatttactaacaagtannnnnnnntaacatcctaaatatgaatgtctctaaaacaatgaaatcaaacacataag

SEQ ID NO: 167905 - DNA, 1714 bp, Cannabis sativa
aaaaaaaaaaaaaaaacttactgtctttggttttgttttttgtacaattaattttctgtgtatatactctatttatttctttacatactatatctctgtgtcactccagaatagcatttgaagttgataagaatggtccaaaaaatttaaataaacaagaagaggtaaaaaaaaaatctattattctattatgttatgcgataaaagttaagtgtatctgtaatcataatcctctattgggaatctaggactaagaggagattttggtaataaaggttatgaatatttttttatgtagtttttcttgtttggtattttgttgtttttagttttgctgattcggtatttgacttattagggactgtgttttatatgtttttattttttaacaaaggacttttattaggttatagaaatttcacttattctacaaaagttgtaataataatagtaattctaatcctatttaatcttttgaacttttcttttagcaccaatcaacactatagtatttgccaattcatttttaacctttgctttgaatgatagctgattgtaattcaaatagatttttcatacagcaagaaccagagcaagactaattccatttggctttcactaagttttttttcattcaaaagttagtcattttattctgcataatatgttacttacttttgcattgattatgagacactcattgaatttgcaagccttttcttataattttttctttcttttattttcagtataagattaagattatgtatagtgaatattttgatgattgcccttttactgttttagtcttcgaaattgttttttgagctatattgttttgacaaatgcacttcttttgagattgtttgtagttttgacaaatgaacttcttttgagctatattatatgattgtacgtgcaatcttaatttaactaaatcatgcatcaaattattaaaatctttctcaaagtagtatttctgtgtggttgtatgttgtgtgtctatataatttaactaaatctttgtttagttcaactataatagtttcaatatatttgaaaaattgaggttgaaatttttgaattactatcctattctctactcgaactcttctcgatacacttagtcatactgctttttatttgctgcactcttccacaccttactaattgtagggtctaattaaatacacaacttaatgatattttaagaatttatatatggtttactttattactctcaaatccacatatgcaagaccaaaggtatataactaatgtatagtataatcgttttgtgggttggtcaaagaaacttgaagttcaacaagagccacgaatcgtaaaaaataaaagatgatcttataaagattggagtatggaagaaaaagaaaagagaaacaagcctagaagtgaactgtctgaaataaaaaaagcaaggatggctgagaaaagagatggaaataaaacaactacatgtgaaagatatgttagaaaccatggaattgttattggagaaacaactcgttcaacatgccgagtacaaggtactactaataatggtatgtgtatgctataactaatttaaagtccactaaatatttccatgttaattagttatttttatatacaagttaatatatattattttgatttctttttgtcttttcaggaagactcaactatctaaatttagggcttatttggtactcat

SEQ ID NO: 167906 - DNA, 1357 bp, Cannabis sativa
agtcaaaccaacaacacagcttcacatctaacacaacgaacagaaagaatccataaacaataaatattgatatgaaaatgggctctaaaatcaaaataattaacaattcgaactggaaaatggaaagtaagaggagattgaacctctagtttctgaagcacgagtgagtccgagtttctggagtggttgtttccggatccgaaagggattctcctaatctgaaaattaacacaatcaataagctaaactaaactaaactcttacaacaaaccagtgagggacatcatacgaatatcccgataaggatatatacgctcttagtaaaatgtaagacatatacctggctccgacttacaatacgtatgagaggtcgaaatacaaaattgcatacaaaaaagtgctcatttcctaaccattggatttaagagactcgcatttttctatcatctaatggcccatatttagcctatatatatgatcaatcaatctatatatagttccaaaactaaactgagcagaggaatctgtcatctcattctcatgtcctaacctaagcaaatttatgaaattagaatagaaaaaaatcaatcgatgctttaattagctcaaaatagattcaaacttcaatctctaaactcagtgatgccttatcgatatcaaataaattaattaattaaaagaaaagtaattaataaattgtaagactaaatcgaccaaaaagaagatagtcacagaaagaaaaatagaaggaaaagaaaaatgttatttatttttaggggttcaaaataataaaaaagaaaaagataatagaaaattggtgctctaactgaattcaaacaacagagagagaaagagaaagatacctcctccgtcctccggctcggtgagacgtgagaatgagtttcaacggagtttccgcagaggagatcggaccggagctttgttgttttgatttgagttttacaatttcaagggaagaagaagaagaagaacagaatagtcagtagtaagggttaagttgtaattccagactacttaaacaggggtaaattagtcattcaccatagtcatttaaagtaaaaggtgattttaccgagtataaatacagctactactttttgactttttacttcttagcattcacaatggtcattccagtgtctttttttgcttatactagacctgcccgtatgcgatcattctcgttctttaaaactgtcacgttttcgaaatacaacacaaattagtttagttgaaactctcaacatttttgaaccaccataaataaatctcaatctcagtgggcaaaggtttgatttttcttcttctcgatttttcattctttaccccaattatt

SEQ ID NO: 167907 - DNA, 1331 bp, Cannabis sativa
ttctgttacagcacaataggaaaatgttgaaagtatacagtaagtatattaatctctttcgtagggtctttaacagggccgactcggagtttaaatggacctaaagaaaaatatattttttgagctcttatttataagaataaatggtattttaaaaaattattaaaaaatattttttattaggataactttaaaaaattataaacataaaatatttttaatatttatacggttttttaaattttacttacacaaaatacagtcttttggtgtatttttatgttgtctttttattattttattgttaattttttttatttaatttttttatgttattttgatgttattttcttgttacttttatgtattttttttttgtaattttcttgtattttaaaaaattagtgttatatgtaattattcattttttatttggaccttagacacggatctattttgccttaagttaaaatttaatcttgtagataaagttgctatttatttggaactaaaatataaatttggtattttttttcagtctagggaataaaacttggtagagctgtaatctaagaggaacaatggatatgagtttgacaagcaatattgaatgaaaccaaaattttctaattatgataatcataatagtttatatggagagatgacaaaggtatctaagaaatacatgatgtatgtaatgttatttgcaaagattatatatttctgagttgtttttgctttgcttgtaatcttatttgcagtagagaagccacagttgtaaccacagaagaaaaatgattaaaagaaaaaagagaaagaaatggatatacagctgattctgattcatattaatttgcttaggtttgtttggaatgaaggaatgaataattgtaataagaagttccttttatttgctctaaatgagtgttatttgcactaaaattggttcttttttcattataaaaaaattggtatggtatatggtctaatgcaactgatactcaattttcgactggtatcaataaataaaagagtaatttgtggcgaaaccttttagagaagagcattgctacggtgcactaaggtgattagtactatgagaaataggacccgatattaaaataacgatattatacctcttaagtgtgttaagtaatatttaatgaaaagttatcactatctctattctattcctgattatgagcaaccaatcattcatgcacttctgaaaaaaaaaaaaatcaacttagatctagaggtgtttataggaccacatataatgtttttaggcctatccagattcgatcaaattatatattggatgttagatt

SEQ ID NO: 167908 - DNA, 1199 bp, Cannabis sativa
  modified_base (1072)..(1075): a, c, t, g, unknown or other
acacacacacacacacacaccttccagatctctgcattttttatttttctctttggatttgagatttttttattgtggatttgatttgggtttgtttattttggtgaaatttggatcttaggttagtgtttaggtttctttgattgtgtttggatttgcaaaaaaatattgaggtggtggtgggtagttgtggttctgttgagcttgatggtggtggtgctagtggtgctagaatgaaggaaaaaaattggaaaaaaaaatatgaaacaagatagtggaagaaaagaaaaaaaaaatgtttttatttttttttttgtgatttttttaatttttaattaatttattttttatattttttcattatgaattatattgatcaataaaattatgtcacgtgtaaactaggtacatgtggacaatccaacatgtcacttaacagataaaatttgatggaaatgctcaattgctaacagaccatgagttttgggggtttggctgcaaaaatgagttttaggagttaattgctaaaatattaaaagtattggtggttttgctgcaatttaccctttatttattttcttattccatccacttttgttctcttactattaccggcttccaaagctactgtcattcttactttgcatttatgaagttgaatgagactatttgattagtttattattatttatttaattaattattatagaattattaattaatggaattattacatgaaaaatataaattgacatttttttcataaaaatacctccataaggtctggacaatatgttattccttttatatacttttaattaccgaaatatctcttacactatcacttacacaatcagacgacggttgctgagtggttggctgaaggttgctgggtggttgaccgaaagttgcatcagacaaaagtttcaatcccatgaagcatcagatgaaggttgctaggtggttgaccgaagattgcatcagacgaatgtttcaatcccaggaagcatcaaacgaaagttggtgggtggttgaccaaaagttacatcaaacgaaggttgctgggtggttnnnngaaggttgcatcagatgaaggtttgtgggtggttgactgaaggttgcataagacggtggttgaccgaaggtacgttgcatcaaacgaaggttgttgggtggttgaaggtgttggaaattatttt

SEQ ID NO: 167909 - DNA, 538 bp, Cannabis sativa
gttctgttgttttaaggtcacataataaacaacttccttcttgataaacttgaaacttcaactactggcttctggtttgaagcctcttttgtacagccaaccacattataaaactatgtttatgtatgttatatctattctaaactttcttatgtcatgaaactcgatttaacacagtattatatcttgtgtcatatttctacatttgatacatttttagaaatagaatgattttatttacttattaataagtaaaatttacaaaaatatgacatttatctgaaaaatttattttgtgagaaaaattaaaaaaaaaattaaaaacaatttaagataactagtaattaaaggggtgaccaattacctaactccttagggtaactagttaccttatattatatttatcatattttctgttgttgttttgaatttttgccattaaatacatgttttttttttttaaattgtattaaaacccataaaaatgtgtatttttcagaggtaagttgaaaaatgccttttttattcatcaattaat

SEQ ID NO: 167910 - DNA, 991 bp, Cannabis sativa
atttagaacttcgggatggagacgacaaaacttaattacagagtcagagagagattttttttgaaatgcaagaatatttttgggtgagtggtatattaaaatgccatgtcttatatttaaccatgctaagtcaaattttccaactaaaatatataagattcaatgtttatttaaccgacggtctctaattatttggggctagggcaaattttcaaaaaggcattttatttagaaatgaaaataaaatttaaaccaatttttctagcaattttttagggaccttaattatggactattgttaagaaaactttcttaaagaaaagatattaggaagtttggggagtttcggagaactactttatcctagtaaagacaaccctactaatagcggtatgacaacattgagcaccaaaaaaaccatataaaaattgtaagaaataagactacttatcctctcttttaattactaaattcatattttccctctttagtctttacatacttctatcttaatcaattattatcatctaaatattccaactctcccctacaaaacggcaaagacttccaaaacatcacattcctctcttagttacacttccatcaatatcttggcttattgataatgaatagtctcgatcaccaaatgaccttgatttcaattaagaaaagaaaaaggacaaaaataataaggggtacacttaattattttagggtatagagtaaaaatagattgataaatatatatcttattttaattgaggataggaaggaattattatttattttatttaaaatataaaaatacgattgtatagaattttaaatatttttataattttcaagatttatttacataaaatattatcttttgatgtatttttagttgttctcttgttattttgttattagtttcttgttttttatgtattattttttatattattttaatgttatttttatagaatatcataaaaatgtaaaaaaaaaa

SEQ ID NO: 167911 - DNA, 794 bp, Cannabis sativa
ttcagcttctttgtcatcattattaaatttagcttttcctgggatttgttcccagttgaaaggaactgcaactggttttgttacttgctctaatttgaaggttggttcaaaaactgaacttttactcttagctttctttttattctctctttctgaagttcctaatggtttagagaatcttcttacagaccaaagtggtgcattcaaattaagcttcctttcagccattcattaactaacaaacaaaccctgaaaattaaattgaatgatctaaaaccaaatacctctaaaattgaagaataattgtgtcataaaaactaaaattgaatgatctaagaaaatatcagagtaaatcaacaaagagaagaaaaaaagaggtaccttggtatgatagtggtgaagagttgagagaatgagtgagaagaaagaaaaggaaggaatagagagaaatgttatcaagaaaaaaaagtttgggctcatgtactaaattgtgctttaattaataatatatttctatcttacttttgtttcttattatattataagtacatcaattatttatgagcattcttattaggcggcattttctaaattcgtcgtcttgtaattagttagtgataatattttttaaaaattattacattaaattatatagaatctgataattaattagactaataataaaattaatatacagtagaacctctatttaaaaatactctattcaagaataacctctaatttgttataaaaaaatcaagtcccaatttggaccagttataaataagaataac

SEQ ID NO: 167912 - DNA, 508 bp, Cannabis sativa
tgtgtagggggtaggattgtcaagaagagtgtcatctgaagtaacatgatgggtggctcctgtgtcagcgaaccattgacaatcatcaccaaaatcttgcaccatagttgtagcataagccaaaggatcacaatcaaattcttgttctgttaagtaagcacggggattgtgtggattcggcttgggaacttgccaagatttatcaaatctataatggcatacaggggcagtatgtccactcttcaaacagacttggcaaacaactcgattttgaggaggtctgtagtaggagcgaccacgaccgtgagtggaattcgaaccatctgtattaccagatttggtttgggaaaatggtcgaacacctccagatctcccagaaccaaaagccagattagcttgaattcgcatggaaagatcatccatttgatgatgatgttcaagcctactttcgtgagaaaagagaagagcttgaacttcttcaatcgtgagattgtcacttctggatgta

SEQ ID NO: 167913 - DNA, 707 bp, Cannabis sativa
attttacttattggtcgattgatgattttatcttcatgtcaatgctattagtatcctctttatctacgctgaaaattttgtgttttttttaactataatcttcattgaaagaaactcagaggaaaaggaaaacaaaacaaacaaaagggagttaatggcagcaacatagggtgtcacctcacctccctagatgatggtaactttgagtttttatttattacgagagttgcttacttaagaaataataataataattcatgtttctaaagaatagaataaacaaaaaaagtttaaaaaaagtaggaggttggaaaaaaaacatccggatctcatattaaatgtgagctgaatcatttttagtatttgatatgtcatattttgtaaatttaatatttaactcatatttcatctttttgtttttaatttaattgattttatctttttttttttggtttattttgtatttgtattttagaatttttatttctctatcttttcattttactttaatatttttagtgagttttgtgtttgctttagatattatttgattattaagatattatttgattattagtgtgtattataatattaacacacttctatttttattattttttatatatgatttctctcttctaaggaagcgtttggttgggaagaatgaaaatatgggaatgggaatgggaataggaatggaataaaat

SEQ ID NO: 167914 - DNA, 764 bp, Cannabis sativa
  modified_base (730)..(738): a, c, t, g, unknown or other
aatcaataatcatgaaattactactaataattagaattgtagactattaggtgaatagtaattttaaaataacaatcaatcactactatatcatatttaatgctcatttaaataataacaagatgataataataaataatcaatttaaaagcatttgagcaattcaattcattggaatgaaagaaatcaaaatattgttaatgaatgataatcatgtttaggggattgaaataaaaactacctctataaagataatcacaattattgacataatcataattctaagagtttaaggagaaagaaaaaaatctagaccgatgattttgatgaaatcctctttttttccatagctcattctcagtatttctcttctaaaatgtaattaaaaaacattattaattctaaaaaaaatctattttatattttcacttaaattgtaattaaaaactaaattaaaaactgaaatcaacatcgtgggcttcggtcaagaaaattacatgttgtggcctgaatttcgttttagataaatcagcccccgtggcccgcaacccgactgtcattttgctacacacaggcagtggcctaaaaaacttgagcaacagcctgtgtaaaaacacgtcacatactcggatagtaatttggtcataagatatttcggaaatctgagaacaagatctaaaactttcatgttcctctcaaaatccaattctgtaacaccctaactagcatnnnnnnnnnacgtgatttttaaacgtattgtgcag

SEQ ID NO: 167915 - DNA, 1893 bp, Cannabis sativa
gggttcaagtcccccattgaggtctggatcctaggtgtcggtttcggcctatgttcgagttttggttcagatcgcgagtccatgtcaaagtttaagtcctggtccaagttcaggtttaagtttaggtttgggtccaggttcggattttggttcagatcgtgagtccatgtccaagtttaggtcctacaccaagttcaggttcaagtttagtttggatcccggtccagctccgagtccctgttcgagtctgggtccaggttcgggtctaggtctaggtcccactctaggctttggtctcgggtcgcatgtaacggtttaggtccaagtcccagtcagggttctggtctgggtttgggttcgcatttgggtccaattctagacccaggtcctggtcacaggtacgggttcaattcttggcttgggttcaagttcgggtctaggtctgggtttgggccgaggttctagttttgtcccgttcatgggtcccggtctggttccggtttaggttccaattttgggtcccgggtacaggttttgttcaaggttcgggttcatgtttgggtctaggtttgggttcgggccctggtacttattttggtcccgttcatgggtcccggtctggttccagttcaagttcaaattttgggtcccgagtccagaccttgtcctatgttcgggttcgggtggggtcccgatcccaattctgtggcctaggtctcagtcctagttttggggcccagttcccgggttcgggtccaccatcaaagtttgggtcctaagtcccggttcgagtactggttcgggtctcggtctgcatccttatccaggttaaggttcggattcgggttctggtcatggtcacagttcgggtcccgagtcacgggtctggatcttgggttctagtaagggttcgtgtttgggtcctgatctggctctaggtcccaatccggattcaagtcccagtctgggttcgggtcccaagtcttaggtcctgatccaagttctggtctaggtttgtgttcaagtttgggtccaatttgggtccaaagtctaggcccttgtcccggtccctgttcgggtatggggctgggtctaggtttggttccagttcttggtttggctccgtgtttgggtttgggtttagggtttagggtttaggtttagggttattgtttgggggtttaggatttagggtttagtgcttagggtttagggtttagggtttagcgtttttggtttgggatttagggtttaaagtttagcgtttagcatttagggtttagggatgaggatttagggtttagggtttagtgtttagcatttagcatttacggtttagggatgaggatttagagtttagggtttagagtttagggattagggttcatgatttagggtttagggtaattaaaaataaatctaattatcgttacttatatcattacttaccattaattttatcattacttattattacatatcattaattatattaactttatcattacaaattattacttatattaactttattattaatcattacttatcattacttattctacatatcgttacttatattaactttattattactaatcattacttaaaactactaagtaatgattagtaatgataaccaatgatttgtagtgattagtaataagtagtgattaaaaataaataatgcttagtaatgattagtaataaagtgaatataagtaatgataagtaaactctaaaccctaaacgctaaacggtaaacctgaaaccttaaacgcactacccttaacactaaaccctaaaccataaatccttaatcttaaacacaaaccctcaaccctaaaacttaaacccgtaaaccctaagccctaaaccctaatccctaaaccc

SEQ ID NO: 167916 - DNA, 3737 bp, Cannabis sativa
ttatgagcaattacaataatatgtttgctacgttgtttgcaatttttttttttgaagatatttgaatattattgatttagttttaaggtttcagccgcaacctatctcatgatttttctctcaaacctctcttacaattttctttttacatgaagcgcaggagggggccaggtctctgagctcacagtatagcagtatagaggggtcaccttctatggagaccagaagatggaaaccacaaatctggttagtgaattcttctttaattattttcaataactgttgtatattgtttcggtaaattagctgagtattttgattattacaagatgaattgggtctttgttaaattaaagttatataaatttcaatcatcgttcaacatagctaaggtgtttgattaaatgtcttaatggaaaaatgatagtattttgagagttttaaatgggtgatatctatgttagcagcagtactagctttgttattagtaaaatttatgatgtagtagaagtgtttaattaaataattcactacttaaaacagaccatgtaattccttcccttatagaaatctttaaacctcaatggaggcatggtctttcaaagagtataaacataggtaacaactactaactatgtgtatttactaatctcatattttactcttttattaaaaataaatgcaatccagttatgatggcacacaagttggtcacggtagatgtcccatattggggattccattatggccttgtgcaagctctactatgagtaatttatttcttatattttagcattacttattttttatctttatagagatgtttcatgagtaattggctaccaataactgattcaatttatattctcaaaagaataggatcatgtcttaataaatgttatttatattttggtgcaagaatcagtaaaggaacttaggtaatatatattttttgtacttgtgcttgaaaattgcattttgattaattacaaattagattacttgaaagtttatgcaattgttttgctttatatgggtaaaaaaaaagataacacagggtgttactcatttatcgtcagtatcttactatggcattatgatttttatggtttttagtagaacagttcatccatgatttaccattaagagattaacatcttagagcttttctgacgacaattattgaaatggatcttgatgagctctcaggagcagagcatggtcggtgaagtgtatatccgaacaatctgaagctcaagatacctcattttccactgttaagaatagaatgttttgtgatgaagatttaattacctctccaaacttctgtttggttactaaggcaggagaactcaaggttaatagttcaataaactaatgaagtagaacaatgctcccgtgtaagtgggtatttgagcttgcaatgcagtatatgtttagtattttaatattgtaagatgtctatgagttatgaattaagaccagtttctactgttttggaaaggcatgatgaaatctaatcaaaccttctttgaattgtgtgtttttcaatcgtttcagtattactaattgaaggtttattgatgagtgttatttgatagtcacattttgcatgtgttaaggatttaaactttatgacctaaattagttattttcttcctacaagggttcaggattgtggagcagctgggtggttttgtcacatggaaccactggaaattaaagaatcttagttattttcttgacaagagaactattcatatggtctcaggtgccaacataatattttctgctccaaagattcagtgggtacaagttcttgaacggctgaaaagatttcagcagaagaagtgataatgatcttcctgacatagctgtaagtattagcagtagagaacagtctcatgattctcataacttgaacaataatgtgaagtatggcacaatttttgaatgaacaatatgtaggttctcataactcgagtacttttagaaagcattgttgtttagaacaaacgtaatcttaaactaccatatgcgtataaattgcactagcatatgagtataaaataccatatgagaatggtctcatcttgagaaatttgaattaccactactagcatatgagtatacattgccattcatccgatgcatttgccatacacatagaacatggcaacaatctatagatttggatgccaaattttttaaaaatttattttaacctcctaatttggtaagactattttttttctctaggcagatggtaatacattttttattttaagtaattgttgattgctttaaattatgttatttcttttttaaatataatacctaaaataaaaattagaatacgtgcattgcacgtaacaatatagatacttctgcctacacgtggctaaatacttggagggaaagatggtagtttgtcgttgcttcttcagcgagaactttgaggtcatattttcagctatttttttaaagttttgcatgttagctccttaatgttgttttcaaccagctttgtatcccgcagagtttttcattgtcagagacaacccttaaagaaatggcagatgaaggaacggaaaggacaatcattttcaaccccagagtttgcaatgacgtcaagcttgaagttgggaattgcattcgtatctactccccatggtacagtagtaaaattcaacatctttgttgtttattagtttattttctaagaaatttgaatatgtctgttgacctgaaatatcttgctccatgctaggctggtagcgttcttaatgtatgcatttaaagtagtgttcttaattttgatgttgaagctttcggacaggaaggaggtccaagcgggcaatgacaaaaacattattttagttaattatttttcaattatatcagtcagttcaggtttctcagaagaggtttgatttgcttttgtattgcagttctttaacatgatgaagacaaaacaaacagataattagcaatctaaatattaagtattatttagttatgacttatatgtacctaaatttatttgaataaccaattataatagcacaaatattacttaatagaacaaatcattagaatgatcataccttcacgtacaatctaaataagaaaaaataaaaaaacttaaactttacttaaaactaatatttacgtgccttggcacgtaactcttacctagtatatatatatgtgtcttatactattattttcttaatcaattttatttttatccatacttttgtatttaatgtatttatttttgagtgattttcttaatagaaccaatattgatgataaaaaaatacgatctttaatggaacgatagaaaaatatgacaaagaaattttttcttaattttgagtaagtaaatatattattttattaaacaattatgatgagcttcatatttttttttttatttgatagaagtacaataattatagttcagaggtaaaatttgtttatttattataatatttatatatagtaaaaagaattagttaaaatagttttttttttttttttatatcaattttgctaatacttagtcaatatctttgatattacgtgagataatgagcgactataattgagatacgatgataataatggatttgaatgcaatagcgctacaacttacaagtgagatatgcttaaattttttttattgtgtttcaatttacatatacacttaaaatataatttttaccttaaat

SEQ ID NO: 167917 - DNA, 905 bp, Cannabis sativa
  modified_base (765)..(774): a, c, t, g, unknown or other
ggtcagatgctacacttgtgtcttcttctacaaccatagtactcaacttttttttttcatagtactcaatttactatagcgatatttattaataatactagtgttgatgcccactttcgtagaaccaatgtccgtccacctgtctagaatccatgtaaaaaaacttatgttcttttgtgatttaattttggattaatttttataggaaagtacaagaagaaaaaacagctctcattgtctcactattagcttagaattccttatgtttattgtttatggcatggttgtatggaggaaattataatctcaatgagatgctctatttttttaaactgtaatctgtttgtgattttattatgctttttcttgccaatgtgaaatatctgaccagtttgtatatagcaatatctaccattattcctctcccatatgctttttttatttagccaaatgaattttatatagaaagaatcgcatacaaagtaggagatagaagtggtcttattcttcttgcaaccaaatgaatttcgagaagttttgatcttttgatgacttttttctaggaatttaatctttttatggtattgggtcattttgtgtttttgctaacaaaataaatggaaggttatgataaagtctataggtttaattattgcattttaagctatttttaggggtattatctgcactttagacgaagattttttttgagtcaattttgttagtatgctttttgttaacgcggattttcgttaaccaaatttnnnnnnnnnnatgataattcaacacagaaaaaatgaaaactatagaaaaataaaaatatcaacaacgggttttttttacgtggttttgtagttaaaattatgcatagtccacgagtaaatcttattcagatttctgagtat

SEQ ID NO: 167918 - DNA, 791 bp, Cannabis sativa
tttcaggatgaggtaattatacttttagactttcagactgttaatgccacaaattgacctcattcgtatatgggaggcttattttgtaatgttgtcgacttatgaatagtttgctaaattgtttcttaaacatttatatagttttgagtgtgtaactaaagtcttacattgttagaaatataaaaaatcatgggtatataataaggatgtacactatttttattaatatgaaacttttttggaaagtgtcaagaacaaattcagacttattaagcttagagatttgatatggtttcccaaagctttcatatgctctttctcatccatgaaagcctttgagattgagatttttgcgacaatggagaccgaccaaagagatggtttttgcttgactttgcctcttaattatgtgtgaagataattataataagaaagagtataattataatggactttgtataggttttcgatggagtcgaagtcattaattggagtgggatccccagtgctatgagttattgtgctcatccacctttttcctactctatacacttctatatatgaattctctaatgtaagttgtggcagacatttgtccctccttacaaaatttgtatttttttttcaataaaaattataattttcattaatacttcaaaaatgtcccactataaaatattgggctagctttgccacataatttgattttctatacttacatatacttaatattttatttctaaactaatacatatcatcattgaaatatatgaccactttatctaaaaccc

SEQ ID NO: 167919 - DNA, 508 bp, Cannabis sativa
ctgctaaccatatttattgttcattgcaactgctttgagacttggaagtatttggagagttgaaacgtaaagttggtaatggcaaaatggcgtcactccaagctagaggaaaagctaaactcaagtttcagaacaattttttgtttttagatgatgtttttttaaattccaaatttcagaagaaacttgatttctgtttcatgtttacaatcgcaaaaatttcaattgaaatttttgagtctcaattaaaatatttcttgtaatggtgttcaattatgtgttgctactatagaagaagggttttatgttttaagacatgatgaaccatttgtgtttaataacgaactttttaaaatagcttaaccaagaaaccttaaaagacaaaagatcaaatatgaagacgaattatatctatgccacctacatcttggtcatataggctatgacaaacttcacagactaaccaaaggtggtccattaaaaaatgtcaccttaggtgaattaccag

SEQ ID NO: 167920 - DNA, 631 bp, Cannabis sativa
  modified_base (564)..(605): a, c, t, g, unknown or other
cgaagaaaagaagtgatagtgggtatgtataaaatctaaaaatcaagcaccaaacacttttaccaagctactcaagagagaaatgttcattatattagaaattattctttgagtcacaaatcaagtttaagggaggccgggggtggagtgttgtaatattaaacatgattttatatgatcaatcgctagaataattttcttgtagtaactgtaatttctagaatagccatctattcaccaagaggttgcttgacttcataatttaaaaattgttttttatttttttaaaactgaaaaattgtttttaaaaattaataagcgttgtttggaatttttttttaaaacagttttttaaaaagtgagctttacaaaactagaaaacagaaaacatcaaaatattatttttaattttcaaaaaaaaaaaaaaaaaaattgcctaacctattatattttacatttttgctcacgtactcgaatcctagacccggaactaaacccgaacccggacccggatgacttcatgtcatggttgttggaatgtattttacaaggatcttagatctnnnnnnnnnnnnnnnnnnnnnnnnnnnnnnnnnnnnnnnnnnaaaacgatgaaattaaacacatataa

SEQ ID NO: 167921 - DNA, 2243 bp, Cannabis sativa
  modified_base (1849)..(1850): a, c, t, g, unknown or other
ctgaatgagaaagatgtagctagggtttgcgtttcattaattagtcagttatacccgtcagtttaaaaccgtcgggtatattatatgtgacagttttagggttacgggtataactcactattaaaaattgtgatataaacccataaaaccatcgcggattgccctcttgagtgttctaaactgtcgcgaatactcaatttttctcgacagtttaaaatagtcacttaatattgttagcgacggtccctaaaaaaaattatttttgggaccgtcatgaattttggctttgaaccaccactaagcaatcagatgtgttgtttgatcaagctaagagcttctttgatgcccatggcttcaaccatttctggagttgtcaatccttcaatgaagcaactacgggcacggactagtaaacaatttgagtcacaccatgccaaacccataagcagaattttcaccaaagatggctccatcaactgttacattcactacaactactcttgacatcattagcggtggagggttccgctactagtaccctaaaaactttagctaaagactattagcggtagtgttctgccgctaattggttgctattaactattattagcgatggactaagcatctgctgctaataataaatattaagcgggatccgccgctaatgtttatgttagtctcgaaatacaaacatcattagcggcatggtccactgttaatacacgcagctaatagttaaaaatttgaaaaagtaaaaattatttcaaaatatttttaaaataataaattatatataatcaaaattaactaatattatcaattaaatatataattaaaaaataatacaacattcattatctttataagtgtcttaaactaattacaacataaaatcactaaggtgaataccaccaaagtataaggaaaagaatttaaaagggggaatgtcctaatcgtttcgttaccaagatcaagcaagaaattctcctcatttgtataattttgtaatggataatgatctaccaagcctatagaggtccccaagttgagtttgttggagaatcaagtagacaaaaatagttgctcctgcgacaatatctcgatcccaattagtccaaaccaattaataaacccaacaaattaatcactcattaaattaaaatcacaactttttcttaacatacctaaatattaaaaaatagtacacataaccctcatcacaatcaacatatacactgtaagaaaatatacacatgcattacctaaatattaaaaaaaataattaaatagaaatcaattacacagcatatatatataatatatattttttgagttaaaaaaattaaagggaattacccttatatattgtttcttttaacttttttttttcttttcaaatttacggtttgagtttttaaagtagttgcagcgctggttacaatagagatttctatacgatttttcgttaatttaagttgtagcgctagttgcaatagggattttgatatagaattctgtaaaaatttaaaaataattgttttgaagtataaaaatgaaaaatccccaaaaattaaaacacatatctaatattcataataataataataaaaaacatactttttttacaaatacaaataagtgaacactatttccaagctgcaaattcagaacttgatccaataataataataaaaaaaaaatacttaaatagaaaacaataaaataaaccataataatttataacatcattgcccgtggtaatactccaccctaaacaacaagcaaaatcatttttaaaaaacatgtattgaatattatatttataatatgtagatatatatatatatannaatatatatatatatataccatgattgtgggccgctcaaaatgaatggggacagcggagatggccgattctgcttggggacgaatgcgaactgcaaaggggatgtgagatgagctacacggagctgggacgagcgacggatgagctggaatggcctaaagggttgttggaggtgagcggacgaagtatcgtcgtcgtggtgaacgaggagagaaaatttttagggttatatatataactattagcagcggggtgtgctgctaagctctgccgctaatattattaatagtattaaaataatttttgtaagaggattttttatttttacactttaaactagttttttttttttttttttaacatttttacggaattctacataaaaactcttatt

SEQ ID NO: 167922 - DNA, 785 bp, Cannabis sativa
aagtgtcccgaaaaaaagtagtcaaagtgtgaataagtgaaaagttccaaagtgaagtgtgaataaaattttatttgcaccattaatgttctctttttaagcagaattttattctctctccaagtaataatgctatagattttttttacactattaatattgattatttcaatttccatagtaaagttgttgcttttttttatcaatcaattagaaacattacagtatttgtatattttaaaaaataataataaattaataatcactttaaaattaatatataaacttcttcctaagcagattaatagtcactttatatattttttaaaatattaatatgtcaaacgtttcttattcaaattaatacactatttctttttcattcttctcctattttgttgcaaaagttcacaagtggtatattttattctcttatttctctgtttcttatcatcgttcttttgctcttttcctctgatatatgttcttttttgttttatatttctattctttctcatggataatgaaaggaatagttagataatcaatatggaaggactattcaacaatcaaaggaatgaagatgaagaagcaacaattgatggcatagtgaaaataaatgagattcattaacattctaagataccaaaggttagtaagaaatttaaaattgaagaataaatttatacttatagtatttgtcaagtagctttagttctactttatatacaaactagggaactaatccgcgcttcgcgcggtttttacaatagttttaaattttc

SEQ ID NO: 167923 - DNA, 1472 bp, Cannabis sativa
atacatttaagtgaattgattaagagaagtataacatatttatagatgcatgcaactatatggatattaaaaaataaaaaataaaaaaactcaattttgaacaagtcgatcgtgtgtatagatagaccggttctggctaggctaagtctgtgcctaagacctatctaacacaatggccaaaaaaaatttcttctttaaagatcaaatatgttttattgattttaaaaatactatatttcttttaaaataagagtaaatttttttttatgaccactcgtgtgtataaatataacattgcaacaattgttaataggaagtatttgatattgctctagagtagttagtttttttttcgttaattgcatgatgaattctacattataactttgaagggataaacataaaccaggtcaatttgtaatatattaattaatttttataaaattttaaataatttatggtttcgaaaaataagcaactcaaaacaacttaattattatatatacgcatataaaatatactataaaaataatttataaatttttcaaaatttatatagcataaaaataattaaaaaattaatatacttattgcatatacccaaaatatataaatatatagtaagcttgttttatgtggcaatttttaagtttatccacaaattaattgaaaaattatttggaatattttacaaagaattactaggtcgacgtacaaaagttaatgcaaatataccttcataaatatatgtatataaaagggagacttcattacttatttacaaatatataattataaccaagcctatcatatgttgtcctgcctatttttttatgaacagattaaatagttatatcgttcatgcgatattatattcgatacatttcaaccaaatgcatgcgcatgtatgattgcgtaatttctaatacaataaactacgtttcttctgagttattcatatatatttttccaataatattatttatatatatatatatatcgatcaaaatagctatattatatatattattacactcatattacaagagtttgttctcgacacgtattacaagagtttgttaacgaatgaggtaacatattaaaatattaataagatacataattactcataatatatgttatttaattagtaataatttatacttaattactatatttttgttacaagtaataatttagtacgattaaaatttatatttagttactaaaaatttatattatgactaaaatatagtcattaaaagtaatttttttttgtaagtgaccttttagagcatccacaatatatataagagtaagagttatagttatcaaaatacacacatattatcttttattttttcttttgtcacaatatatatatgagtgtgtttttaattccaaaaggaatctgtgaagatttagaacaactgatgtgtaagttttggtggagagcttcatcgaagaataaa

SEQ ID NO: 167924 - DNA, 1221 bp, Cannabis sativa
cagaaagttaatcatgaaaataagttgaagccaataagtgcgcgggcaataaagcttcgtatagccttaattagctgtctgcacaaccaccacctgttatttctccaacacgatgttcaaatcgaaacaaaacctcgaaaaagatatttggtaatttatttctgtctcatagcttcttgacaacttttctttagttttttattagagaaagttacccgatacgtatgggcactgggatataaacttgaagtttcattactctgagtagagagagcaatgcttcacaacatttatattaaaattaataaatgaacaaatttcaaggcctaaagtaataccttttcatcaagttcaacttgacttttctcctcaaccaaacgctccaactcttcttctgcttttctcacatctcgaaatacattatctgcttggactttctccgcacatagtgcatgcaatcgatcttttatgtttgacatatccttttccatgtacctttggtcatcccttagcttctccaattcattatgcaagctatccctgttgccacagtaagtataaaccatatatatcaatgggtaaatgtttatatttgctaagtgatcgaatatatttatgactaaaccgaattaccaacaggtggaaaaactaaatgtcatactttgtaatctgtaaagtatttagctccgactgaatatcttccaaggattttactccttgccctccgaagctaagtttatactctaagtcatcaacttgtttctgacaagcttgaatttcttggaatagccgatcagcagcttcaatgggttgaaccaaaacatcgattgaatctttctcagattttatttgagctaaaacagctaacagctgaaaaagaaacttgcagttatcaacaagagtttaatttcaccatgctaagtgcacataaaggaagaaaagattaactgaaaaatcaggttcaaattatgtttcagatcaaatcacatgagtaaattatcattagcaatttagatggtcagtaaagaatgtctcagatacttttctcatggacaaatacctgatctaagaaactttatagagtagaatactataaaaggaagagatgttaggaaaaagggaaattcgattctaaggtgtggtctctcttataaagtaaaaaagaaaacttagtaagttctgtttcactcaaaaaccacaagagcgaattgtctttctcaa

SEQ ID NO: 167925 - DNA, 965 bp, Cannabis sativa
attaattatatactgtcttagtgtattttctttataattaatatcaaatttgatcgtgataaaccattttaagaaagtttattttatttcgttcatcttgctcgatttttatatatgatttttttcttcttcttgtgtatatgcaaattctcatatatttaagaattaataatgaattgttcaatggatgaaagattgtgaaatggaacatatttttataccaaacataataaaaaattaaaataaattcaataaaccgatccaaaaaataaaattaaagtcaaaagagtcatttgaatcagaaataatatggaaaaaaaaaaccaccaaaagtaataaagaaaagactcaaaaaaataaactatcattttgaatagatgataaagagttataaatatatagaaagaaaatgaagtatatatattatttaagatctctaaattacttgtaattaattaattttgaaatgagcacctaatcctttatgcacactttttttttaatatatatttttcttattttttttatttaatcattaaaatctaacttctaaacttaaataatggcaaaagtggtccaaattaacttcacatgtatatacagagcattactattaagcactagtagtgcttagcatctcgatatgtcgcgttgcaattagctagtgaaactctttaaaagctattatattatattatatagaattcgatacttagttagactaattaccactggagcccattagcatttctcatatactatgcataccatgcatataatagtgggcccgacctcaactttaattatatacataaatatatatagcttttcttatgccaaatttcaaatggagtgtatatctcataagggcccgtttggtacgcaggcctggattggattagacaggctaatttgtccaatccagtgtttgggcatgttacaagtctggataactaatccagtta

SEQ ID NO: 167926 - DNA, 1389 bp, Cannabis sativa
aaagctcgcttaattcgttagatccaacttttacaagaatttaacttagaaatacgtgataaaaaattatctaaaaatattattgatgatcacttgtctagattagttgttgaaactgtaaatgactccactcctatcaatgatactttttctgatgacaactcatgcatgtatcctctttgccatggtacggtgatattgtgaattattcgattactagagaaataccttttcattggtctaaacacgatacatctaaattctattctgagaccaaaaattttatttgggatgatccttatttgtttaaatattgtcttgatcaaatcattagaagatgcattctaaattgtttaatttttttttttgtgttatgatcatgcatgtggagaacatttcagtggtaggaaaaccaatgcaaaaatattgcaaagtggtttctattggcctacaatttttcatgacttatgtttattgtaaatcttttgaacaatgccaaaagttagggagtttaactaaaagaaatatgatgcctttaaatcatattctgattgttgatatatttgatgtttggggcgttaattttatgggatcatttcctaactcttttggaaatctatatattcttgttggagttgactatatctctaaatgggtcgaaactgtttcatgtcacacaaatgaccataaagttgtgcttaagttcttaaaagaaaatattttttcttatttttgttaaccacgtgctgtcattagtgataacagtacacactttttcaataatccctttgtgcatttaatgaaaaaatatgatattacacacaaattcagtacacattattacccgcaaactagtggtcaagttgaaatatcaaataaggagattaagcacattctagaggaaacggtcaatccaactagaaaagatcagtctttaagactcattgatgaattacgggcatatggcacttgatataaaacacccactggtatgtcgtcctatagacgtgtgtatggaaaggcatgtcacttatctgttgagttagcatatagagcctattgggccatcaaatagttaaatttttctatagacaaagcaggtgagaaaacttcaaattaatgaattagaagaaataaggaatgatgtctgtgattattcaaaaaagtacaaggatcgtatgaagctccataatgacaaaaatatttttaaaaaacttttctcttaaggtcagaaagtccttttatacaattctcatttgcatctattccaaggtaagttgtattttaaatggattggtccatacattgtgttcactatttttccacatggatcaatttaaaataaaaatcctaacaatggtaatgttttcaaagttaatggacaaaaat

SEQ ID NO: 167927 - DNA, 1271 bp, Cannabis sativa
tgagttgattaatatgtttgttgtttagtaatagtaaaggtccacattttataaagatgttgtcttatttgaatttagcaataacagtggtatatgctatgttttagcatatgagtaatattttaaaaaggttaattagtaattttttccctaaactttcatattactaaattgtgcttttgaaatttttttgactgttaaaattcaatttaacaaattggtgatttatttttatataattaaaaaatataattttatataagagtatgatttatttttgaaagactaattaataatttaaaattcggagaaaaattactaattagtcttttaaaaataaatcaaccatttggatggagatactcttatataaaattatattttttaattattatttatttatttaattagaaaagtaaaattattttcaaaaatatgttcagtaaatttattttgttttttgttttctgaaattaaaatcttgggttcttctctcgtcttcctttccaatttcttcttctctctcactttgactttctgaggtaaggtttcaatctccctctctcttaaagatatcctcttcctttcacttcaatttcaaatatgagaatgaaaaatcgagataacaaattggtttttaaagagaaaaattttctgctatacaggtatgattttaatcgtttgttaaaaatatttggatatatatgagtgtattatgatctcttttgttagaaagcctgggtcgttcttcttgtaatcgtttttgttgtttggttcataccaaaagactgggtctgtttaaaatccactcaaaagtatttattttcgtcgattaggaaatgaagaattagcataaaaaaacatggaatttttttaaaaatatatatctattttctatacaaaataggttaatgtaacagaattggtttaaccagttttttaactaaaaaaaataagaatgaatactaattaaatcttgtaactaatctcaatatcgttctcttctctaataatatttttctgtaatagtgattcagaagaagaatgattcagtattttctgattcttgaattgagttgaggagaatttagttaggttttgggtttgaatggtttggatttttacacgtacaaagcataaaataaacatagtttggaagaggtggagagaactgaaaatggcttaatgatttgcatcatttaatagttttgttatctgcaccgttttaatatgtttttttatatatatatataatttgtactctttgctta

SEQ ID NO: 167928 - DNA, 1097 bp, Cannabis sativa
cagccattgttcgaccatcatgacatttgggcctcccaaaaaaactagaggcacttgcttacgaaatctctcatacaaaggctccatatggggtctagcaacaggttattctgatggctctactggaaccgaaacgattagcacttgctgtggaggaactgcaggaggaccctactatgtcagcctctgaatctcctcttcttgttgattgattcgggcttccatttctgaaaaacctttgttcacagtcttgaggagctagtaggggattttcatgaccacccctttgaaacctccgacgacctcttccgcgtccacggggattcgaaggattttaacctccccaaatgccttcggtctcgaccatattactttgactccttatgtttcactgagggtatataatattggacttagcctatgaacccataagttaagtaggttagacagtgatcacataaaattttaagtaccacattcatggattttaggcaaagcatttatacaactaacatgtcactaacatgcttttctaatcaaataaattagtaaacaggtaaaggcttactgaaccatgagtcgagcttatccctgacagtgattgtacatgtcttgacagtcttcaatgaacaacccatttcctctgtaatgaccacttagttatatttgagaattagtagataattagagtctaaatttactagtagacatttaattattattcactagttttgcatatattatgacttaggggcttgtaaatcgtcaagcagtagttccactcaggttgattggcacacctaaattcaaaatcaaggtaagattagtataatgatatgcacatgtatttacatgtctagcatacatatttattaagcctattatattacatcgatagcagtttcaatatacgtagagttgtattggcaactgatagatgtatgtttggctcagatactatcgatactatcacatcggtacgactagagtattgagtataggttgatattcaattggtggtattgtcgtacgaatgttctagactcagtaacacatagggcgcggggatttgattacagctgggtgtatgggcgcct

SEQ ID NO: 167929 - DNA, 898 bp, Cannabis sativa
caaagctccatcctctcactaatagaattcttaccatacacaacagtaataaagaattcagaatcaagactagaaactttcaacttacagtgcaccaattgattgtcttcatgagaacaataaccttcacaaaactcctttgccaaattaaaagaatttgaccatcaagaatggagctagagtaataattccatttaggaaaattatgatgcatcttgttcagaacattctcacccctcgccttagcttcaaggagggcaccaaacctaacattattcaaaagacaaaggtccagaatgaacctttgtttatcgcctttattcatccctctaacattccaacttaggatgttgcaccactccatccaaattatggggattagtaaccatattcttaaacacaggcttaagaatagcatcataagtatttttttttggtgttgtatgtccctttcccaaagaccacttgttaccaactctccttggagtgatccaatcatccccgacctttagactatggccttgataagaagaagatttagcaattactatcttagccccaacttgatttgatgaggtaccaactgaaactagtttctcagtcaaaatagcaacatcatcaaactctatgcttttgttcaaatttggatttttggattccatcttctttggttccaccttagtcttcttaacccaaaccataccacgatccttagagcacgaactaacattgtgacctaaaatgtctgtcatacaaatatatgatagacgccaaatactaacaacaaaaattattgattcgaaacggcgtgcgtgttctctctctctcttgctctctctctctctctctctcttgtacacgcccaaagggctcctctcacttcatctctcacacgcct

SEQ ID NO: 167930 - DNA, 1222 bp, Cannabis sativa
gttaagcttattagctaataatataagatgaataaaaataatataagaaattatcccatatattttttatgattctgttagttgcaatttgagtagttgcatgggttactatgagaattgcgatttgaattgagttataatttaaattgctttacgagttgtccaatatattacgtaaaaaaatatatattaaaaaaactttgaaatatataaattaaaactcataaaaaaagagaatataatcttttttttcaaatttacagtttgagttgctccggtagtttttcccgtagtttatacgtgagttattctataaatttgaattgcgatttaagttgctatgttagttgttatgagagttttgatgtgaatttccataaaaaaaaaataaaaaaaaaaaattgttttaaaatctaaaagtaaaaaaatccctaaaaaatactttcaaaagtatttgaatatatcaataccgaaaaaagtatgaatgaattaaaaattatataaattattttaattttaaaaataacttctaatagtaatcttctattattttccttttaattacttgaaaaacatgtactttttctttaaaaaaaatttacatttttattattatgtcttattactttttaaattttaggccccgcctaatggtaatgtttgtgacaagaagttatgagttcgaacataagtaactccctctaacaagtatttaataaatccaataaaccttaaatgagaacttttagggtcaatccattctttaaaccctctacttcatctactgacatgtttactaataagcaatgagaataaatagtaaaaaagtcaattcccttaactaattttttaaagaatgtcattaatgaattttatttattttttaatattatattaataatgacaattttatcttttaaaatatgttttacaaaataactcatatactataatttaactcaaaaaaagtaatttagtcaatttaaatatttcaattactatcattctatttccaagcagttttagtaaacaacatattacaaatattgattctgatcatttttcatttattctattactttattccaataaatactgtatagtgaacgttccatattgtaggtcaaatagaaaaatgctcatgcaattctatcgcatgtttgttttccactcataaatgatatgattaggagtgttcataaaataaccgatccaatccaat

SEQ ID NO: 167931 - DNA, 883 bp, Cannabis sativa
ccatttttgtattagtgtaaccaaaatagggtattttgtttcatcgtcattttctcttcgtatttgtttataaaacttgcatccaccatcatatttgattcttattggaggtatgccttctgttacttgaaatcatggtgatcaatcttatatttatttttgtccaacttcaaagcttcgtatattatgtcaaaaagttcataatgtgaacagtttattggaattagtataccttcaacttcatagtcaacttatgttattctgtcaatctaagttccattataagaaagaatcactgttctaacatccatattcctgtgtgatatttagtttactcatgctaagttttgtatacagtaaaaaattattcatagtatacaatctatataaatagaaataataaacatgtgatatgaataggtgtagtattaataaactaaaatttaccatatactacaaggttgatattcagttgtacgaatgagctgcatacatttgaactataatagtggagcgattacaattacaaaactttataatttattattattgtaaaagtacttagtactggttagttaactatcagtactgattacaatttgttaactatctgattagtattgattattgttaaataatcgtgtttaacaaaattaaaaaatatcatatttattcagttaaaaaaaatcattaacaaagtatatataattccacaaagtgttttcattgtaattgatgcatttttaactctttttagaaatcaaaatgtataatgtgttatactctatgaagcagtagtatgtatcgaattgtataatttatcttttttagatttaatttttgatgtcgaagttgaattcgtacttcttcttcctcgaagcaa

SEQ ID NO: 167932 - DNA, 571 bp, Cannabis sativa
tctcgcacttccatgggaggaagacctcagcttggcgacacttgttcagagggatcaacaagtgggcgcactgcgctgtgaagagaacgaaaggggctcgagtcggatgacttcgaagaggacgaaggagaatgggtcgtaggctatgattttcttgagaccaactattttgcaggtgaagaaaggttggtttggctcacatacaaatcaaacaaaaggcatctgatactttcaaagaaagatcaaaggatattgggttagaaggcgtaaaacctctacattcggtctgcctggtcttttccccattccatccttcatgtcatggtcaggcggcttctctgcaggtggtggtggtgccaatgcaccccaactttatttttgccatcaatgcaatcgcacagtaaacctagacccctcttctgaaatagtctgctctgaatgcagtggtggcttccttgacgaagttgaaaaccctatgcccagtccaaattttaatccttttttctccttttcacccgatgcaccatattcaaatattaatgggatttgttttatttttattttattattt

SEQ ID NO: 167933 - DNA, 1135 bp, Cannabis sativa
aattttttcacaatgggtacctctcggctgacctgtttgagttgagtgaattggtatagattcgtgtatccgaaaaatagctatttatttattttttaaaaataaaagaaagtagtaataataataataaaaataataataataaaagaaataagtttttattctctgtttttacggctccaattttgaaacgggaaacaaaaaagcatcgcatgctattgttgattaaaaatgtttaataggacctcccatatttccatgctttcttgcaggtggaagatgctacaaaagctctagaaacaacaaatgggacaacactcgaaaagaatggccagattttgagagtagcatacgcaaaaagcattcttggtccaggatcaggaacatcaggacattcacagtccagtagccttgcggccgctgcaattgaggcagcggcattttctcaacaggttccttgctccaactctaatagaacttttcattttttctgttgcgcccgacattatattttgttttatttatctgatcttgaaggaaggattagagtttgtaaaggaaattggaaattgtcttggaattgtttaatctcctcttcttagtgcccacattaaactaacttgctcatactggatttaggccagttatactaactaataactgtagacctttattaaggtttctgggcttttcacaatagccacatatgaacttgcgagtgtaggaataatttgcagaacggcaaactaactatataaaaaggttaaggacctattatgatctctgagctccatgcaattgtcactggagaagttggaatgagtgattaagattggttttcatttttcttctacatggcaggtgtatatattttttgtttatattattgactaaaggttttgttccccttgttaattgacttctctttcccttcattcatgggtgcacttttaatgggtattaccccttcatagataatattagaaaaatttgagtttttatgcttattctttttattaaattagaaaaatatctcatttttacaatatatggactggagttgttccatcggctgaaataaataataaaaaaagttttttcggcaaaaaaagataaaaaaaatagttgagtttga

SEQ ID NO: 167934 - DNA, 868 bp, Cannabis sativa
caagtaggcaaaatgcttgatgttgatctccacaggaaatttcgaaccttaggagggatttttaaattccatagctttctccaaaaaccagttgagttatcttgggaccaaacacctttaagcagctgcaaatgtttataagcacttcggacagtgtaatctccatgcgtatcaaacttccaagtccaacaatccctcaaaactgagtcacttagctgaattgaacgaataagctgccagtctcttacgtcaaataaatcattgatgatctcctcatcccattctcttctatttacttgtaacaaaaaattgatagtagcattaaccaaggctgggtgagtggaaataacagagctattatccaagtttgggagccaaggatcaccgacgatagacacctactcacccgtacctatagacctcattacaccagccaaaaccaaattttttgcttcaaaaatgctacgccatacaaaactcggattgtctcccagttcaacagagagaaaagacccctgggcaaagtacttagccttaaatatctttcccaccagagaagtctcatgaacaagaagcctccaacctttttccctaaaagagataaattaaagtctctcaaattacaaaaacctaagccaccattgtgtttatgccgacacatacgatcccaactcatccaactaatacgcgaaccttgtgaggaacccgatttccaccaaaacttcgccataagccgctccaactctttgcacgtatcaacaggtaaaagaaagaacaccaaagaatgaacacccaaacacgaagaagacaaacaaataccgaattacaacctagaacagatgcgagtgggcttagaagaacccagtga

SEQ ID NO: 167935 - DNA, 901 bp, Cannabis sativa
ttttttttttgtgtgtgtgtgtttctaaagtcctttcaaagtttagaaaatatgtgttttattgtccggtcgagctgatcttttggataaaaaaaataggatatgggtgggttagaaaaagtcagtgaagcagttaaggtgtcaattatttcaatcgattttttttttttttgaacttggtaatgttttctcttctcaactggctacatgtggcaaaagtaattccacgatacatttctatttccataccaaatcaataaaaaaaagggacaaatcacatatagatataagactaattagtatttttgcccttgaattttgatatgtactaaatcatgtctcttgaatttttaaggtcattaaaaatgtcccttaaactattgagattgttggatttaagaacttttgtccaattttagtaaaaaaatctaacatagataaaagttcagagacatgatttagtatatatcaaagttcgaggggcatgatttagtagatattaaagtctggagagcatgatttagtacataaacaatcattgaaatagtaaaattaaatgaaattagataaaagtccttaattttaacaatttcaatagttcagggggcattatttggtaacatgtcaaagttcaagagacaaaaatcctaattagcttaaatataatgacaaagacatgctccaaaaccattccgaggttttatataattattttttcatttgaaaaagagattttacttaggagttaattaaatttatgatagttcctatgattagaaatagaaatcaagtgactatggcattaatattcacataaataataaaagagaaatgttaaagggcaccagtggtgccttgcaccctcctatgtgtcaatatcgctatcggtctaattaagtat

SEQ ID NO: 167936 - DNA, 1657 bp, Cannabis sativa
  modified_base (1089)..(1092): a, c, t, g, unknown or other
  modified_base (1256)..(1279): a, c, t, g, unknown or other
atgaagttgaaatcagcgtccttttgttgagttctaaataatgggagcccgaaataattgatgttacctatggtattgctgagatctagtttttgcatgatgtctcttttcataccctcactagtattgttactgaagaatattgaggttttgagtttattaacactctatcccgaccaattacaaaatatttctaaacattgccaaaagtccctagcttccgctaaatttactatgcccacaaaaatcatgtcatcagcaaagaacagatgagagagcctaggaccatctctacacaacttcaatcctctaatagttccattatctagcgcattttcaagaatatgtaagaggatttctactgcccagataaaaaggtaaggggagagagggtccccttgtcggaggtcgcactccgggacacaactactcatcttgctaccattgaggtgaaggttaaatgaagtcgttgagatacactatcggacccaattataaaacttaatcagggccttgaagctacaaagtacgcgatcaatgaattgccaacttaatttatcgtaagctttaaccatgtcaatcttaatggaaaaaaacccttctttccctcttttgagtttaaacgagtggatgatctcttggataagaacattgttatcctgaatatttcgacctgggacgaaagccacttgtgtaggacagatctgacgagggagaatcggtataattctgttagcaatcaacttgaagataaccttgtagataacattgcacagagaaataggtctgaattgggagtacttttttcaggctggaaataaatcaagtgtactaatagtaaatataacatttgacttgtatcaataatatcgtatgaattggaaaataaatagttggaggtaaaatataacatctgaatttcaatgggcaaaacatttggtaaattgttctaacttgatctctttataatttatactttcaacttgaaattaggcttaattcactatagaaaataaagctacctttgataataattttttagttataatataattttttttatgatttttagttacaacaaaaagttannnntgactaaaatatagtatttagttaaaaattgtcactaatttagtttagtcacaacaaatattacgactgaaaatacatttagtcataacaaattataatttttgtgactaatacctttaaccataaaacttttagtcactatgataatttataattagtcacannnnnnnnnnnnnnnnnnnnnnnntttgttgtgactaaaagtaagatattctgtagtacactaaatgaaatattttcacgacaaaattggaaaagatattatagtttcgttgattaattataggtaaaattcattaaagttttgaccacctaataataccatttataaaacttcttttgaatttttgaattctcaagcaatatatagaaacaataaatcacatctcaagattctccaagcacaaaatttgttcccctttgttttatgcacctaaataaaaaaatctcgtcaagtttcgagaggtgtgaggaactacaaaattttttatttttagtcataataaaatttgtgactaaaaatgaaaaagttttgactaattataaatcatcattcttatgttgt

SEQ ID NO: 167937 - DNA, 698 bp, Cannabis sativa
ttgggattggataaggctagctttagggtggttttagactttgtcaacttacaatttaatattgatacgtacgtttaatattattcaattaattattataattagcacattagagattgataagtcttgtatagttgtatgtataaaaaatagaatatgttttcttttcttttcttttctttttcacatatttgggaagttgatttgaatttagaataagatttgaaagagactggttttgactacaatgaacacggttaaacaaaaaattttaaaaatataactatttatttttggtaagtaagaaaacttgtattgataaaaaactttacaagtaaaagggaacaacgtgcactcactgccaattgcaatgcaagaagaaaaaccaaaaagggctcaaaactagagcatgcacaaccaccactcacagctatatctaccgttttagttttggaataagaaatgaattgattaactcttttgcgaactatacactttgtattttcaacaataatatctcttctaatggatttatgctcccaaaaggaaacatttttagctctccaaatctcataaaccatagccacaaggcactacaagaaatgtcacttttatcagcacagttcgctactgtgctggtaaaaataacttttaccagcgcatttcgcaaactgcgctggcaaagagatcaaagtttt

SEQ ID NO: 167938 - DNA, 999 bp, Cannabis sativa
  modified_base (951)..(969): a, c, t, g, unknown or other
aagattagacttgaatggaaatatttaaataatcatattactggtgggtaaaaactcgttttatcacattataagctataaaattacaagatttattgatactaaataaaatacaactcacaaaataaggagaggttctattacaaaatgaagaatagttcacaagcatccaacgggaattctttccattaagtattaataaccaccctagacttgttctccacaataataacttgtagcttttgtcttagctacttccaaagacaaactgtaggcagccgcttccccacacagagcatcagaaaactccaaaagttttgtttgtacccaaaccacctcgccaagatggttccttgctactactgcaatacacatgctttccatccttactttaacatcacaattcaatttgagtcaatcttgaggaggagggtgacaaacatccaacaaagtcaagaaagaagtcgggaagagggaagcacaataatttcataagagatatgaatagagtcaatgcattgtttaacattatctagcttattattgtgtacattgtcgtttcgaacctgccaaatggtgttgacaacagacgaagcataaaaaaacttcatcagtgttaatgccttggttttttaagccccataggaatttaacctagtcccgcatgccaatgtcagtaccatagatacgaaagataccccaaggagacgaccccataaatgaaaggccaagttgcatgaaagaaaaaggcgttccatcgattcctcctcaacccgacaaatagggcatcctgctgttggaatatattttatcaggacctagatttactaaaacatatgttattaacatcataaatataaacttctaaaacgatataaaataaacatataaaaggtatttgaaaccttacattggttgcactggaattaaatgactccttctgctcagatnnnnnnnnnnnnnnnnnnntctgtagtagagtataatcaagatttgagc

SEQ ID NO: 167939 - DNA, 630 bp, Cannabis sativa
ttgacatattagagggaaacgtgtaggcaattaaatgataaaaacaaaaaccgtatatgatgtaattatttaaaaaaaaaaccgtataaaagtttaaaaaaaatggtaaaattagaaattaaaattatggtaccgtataaatgttgaaaaaaaaaaaaatggcattttatgtaaaaattccataatatttggtgaaacacctagtattagttgtgaagagttgttttttcaaaaattgaaaagttatgaaggctatcagcctcatactagtttgtataaaatttgtttatataaaacaaggaatttttaagaaaatattagattttagaattttttataaaaatactatttttttataaaataacctaaaataaccgtaaaacaacataataaaacaattaaaaacaacaaatagaacaactaaaaaataaccgtaaaaattaatcacaacagtataaaacttacagagtatttttttttttaaaatagtatttatgaaaaaaatagccctgaaaagaaaaattaaaattttcagaagtaaaaatcctataaaacaagggcattttacaaaaatactgcatttggggtaattgttttcaattttactgccacacggcagaattaacattt

SEQ ID NO: 167940 - DNA, 1008 bp, Cannabis sativa
atcccccattatctaacaatagatgaccaactttggttaccccaaccatggaggagctgttagaacgagggagaaaaccttttctatgagcgatctaagagtcatttcaaatatcagtatccttcttgtccaccaccaacgtacaggctcctttttttaagatagttttaaatttaaccatattttttcaaaactacgaattagaattcttagaagtaaaattaagaaaagactttcctttaaggtatctaacaacaaagggattcgtttcctattaaaaggttccacccccatttcgcgaagaaggcgaagttcatttctctagttttacagaaaccaagacccctaaagacttaggaaggaaaactttatcctaagcttttagatatagaccataattactattttcagacccctaccagaatcatgaaccattccatcaatcttagtcacaaggcgactcgagagtttggtcgtttgcatggcatacataggtaaggaaaggccaaccgactttatgagagtagcccgacccgctttagacagagacttatctttccactcctgaagtttagacatgaggttctcaatgatgaaattgaagtcgacgtccttttgtctagagcaaaagagaggtaaccctaagtatttgatattacctatttggggacccaatgcctagcaccgacttgatacctcttttcatgccactagaagtatttttactaaaaaaaattgaggttttgagtttattgacttgctggtcggaccaatcgcaaaacctctcaatgtatttccaataacttttagcttcttccgaattcgctctcccaaccaagattaagtcattcgcaatgaaatgtgggagagtatatgaccacccttgcttattataatacccttaatagagcctttgcattgtgcgtcgatcaaaagtctagacaaaatttctgctgcccaaatgaacaagtaaggagacaaggagtcaccctgacgaagaccacaaga

SEQ ID NO: 167941 - DNA, 511 bp, Cannabis sativa
tgatttattctatgtcaaaaagtagcttcattatagtattatactgtcgtagataagtcgtcttttgccagttcttggtaaaagcatcttcagtatatttgcaataactcttctatttttcatccgtttttgaatattgatatactgtttgaaagattattacgttgtctataatatttatgaagaaatatttcattaattcaaaatatttttgccttaaaagtagagttttcatcctgtatctcgaaatctcattttatcttttttcaaaaaaattatttcagtaaaatagtatatctcttccaatataactctgattttaataatctttgtatcattggaaaggttttttaattatataaaaactttgtgaatagtaatctttctaatttagacgttctataattcaaatttgggattaaagtttctgtataggaaggataacaaacacactaaggcgtttggttgggaggaatgaaaatataagaataggaatgggaatgggaatagg

SEQ ID NO: 167942 - DNA, 500 bp, Cannabis sativa
  modified_base (413)..(415): a, c, t, g, unknown or other
aaatttgtttgagatgagtactaattattaagaccattttttattgaaattattttacaaatactttaaaaataattaaagaattacatttttttacagaatttttaatttttttcttatatttttacagttcattatttattcgttgtttttaaaaaagttattatgttcacacgttttgacgctgtaaaaatatagtatacaaatgtgtcaagaaacatacaattatattttaaaatcaattagtaatgagtggagtagctcatattcttatatatatctaaatacttttacatttaatttaattcacgtgggacaatattttctaataaaatgtaaataaaaaagtttgtaaaaatattaataaaaaaaacaattcattttaagtgtattttgttataaaataatataannnaatataaagtagatgagaagaaaggagaagaagatgaagagagaaagagaaagtgaatgagaatttctgagttgtttattccaat

SEQ ID NO: 167943 - DNA, 1178 bp, Cannabis sativa
aaattaattccaattaagaatgtgtcgatgcgtggactaaaatggtgatcgaatcatatgggccaaggtgggctttacttctttgagtgtccttcccagaaatgaaagaatcagacaaaagaagatgcaggttgaaaagtctaaatatggagaagccattggaccagcttttgtttctctttctttctttttatttattattttatttttccagcttggcaaaaatattgggacactgtttgtacctggagatattgttgtttgtttcctttatgctcttctttttttatttattaatttactttttaaggtgggaaagtacaattaatgatttatttattatatttggtatgttaagcaaagtttgtctgagattacaagcttgtttattagtttggatctcttctcttaattaattattattagtatgtgaataatggtgatgataataaatttggtgagatccagggtgtccaccacttgcttaagctcaaggcatggttttgttttatatttatactactaaggtaaggataagacctgtcctttttagacataaatataaatatacatatattttttatatttataattttatttttgaaagagatattttatatttatataaaggatatatttttgaaaagttttgaaagaaagtctatcgctttcgaaaaagagaaagaaaaaaaaaaaaagagaaagaaagtcctctgaataagtatatagatgtattacaaattaagaatatagaataacaaaaacagcattgtgactcgtgagaagtgagaaatcccaaatctcataatattattttttaataacccaaatctcataacaataataggtcttgtctttgttttaatgatttttgttgaccttttgagataattgtctatccaactaaaaacagccttggaaaataagataatcaatttgctagatctagtaagtatcactactatgtgaatttatatttatatacgcttgcccgaaagtaatttttaggttgggaagtaaatatcaataattgatgtttataataatcaatatatttgttatgtccaatagaataacagaataaataattcgtatgataaagtacacaaaaataattattttggtaaatttttatctagttcaacatttagttgagcattttagtttttttttttttt

SEQ ID NO: 167944 - DNA, 977 bp, Cannabis sativa
tcaagcttcttatcccattaggccaccaggctactaaaggttagagacaatttaaatccaaaagtatgtaataaaaatagggatatgaatgcagatcttaagacttcaataaagggatctctttcatgttttgaactactttcgacgtctgatacttcatttgttttactaaaagaagaatttttctcttgccaatatctctcacattgaattttttgtcgcattacattccatttattgagctttatttcactgtagagaagaatttttttcttcgttttgttctctctcaaaatagagaagaatccccaaactctaaaaagaaagaaagaggaaaaaattaaagttttctacaaaccttaattagaagaggttgttggtaaacacaatatcaccattttgccctgagaaatgaagctctaaagctccaattcaacatgaaattcaagcggttcttgctcgaacccaggaacataaggtctctccaaacactcttaatgttccacatcatccccaaatgtttcggctccggctagttgctcagcttcgattttgctctggtctgacaccaaatactttggaatgaccgcattgagttaacttgcaaaaactcctgattgaatttgagtgtgagagaaatggtggccaagcataaaaacataaatatggtttttctaatttttttaacaaaaatataacattaaataaactcatataaactaaaaaaaaaaagtccataataccaaaatattatttgattataccataaaaattaacttttaaatttattctgtgcaatttctacttatataaatcttaactacttagaaaattattatttctcagaaaattttatccatttatttgaaatttggactacaaactaagtattttttaaatccaaaattctgagccttgagcctgtcctaagcccgtgagctgaaatcttgagctctaagagcatctctaatggtaag

SEQ ID NO: 167945 - DNA, 784 bp, Cannabis sativa
tggattgcctcaacaacttgaaatgatattcttgaattttaagtacctggctttgggttaaccaataactggaagacctaaattttaacaatatacattaatatttctgaacatagaaactaatagatacttttattaaggataacaactgtttgttatgtagttaattagtgggttcgtttcctgattgcaaggacttgtgttgtaaccatttcatgagactattcactctcaaaaataccttaaacaaggatataattgacaatatgttgattccttcagttgtttcacaccaacatatcaacacatcagaagcttctccctctgattttgtaccttctgtcgcaaataacaggctcctacttccacagctcatcgaatttgcactgtcttttgataaactttcatcaccttaagtagatgtaatgaaaacttaacttgaaacattagaaaccaataaaacttggactatcacttctgctgctcaaggtcccaaaatcttacgctttggacttgatttttcacatggaaaaaatttataaggaaaaatagtacaaaaattatgaaagaatatttttcataaatttgattaagagattttattattattatttgtaaacaactcgcgttttgcagcgaatatttagaaattttaaattatgttataaaataaatcataattttaatttaatgataactaagtaataaattgtattaaattttaatctaactaattataataatatgttaggcttgagtctattttgagggtgaattgtcataa

SEQ ID NO: 167946 - DNA, 772 bp, Cannabis sativa
tactgcatgaaatatgagtattctgtcctaaagaaaaaaaaaagaaaggtgagtattattcatacaagatatagtacctattacctaatacggaattcagctagtaattataattatattttttttcttacaaaaaaaaagtcttcttaaaaagaaaaagactgttaattatgacattatatcgtgtgtttgacaaattgacataactcaatagcaaaggtgagaagattgtaagtaacaaatttgtctctaaagaacgtagaaaagctaaggtaaattacatcataaagtagaggatctcctagacctacaatgcaattaacacatcacacgtttttatgttgacaaaatggtttataacctttcaaaggtctaaggatatagcttcccattaagtccttcattacaagagttgcctttttcacaaacattaccaaaaaaactaagtaaataataataatttttttaagggtaaccgttataggttaaaaaaaatcgaacgacaaagtgaagagatttcttccatccataaaagtttactatctattctaatgacatgttaaattaatctatgagctataacattaacgttgcaacttacataaaaaagagatgccttcgaaaaactaaacaataaaacttaaatatcataaaaaaaaatctttgagatttgtttgtaatttgtcccccaatatatctgtaaaaaaaatgattagtatcaaatcaagtaaatataataaaaaatttaagaaagaaaattataataaaattt

SEQ ID NO: 167947 - DNA, 1007 bp, Cannabis sativa
gtacttcttcgggtaacacaggtatcatcctatctcacaattcttttcccccattacatggttcttggataattgacacaggggccactagacacatttgctctaatatcaagatgtttcaatgcatatgtaagatatcaccaactaaactaatcctccccaataatgattgtcttactgtgaatcaaagtggaacaatcaaattaggaaacaacattactttaacaaatgttctatatgctccttccttcaaatacaatatagtatcagtaagttatcttactaagaattcctctgtttctttttatttcactgctgatgaatttacaatgcaggacaatgtcagcaagaagatgattggaagaggtagtactgttaaagatctttacatacttgatactacaccaaatcaaaatcatgtcttctctgtctcggctgagatttggcactcacgtctcggacatttatcaaacaaacgtttaaatttgcttgagaatactttgaactgtaaagtttcaaatttacacaaaaacacaccttgttatgtttgtcccattgccaaacaaagaaagctcccttttcccaacaacaacactatttctaataaaattcttgatattgttcattgtgatgtttggggaccataccacattgtgtcacacacaaatcacagatatttcctaactttggttgatgatttttctagattcacatggatttttttaatgcagcataaatctgatgtaagtttcattatgcctcaatttctggcatacttacagacacaattcaagcagcattttaaagtctttcgttctgataatgcaccagaactggtgtttaaagaattgttttctaaacacgggatagttcatgaattctcttgcatcgagacacccgagcaaaatgctgttgcggaaagaaagcatcagcacttgctaaatgtcgctcgatctctttattttcagtcaagagttcccataaaattctggaatgaatgtgtattg

SEQ ID NO: 167948 - DNA, 685 bp, Cannabis sativa
  modified_base (626)..(639): a, c, t, g, unknown or other
tatggactggtgttcttgtggtagggtgagtaaacaaatgtagagcattttttactcttcctttaagtaagaccttccatgttttcttgtccttcacaaaatagtaggttgagggaaattcaagaaacactattatctttggtgagtttccagacactaacaatatttttgattatttggggaacttttaggacaaaatttgatgttaaaggagaactagcagctggtaaagaggaattacctaggtgggaaatatgaagttgcttgccatcgccaactaccaaggagtcaaaccatgataaggagtttaattgtctaaatgttccattgctagtggcaacatggttgttggcacctgtgtcagcataccattcatgatcatgagcaaagttaggaagaacattggagtagtaggcttgagggtcttcttcctaaatctcagtgagtaaggcttagttttcaccaatcttgggtggttgaaattttttgtcaaattgatagtgacatacgtgtgaccaagtttatagcacacttggcacacaagatgatttgagggataaccacgacaagtaaaccttgtggagttgcgattgggactagttgatgttggaaattattttactagnnnnnnnnnnnnnntcacaagtatgttgattaacattctaaatatgaacttttaaaacga

SEQ ID NO: 167949 - DNA, 503 bp, Cannabis sativa
cacgtgtgataagatctcttgtcatagtcttctgtacttaattgacccatttgattttggaagttggttgttcttataaaacatgttttcatgattggattgtttgaagtgagtgccggagaatctccaataaacgtattcatacacattaacttgtttctgattattttgttgttcttgtaattacaagaaatgcttctgtgtattttatgatctcttattaattttttgctttgcctgcaggcagcgaagcatgaacaaaccactgaaagttctgtcagagtggttaagagggaacctgcaaaaactagacccgagaaacaaaatgaacgagtagctattcctgatgctcgagtacggcacctcaaagatcagcttgtcagagcaagagtttacctttctcttcctgctacaagaaacaacccccattttactagagagcttcgtctacgagtgaaggaagttcagcgagtactgggtgatgctagcaaggattctgaact

SEQ ID NO: 167950 - DNA, 1097 bp, Cannabis sativa
attcttacccactcatcattgaattgaatatacccatatacaataactatatatgtgaaactttttctatttttaagacatacaaaagttgtattctaattttttatattttaaaatagtttttttttcattattatttttacataaattcacaccaatggagcatcttaaatcgtaaacaaaatgtacataataatttacatagaaactactgaaccaacaacccataccgcaaattaaaaaataatatataaagtaattctcctttcttatattttgttgcatattataaatatcacataaatatataaatgacttccgttcttcaaacattctaaataatttataaattaaaaaacgagtaggtgtgcactgtttaaattttattatcgacaccaaaaactatttaattttttttaagaaaaaagaaccaatataatactattaaaataattgaattaattatagtttcttcaaacctaaaaaatacaaaaaataataccttataataaggacaaaaatcataccccaaagcaagctaaaccattttccaaaaaagctatatatatataaacacacaacacaagatttcatttcatttcatttcaacatcatcatctaaatattaataaaatgtctttcattaagagcttgttcttcatcttccttcttaatattgtgtttatttcatcaacatatcaaaaaacgacaacaaatgcttctccacaacgtcgtcgtttcaacaccaccaccacagtccacatcatcacatcaaatccaagtagccttggagatgatgataataataataataataataataatcaaggtaataaattgattaggattagagtaagtaatacaaaacaaagtttttatagccttgaaaccacactcaaatggggagagagttacaaatttgtggctgaagaaagatgtttgtattattgtgaagccatttggggaagatttatgggttcatggcatggatttcagcccaaaagagatcttaataactctgttttttggttgatcaaacctaatggtttctttcttagttgggataattctacttgggtcaagaaagctctttggga

SEQ ID NO: 167951 - DNA, 649 bp, Cannabis sativa
cgattgtttctctttttgggcctagatttaatgtaaatgatgagaatgggcatgtgcaaggctctcccctggttagttcaaatgttggggattttattttaagggcatcgattggtgtgggcccaagtcaattttctaaaggttttgttgggcttggacgggctgttgataatagacttgctaactctaacggtacaacttggccaaacgtgttgattgtggagcatgaggtgttcaataatttgggccaagggccagctggtgtggggctgattgtctcacctattgggcctagatctccttctaatggtgttgttgggcccgaggatttgaaccgtgtggataaaagtttggtatgtggtgatctaaatgtgggtgggtctcttgctaagggccaatcatgtaaggggcagattggtttaaatgtttctaaaggccctactgttgactcagtttgtgggcaagcggtccattcttaacttgatgagaataaggccttgtctagtttttttcaagcccaagaaaccatgttacaagaacttaaaaaaattgggagcttggatttgtatgagatacgacggttagggggtgattgatgcgtgtcgtaagccacaacaaatttactatttttttaattccaatacttcca

SEQ ID NO: 167952 - DNA, 902 bp, Cannabis sativa
acgacccatttcacggcatcccatgaatcgtcgtaagcaatcgggatcggattctccggagctaatctgtaatcaacggagacagccaccacgttggcttcggcgaccaaggtgttaacggcgttgtggtacttagcacagaaaggtgtctcgacgcagaaacctccaccgtgaaagtaaaccaccagaggaagctttttcggagattggctttgaccggcgacagaggaattgggaacgtacagccttgctttgactccggtttcaggtgagatcactacatctttggattcgacaccagttttggggtcaatcgaaggtgggacaacgtcggcgccggcgattcgctcgatgcggccgcttttgtagattctgagaaaaggaaagaagtcgcgagctacttcgtcagtggtgggggctgccatggcgtcgggagtggaagagatgcagaagagttttgtagttgttgttgagggtttcagtctaagcttgggtaaggaagaagaagaagaagaagaaggtgtggaggagaagaagtgaagagaagtactgaattggagtgtttggattggatttattattgaagacattatattatgaaaatgaaggttttagtagatttttgtatcttcatattttattattcatggtagagtagcatgtcaagccaaataacctttttagattttttttcttattttgaatagtacattttggatcattgttataaagtaaaagtaatggccgtgttcaaaaagagattatttatcaattttttattttttacataatgatttaaataatgggttaatttcacaaatgcacaaaaacaaaaaaaaaaaataataacaaaaatacggttttacggaattttaaatattttttacgatttttttgatttt

SEQ ID NO: 167953 - DNA, 882 bp, Cannabis sativa
attattattattattatcaatttcctaggaacccaacactcctaatcggtaagagaaagaggctaaaggcaaatataccagatgaaaacgaagttttttagagagagcaggtcccacaaattctttaaccctatcaacagcttcaatgaaagaattgtcaagattatcaataattgaaactgaaaaactttctttgaggagttgaactcttgtgtggcttccgataaatttagtgttgccggtcacgagaatcctctgctccaccgaacctattattgatattttcccaattcacaatcgaaacaaaatcaattcacagtgtcgtcgtctttgtcatcatcattggtgttgattgttaaaccagccctcaatcgcaaagaagcgactattaaaaatttcaattgttgaagttctttttcttgctccctcaatcatattcaatttcaaatgaaatttttaacaatagtgaaattctgtttttataattactaagagaaattatcaaaccattttaaaaatgcgaaactttaatataattgtttgaacagtaatttaatctgccagaacagaaataaaggctctctcttggaatttattagatggatctcaagtgcttacaaaaccaacttgacttatgcaaataaagactctctcttgaaatttgttgtagctgttgtaatctattcttctgatcaaatttcgaaagtatcaagaattttaactcccttcaaatcgtagcacttgtacatttcatcccgaagagtgactcatgatatcttcctctcaaagagtgtttaacttgcaatcttcctcccaaagagtgactcacttgcaatcttcctctcaaagagtaactcacttgcacttttcctcccaaaaagt

SEQ ID NO: 167954 - DNA, 797 bp, Cannabis sativa
aactcttgcctcatcaagtcttccacaacaccccatgactcctaatcttgattttcatgttctagccaccaatagaatcaccacatgtttgacagatgtggccagccctaccaactcagcaggcaaaacaaacttgaccaacataactcgtcaagtcaaccatgctaacccagctgatcccaatgaccagcctctactgcccatggtagatttgccatgggtacctcgtattgtgggtttagccaatgtggagcaaccccagaacaccactaactttggtccccaatattatgctggggaaacagggctgtggattggcgaaccatccattggtgagcctcgtgtggactttggagaagactttaaattggccagacatagagaggttgtctgccaagttggccaaagtgaagaaccacacaatattggttgtgatgcattcacacaatagagatgcaaatttctaagatggatggatgaataagagtacatcctccgatctcattaggcgaagctagaccgctgtaacaaagaagctagtgacttgataaggcatttcaatgaaagaactgtcaagagatgtcaggatctgatcagagatcctctccaaagggagactagtagacaaatcggccagggtctacaggaaaacattctaatgacgttcttcaggaacaaggacaaactacccctaccctaaggtggacaagtcttgccacacagatctagtggtgggagtagccaaaatttggcaaccagtggcatggggggttggccagggatctctggctcaatag

SEQ ID NO: 167955 - DNA, 1919 bp, Cannabis sativa
aaagttataagaaaataataccttataactatcgccaaaaattaaaattaaatatttatttataactataattaaacttcactatttataccacaaattattattattattattatttcaaaagtgatggctaatatcattgaaaagttaaataatggcatactgataattaactatacattctttcatccgtagcacaactaatctatatcaaaagattcaaaactctaaggtacatgtttcttattattattattattattattattcaatttgaggataagctagttagtttttgaattcgtataagcctaggttgtttttcccaaccaaaagattttgtttttaacattgattatttatatacaaaaagtggtatattacaatttaatatttttcaacataatttggtttgaaaaataatataaaaaattgttaactatttacaacatctcacgtgtcaatatgatattagatacttcagagtacaataataggtgcctaataggaattatcctaacttaatgatcactagttttatttatgaagaaatgtaatgacattgaggatgaacggaaaagagatctatataatttggacgtgtcatcactttttttcataatattgttatattgtttttaacaaaattatatttaatatgtaaaatgtccaaaatgtaatattttaaaaataattaacagttaaatatttaataaattaaaatatacgatcaaattttaaacagttacacctaatgttgtatgtacttgtttgttgggttcgtccttatatttttctttttttttcttatttttcaaaatatgggtcctcttataacttatcgtgccaatatattttttgacaggtaagtcggtaaatctgatatttacatgtcgtgctaaaattcgtactgacctatttgtcttaaataagtcaacttgttttcttctaaagctcaaattggtgttctactttctatatttttccttaaaaaaaattaatgatctaattactagattgtgcgtatttttaatagcttcaattatttgtatataaatttttacagataattataagaaaaaaaaaattactattaaaacttaaatatttatctaataaataatcaaattttgagtaacactttatatataaattaatatataattttagttttatatttgctaatagtcataaatatatagaattataatatttgagtttttataattaatagtacatgtatgtctactctatataaaatgtggctatataacagaattcttgatttatgagaaattattgggtgatttttttttttaaaaaaaaaatctattcaaaaataacactttttttttattaagatgtattttaatattaatttttaaataaattaatattacttttaaagtctaagtcaccgatatttttggtttaaccaaaatatactataacgtaacagaatattcctaattaatttatattattttaaatgcatataattaacatctccgttaacttttcatctacctctaccatccaccttgtatattattaattaaagaaacgattactttctaattttataattttataataataaaattataatttttctccctccttattgcgattgacctatattctatccatctctcaaactcaaatctatccgccgatcaactcctctgatgtcaatcgcattgatggtatcaagaatattagaaagcaattcaagatggatgataaatatttacttactaaaagtaaagatctaatcattttattttaaaaattcttaatttcatactttcatctatttacttttggccattatccattataagtttggtatcacaataattgaacttagtaataacaccatggtttcgtacttaaagtgcattctacttctattgtta

SEQ ID NO: 167956 - DNA, 2061 bp, Cannabis sativa
ttggagaagggaagaagcattcaatatttcccacgtagccgtgcttctccaaattcttcattttggcctgggttactatggacgaaggagaaatccaccgagcccctaaggcaccttgccttctttgaggaacgacctcagtgtattcctcggtaacatagtcttcaccctctaccaagacttcaccagcctcaaacacgggttccccttactcattataaaccccgaagggcaatctccgagaaactccctcctcctcggctttagatggagaatcaggacggacctcaccctaatcctccacctcttggacttcaaatatccccttcattgtcttcctcctcagtagtaggcggggcctgttcaacgctcggcatcatggcaagtcaagccacgtgaggatcagttaaagtagttttgcgcactgtatgtttagtgcgggtcatcattctatccctggacggcgtttgattagtgtgcctagcaacggtcaccacaaaggtggctataggtataccagtagcagtaggacttggtcaacccacgggtatagtgtcaactatatctgggcggacgatgtatgtccagctggatggcaaatattgtctccacctcttcctgagttcccaaatgaaatgtccgtagccctcacctacgatctggtcgggataaaagtggtgttgtgcttcgggttctagagaaggtgtgtgttcgctgcttatctcccagtcctcaaaacttgaggcagaaagaccgtcacttgacgaggacagactggcacaaagacgaggttgacccttgtacagaagttggagaagatcctggtcaatatgatgttctcctccccaaaactcaccagggttcatctacaaaaggtaggacacaagatgagtgtttggccgggatatcgaacaaaaacaaataaaatataccgaccaggtccaatcgaaggattgaaaaggagaattttgcatgatttaggtttacaacatagaatttcacaacttcagattagggttaattttcactaaaccccgaataggcaagtgaaaccgaatatcgtgaaatcaacatcataatgcaattacagtcaagtcatatggttaagcacaatcaaactctcatattcctaaacttggattttctacggttttcctagagcaagttcaagactatcaaattttctataatggaaacccaaaaaatcaatgattcaatattaaagaggaaaagatgaagaacttactcactgttcgaagctttagagctgttcggatgacatggatcgacactttctggaaattcttcgaaggatttgagaggaaaaggtgttcttgttctaaaatcgtcaagaaagaaaatgctaaaagtggtttattaggactttctgccctatttataagcaaattagtgaggaagtgtaatcatttcgaaatttaaatgcctcagtttctccccaaaagcaaatgttgggcaattaagtacctgaagagcaaccgtcaaaagcgtgcaaatttttggagtatttcgaggtacgaatcaatcagcattaatgagccaaatatcgaagagactcctggtcagaatcacgtcggatcaccatttcaaacatggattcaaatcgagtgaagtctacaagcgacttcggaagtcccgtgcaaacttggggggcaaatgttatcccatttttcgcactatgacgtggcagcatgtactagcgacatgtgtctgtcattctttacacttggttggagaaatgttccgaatagacttcaagcaacgcatctgcgcgcacaaagtctgcttgacctagcagagtaaatggcatataatccgatcaaagagtgaagttagctctccgagccgcgtatgaagacttgactacttcaaagttggtatcgtgaagcccaagcacaaaggcaatccctacaatcataggattgtatcaaagggatacgacaggttgtcctaatccaccatttcatgtattctaaatatgtaatgtatgctcttaccaattatagatattgtaagcaaaagagaaacctttcctcatgcatt

SEQ ID NO: 167957 - DNA, 1848 bp, Cannabis sativa
cctagcacctaggctgacctggtgcattgtttgttatcattttaaatgccaaatatgattcaaccattcactaaagaatggtcaaaaatggagttggagtactcgtactcaagttcaagaaccttggaagcaccaaaaagataactcaagagcccagttatgaagtaccaagggcacaggttgacaaatggcttggtgcactaagttttgcttattcgattatgattttatttcaaccattcatctagtttttcacaataactaagatccatgaattcaaagaattaaaattcacaacttgacatttctcatatccaacatgggaagaacactaagaaatgaagagcttcaagtctctgagaactgctgaccaactttgctagaacacaaaacagactaggtgatgtcaaaatatcacataggaatcataaagtacatacgtagatgtttttttcacttacctagcgtccaagttgactttatatttcaacgtgggcactaggatatcaacttgggcgatggatgtcaacatgggcgctgggtcatggacaacctttagtcaaatggccataactcactgaatattaacctaattgacgcgatgcaacttcccttttatagctaattcaatgatctatcaaatcatgtctaaaacttcaattataattgaaaagttattgactccaaatttaattcccatgggagttaaaaaattaatctctgacttacctggagtgagtcctgccgtcacgacatgggctttgaaaattaacgatcaaccctagaagttaattttcacaattagatcatcatctatggtaaactattaccaacttgtattttttcattattttattcctattttcaagggccttcttcacctataaaaggagagctcctttagtttatttttcacaagaaaagtagccataaggtcagagcaactttctctagtttttctccccagtaattagatcttaaacacttatccattttctgtaattccatcccatgataataaaaactcaaagtagacgtagctctattataatggtgacatggggagtgaactactataaattttatgtgcctctctaaattgtatacttacattcattattcatctcgccaatctagcgagctgttgttggccacttttcaaggtccaattaagatttcattaaaaagataacacatcaaacaataattttaataaaataaattaattaaattacttttttaaagaatttgatttcgattttatttgaattagttgattttttaaaaattcaaaaaaaaaatcaagaattgggtgcctacatgcacgcgcggacacccgagtgtcacttgggtgcacgcgcattcagacaaggggttgtccggaggaacacgcccaagtgcttgtctaaacacccattccgcgcgcggagaggctgcacgtagcctccagcaccgagctttctcggttgtgcactcccatgcgcgcgaggatggtatgcactgcataccatccgcacccaatgcaaaaattttcatttttttttcatgctttttcatggaattaatttcgaattttttgtgtaattttttatttatgttttatttttcaaatttcaaatctaattataagtattcatgtctttctaaacatataaccacaataacattccactgtgttgatatcactgtaattgcgaatgactatatgttctggacttaacagatttgtgtatatatatataaattaaaccataaacatgaatacagcatgtaagcataaataatttctaatcttttattgtatacaaatcagattagattgtaaagggttttatttagggcataaaa

SEQ ID NO: 167958 - DNA, 1020 bp, Cannabis sativa
gtcagttttcgtgcaaatcggcctacctgacccaggtcatggagagtgcccccctctgtgaggtcactcctttgctctagaacaagctctagactagtaaaattctggagcgccataagattctttggtggtctattctttccaatgctctcccggttcgggtagcgattaagaagcggtttccgatagaagacactagttgccctttgtgcgggatgggcgaggagtctctagaacacttatttctctcttgtgatgtagcattaaatgtttggagatcctcgccttggggcatttattctgtttgtgatacttgtatcagcttgtgggattgggtcaaattcatttgggacctaaaacataaaggaattgatgctgagaaagttttcctgtatgcttcaattacagtggacacgatctggcattcccgcaagcaaaggttcataacaatgattcagttgatgtgaagaagtgtattgactctatatgtacttcttttgcagatcttcaggattctctttttccctctcccgagccttgtcggacggaggtatggtcttctcctcctgaagattggatagaaataaactgtgatgttaaggtgggattggatagcatgtgtactgcagttgttgctagagaccatcttggtagggtggtttggatccaaacagctcatctggacttctctgatgtgttgtgcggcgaggcggatgcctgctgcttggctatctcgattacgaaggatctgggctttaagtttgtcattgtggagagtgactcgagggtagttatcaatgctctcaatgggaaggtatcctattgggctttggataactatgtctcattttgtattagttattcttcctacttttctagttgtattttctgtaatattaatagaaattgtaacttgttgcccataatgtggctaagtaggcgttttcctacaagaagtttggagttattccttttgattccattccttttgatttggtttgtaatgaccgtgaggtctaa

SEQ ID NO: 167959 - DNA, 589 bp, Cannabis sativa
accactcttgcaaatcgggaccacctaataccaaataaaggtacaagatgtaagaccacctcttgcaacttgcgattcgcaaaccatggatgtcaccatgttctttgggaccaatgatgtttcttaagccattagagcttataaatacttcatttgagatgtgagaaaggttgaaaagtcaatattgtaatcacttatcttgaaagcaatacaaaacaatttttctctctctcactgtgaaatcactctcttgtttgaatttgcttatcttcatctttatctcacttttgagttttgagtttaacttttactttttaaaaattagttgatgagttcttataatcagccatatatgatatatagtagtacttaattagtgatgtgtggatatatatctcatttattatttaataataataatagtagtagtagtctcgaagtaatcaccattatgcttacatttttttcactgcagaattcatctacaatagtggttatgtgaatgatattgagcaagaggagagagtgagaaagagaattttcaatttttttttttgtataattatacgacctaaacttttttattaca

SEQ ID NO: 167960 - DNA, 624 bp, Cannabis sativa
aactaaaatctctcaaatctaataattttccaatatatatgaaaaaaaaactttctctctagatctcaatttttattcttagaaaaaaaaatactaaacaccattaaacaccattgctacttagtatatttttacatatcatattatcataagtgtaattaaatatttaatctcatataatttaatgtaaagtattaggcagccactggtattaaataacattaatgctccataatacttgaacattgttattggacaccaataatacttaacacctttaaacatgtcgatttgtgattagttatactttttaaaaattattacattaaactatatggaacacgatacttaattaaatcaatagcaatattaatatataaaagagagtcaaacaccattagtatcttttagcatttttcataatacttattaccctaaggcaaacaatgcagcttcttatgataattttagagcttattatattttaaaataatttagtttaatgtatttcaagtaggtaaagtgtagatatgtttgaatacatatacataatgtagtagttatagtaagttaaataatgtctatatatacagatattgaatatgcgcatgccatatatatata

SEQ ID NO: 167961 - DNA, 1302 bp, Cannabis sativa
caacaacagtacgcacagttttgtctctagctgtttcaaacaattggaatctgtctcaattggatgtcacaaatgcttttttaaatgggccattgagtgaaactgtatacatgtctcagcctcctggatttgaagatccagataatccaacacatgtttgtttgctacaaaaagctatctacgggcttaaacaagctccacgagcttggaatgacaaattgagacaaacacttgtgtcgtggggatttcaaggctctcgagctgatagctctttgtttgtctatgggacaggacaaaatattgtgatattgttggtctatgtcgatgacatattaatcacagggccaaatccaactcttatctcacggcttattactgatctaaatcagtccttctcattgaaagacttaggcccggttcattatttcttaggagttgaggtttatcgtgatcatactgggatgtatttgtctcaaaccaaatacatcacagacttgttagtcaaacttcacatggaaggtgcaaaagctagtcctaatcctaccagtgtgaatgtcaaattgagcttaacagaaggtgaaccgtttcatgacatcaagctttacagaagcacactaggtgccttgcaatacctgtctctcactcgtcctgaagtagcatttatcattaacaaactcagccagtttcttcatgctcctacttcaactcattgggaggcatgcaagaagttacttcggtacttgaaaggcactgtcaaggatggattatggcttaaaccttcctcggctatgactcttaatgtgtattcggatgctgactgggccagttgcttagatgaccgccgttcaactggagggtatttagtgttccttggagacaatttgatcagttggtctgccaagaaacaacaagttgtagcacgctcgagtactgagagtgagttcagagcactggcaaatgctgctgctgaactcaaatgggttcggtcactactgcaggagcttcaggtttcgatcgatcaaataccggttatctgggttgataaccaaagtgccacggctttagctgcgaatcctgtttttcacgcccgttcgaagcacatagagatagatctccactttgtcagggatcaaattctcaacaaagatctagctgttcgatatgttccatctttagatcaagcagctgatgttttgaccaagcccttgtcgacagaaaggtttctctacttaaaatccaaactacaaatggtgtccacaccatttagtttgaggggggatgtaaatatagttgagtgagttt

SEQ ID NO: 167962 - DNA, 583 bp, Cannabis sativa
tggattggacagtttgcttggagcagtggatgggtggaggagtcaatgacgcttgggaatttggatgttaaggaggagatagtagcggcagcgcctcaccggactaagccagccatagggatgagaactcgccagaggagagattcgattcagggaagggatgaaggtcggtctatcttcttcttctcttccgcttttggtttggggacgaattacatttataggggttatttattattttattttactacttaagaataaggaaaaggaacaaaaaaataaatgttattttttttttcataaaaaaaaaacagattatttattcgggtttcgggtgcccacccaacttacagaaaatgttttttaaaaatccaaacccgatacccgaatatgctattttccggtgagacccgacccgattatacgggttatatttttttttcagttttttttacagcgggtcggagcgagttggcgagttttttgggcttccgggttgaaatgttcagccctagtttgtaacacttaaccacaaaaatcgaatatttggtggctaaactacctaaaccctggttccgttttg

SEQ ID NO: 167963 - DNA, 585 bp, Cannabis sativa
aatggttccatatcccttgacaaacttgcgctaatatcccattaaacccaaaaaacctcgaagctcctccaaggtcttgggtatgggctagtacgccatgtttgcctacttatgagggtctactgagactccctcgactgaaacaaggtgaccaaagtactcaacactagcttgcctaaataagcatttcttgcagtttgcatagagctgatgttgtggcatcctctaaaagaccgctgctaggttctaagtgtgtttttccaaggaggagttatacaccaagacatcataaaaaaaaacgaacacatgcttatgcatgtcttctcaaaaaattgcattcatcaaggcttggaaagtaggtagtacattagtgaggccaaacgatatgattagaaattcatagtgcccttcgtgagtgccaaaagtggtcttctctcacaaacacggatttgatgataccccgattttagttcaatcttagggaatatctgtaacgccctgtctaacagggacgccacgtgtgtgcaatttaataaaattcttatatagatactatataattataccaaaagtgtggttaattaa

SEQ ID NO: 167964 - DNA, 795 bp, Cannabis sativa
ctcctgcatttggcctcgggtatctgagaaagagactgttaattactacttttctattataattttttagttttttttatgctcgaaattatacgtcaaaatattttttttttaattttttaataatagtattcggtatagttacagtatcaacgctgtaaagtttaaaaaatttcgaatagtttacaatgtcaaaaataaaatttttcatatttcagtttaccatcgtgttaaaaaaaaattcaaacatactttcgacactgtaactattcgaaaaatttacagggacgacgttgtaatcataacaaacactgccatgaaaaaaaataaaaaaatattctgacatgtgttttcaggcacgaaagttgactaagaagttgtaataagaagttgattgaagcacttgtcatataagaaaaggatatcagtggtgctcatcagtttttatagatgacattctacgattggttagtaatattccttaaaagctattttttttttaagttttatgatactcgacacttaattgcatcaatagtggtatgacaccgaaaagagtgctagacaccaataatatctttttaacaattttcataaaagaaatgctaaaaagtattctttgtagttagcactcttttaaagtataattttaatataatttaatgttaagtcccacttattttcttttaatcaaaagggtaaatagtagcataattacctaaagttttaagtttgtgagtgacataatctcaatgtttatttttagcggtataagtatctaatgtttgtaaaatt

SEQ ID NO: 167965 - DNA, 957 bp, Cannabis sativa
tatctaagatataaaatgatcactcaaagaaaataaacataccattgagactacaagctaaagacccaatataattagctataaggtatccaattgggggacagattctgatttcttcaactgtgccatacagaaacaaatcaactatatatcataaaaagataaaatatttacctttagaacttgaggtgcatccatcatctataccaacatcttgttctgaaattccagatacggctccttcagaattccctgaactcttcaagttaccatcttcatgattctttggtacagattcttctgccaaagaaaccaaaatcaaaaatatcaacaccccaccaaccaataaccatgtatgatttctttgtatacatttaattgcataattttttttttttcatgtgatacatgatttgtataaaaaagatatgatagtagttgtaatacatcctaggcaatagcaaaaatgtccatctctataaattttaggtgcatacttataaataacaatgacatgttttgtaataacaaacaagccgtcgttttcagcccagtcagagaaaccaaatccagcaattcatgactgtttttttaacatttaaggaaaaaaatggcatgaccaaaatctaaattattgagctttggacttcccatctttgtaaaatcaaagaagaataatgccaatagcaatttaatgtaaaaaattaaaaagaaaactcatttaagaacagataacttatcgttcaaactttattaaaacaaattcaaatttcttcaaagggttgtttagtacttttcaccttccttattggtcccaaatgaaactctcaaaatcatttaagcaacttttcttcttaccagctcacaagatggattagactgggtaggataacgtaatcaattaaccaaagctttcacataacgcaataaatcatatattatatatatatgtatgta

SEQ ID NO: 167966 - DNA, 1100 bp, Cannabis sativa
taattgtttttatataattacatttaagtattgttgaaaaatatacaaaagtaatttaaaatataaaaaatacatgcaattttagtgttagcacgatacaacatattcatatttttgtacgagctgaatgatttatatttttctttaacgaactcacttgcaacgcatggcacgatattataattttttacaagcaggcacacacaaatcttattatacatatttatcaaaaaatgaaaaaaaaaaataaagaaagaaaacctttttatcaaagatgaaatacagttcggttaggctcggcacaacatcccatatttgttaggggtatttgtattgcaggtggtgtatgtttcgactattttcaaactaaattgtatatgcggtttcttcaattttccaaatcgtaccaacaccgcaaaattaaaaaaccgcagaaactgcatcgcaaaaaatagtgcagtgcagtgcggtttctacaatttttggggtttagagtatcactaaaaattaaactatcacaaatacaataaagcttgagcgacacctggtaaaaataccgtaagacttgaaaataaatatgaaaaaaaattcaaatttcaacaatacaataattaataggttttaggttaggacttcatatattagacctaaataaatataaaaattaatatatgcggttcggtgtggtttgaatcctatattaacaattcaaaatcgtaaaccacaccaccatgcagtttgaaaaaaatttaaacggtgacaacatcacaaaaaattataaactgtatttttttttgcggtacggtacggacaattttagtagtgatgaacagccctaaaattatttgcacctttggtgaagaagagtgaggaggacaatttagtggttagtccatacagaagaggagaggacaaaagaaaagaaaaacgacaattttatttcaaaatgaacatgctaaaacgacaaacatgtttcacggataaagctgtccccttcatcacactctagactctactccacaagtcaatgagtcatatgtaaaacaagactacatgattgagagagggaaatttgattttctatacttagaaaatcttaa

SEQ ID NO: 167967 - DNA, 999 bp, Cannabis sativa
tggtaacatagaattaaaaaaaaacacagtcagattttttcagttatatataacacttattaactagcctcccccgtgaggtctaactcaattgattttatctataaatgccttttattcaaaacaaaactaacctccaccataattgaaaacacgtaggtttttcttttcttttttctttttgaaattatggagaacaaaggaagaaacacatgaagaaacgtggctgttagaacttagaaccactactactggactggttggggcacatatatagcttattataattattggtccccaaagcaaaaggtacgaaataacttagttttttatattctttgctgacaattatgtacttaaaattcgtctatacaattggagacaaacacaaataacaatcaattaaatctgagtacagccgttgattatatataatgcaaacaattttgtaatagagacgaatctatatattattctaaccaaacacaatctgacatgattaatttattaattgacagagttcgcattacatcgaataaatcaaggtattcaccctttgtattagattcattgaatggttttgattatgacttttttactttattattcatgggaccatcatcatcaaggattatcatgacttgttctttttccagtgggagtgggatgggatcgactttgatagcaatatatatacatataaatatatatatgttgaccatgtgattcttatgcaacatggctgcaaatgaaatcactttttgcacaagtaattaagtactagtcctcataaatttcataactttgggcttttccacatgtaataattaacctcattttttatcccaaaatataacgagtttggatttaagtacgaggagtgttaccgttaattttcttttacaatctcttaatcaatttttacgtccgaaaatatatgtcggaatatttttttcaaatttttttttttcacggggtattcgttatgcttacaatatc

SEQ ID NO: 167968 - DNA, 1203 bp, Cannabis sativa
tcttcagaatgtgtcttttcccctatttctcctacaataacagccttaaagttctattgattacccaccgcatttctatctcattgcttaacatttgtctcacctttttcaacaatgcttttttccttattgcaattggaaactatgtgccctaattgagcacaaggtgcacatttagatgggagccattcatactcaatcacttattcaactaactacttccgttcatcgatataagctatagtttttggacgataatcggaaatctccatatccaccaaaactctagcatacttcaccatcgttctactatgagtcaccttgtccaccacaattggtttaccaattgtactcaccatagcactgagattattaatcccccaatactgcaaacccgatccattcaatctaatccataccagaactgatctaaccatactcaccaaatccatgtctgtggtccaaggatgaaggatcactttttttttttttttttgtcaaaatgaatgactctcgattccaatactaggtcacgagtagccttatccctgaaattaaccattgtgaatcctgagttcattctcataatcttatctatgcttaggttcccccaaacccttttaatgaatccttcaaacactctgaatggaggattagcaccaagaacgatacaaactataacattcttctaaactgaggcttctattttgacctcctccagatctaaaagagctacaatttggtctccaactttcagaggttctatatatttcaaccgagtagagggagaaggtaccctattcgatttgaatttgctccaaatctcctttcccaaactctgaaagtcagtattctcaaccccctcagcccacctgactgttttaggagagctacgattcaagtcttgcatctttggcacaccacgatccacatctaaattagtacacacgtcataaaatatttattcaaccaaatagaagtaaaagtttaattttaaagtacttgactacaatccctgtgggatcgacctcactcttagtgagtctactacttgttacgacacgtaagcttgtgagttgaaatttccgcaacacctgagtgtcatcaaaatccaccatcgccgtcttactctcattggcaaacaccatcggcttcgaaaaaactttcctcttccgaaccatgggaaagagagagagagagaga

SEQ ID NO: 167969 - DNA, 700 bp, Cannabis sativa
tgaatcaaagtttggccctaaaccatttaaaactttaagaaccagatcttgatcttgaacaggggagccaaccaccgtgagagcatcaaatatggactgaactttttcaatatattcaaagatggacatggtacctttttgaaaatgagagaattgtcctttgagttggagcaatctgacttttgtttgactgagtatactgaggattgagatcgccattatgaggtttcttggtggaggatgaccagtgaaaagaatttcatcaaggtcgtgactaatcacagttggtgtgacttgtgattttcacgaaagatagttgttacgatcgagtttgactgtaagagtagaggtgagagagtgagagagtgagagaatgggttccaagaaggaaccacaattggatttggttgagtagcaatatgagcatcgacattagccatctgaattccaggatcaaaggttgaagatgacatttagcaatgtcgattggcgattgatactatgtaaggctgaatgagcagtagtaatagtgtagagcaccaagaacacaaaacagagagaagaagagaataataatgcagcttagttgcaccctctcacaatagctaagggcctttatttatagagataaagcgatacagttacaagttatagagaacaacgaaaataattaacttgtaactaactcctaactaactat

SEQ ID NO: 167970 - DNA, 2442 bp, Cannabis sativa
ttcttctatcatttttctaaaccaatagagtcgtatatctatgtgttttctcttttcatgataaatcagcttcttacgaagatggatggatggctggctatccaagtacatagtcactcctccttttagttgtttcaattcgaacaaaattctctgaaaccataaagcttccttgaacactttcgtatagtggccataaatttttcttccttggtggaaagagcaattgcagactgtaattgggccttccagcatggttgattttctagtatccatatgcgaggcatagtgagcatcgacgaaccctttcaactccggttctccttttgctttcttataggtcataccataatctcaagtgcccttcaagtaccttactaaccatttaagggtcgttcaatattcaatgtctaaattggacattaaccgacttaagatgcttagagcatgagcatatctcttgtttggttctcaccattacttacattaaacatcctaaaatcattgcatagggtacatccttcatttcctctttctcttttgcactattcggacattattctttcaataagacaaactatccgcccaatggtacggatgtactctttgcatcttctatatttaacttctgaataactgtcttgatgtatcagaattgcttcaagctgattgtcccttcctttttgttccttgaaacttcaattcaaagtatcttttgaactagtccaagctccttcatctcaaattctctcttgagcttggctttgatactcttgatcacaaaattgtctttgctcatattgagcatatcttccacatagagcaataagaacatagctatagattactctagattcttgaaatgtaaacactaattatatgtgaatcgtttgaacccagtttgttgcataaaagtattaaatcttttactccattgtcttagggactattttaaaccatataaggactcgttgagcttgcatactaattcaactcctttcccttccactttaaacctaggtggttgcttcatgtagatctcttcatccaagaataatccatttaaaaaagtagttttaacataatgttgttcaacttcaaactccatttgagctgccaaagatagcatcaatcttatcttattgtactttaataccacaggtgagaagatttcagcgtagtcaattctttccacctgagtaaaacccttagccactaacctagctttgaactgaatgggttcgttctcactgattctctctttcaccttgagaatccatttgcactccacaacctttttgttctccagcttcggtactactatccaagtctttttcatcatgagtgaattcatctcctcatccatggcctagagccattttgacttgtctccacctgttatttccttttcgtagcttctgggctcttcaattttagttggttgtactactgttagtgcaaatgcaaccagaaccacctcaacaaatatttctaaagggtgattctctcttctagttctatcacgcgccaattgataaccttccaaaaacatttatgtctgactcctcccaaaacatctatttggtcttcattatctttcagctcaatatcaccttttgtttgcacactatctttcgattccatagtatctttcaactacgaaccttcgtctagatgtttcattctgtactccatttccatctgtgtagtgttcttgtttcttaatctttttgcatcacacggagacacactacttttttggctatcaagtggtgaaattctaattccttgaaaccacatttttggcaattactaccttttgtctacccttcttggaaacacatattctataacccttggtacctatggcataacctaggaaagttaccttaacagattaaggttcccatttatcaataaattagcgtacatatgctgtacacttaaaagtttttaaatgcattaagtttggggttctgttgtaccacatttcataaaggttttttaagcctataactctgtttgggcttctatttataaggtaggttgcagtagctaaagctttcccccaaaatagtttttctaatccaaaattgaacaacagatttctaactttgttcaattgggttgcttcatcctttcagcaatatcatttttctttcggatgttcactacggtcctatgtctagtgatatattcttgacacagcttatcaaattcagatttgaaaaactctaacccattttccgtcctaaggttcttaactttttgattggtttagttttccacctgagttttccaaattctaaactgttctaggcattcattgttggttgctagcaaataggtccaaagacatctgctataaccatcatctatagaaagaaaatattacttaccgaagtgagtaggaagtttgtatggcccccaaagatcaccatg

SEQ ID NO: 167971 - DNA, 2392 bp, Cannabis sativa
  modified_base (1974)..(1980): a, c, t, g, unknown or other
ttcttgtccttgcgccacaaacccttgaggttgttctacatatatttcttcttcaagataaccatttaggaatgtcgacttcacatcgagttgaaaaattttctatttcttctgtgcagctagagttattaaagccctaataatgtcaagtcatgcaactggagaaaatattccattgtagtaaacttcatactgttgagagtatctttttgcaactaatctttctttgtactttttgatagaactatctgcattgagctttgtcttatagacccacttgactcatatagtgtcgttgtctagtggtcgatctgcaagttcccacgtcttattcttctcaatcatctttatttcttcattcatattttttctccgtacttcttgtttctgagctactttaaagctttctggctccaaaagcactaagttgcatgtttcgtaaatttctgatagaggtcttgctcgccttattggtgaatcaggcagggattctaaggcttgtatcagttcctctattattggctgagttggaatttcattttgatcagtttcttatcttggcggtaaaggaatattgattgtctttctttcaacatcatgtgtatcctaattgtatgaagcatcttcatcaaattttacatctcagctgattataagtttttttgtttctaagctatagactcaataaccttttgattgagtactatagcctaagaagattcctttctcagtcttctcatcaatcttgcatcttttctcttttagaatgtgactgtagcatatgcattcgaagactttgagatgctttgttgatggcttacgtccattccaagcttcaatcggcatcctattctgcacagctttggttggacatatattgagcaagtagactacaatgcttactacttcagcctaaaattgttttgggagacctttctctagtagcatggctcttgctgcctctataacagtcctgttttttctttcagatacgttgttttgttctggtgtgtatccaacagtgagttggtgctccatttcttcatcttcacagaacgtattgaattcattagaagtttattatttgtcactatcatttctaattgtcttaatatagtgatcactttgttgttcgacatgggttttgaattttttgaaaatatcaaagacttgcaatttttattgcataaaataaacccatatcattctaataaaattatcaatgaataaaatgaagtgtttgttttgatcatttgatggagtgcgcattgccccacaaacatatgtatgaaccaactccaatggctttttggctctcaaagcttttcttgacagaaaagattgacgacattgtttcccgagcatgcatcatttgtagactgcgttgatctccttaatttctaggaggtctcgcatcatattctgcttgaggatctttagcccgtgaaagttgaagtgaccgaaccttctatgccaaagccatgattcatctgtttgtacttgcattgccacactacttgcatctctccattgtataggaaaatatcaattttctctcatgttacctttgcaatttgaaaggatttatctttcttatcttagattgtgcaagaatctccttcaaaatgtaaaaagtacactttatcaattatttggcctatactaagttggttttgatcgatgttaggtaccaagagtacatcatttatgtatctcttgctttttttggtgtctacgacaatggtatctttcccgactgcttcagtgaagtcaccattactgatttttggctttagtcttggatttatcaagagtacaaaggatgctttcattttttgtcatgtggttactacaaccactatcaagataccaagtatcttttccttcttctgatacagcttggcagactgagagagattacttttatcatttttctcttcgaaaaaattagcttgatgggatttctttaaacgnnnnnnntttttagtgtgcccaattttttttacaaatttggcactgtgattttcctataaaccaatagtctttctccaagtgactttttttttttataaatgccacatggaggatacttgtcattatttatttttttttttcttgtgtctttttcacatcaccttttggtttttgagactgcaaattggttttagactgaaaggcattttcagcttcactttttttatgcctttcttcactaatacaaaaataggttttcccaacgtttttaaacagtcgtgtaaagtattcacgtcagtttttacaaccgtcgctattcgaccatcgtaaatcaggcagaataggcgacggttcaaaaccgtcgctaatgtgggttccccgacagttttaaattgtgccttatagtctggttacgttt

SEQ ID NO: 167972 - DNA, 774 bp, Cannabis sativa
aaaaaaaaaaaaaaagcatgactaaagttatataaaatatactattaaatttaaaagaagaactagaagatacaaaataatttaataaataaatatagagatgaaatacaaaagaatcaatatcaatattaagaaaaaaaaaatacaatagctacactttaatctcgtcaatattactattctaatacactcatttttgtagtataaataaaatagtaataagagagaaataacaaagtgtatctttttctattctaaaatctgatgatgttttccattgatttttagtcttatttatagataaagcttgctttcaaaaaaaaattactgaacttgtgtataaagtagtggataaagtggcataaatactgatcataatggcccatgtaacagactactgggtgagaggagagggggattgcaagtctcaagtgttgaagggaacatcaagctgaacacgtggctgctggaaaaatgggtactcatgagtaagtgaagcagctgatggggtctcttgttaggattgttggagccgcatgaactgatcaacataatagttcatatgttagctaagttgggcgtacaacccatttggagataaatgtgatttgctcatttaatatttaagaaattttcacatctccacaaaaggtgttaattttggtgtgcctactaatacccaatttaccctttccttatttcttggacaccaactgacataactgttttgacagttatgttagttatgtgcctttgctgttacttgtgtgtata

SEQ ID NO: 167973 - DNA, 1053 bp, Cannabis sativa
agaaagccgtttcattcaagtggatgtattaaaaaatttaaaaggggtgaattagtcatttaaataggtaataggaatttaggatatctagaagaaaaattcattttcgcttgcaattagtctatacatatagaaatatatatttcttttttattttcctaatatatatagaaatctccttaaataattgcttagtttgacaaaataataaaaaaaaataattgctttagtagttactccaactacttttaaggtagttataaaaaatattgttatatattatttttaaatgttatataacatttttataaaaacgtatgtttattgtctttttaaggtagttataatatatatataaactatttttaaggtatgtttattgtctttttcttaaatgttatttaatattttctgctaaaaaattgttatataatatttccataagtattgttttatctttatcttttcttgttttaggaaaaagtattgtctttccattttatttattttgctggaacaaaaataaataaaatacatgataaagctatttcaaaataccatttctagtttttgttgaattaaaaaagaaaaaaaaaagaaagaaaaaccatttctggttacaccacaagtggttcagcattattttttcttttttcttttttaagaattagtgattatgtcttatcttgtttgtagtatccaaaaaagactacattgtatactaattaatataaatgaattttaaagatattaggaaaaaaaagaattttaaagtttgtaaattgtaaaaatagatgtacaccacccctaactattactttactcatccttttatgataattactaattagtataatgcattaggattagtggtgaattcatataacattactatttactataatcacctcccaattcttcactccttgtgcattcataatcaaaacataattgttgataggttcaaattgaaaaatcatatttaaggttgcgtttggttggaagtaataaaatgaaatggaatagaaataaaacaagttttataattttatt

SEQ ID NO: 167974 - DNA, 712 bp, Cannabis sativa
attatttattaattttcgataaaccctcttacacctaattaaagaaattcttaaaataaattttaagaactcatttatagttttgtttttacgtgttttttttagttaatattaaaaattaagttttggatacaaattaattataatacctagtctaaacatgtgagaatttttttactaagatgtcaaataatcatgttgtgaataatattttcttacaattattattttataatatattttttttaatactaaaattttgataaaaaaataaataaaaaattataattaattaagtaattttagattgaatagtaaaaatatttattcaaccattatattgataaaaaaaattaatttcgtaacaaataaaagttgagattaatagatttatataattatataacataacatacaaaatgattcctaaacaaaatatttattatcaaactttattcaaaaataagaaagtctcttacattaataaaaatggaaaaaaaactatttaaaataccacctaaattatttttcttttattttttatatataaatatataaattttatgataaacaatttcttttacctttattattataacttttaatttaaatatagatatttttctttcacttctattctatataaaatgtggctatataacagaatttttagtttatgagaaattattgggtgattttttttttaaataaa

SEQ ID NO: 167975 - DNA, 1215 bp, Cannabis sativa
aatggtagaccatttctgagaaaacaatctgccgttttctactgcatatttccccaaaatctcatttctaactcaaaaatatcccaaacttcatgccaagctctagagtacctaattaagacataaaaaacataattcaacccgtaaaaacatcatcagagtcttgaatacaaattcgctattgttgagctaagtactcattagcatttctcttattttttcggtctcttaagcaagcggataagtttggcatgttgagtgttttgtgataagaggattttcttctagtgcattttatcaagataatgaaaaattgtacaatttaatcataatattgcgtgaagatccaccgccaccacaatagttcttcagctccatttttttctttttccttttttaattttggtgcaatttcttctcttactatataaccacatacgtggccaatggtggtaataatagtgttaatcaaagatgaaaaatggtattcagattagaaattaataataattgaaaaaaaaaaattgcgtgcaaaatttgagtttattgcaccgacaaaacatgttacacatatcattcatgaaccaaaaagggagaaaaaaaaagaagaaagaaaaaagaaaacattatcctattgagagtactcgaaatatatgaataagtaaggctgtcccatatgtctccactaaaatcattcaagaacaagatacaacttcacaacagctaccttagtcattggtctttactctcacaaagaaaagcaaaaagttccaagtcattggtcgttacgatttattcaatgcattgggtttcaaacttgctaaagtggttggggatttgaagtaaacgtacaatgacttcttagaattttaagtttgtaccattacatacagtttggtttaaactttaaatctgaggtgaatcatcccatttataaaattttaactcttttagaatatttgtttgaattagtactagcaatttttgactcgataataaacctccaaaacgaaacaaaatttataggtttgaataacacccaatttttgtgttattgttgcattgatacgtttagtacgtatgataaacatgtttttattgaatattaataatatgagaaatgctaaaaggcaccattggtgctaagcacaatcttacgtgttaatatcactattagtctaattaagtatggagtcccatatagtttaatataat

SEQ ID NO: 167976 - DNA, 1213 bp, Cannabis sativa
aaaaaaaaaaaaactacaataaaatttttcatcaatttggtaccaatggcattttgtgttggtttgaaaatgacatattcaacatttgcatcaatttataatagacacaacctagcgtcagttaaaaacattaaataaaagaaaaaaaaaggcaattgaaacataaaaactttacatatataaactaatataaatcaaaacctaagtcataatcagatgcaccccatctctctctctctctctctctctctcggaggacgaccaccgtctatttctaggtttttgacctcatgatagtggttattgtattttgtattttgatctattttagattttttttttgtatgtttatttgtgtagatttgcgtatttgtctatttaaatattagatctataaaattagaatgaacattaaaatttaggtatttgttttagatttgggtgtgagctcggatgaatatgatccggatctatttttttttttgtcggtacaaaatcgacgagatgttataaaatttgacttttacactattagcgtctactttcaaccttcaataatttttggtaccgactgttgaaaattgacgcaaaataatatagttttgtgtctaactgtctatagtatatacgtcgattttaacaaccgacgctaaaagaataaatgtgttgcaaaccgataaaaaataccatatttgtagtagtgtttggatgacacgtacgttttagcatatggataatcgccgtgttagtaaaactgaacgaaattagacaaaagttcttaaatccagtggcagacccaagatttaatacgaggagggctactccttagtgttgagggaacacgttttgacaagttcttgttggtttttattattccaatttccgtccacttgacgtggtatgtccacatggataaaagtgaggccacgtgaaatacagcctgtcaatggataagcaaagtcaccatgcacaacacgtcaattaataagagttccaaataatcaagtaagaccaaagtgaaggaaatggccaaccaaggaggtctagccggacttttttttataagtgagggaggtgtacttttttttgtacataatataacatattaaaaattaatacaaacttgtattttatagtatcaatcaatatcaatcatcaatatatataaataaaggaaagcacaaaagaacttaggtggcatcttataattctc

SEQ ID NO: 167977 - DNA, 521 bp, Cannabis sativa
aactgtagacttccttgaccaatatcaacaaaacaacagtcaccaaatctcttcggggtccatccttttgtgtgcaacctctagcaatgggaattcatcttcaacatttcaattaaagctctctgtggatgctgcccagaatgtaacaacaaacaagacaggtttgggtatggcgctatataataataatggggacttgctattgaccgtgttgacaccttgggaaggaataaaaccaacttttttaatggaagctcatgctctctgtcatggtgctaaaaacacacagcataaaaccagattacacattgtctctaattgtaaaatacttgtggattatatttgtaatgatgctactcataatattctcttgaacaggtttgctaagaacatagaaagcttgatgtcttttctccctaatgctacttttaggcacatcacaagatgggctaatgaagatgctcatcgccttgcaaagtatgcattaggcttagattaggaagcttgttggaaagatcaaa

SEQ ID NO: 167978 - DNA, 1184 bp, Cannabis sativa
ttccctcttccacaatggtctttcccataataataatattgtttgattttgtttactacaatctaaagattattatttttgatggaggagacatctattaagcacattctagattcatgtttgtattcggaattgaaataaattaatagaaaaatgtacctgaataaataaaaaataatctgcattaatagttgtgatatattatttattaaaattgtttggaaaataaataatagtgatttatcttgtttattttattagggaatataatcggaatgcttaaattaactaaattactcttttgagttaaactataggataagccatattttaaaggataaaattatcattataaattcaatattaaaaaaataaataaaagtcattactcttatgacatgttttcttaaaagggaataagaatgaatgttatggtattgattctcatacaattgtttactaaattttaaaaaaggagaaagtagtgtaacccacacaaattagggagaaaacaaaggttctcccccaatttttatagagaatatatttccctttcctaatttaatttatttttattttaattttattaattaaaaataaaaaaagacaaatataccatttaaaaatctatgaacagaaaataatgacatgttttaataatgacaattttgtcagcattccgattacctttcccaattatgtaaacaaaataatatgattctggttttcttttcgcacactttagtaaataacataataaaatattgtttcaaattattttctattttaaaccgattcatttcttccattgattattctgattacaattacaatttagtaaacgcgttaatggtattccttagaaaattagtggagaaaattctctcttttttttctcccttatttaattaagttctcattttcttaaatttgataaattaactaaacaaatataaaagaatgactcttttattattgattccaattgcttaatagtaaacatgcatcttaaactctaggttgcttatatttatggagtagtaaggttttgaaaatataacttaagttatttataattgggtgttgaatttaagtatttatgccacaaattattttatatatatatatattttaaatatgagaatttgtagttattaatattacataaaataaaaaattataat

SEQ ID NO: 167979 - DNA, 701 bp, Cannabis sativa
tatataacagactaaaaagttcaaaagtttaacaatacatccatcatgatttggaggacaaaatttctaaatagccttaataaaatattaaaaataaacaaaaaatagtatatgtccttgataaatccttaatcacacaaagtacaagctggctgatattttaaaatgcctgctatatatatgataaaaagttttttacgcttaaatcatagagcttgtagactttagtcctataaattattttgcttagcaaaaatactccgaactataaataatatttgtagactttttctcattctatttaaaaaatcaacggtttgctaccagggctagccctaaactttagctagccattaaaaaaaaattggacccttatttagaaatatggtactttcaaaatgagtaaaaatatatatacatgtgtgcatttttagaagaatttttttttggtccatggaataggtgggctctaattaaggacatatctaacccacttatgcctaagatcgcgcttgcctaatatttttttaaaaaatattttatagtatttttttattaattagttgtttttaaattttttttaaataagtgaaaattatttcaaaactaaagagctaatatataaagggctatttacaaaaatatgggaaaataaagataagttttgatatatatggcataaaaacttaattacactaaat

SEQ ID NO: 167980 - DNA, 668 bp, Cannabis sativa
ttaatcaattaattagttttttttatttctcttgtaaagtatatgttatgtacgttatcatgtgacactagttgaccatataaactaaactaaaatgtgctaaaaataacgatattctcacttaaaatattaggaataataaggtgacaattttttttagtaactaatcacattaattttagttgaaattcactgttgacaaagaaagttacgctaaacacttattttgttggacaatcaatcaaatgcttctacctaattggactaatgaatgccaacgagaagaattaactttccacatgttcggtagaagattcttttttgtgggccttgttggccacccgccgtgaccttgggttttcagaaaatcctactcgggggacttgtagcttggtagtccaccaggtgttgccaccgttgagtttggaaccctaagcactgttagtgataagtgcgaagaaggtgaaaatggcatcaagtcatcaagccccttatgctccaagtgacagatgtgctacaatgttcgagacaacaaagagttgtatgctgagttcggaaagaatgaatcactctagattcaaaatttattgatgaatcactctagattcaaaatttattgattctctttcccaattggttagaccataggcacacaatgatttacttta

SEQ ID NO: 167981 - DNA, 636 bp, Cannabis sativa
aattgatttgatgaagtaactgttaaacagaatctaattattgttattatttaataatagcgtatacaattaatatagtgaatataataaataaatatagcaatatttaatggtgcatgttacgtgctgtcatatccggtcattattgatatttatttttaatataattaaatatcataatcaaacttagtttattatacggctatttagagcgtttgtgcggaattattaccactaccaaaccctatagtataaagttttatatgaagtgaagccactaagactagcttagtggtgagggagggatggaaaaaagggagaggtcagttcgaacctaggaccttgaaactattaaactattaaataattgtaaaatactattacgctacactaaaaaaaaatgttttatatgaagtgtggtgtggcctatgtgttattgacacataagtaccacttctatattttaaataaaaattaatttaaaatttaaaaaaactaatttattttgtattaataatcaatattaaaatttaggctaattagaatttttttctcccaaactttaacaagtgcaaaatcatgccccctgaacatttttggccgttaaaaattccacctgaactattgagattgtta

SEQ ID NO: 167982 - DNA, 506 bp, Cannabis sativa
atatatataaattaacttcaaaacattttatgtttgaactaaaaatattcattgaattgagacccacccccataaattttatttttttatttttataaaaaaagcacaaaaagaatactataataaaagatgtattttatttattttttatatgctgctttagatttagacctaataagcaattgtactgaccctattagatcattggatttgaatagtaaggggaaaaagaaatcccaaattgagttgtttaagtacatcactttatttttctcacttaaccctaaaaacaaatatttactatactataagtaatagttatgactcctcttatttgtatgagaaacgctaaaatgtatcagtggtgtctaatacttttttatgtgttaatatcattattagtccaaataaatatcgggtctcatatagtttagtataataatttttaaggagtatcgttagccaatcgcaagacgacatatctagaggtgttaggcactattggt

SEQ ID NO: 167983 - DNA, 1214 bp, Cannabis sativa
attttctctctcggaatcgcacgatcatctccagtcacaaaagtctacaattcgatctcaaacgcaagcatttcacacaacaaatcaatctcacaatccagaattttgctcgattgacaacatagctccagcatcaatcgtcatctccgattgtcttctccagctacggtaagttcttcaattgcttctgaacctcttccttagctgtgtgaacctgaaaatcaatgctcgtaaaaacgcttactagaaaatgaaaaatcaaaccaaattatacatagtaataaatcttcgacaacaattctcagtataaacaaaacaggtatataaactcaataatcaaaattatatatggcgataattatatatgaacatatgtggaaaataaaagaaactcaacaatttaaaaaatatatgtaaaaaaaagaactggttaaatcaagagaaaaaaactaaggacaaccttatatataaaacaaatataatttcacatttaacagtattgaaaaactggatataaataatattaataaaataagatataaagaataaaaaataaaataaacaacaagaataaaataatcaaagacataacaagcaaataaaaatataacagaaaaaatatccagttaaaaacttaaataaaacaatcaaacataaaaattaaatgaaaccggtttcgaatacaaaattataatcagattctaatgatacattttttaaaaaaaaaatgtaaaaagtaatcaaagttataatatacaagaaaaatatataacagaaaaaaaaaactagttaaaaacttatataaaacattaatacataaaatttaaacagaaccgatcctacataaaaattataataagattctaatattaattttcttttaaaagtacaaaaagtaatgaaagtcataactcacaaaacataactaaaaaaaaaccagttaacaaaaaaaaacatacataaaaattaaaaagaaatcagttccaaataaaaaattatatttagattctaaaaatatgcaaaaaaaaaaaaaaaaaagtaatcaaagacataaatgacaaaagaaaaaaatataaaagaaaaaaaaatgagttaaaaactaaaaaaaaaaatacatataatttaaataaaatcggttcaaagtaaaaaattaaaataagattctaatattacttttcctctaaaattgcaggtatggaacaaatcatgtgtgt

SEQ ID NO: 167984 - DNA, 1341 bp, Cannabis sativa
catataaatatcctaaattagtgatccattaaggaaggcaatatttatgtcaagttgccttacttcccatgactgtgaaacaacgattgtaaggactattctgattgttaaggctttgataaccaaactgaaagtctccccaaaattgtgtccagccctttgtttgaagcctttcgctactagccatgctttgcatagttgaaaactcccttctccattccttttaattttgtagacccatttgttcccaataatgtacataccaggtgttcttcgcgccagtatccatgttttattctgattaaggccttattttctgtgtccataacatctctccattcactaatagccaatgcctcctccactgaatttggttctttagtgatacaggtccattttgactatccaatgtatgttttaggcttaaaaatcccagccttagcccttgtgatcattggatgagttagtttaacttcagcactagtgacaacttcatttgattatgtttcaacttttgtacgttgctcatgacctaagtttggatcattatctttgattgaagcagcattggacctgtcattaatttcaaaagtcgatataatatggttagtttcatctacctgatgtgaggaagaacatggtgtagacggcgtagcaggtggcatcgaaggtaaacttgtatgcacactattattttgacatgcagagttatgagccaagacttgttgagtgccttgactatctgaatttgctgtaggagaccagaaaggcacaaaaattgacatatgtgactcgggcttatgtgtgtttagaaaactattttgaaataggaattcatcttcattgaagaccacgtccctggaaatgtataatctacctgtgcttgacaagcatttgtatcccttatcattgtcactatagcccaagttcacacacttggtggaatgaaaatgaaactgaaacttgtgattttgatacgctttaaaacacgggaaataggaagccccaaagactttgagaaatttataattaggttgtctagattgtaatatttcaaagggtgatttttggtttaaaatgggagtagggaaccgactaattaaataggtagatgtttggaaggcatcccaccaatatttttggggaacatttgattgagcaagcaaattaagacccatctcgataatgtgtctatgcttacgttcagctggcctattttgagctgaggtgtgtggaatgcgggatgtcaaactggtagagtccatttttaagccaacccttgagtactacttgttttgtcaccttgttcttcacaagacacacatcaaaaaagaattcaac

SEQ ID NO: 167985 - DNA, 1037 bp, Cannabis sativa
agcgtgaactatacatgctagtttacagtcttacttggtatcccaagtatgtggagattccaaatccccgagtgttcctgagcaagcaccgctaatcctagtcacacgatctcgggatttcaaaaataggatcaatcccaaattcaatttcacataaaacacataatttacattccaattacacattagtatatagagctcaaaacgagctttttaacgatatcaagaacgtcctaaacagagttccgagtcaaaagttatggcaaaaacaagaaaccaataattcctggggaaaacagggcctcgctgcggtgaggcaagccgtggccacggcgagggccctggaacccccaaaaaaaccatttttcatttcctttgaaaatcaatcccaaacatgccaaaacttacataaaaccaaacataaccttaaatttcaatacacaccattcatatccaacaacaacaaggattaaagcttaaaacaaagctccacatcaagtacaacaacaagaaattcaagcttataacgcgcataccaaagttacacctaattcaaagcttgaaaatccaagcatcaaagcttcgaggaaaaacccagaatttcaagccaaaacccataaatcaaaccatatttttcaatcctaaaaacaacaaaaacaatctatatgcactactcatactcccaaaagctcaaacacacaaaaatcaccaatatcaccttcagtttcaccaacatgcattcaatttcaaatgaacatcaagaacaacattagagagcttcaaataacagaaattaaacacatacaaaaaggattagaagcttaccacaaattcacaagctttaagcaatgaatcacaccaaactcactccaattcaagctttaattttcaaaattggttaaaatttaagaaagatgagaaagagagaaagagggggtcgaccaagggttaaggaaactagaaaaatgattttttccttttttcaaaaatagtttttgttgaataataacttaagtggtcaaatgaccaaaatgccc

SEQ ID NO: 167986 - DNA, 635 bp, Cannabis sativa
tttgtctacaaaatccttgacagatgcttcattgacattcatgggggccacaacttttcccaaaagacacaaggaggagagtgcctgttgagaggaagcacacggagccaactttatagttgattccacgcaagaaaagcacttaccctttccattgaatgcagggttggtggcattaactatctccataccgacagcaaaagacaagacaccaaacaccaaccttaaaataacaataaactgctaacaaccaacccaccaaagacaccccaaagaaccacaaaactacacaatctcacccccagagaaaaacagaactaacccacccgacaaaggaaacaacaaactcacaaaggctcacaaaagcttcacacaacaagacactcacaatagccactaaccaaaacaaacctgactacaacgaacaagacccgaagaaaccaacaggaaggcagaaatcaacaagagagtgatagaagaccactctctaaactcactcaccaccctactagacacactctctctctctctcctaaacctagcctactcagttctctctctataataataataatactttagtttgattggttagataatgccatatttagtgacatttactttttatgccatat

SEQ ID NO: 167987 - DNA, 997 bp, Cannabis sativa
atttgtgtaccacataaagggttagtttgttagagctctaccagtttcgtatctctaagaattttttagtttgatttcttttgatgatcgtaaaagacttagttatttaaaattatatataaatttttaaaaaattctaaataatttattgtactgaaaataaaatttaaagtgttacttactatagtcccgtttggcacagtttttaaaaaaactaaaaactgctatttgaaaaaattgtgataaaaatgtgtttggtaaacagttaaaaaatagtttttttttaagaattttaagagaagctacaactaaaactaaaactgctccaactcaactttaatgtatataggaaaaataatgagtgtcaaaaaatatgtaaatcttatttacatataaaaaaaataaaaatttattaataaaattaaataattacaacatatgaaagtatatacaaattaaattaaaaaacttcttacataccgaaacaaacaggacaaactccatttaaaagtatactgtaaacttacactattattttttacatcagaaaactaaaatagtttttttcttaaaaaaaaaactctagaacttattattcttcacaaattagtggacatgtgtctcaattgaactcaaccatttattttcttttagaaagttattttcgttataagagagttctaataagggtaatatggtcatactcatttttaaaggaaaaaaacataccaaatctgggtgactagatttctggcttctttctttacttcccaattagctcaactgatgtttcggaattgcaaataaaaattgtaattttattattatttttcacgaataccttctctttcatcactgtgtctgtcatcaaaaagcttgaagaacaccacaccactgccactagtgccaccaccactaccaccacctccctctgcaactagagagagaatttctgattgtagaggagggagaaagtctagagagagagagagagaga

SEQ ID NO: 167988 - DNA, 504 bp, Cannabis sativa
tttctcttcagtattcttctcttctttctttccttctattctcttttgtctttgctttgtttttccttttcttggttcttgatgctctgtaataatggtaagaaaagtttccaacactaataagaagtgacgttttataattaattaacaaatttttatagtctttatcaaattaaaataaaataaataagacatgatattaaattgtaccaataataatattacatctcacagtaatattaaattattagagttagtcccacattattaattactaatgtgtggagataaattattatatataagatgaatgagctatactttttaatcgcttttgagatggaacctcatttattttaactcaaattctaatatggtatcaaagtcacttatgatccgttgtgagctcaaatgccaccggtccaaaaaagtcgtttaaacgtgtacacccacaaattttcaaatgaactactcttctcattaccaattaattttgaaatagaa

SEQ ID NO: 167989 - DNA, 604 bp, Cannabis sativa
gcggtttgggtttgctatttccgtaattgaatgtgattcaaaggttgtggttggttggattaataattgtcatttaaatattattttttagtttattattttttatgtttgttctttaatagcagctgtcattggtggttcttgtaatgatcttgcgttatgcaaatagtattgttcatgtagtgctatttctgttactggtagtgtaagagagtgtatgatgttctttcacaatttttaaattttttaaatgatttgttttaatgatatgtaatgcttaatatacatgttatttattgaaaaaaaaaaaaaaatcattgtaacatagagcgtattctacatttttcaaaatttactttaaacttttctttaattttgtctaaaattttaattttattctctaaaaaccatgaatcgaattcacgacctctaaggtaagatattaaggcaaaatattaagatctaaaattttatataaagttattaaagattccataatttgccttgacttaagttactattttctttaatacaatcccgagtgtatattacggtgccgtttagtaacacttttgttttctaattttttaattacaaaataaaa

SEQ ID NO: 167990 - DNA, 533 bp, Cannabis sativa
ttggctggccagcctgtggagacattgactggccagcctttaggtgaggtaccacccggccaacctgttggtggtcagagtgtagaaccctcttcagaggctccaaccttcccagctgatgtcgctgcctaggatccgaccagtctaaatcttcctacccttattgttactcctaatgatgtttaaaaacttatgttcattttttatggttttattttgcacattatttttttgttcttgtatggcttataggccctttacttttgaacaatgtttatatatgaccttaagcctttttactttaaatagatgaccaaccaggaggttttcaatcctggctttaccttcttttgttagacatataaaaaaaaactacttaaaatttaaaaacaacatcctctacaatgcaaaatcaacttatgaaaaatttaacaattttttaaacatgtcttctattttgtatttaaaattcttttacctaattaattcaactatttttcttttaaaataaataaactgattttttttttttt

SEQ ID NO: 167991 - DNA, 640 bp, Cannabis sativa
acatagtgtgaaacactttaataacttaagtgtgagttacaggaaaaagaaaattaagtgtgagtgtcaattcaagtcaaagtgttagtaaaataaaagtgtaagtatttgttgtattctgtactgtggtctagtataagtgttccagttttgtataattacttttatattaataaaataattatgttttcaaaattatgttgttcaacaatttctagaggatcagctccttgtctcattctcttttcatatgttttcttctatgttctttaaacaagtaaaatttagcacactttattatatggtggttggtatgtcgtttttttgccagatccttacaatattttttttttttgaaatcgatccttacaatattttaagttgtctgttcttataaaaaattatataaaaatggaatgtgttccattattttgaaaaattattgcccagtctttgtacagttttttttaatgaaaccaaaagaaaattttattaatataagaaatataataggcaaaacgtgataatattatttaataattttgttattatactagaaaataattgtacggttggattttatttaaaatattcttttttaataataaaaattaaaaaattctcacaaaaaaaaaaaaaa

SEQ ID NO: 167992 - DNA, 833 bp, Cannabis sativa
tttgtcaagccacaccatcacaaaaaatgccgccaatgaatagttctcatgcatgtgtttatgttatcataatttagtgaacaaactattcataaagcttttaaaaaaataaataaaaaccattcaagggaaaaaaataattataaatatatatacataaattatttagattattttatatataaattttaattttttataacataaaaatagttttttattagttttaatttattatttttttttaaaaaacttttatttaattatataggtgtgtatagtacaatatatttcaattcttatttcttatatttaaatttaactgttagattgcagaaacattgaatatatttcttacttattatataaatgtctatctaacactttttgttgtgtcttaacagattttattgtgacttaacagagttttttatattttttaacaaaaagtgttaactttaacaaaaatgtagtatttgcatcctttcacaaaaaagataatcattcacagatgcattcattcacatatataggcatcctcccagaaaagaggcaataattcactattgagatgcactctttcatatatagtcttgtctatagtggaatcacatgcttctatatagtgaatcacacgccaccatcttcaaagtttccttttttcaatgtcactgccatttttattgattgtctttgagtcaaattacctctatgatctataaaattctaaaatacttactgctctatggctatcttcatcatacatacaaattttgcttgtacaaacaacaactacaagcaaattttgttatatatgttagtgcttttcaatt

SEQ ID NO: 167993 - DNA, 1195 bp, Cannabis sativa
  modified_base (1163)..(1170): a, c, t, g, unknown or other
gatataattttccattttttttcagtagtgaagataatttgttatgcattaaagtttaactagtttgtattattattattattattattattatttggaatatttcatttattctatagatgcacgtgatatatttactattgggaagattattttagaaattttatattaatttcaaacatttttataattctcattatattttgttattttgtatatttttttctttacatttatatcctttttttcatattgttaaatgataataccgaatggttgttattattatttgttgattaaaattttcgacaactaataattagaggtgtttatgaaaataattaatgaatattaaaagagaaaatttttatgtgattgggccttagtccatgagttactgtattgattggagtatatattaaagagtttttccgactaatcccctttctgtatatcattgaagtatttattggctcataatagtgataaaatagtgatattgtcatgtttgtttgtaccatactttgcataattttctaaatctcattttatggtataattacatattttatgatgaactttgagctgtttataggtgttgggcgggatttaacttatctcttatttatgacttgatgactcatttatacagttgttagttaagtctcataaaatcagggaatgatgggtttaaacccttaaacacgtctgtcagagtaaggtttcggatgcatttccccatgttgcattaaatgcgtgagtagtgtcttgatccttaagtgacgtgttatgtttcatcagtcctcccgtataccctttctccaggtaaactttactcgcggaaaggaaaagacaagaaattaatactcttagtccagcagaccctcccaaagatgattgttctgtcgttgctcttccaaaatgataaattctagggagtaattaaggtgatgtgttagatgagtcctattaccatctaatttactcttaaactgctatgtattttgaaagaaattttaggcaatatttacctttaaattcttttttgcaattttacaagataaaatttgcgatatgtctcgtagagtattgaagtcattgctaactaataatatgataataacttgattgtaccaaatatcaatattatatatatatatatnnnnnnnnacgattttgtcccgtgatgtacttt

SEQ ID NO: 167994 - DNA, 1683 bp, Cannabis sativa
  modified_base (1485)..(1486): a, c, t, g, unknown or other
  modified_base (1632)..(1638): a, c, t, g, unknown or other
tttttttttttaaaaaaattatgaatgaatattttcagggtgttaataaaataggaaattcaatttaatttgcaattcaatccaattcgtaaagtgactgtgaatattcgcatttgtacggacattcgcacttgtgtggatgtgattgaattggaaaatttaaaatccccacttacacggattccatattaatttacatgtaaaagtaattgattaaatttaatccacacatatttataaaaaaaattataattaaaattttaatgtaaaaaaaaaaaaaattataattaaaattttaatgtaaaaaaaaataattaaaaaatttaatacatataatacacgtatatttttaaaatttaatagattaaatatatattttattcatatatataatttttttacatacaatttaaacaaaattaaacattttttatacatacaattttttttcttctaaatttgttatttgttattttatttattttaatttgttgtttgagacataaaataacaataatttattttattttgttgttatgtgaaaaaatatatatattttttttttcataaatattaaatagtttaatattgaaaagtaactaattcaaaataacaaatccaatcacacttttgcagatttgattggatttatggtattgcgtggattagattggaactaaaatataaaatctgcacttagtgcgaattaaatgtattatgagcaaaatagtgagattagattagattaacaacctacaaatttctggtataagaatcttaatattcatcttttttaatctttgtgtaataagtagcaagtacactcctccgttatttacctggtgttggtgtgagtcattcatttctctccgtaagtgataatgtgttcgttccaagctactaactttttttttctttttttttttcaaaatcatttacatgctactagttaattagtcatcttcttacaaatcaatatataggcgaacgattttgtgtccagaagtaaaaatcacggattggaatccgttgtacgacaagtaggtcccacgttataatagtttttttttttttaattatttaatttagttgagaaccagttattctaggtttctttaccggttgtacatttatttttttaattaaaaaatgaaaaggtacaattaatttactgtttacgttagttaatgtacgaaaaagtacaacagctttactgttcgtggcagttaattgtacaaatatactgtatgcagtggggccatgttgtcggagtgggattattttggtattttcattcctttatatcatgtatgtaattgtgggattgtagttgagtacattatattacgtaccttgtacattaattgtttctgcatgctgtttagtaaaattaatgtacaaaatatcacataccgagtacgttcatttatatttcgtagtatattgttaagaataatttattataacttatgaaattatgtgttnntatatattgagttttacgttggtgtattgtttttattattttatatataaaaaattaattactatggaaattttaaccttataagattgtatttttttgcctaaaataatttatttgttcgttaattataattttgagattggttnnnnnnnttaccttaaacacgacaaacataacatgaagtatataaatctaga

SEQ ID NO: 167995 - DNA, 638 bp, Cannabis sativa
catttgagacccaggtggactagtactcacatttctccctaatcaaaatgtgaatgtaaaataatcacttagtattcttgtaacgattaaacacaatgtatatgtacaaactaactatattatttcgaacagcatagaaataaaagggttcttacaaaaatattagattttggataaaaatttgtaattttattgttacatggaatttttcacaaaaatattattttttataaaacaaccgtaaaataacaaaacaaaaccattaaaataataagaaaacaactaaaaaaacaaccgtagaacaacagtgaaaacttaatacagtatttttgaagaaaaaaaattgtctcacaataaaaaaaaagttaaaaatttcagtatgtggtataaaaacccccaaaagaaaagtcattcttaattaaaacatcaaaattataggggaaatttttatttttatgattttttttttcaaaaaattgtttttttgggaaaataaaaaaaatgggaaaacaagttgctagttatttttaggataacaaattactttataatgtatttttcttcgtatatttaaactttctttttaattttttttttttttgaaaaaaaaaactatatttttgtacaaattatataaa

SEQ ID NO: 167996 - DNA, 1062 bp, Cannabis sativa
tgttgctttatgttttcttattgaattgagttgagccaataatgtttagaattggccaagtagaatctctcattcaataatttcatatggttacctctttattcattacataatctcatttcactttctttttatttatatttatattatctaaataaaataatttatattgttgtaattctaatttatatgttgtaagatgataataataatgaataaattaatacctctaaaaaggggggggtaaaggaaaagattttttagtacaacaaggaaaagaaaataattagacaaaatagttatatgttttgaaaaaaagataaaatgattggtaaattttaactctctaatttttattatcatgttcatcattgataagtttcatgaataataaacataaatttgacgaataatttgtttagttttagattattgaatttacatttttactttagatttcaaatgtttttctttttctataaagaattcaagtgataaaaaaaattgttcgggtcaacttagccaacctgaacccgcaaacccaaaattatttcacgagttgagttcaagtacaattttttgaatctcaaacataatcaacctgctcaatattctgtcgtaactctaattaatagttaatctttttcagtagagcattgttatgaggtacttatagtatctaacaccacgatgaagtatcactctataattagttaataattttctataatatctattaaactaaaataagtaagacttaatatttattttttttgacgtggtgaacagagtcacacatgattaacaaagtagcaaatcacaatcggcctcctcgtactgagatagctcatcgtctaaccgaagggcatgttttgccaaccatgagctatagaaatcaaatcgcgagccacatgggacaaaactgctcccgaaaatatagacaataaagctataacgtcttcaaacaacaagtaccttctcacaattaaaagttgtcgccagagctagcaaatctgaaaaaacatcgcaacaccaaacaaaaacacatttatattagaataa

SEQ ID NO: 167997 - DNA, 1353 bp, Cannabis sativa
ttgcatgtattatgttatttgaggttggtttaagtgttctggaaggttttgcttggattgggcatgttttgagaatgatttgaattgtttggggaaacatggtgcaaaatggttaaaccgatttgacaggtcatataaaactggttaaccggaacagggataggtttcccgaactgttcaattcgttgattcgtgttattttctgagccttggttgattagtcccttgatacttagggtattgtggtattagttatcaaaaacagaagctttagttggaggtttgagtttcccggattagggttttggcgtgtcgtttacccgtttatgtgattgtgattaaggcatccatcctacacgaggtaagaatatcatagaacatattatataaatgcgaatgtatgtatgtgtgatatatatgcatgcttgttgtgattggtacactaccaacactattacgatagcggtacagagtgcattggtatagtgtacaatatttaaagagtatgttatggtgttaccaacactagtacggaaacgaggtgtgtgtggtacaacacttagtggtactcgagctatgaaacaagctctaccaacactcgtacaataatggtacgtagtgtatgtggtacagtggctgtaccctagtaaagagtattcttacttatctgttaagccttgtggataggtgtatgggcgcctagatgcaagtcggtattatattatttgttatatggttttcttactgagtttgttgactcacagttgctacttccatgtgtaggcaatggaaaggcgaaggcttaataggagtgagctctgagctagggtgatgattgtacatgtcgaggcgacgcgacctcgagtgttcggtctcgggacatctggggttgtattttgtagtcgttgtacgaccaaattttaatatattttgagaatgtttgtaatgtttaaatacgagattctgacttttataaataattatattaaaggttataaagtttagtaatcaaatcaaaagttttaatttgtcacgatttttcaggaaaaattctttggtcatcaaaggtagcacagcaattggaaaattctctctagcctagaacaatgtgtcaaagcatattattgggtaatcatgatttttaaaaagtctttttattgtttgttaaaataataataatagtaataataattataaaatatttattgtgataattttcttcaagtatgaccgtagaatctagaaaaattatatcttaactagatttcttttatttaattaaacataaataaaattaaggtggcgtttggtaacatttttgctttttaattttaaaaacagaaaaataaaagt

SEQ ID NO: 167998 - DNA, 626 bp, Cannabis sativa
ggaaagcaaattagatcactagttgatgacattataagagaaagaaaagattgaagcttttaaatgaaaaaagaaaaacgcccataaagtttatttgacatattgtattagtggatttaactattaatcaaatccctccatcatgatatatttgaaaggggttaaagcttttatttgaaatgggttagcattgcaaaaagttttttatttttttatttttttatgtaccttcaatttcaaagcacactactcttgagtctttaccactacttagtgggtcatatataaacaaaagttaagaggcacttatataaaaatgagacatacataaatcattataacgtaattgtgactaagaaaatgatgtcatttgatcgaaatgtaagtgtatttggtcttcttcaagtcctccccgccagttacgacatgatttaatatataaataaatataataaggtttttagcactatcaattggtatttatccatgaccaaatttcttaattcttattattttgtatttgagtggctccaccttgaagacatactatttcaaattcaaatacatacttttctctagtttttcatccaattttgtttctagaattactctctctctctctctct

SEQ ID NO: 167999 - DNA, 694 bp, Cannabis sativa
caaagaattcaatttttagaaaaactaaaactcagagtgttgtataagtttttgaaattttagatcaattgttactgatgttacttttatcaagctcttatttagtttccatttttgtatattaacaggttctgtcaatgtatatagttattttgagtatttaaaaaaattgaagaacactaagaactgattatttaccactaatatgtacaagttttttgatagataattataactgatattagtttagagctagaaatcaaatatggggttaggctatgaagacttctccttgggtagtgccagtggattaggcttgtaaggtcttatatatatttatatatttatatatatagtggtcttatgcctccataccattttctctgaagtaaatccactttcactattctataaaagctgtaaacttttgtgtcaattctgtggaagttcaaactaacaacattgtggcttacataattcaaagttggtattttagatattcattcaattttgtcatttggggtatgtgagtgtaaatatgtgatgatggttgaactgtattgtaatttgtattagccatataactaaagggaaatttgaaattatatgcatattagggattaaaattggtatcctaatctaaaactatacataatttgtaaaatgggataacttttacttaaacccaatttta

SEQ ID NO: 168000 - DNA, 537 bp, Cannabis sativa
acaacaaatggaaaaaatggagctagaggaacaccgaaggcagagaagattggcgtggattcatcgaacgttgtggatcctagatttgcggtcatgaatggagttcaaggaacaccaacgccggagggaatgatcttagctccaatgaacgatgttatcttcgtcattcgtgattctaactggatttggcacggatcgggtagaactcactattcgcaacgtcaaaatagctataacggtcacgatcgaaggatatgggagcaaagaaagctggcgttcaccagtgccataagtgacggcgatggaaggtacagactggtcactagtggaaggagggaggcctggtcgcgacggatagctgaacacggagcaatggacgtcgacttcggctttgtgactactggttgtagcaaatatatatatacatatatatctacctagttactgctaagaagaatatatagttatgttgtggtcgattgaggactatgaagaagaattgagggaaattttactaactattcatggctttagaaa

SEQ ID NO: 168001 - DNA, 841 bp, Cannabis sativa
ggggacatggacgggaaagacgacgcactgtctcctgtgataactatgttcgtccgtgaccaacactcagggagactggaccacagcatgcataacctcactcaccccgagacaatagttacttatcaagatctcagactaccgcaatgcaatcatatgcccaacaacggcatggatctcaggggccgcaacaatagagaacggtgagcttcatgggggagagttaccattccaactctaggagtcgatctgtgagcgttcaagacaatgcacctcctccatattatgaggaacatcctcaacaccccccacatgacgtaaggagcccaaatcttcgggaccatctgaaccaaaggcgacaacctgatttgagagaccacttgaataaagggtacgcacaaaggaatgcttcttattgagcacagtatgacattcctccacctcaaggaggatatgtgccctagcataatgtgaatgctcctccaccaaccagtcccaatactcctgatccagtgataaatgacccacggattacagcaatagaacaataaattcagcaattattgaacgcccaagggaaagtcaggggatacaaatttgatgaggaacctaagccttttgctccacacatcttggcattgctatcccccaagggttcaagatgcctaccattacaaatatgattgaagtattgacctgggaacccacattagtgatttcaatacattaatgaggacaagccaagtaagtggcgatgtgaagtgcatgttgttcccggtgaccttgacaagagcagcaaaaacatggttcaataaattcaagaagcattcaatcacctctt

SEQ ID NO: 168002 - DNA, 920 bp, Cannabis sativa
aaaataattaattaaaatataccatcttattagttactgaaagatcgatttcattgtggaatttttcgcagacctgaaattaataacaaagaaaaaaaaaatattatgggggaattacttatttaaatattaatatagagcaaaatcaataaccaatagttttgttataataataattggaattatgtacgtaccatttcacagaatctggttttgcaaatatcaaccaataaaggtttataaataaataaattacccttgactacaattttctcaacaggtaaaaatattatatggaaagttcttttgtattcaaccagttgtgtccattgcttaacaacatcaatcatgaataataattttcctcaaagtacttattaatttccaaagaaggaatcatcacctgcatcaccatgcaccaaattaattaataaaaataataataataataatttaactaatttgaatctatacacatgaataattcattatattacattattacttatatattaatagttttttaaaaaatctaattaattattaagcttacttacatagtttgaaatcctttgtatgacaatgctctcatatttttcataataccgatctattgcaaaagaatgaaaatcttttacctcattcgagttgatataatttcgtaaatcattctgtgggtataatatataaataaaaaaaaaaaagatttgtattaacaataaaaataatatttaaaaaattaaaacgaaattaatattagatagataaattgatatacttacgtgtatacaggggcggagccagaatcagaaattaggggggccaaactattttataactttaggtgacaaatgtttgagaaacattttattaacttcataattaaaatttctttcaaaaaaaacttcataattaaaatt

SEQ ID NO: 168003 - DNA, 551 bp, Cannabis sativa
gagctccatggcccatttcaataatctcccaaagtacttcgatttctgtaacacttggcaaagaaggtggtttgcaagtaccttgatggcatgagcttgaaagtatggtcttaacttccgcgaggcgattaacaagcaataggaaagcttctcaatcataggatatattgactccatgcccaataatctgttgcatacataataccctagaagttgtacctttcattcttctcgcactagggtcgcactaatggtatgatttgacaagaccaagtataagtacaatgattctccctcaactggcttggatagaaccggggcttttgcctaatgttcttttaacttctcgaaggcttctgtccactctgtagtccattcaaacttattgcctccacgtaaaacattaaagaattaaatgcattaatcagttgacttggaaacaaatatgctatgggctacaatccttctggttaggctttgaatgtctttatgattttggggggaggcatatgtagaacgacttgaatcttctttggattggctttaattcc

SEQ ID NO: 168004 - DNA, 578 bp, Cannabis sativa
ttaggaagtggtttcttaaagttttggagcagaattcaatgtttgaattggtgttcttcaattgttgccttagtttgaagcaaagtttgagttttagaagtcaagttttgttcaataatagtgaatttgtaattcttgaattatattatgttctgatctatgggataggtttaaaactctttaataagttggtctagaagttttgaaatggtttgggcatgtatggaaggaaagaactcgaaaatttctgagttgggctttctgttgtagaattggtcgacctgttctatgaaccgagtaaccagttgacccagaaaattggtggactagttggtcagttatggggtatctcgattttcatgttttcttgatatttaaggtattgacaccttatttatcaatagagaaactttgaattatgaatttaattatgtcctataagtattttagcgagacacttaccaatttaccgttaatgtgacttgttagagagtactacattgctaatgtgtggaaagataatagaatatataagaggaatgagttactcctcccatcgccaattagttttgagatgg

SEQ ID NO: 168005 - DNA, 586 bp, Cannabis sativa
aatgttctatatcctactatccacctccctagtatatataaatatataaagaaaaatagccttttcttaataatgggcttggacaattgtccctcttgcccataacttgagccgacactgatggtaactaggatctttccatatggacttctttgggactcattctacaaatggtagtgactttgtccatcatcattttacacaattcggcaatgaaccaatagagacccttctttatatcatgtcgtatatttggcatgaccgtaacaatgactatcatggatcttgcactattcttgatgaagttcttgtagagaaagctcttgcctaccttcaggaattccaccatcacactaacaaataaacggtttccaactgaaaagtcgagttttaatttgcaaatgccaataattatactaaatttcaggaaaaaaaaaacattactgtaatagtctgtagcagcagaatgttattctgtcattgttaacacaaacaaaccaaaaataaatagtgcacaatttaaaaaacttgacacaagagaattgtatatgtggtatcagttttctttcaaacactactagtccac

SEQ ID NO: 168006 - DNA, 934 bp, Cannabis sativa
atcagattaggaaattggttatggagtcacttcattaaaatgcatagacagatatacacacacaaacttataattgattttttctgattgggattcttcttccattctcttcttgttaatgtgagttttccatctgaatttaaaatggtaaactgaaatatcagaaactaatctcgtttggcaaatctatgttttcggttgatgcagaaacataagctgaagaaaaattcattggacgaacaacaacaccctcaatggcgaggaaggatctggttagagtaactttgtgaattttgagagttagaactgcgtaaaggttttaaatttttaaatttttttctctgaagaataatgggggcaatagacccgagttgataaaacagtataaaagtttggtggtcggtggttataacgtcgaaaaaattgtaggctaggcagctcgatgtcatcgctaagctttttacaacatttttacatgttaattttgcagtgtagtattcttccttgtgatgtattcttcctttttctcttttttccccttcttgtgaagaagttgtgggattatttatggtgtcatttttagagtacaattattatcactatttctcaatctcttgcatgatatttcctagtgtttttactccttacatacattcattctcttaaggactatagcaattgccttgttaagaagaagactaaaatattataacaatagtcttatttaaggagagattcgaacttgagatcttctgaaagaaaatcacatacaagcacttgaattacaagagtcgagagtctttaaatatttacgagtgtcgatataataacttgttgtagggttagaatctttgttagtagtctcaggcgatggtgaaggttgcttttagcccgtgggggatctaattataggaattgtaatagatagggcgtc

SEQ ID NO: 168007 - DNA, 593 bp, Cannabis sativa
  modified_base (489)..(492): a, c, t, g, unknown or other
atgaaccacttagaatcatcaactgtagttttgtgtagagctaaagggtctaatagatagcaagtccttaaataccctataaggggtaaaatggacatgtttggggcttataatactagtggtggactatgatttaataggtaaattcaaagttattagggtgctaccatgcatgtgtctcaaatattattaactaaatcgatcatatcattatggtcttaattacacaataagtactataccctgcatataaatataccgtcatccttatataataataacactgtgtgagtaataattaattatgtaagttcatataaaatattctaacatttttttacttggactacataattaaactaacaagtattcacgaaacaatagtgtgtgtacgcaataaaaaatctcaagaaacacaaatatatgtaaaccaattatgcatcatattgtaacgataagatacaaatatgttatagtgagatttctctnnnntagaaactcgagaccagacccctctttgaaggacatgtgtatccagacttccagtgaaggctgaaatgtccaggagaggcttctcgaagtttagacctcgc

SEQ ID NO: 168008 - DNA, 630 bp, Cannabis sativa
accagtcactcgaatcccaatcgaagatgcacttgtaggaatcacaggggagacagaagaagttgacaatgctcattcgactgagggattgaatttgattgctgagatggtcaaagctcaggatctaatcgaagcaaaggagttgaaccgatctgtcaaaagtcgatcgcagagttgggtagaggaggtagaagatgagcaaatgatgaattcaaatgttcaacaatcagcggaatcagctaggaggatctgggagacgtttacgaaggaaaaaactaataatcgagatcaacggcttcttttcacaaaaccaatgattagagatggaataaaaattgctcaggtagatctagaggaggtccgagaagagaaaaattgctggaaatcaacagttatatgcaaggtattgggagctaatttacccatttactatattcgaaggctttgttaaaagggtctgggccatcttggagttattcaggttagtaaactgtaaatgagattaatcatggtgcggtttaatgatgatcaagcaactcaagatcaggtagtggaggcaggaatggttcaattcgatcgaaaaccgattatagtccgtccttggtctgcggattcaaacacaatgaatct

SEQ ID NO: 168009 - DNA, 1340 bp, Cannabis sativa
ggagtgggaggcagccgcaaccagggcgacacaggaaaataatgcgcaaaaccaacatgttcctggagtgaggagaccataaggcagatcttgcagctcatgaactagcaggcaggagacggctcaggaggaccctcagaacgcttaggaagaacaacctgggcagggtcccccatgaaaatgaacaaccaaatgatcaaccggagtcttctcacagaaatgagaacaaaaggcaacccaagactagggaacaagaaatccctcgtgagaatgagggtaatcttgggactcaacctagaacaggtgggttgccatcgagacatcgtcaacgtccttctcgaatcaatagggaaggggcacgtacaaaccctagtagggggcatgcaacaacccctacccaagggagaaggccagtatgtgacaaggcgattgccagctcaagacgcacaagaacctgtagtcgatcaacacgaggaggggacggaactcattacagtattgatcgagagaatacaggcactagtagaactgaatgttactcaaggacgaggtccaagagtaggacgaggtccgtgagtaactatgaccagcaaccattggatcttcataatcacttgaaccaaaaaaacctaaccttcgccaacaacttaatcaaaggcaagaagatcctatccaattgagaattatatagttggaggacaaattcaggaggtataaagatggagaatatggaaaactgtctggatacgactcggacgaagagctcgagcctttccatctagacattatgaatactgaattccccagggattcaagaaccctcacgtctcgtgatacgatgggactactgatctgaactcacacttgaataattttaatactatcatgcaagagagcaatgttacaaataatttacgctctattttattcccaacttcgctagttagagcagcgagtagctggtttaaaaaatttacccatcatttaatcacctcttgcgaacagttgtctaaggacttcaagaaaaagttccaggcagtaagggataggcgacctaaggcgtcctccctcactaacataaagccgcagctgggcaagacgcttaagggtttattaagtcattttagcacagctactgcgagggttagaaacttgcatgatagtacccagcttactactcttcaggtagggatcacgactgatcttgccatagctggaggagagttatgggatgacctgcagggttgcccagtgaaatacatcagcgagttcaatgaaagagctcaagtttttgttcgaaaagatgaagtaagaaaagagatgaagttgttaaagactgg

SEQ ID NO: 168010 - DNA, 872 bp, Cannabis sativa
aatattaataccggcggatatagagtattaccggcggatattaaatccgcgtctaatactttgtgcgggatttcgaccgctcaaaatttgaaatgactaataccggcagattattagaggcgggttttgccggtattagtcaagaattctgactgtttttttataatcggcggaacccctattaataccgacaggtcccactggtaatgaaacactatataataccaacccctaactcagaaaacaatttctattttccccccacaaaattcaccctcgaccctcctcctcctccgcccatcctccgaccctcctcttctccgcccatttctccaccgtcaaccgcgctattctaccgctattttctttgacaggtaatatttttttcactattttttttttcatctctccctttcattttttttttgtatagttatttattttttgtccatgcttgaagtattgggagagatactctgctcggaacactaacgaaaagtgaaaacgcgggaagagtaaaaagcttggccagaaattaacaggtttttctttttttaattattatttttattagatttattttttcatctttgaatgtttagcgattggtatgttgcatatatatatatatgtgtatgtgtaaatatatgtgattgatactgtataaatataatattatttatgtgtgtatattatatgtatatatgtgttttatgtaaatgtataatttttgaacaatgtatatatattatatatatatatatattatatattcatataatattttgcttaaaaattttaaatgtataaatttgtaaaaattttgattttaagtgtatgtagtaataaatgtattttataggattataatt

SEQ ID NO: 168011 - DNA, 1124 bp, Cannabis sativa
tcaatgaacatgtaattggagatgttctcagttaaagtagcctatggtgtggagaataattggagatttgctccagctaaagagatttggaagtggatttgggatgctgggattcatccaagaacctcagtaatgctgtggagagttataaatgagactattcctaccaagaataggctgcatttcatcagtgataaaacctgtagtttatgtggtgtacttgaagaggaagatgcattacatgtgttctgcaattgcgagttttccaaagccatctaatttggaggaaagttaccaataagaatcgatgtggttcctggagaggacttgatctctttgattgaaaacctggtacccatattgtcaagtgaggttagtaggaaagatcttctcacttatgtgggctgcatcttttctgagatatggcaacaaagaaatgaactttgcatcaagaacaaccctccaaatcctctctctaccttggctaaacttgagattagccttatggaattccaactctcgaattcttccatcaggggagttcactatgattctactgcttcagtagtgaggttggaaaatgcagagttgggaccttgtgacactcaggtctaccatgcactcttcagagatgcttcgtgggtgcggggagatgctggtattgctgcaattgcagtagattactccactggtaactggtttgtcaaggcccagaaagatcagttgctttcagctttggaagctgagttcaatgcgatattccttgctctgtcctgggcagtggagctaggatggcaagaagtgcatattttctctgattcaaagactgcagttcaatgcttaaatgcaaggaaagggaccccagattggaaggtgtctagcatattttatgttaggttttatgtaaccaaagagatcccgtttgttcgtttcttttttatgaactgtagttttaatactttggctgatagtgtagctaaaaattctaggatcgctagcgatttagctgctttgtatcaaggggagggtaattcccttgtgattctcatcaactttcttaattaatcaacatgtagttctttcaaaaaaaaaaaaaaatcaattctcaaagcttcatctatata

SEQ ID NO: 168012 - DNA, 844 bp, Cannabis sativa
  modified_base (805)..(805): a, c, t, g, unknown or other
tctcaaaactacaaaaaccacaccgctaaaatgtggtgtgatgcagtgtgttagagataggttgtagtacccttgtttgttaataactaatttagttggttaaattaattagctttcttgttactatgctactctgtgtaattacttttagctttcttttttagttgattcatttagcttgtataaataggattctctctgtaattcttatcagactgaaagtttcaaattacctaattactacgattgattaccaagtttcaatttaatccgattatcaattcatttaaccaattcaagaattaattgatcaatttcaaacagatagagacagaagatttacaagtttcccctgtatcgaaaacacatttcgattgggtagtgcttgggttctgcaaactagggtaaataactctactaaaatgatttgcaaatttacaatttctagtttgtacaatcttgcaagatccttacagaagtaattaccccaaacagccaaaacccttggcatctcaagcaagatcctcttgcttcaaatcattgaactcccttatgaaagtctcgatctgaactccttcagatttcatggtgaggatgcaactgaaatcccttcagtctgaactcagcaactttcgatcttcatacacaaagttttgagctttaacctgtaaaacaaagaaagatagaatacaaaacaacgaagcttgacctaaataatcttcgatcaaaaagttagttaacactgaaaaacagtaacaaatatttatactaagaagtatataagtgttgggaatattttaccagnatctagatttactaataagtatgtgttgggttttatgcc

SEQ ID NO: 168013 - DNA, 1022 bp, Cannabis sativa
  modified_base (993)..(996): a, c, t, g, unknown or other
aaaagcctcggatatggcggacgagccaacacggtggcctggcgaggattgttcgatgagcttttgtttgagtgggattagggtttgggtcgggtcagtgaagatcagcttggggattgggagaaggccatgctcgaatggctcccgccgcgggtgaatcagagaggtcgggtccttcggaatcgacgtcgtagtagaggcctcaacgaggtcgctcatggcttctagagagagactctatggagttttggcttagagagagaaatgatttgtgtgagttacagatcttccagaaagaataatgagaaaaagaggagaagggaggaagaggaagttggggaggaatccggtgtaattgaacccatcgaagttgactacgtggccgaattgtattcgatgctttggctcttctgaatttcttatgtagaggcttcacctgaaatccgtgaaaaatagctcctgtttctttattttttattgttttgaaaaagggtaattttctttcaagaaggttttttttttatttttttacccttttggatcattaattgctatttatgatattaagaaatattggataagtggcaattatttaatgagcgttaaaaagaaaggaaaaaaattaaaagaaataatatagaatagagaaagaaatgaaaaatgagaaaagacaaaagacaaagaaaataagagggtgaatgagaatttttaccgtgtattccaatggattaatttggtgattgtggtgtagttttttctaaatgaaaaggtctccaatattattcttgaaaaattgtttacttgcggaacccaatcctagaaagctttcttgtccttccggaaagggtcttcaggaaagctagttgttcttcttggaagggagtttcagatagctaattgttcttcttggaaggctcccttgtccttccggaaaagggcttcaggaataactagcctttatttgggatggagtttttgttgggttttatgccnnnnataaaactctttacaatctgattagt

SEQ ID NO: 168014 - DNA, 639 bp, Cannabis sativa
agattttcattaactaaatatataagtattttacgtaataaatttagtataaaatttaattacaataataaatgaacagtagatattttacgtggttttgtagttaaaatctacatgctccacgagttcttcttatttgaaatatttttttgaatacagggtacaaaacttaataaatgtaaataataacttttctctcaaatttttgccgtcgtttttttcttagattctggtcctatttataggtatataagatagcagttattttcattaggatccaatcatttacaatttctcatgaaatgtgcacattctctacgtttcatttttatgcacatgagataattttaaataactactcaaccactcttttgtctttatccttaaacaagcatcttcacatattttttcaataaaaaaaatacaaacttaataatatcttttttattttgcttgccaaaataatctataatttaattacataatgtgaaagttcttggtcattgctgagaagaaagaaagaaagaaagaaacagagaataaaagatgaattgaagaaagaatgaatttattacaccattgttagagagagcaagtatatatatatacaagagcaacaactcattaacaaaccaagaa

SEQ ID NO: 168015 - DNA, 741 bp, Cannabis sativa
  modified_base (684)..(696): a, c, t, g, unknown or other
tgtaaaaatatgatttttattttttgaaaaagcttattttacagaaaaattgatgaaaaaattaataaatatggaaaaatcaaataagagtaaccagttactataaggagtaactaggtaccttatgctgttttttttccataatttttaatttttcttctaaaattttctcataaaataatttttggagaaaaaaaattatatttttataaacttatactttaaaaatcataaaaataaaaattctccgaaaaaataatacctgttctggaaaatcgccattttccaattgagaattgataatgagctttgcagcaagatgaagaggtgttgggtctctttcagcttgtccagcatgaatcaaagccatcatagccaatgaagtttgtactaaatttgatctattttctggcaatgctacatattcctataatatttatagactcacaattatataaaaatgaattatgattaaaaaaaagtacttatttatacactatatatgtaaatttttacaaaaaaaatagtaatttatgtaaatttttcaagaaaaaatagtaatttatgtaaatttttcaagaaaaaatacaatgacaaggcagaacccaataacgtcagtgactcggcccattttctattagtattagtgctgacgtgaattgtttgggaaatttacatggtatnnnnnnnnnnnnnatttttttacaaaaatactgtccggcggtattttttactttttta

SEQ ID NO: 168016 - DNA, 1968 bp, Cannabis sativa
  modified_base (1892)..(1906): a, c, t, g, unknown or other
ctctctctctatctatctatctatgtatcttgtcgacgatcttctcttcttggcctctatctctttcttcgcggtttgttagagatagcagaggccaaaaggtggctcgttgccatcggaatcagaacctcgaaaccaagaaaagcttatatctcccatttttgtttgtcaaagaccatcacagaacgtggtggagcctcactggagctgagtctcttcgtcgctcatccctctctctccctccaggtaaaacttctctttcccactctctccattcatccctctcgatcccaatctctctctctctctctcatttcattatttttttcaagtattcccaacgttcgtggctactccgtgattcagtcacaatattccccatctccggcttctaggagctggcttcggtgtcgatctaatgttttttttatgttaaacttcaattgtaatcattggttaagaaaatatttttttgggattatttgtattgataagtagatttttggataaacatgtattattaagtaattgttttagtaatattgtttttgttaatgatattttttagtgcattaatttttataattgttgatttcatttttagccaacgacactaagtcaattaaagagataagaataatagataataagtaaaataattaagaaaattagaacacaagatttatagaggttcggccccgagattatggtaatagcctactcccctttttcttgtattacttcaaagaattaatatgattacaaggagctggccaagtgagttttttaataattctcaggaaaagcttacaattattttacagcataagagctctcgtgaaaatttatgattttagatccctgtacaatggaatatggatccactatttatagggaaaaaaagatacaataagtaggtttcctaaaacaaataaagctaaaaaggaaaatgttatcctaaattttatccaggtgatgtagcacattttttaggtgacacgtatcgtgattccaagacatgggtggaagaatggtgtaccaagtgctcgctcaggataaacagcttgctagacgcaacaataaataagcaaagtaaagcttcttgtatggaatgaacgaagttaacctggacaggaagaaacagctagcgcttcacgcaatctgaccaaagaaaaatgcatgaagagaactcattaaataaagtttttcattttatataatcaaatctctattttagaggatttccatatgtaaatatcacagtttaggaaaataattaatttcctatttttattgtttgtcaacttttgaggaaccattttccattgtaattatccccctataaataatagagccattccattattgagggacaaaaaaaattatattttcaagagagctattacgttgtttaaatatctgtaaaagctttgagagagatcaagttgttcttgcttctcttctcacaagtaaaatacaatcagaaagaggattagcctattaccaaataaatggtgctgaacctctataaaatttagtgttcttagtttatgttatatttttaaacatattatcattgaatttaattaattctaaattgctttcaagactcggtgtcattggccaaaagcgtggtcaatattttggtattttcattgagagctaaactcaagagtacaattggattgatctcattcagttcaaatcacaaatggctgtaacaactcgaaggaatcaggctactgattctactaatcctatggtgactaatccaattgtttaaactcttgtaaatttgagaaatccccatgctagtgatctgaacagaacctctcttggaaccgttgttactctaggtactcaaaatactagtgttgggttttgtgccctannnnnnnnnnnnnnnaatataatcagatttacttactaagaaagattagaaatgacattttatgttgcatggttcac

SEQ ID NO: 168017 - DNA, 809 bp, Cannabis sativa
ataatataaattagtcgtgataggtttcatgattttttttatctttctaaatatttttggaacttctttttaagaaggtaattttatataacctgaactgttttagtttatggagaaggtaatattttcttttctatttgtgatttttttttaataatttcaacttaatatatgaaaggactttgataagattagctaaatagattcaagaatataacatagttggaccatagcagagcaagtactatcttcaatgcatgcatactgtttattcatttgtgaactttcaaggatgagtaaaaatttagttgaaacaaaacttggttaaaagcttagctattgaaagtaatgccattagaaatgcctaatgttgattagatttttagccaaccgatgtggagtcgtaataaatgattgctttatcagtatccccaaaatggggatcaatgccttcgatcccgttttgggcgcgagtcctcattattgagaactactcgttgtagctttgagggatttagatgctttctccctagttatggataggttgtaacactctcatgctactagttgattatccttcaggtagccaattccacccttggtagggaatttgacgaggaggtgaaagatggaaacgactgcctttagatcatacagggttggacaaccaattaagacgttgtagggtgatactatatccaataccacgaataatgccatgacaatgacactcttgggggctactcccatcgtcaatggtagcttaatgagcccagccagtgctgttgcgatatttttgcacacgcaag

SEQ ID NO: 168018 - DNA, 652 bp, Cannabis sativa
ctggacatacattgtttggccagacatagttgatactatcccgtgggtcgaccaagtactgctgcctttggcattcctataaccacttttgccgtaactttttctaggcataccaaccaatcaccgtccagggataggatgatggtctacactaaacaaataatgcagagaattgcctctactgatcctcacgtggcaccgcttgccacgatgtcgagcgctgaataggcctgacttactgctgaggaggaggataacaaaggggacgttgaagtcaaagagatggaggaccagggcaaggtccgtcttgccagtccatctgaagccgaggaggagggagttgcttggccattgcgctttggaggctacaatgaagcaggaaaaccgttgtctgaggatggtgatgtcttggtagagggtgatgactacgtcactgaggagtacgtcgaggtggttcctcaaagaaggcaaggtgccttaggggctcgatgggtgtctcctccatctatagtaaccaaagctaagatgaggagtttggagaaggatggatacctgggacgtgtcgagtgctttttcccttctccaaatcaccgggcaactagtccaagacagggatactgtgcttggtcaggtgcccatactaagtaggatg

SEQ ID NO: 168019 - DNA, 1311 bp, Cannabis sativa
agttttttgtaactatattagtattgatgctcaaaataaacaaataaaaatgttctttgagctttacagatctgccgtgttgaggacattcttgtcagtggccttgtcaggggaagtgtcattcacatccacagggcaaggactgtaattattggttctactggtctgattacagcatctaagctaggtaataagaatataaaccaaacatacagtaattgcatattttcagtttcttattataaggtaaccttctttttcaggatgtagtgaaggtattggaaagggaaactattcaaatggagctggaagcggggccgggcatggtggaagagggggctctgggtattacaatggtaggataagcaatggcggcaataaatatggcaatgctgaccttccatgtgaattaggaagtggagctgagggacctgaccattcgtttaacaatgttgttggtgggggaatgatcggtaatgttctctatacttctcacttgcccattctagaatcaatgtcatttatgttgtaatgtacttataattaagtgagaatcggaaataaatgaatgtaaactaattgaaattggtaggggatgtgtcaggctaaagttagggaagcatgtggatctaaaagacaaacaaaaaattaaatgacttagaaacttaagaaccatgacaaaggccttattaggttcttttgtgaatatgtgccggtaataatcaaagtaagagtcttgagtggctgcctatacaagagcactctcatcagcttgtctattctatcattcaaaatacatcaccaaaatctcactttctctatttttttacctttaacttttacattacaccatacatcaacttctttaaaatacatcatcaaaatcccactttttttccaaaatttaatatattttattcatttcaaatatataatattaatgtatatacatatccacattaaaaggaaatgttaaaacctaaaacaattaatgaaatatgtttagaacaataaatagtattctataaatgtagagcagaaatagtaaattttaaagaggtttcaaaatgaaggactttagaacatcttatgtagtgtttttagtgtggttcttcaaatatttaaaaaatctctattttatagcatttgatgtgagtgttctaaaatgttaatcatttttatttgtgttaattgatttatgtttctcatgttttagttatattctacttcatttttatttactttaactttttttttattatttttccctctcttttctttttttatttcttttttgattttcttcttttc

SEQ ID NO: 168020 - DNA, 691 bp, Cannabis sativa
agggacatgaattggttctgaaactggaaccaaatgtaaagggaaatgatctgaagtggacacttcaaggttatatagcttagccaatggaaacttaccaatccaaccttgagaaacaagggctctgtcaagtctagcttccacccaagaatccgtccctctaccacgtttccatgtataaggatacccattcaactccatatcatacaactcacactcatccaaagtatcacaaaaaccctcaatcaaccaattcaggtaaagattacctccgtttttatcttgctgagaagttacattgttcatatcccccactatacaccacgacaagtcactttccatcttcaaagaccgaattaaatcccaagtacgcttcctcaagcttcgattaggttcaccatataacccagtcaacctccactccccatggtcacggctttggacagaaacatcaatgtaattagaaccaaaccttagtagttgaacctcctcagcatcacgccaaagtaaagccacccctccactctttccttgagcatccacactgaacgcaccttcgaacccaatagacagccgaagcttcttaatcgccttttttttggccaacgtctcacaaagaaacaacacaatgggcttcttttggataacaacatcctttatgaattggatagtccatgggttcccaagccca

SEQ ID NO: 168021 - DNA, 1343 bp, Cannabis sativa
ttgtcattatgccaagcaaagaaaatttccattcatatctattcacattattgatgaaagttgttttgatcttattcatgttgacatttggggaccatatatcaccatgacaattaaggaatacaagtatttttgtcaccattgttgatgattgttccacgtacacttagattaatctaattaaacaaaaatctgatgcacaaaatgctattcctcaattcataaaactttttcaaaaccagtttaaaaaaaccttaaagctgccaagtctgataatgccaaggaattgcaatttaaagaattgtttagtgaccttgggattattcattatcactcttgtgtccaaagacctcaacacaattttgttgttgagaggaataaaccaacatttactcaatgttgctagagccttgctatttcagtcacacataccactggtctattggggagattgtgttgctactgcagcctatctcattaataaaacacctaccaaacctaaagaacaagtcactatttgacatactttattccaaaccaccaacctatgagaacttaaaagcttttggatgtctaccttatgcctccactctaagccaatttagatctaagtttgctcctaggtctgttctctgcatttttcttggataccctgtttgttgaaagcctatatattacttgatttgaacacaaacatgacatttaattccagagatgtctacttctatgaacatatttttccttttgttcatactggtgtgattccctcatcaatctttcttctctgaattttctcatacagtaggggcaaatacttcccaggatgcaagtacttctcaacctcttaatgaacctgccatgtctagtcattctgatgtttttactactcataatctctctcctcatacaagattagggagacaagttacaaaaccctcttacctaaatgaatataattgttatttggccactaacaacaatgttgcatcttctcacgcctcttttgttactaatcatcccttgtctcagctacttaggtacgtatcacaggttgtctcctgcccacagagcaactattctagctatatcaagccattttgaactagcaaccttcagtcaagcccacgaaatacctaaatgggagaatgctatggatactaaaatagaagctttggagaaaaatcacacttggatatttgtctctttgcctgttgatcaacatgtcattggctgcaaatgggtctataagatcaaaataaatgataatgggatcgtaaagagatttaaggccaagttagttgccaagggttacaaccaacaagaggggattgattccacataca

SEQ ID NO: 168022 - DNA, 678 bp, Cannabis sativa
tatatatatatgcatttattgtgtattggttacttttacaaatcctataagactacttttatattttctttctcttcctggtagataaatatatacatattaatgaaaagtctttcagaatatacatattaactttctttcttacacattaaagaaaataactcatatgataaagcctccgaaattaatcgtcaattttgaaaaaaaaaaagacaattgagagcattaaaaggcattggagccaatgaaacttacaaaaaggtagcatttgtaatatggaatttatactcttggtgtgtgaaagaggactttttttttgttttgtttttttagctagaaagagaaaatttttttaaagcaccctctaagtaaagatagtaccaatggatatggaaaaaaaagtgtcatgcctcatgtgaaagatggcacacgacatgatattttgggaccaaaataaagttaaacttttatatggtaatgtgctatgttagtttttatgaaagtcttaataaaatgtatagatgctcagattagcatgtaaaatatgtgttctcagtttgtactttctaaaaggaaaaaaaaagtctataataagttataaagatacaggattaatttaggggtgttcatccaatccaatccgcactattttgcttatagtgcatccgatccgcacta

SEQ ID NO: 168023 - DNA, 578 bp, Cannabis sativa
attttttcattacatgcataataaatttaattatatacatacatgcatgcatatataataagattaattatatttagcggagtgttaattatagcctcttactaaaatctcttagtcaatcttctattatatttagttaatttttacgctcaaaatcatatgtcataatattttttcaaatttctttttaatgatatttgctacaaccatgattattttttgaaaaattctaaatagtttacattacaaaaaaagaggtcctgatattctagtcaattatgcatattcaaaaaactttaaatttatttttggcaatataaactatttaaaaaaaattaaaaatttataaaaataatattataagtatcacgaataccgttataaaaaagaaatatttcgagaaaagcacaaaaatttactaagaaactttaattaaaggttgacaagtaatagaattcatcgtaattatatttatcataaattaatatacctatacatatatataatgggaccggatttcgtcccgttactgtacggacacggatttcaatccgtgatgtactgtaaccgttggatgg

SEQ ID NO: 168024 - DNA, 1794 bp, Cannabis sativa
aaaaagaagaatagttttcaatcttccaaaccaaggacacatgattacgagatcgaccgccactcttgagtcactatccacgatgatgaatttgtgccccttaagctttgtcgtttcaagagctaaacaacacgcaactgcctcgccacaacaagcatcagataagtccaaacttgctgtattagcccaaactacctcaccagaatgatttttagccaccaccgcaatgcaagagctttctgatcccacattaacatcacaattaagttttagccaatcctgaggaggaggccaccaaacatctctttggatcgaggaagcagcagggaggagaggaccttgcaaatttgcataagaatagtggataacatcaatacattggttcacattagaatgataattattgtgcacattttcattcctgacgcgccaaattgtatccaccacgaccgaagcatataaaaagacttcatctgcattgatgcccttactttttaagctccatatgaacttgacccagtcctaaacacggaaaccagagtctgacaccaaaaaaataccccacggagaagagcaccaaaggtggaaagccaagttgtacttaagaaataattgttcagttgattcctcctccatcccacaaattgggtagttaacatcatccacacggaatctctaaattgagaatggcccttagaggcagtgcattagaaaggatactctaccaaagcacgttatgcctctccaagattctaccattccagagcttgttccaaagaggtggggacacctcgcaatgagggactcttttaaaagcttgaataaggaggccaattttcacaagaatagcccattatgctctttagtccatatccatttttcctttccttgaccaattggatttcctcctttcaaaatagcagagatggtatcattgtcaaaaatacactttaatttctataaatcctatttcccattgactgataaaaggtcaggcaccttgtgtaaacccttagcaggccgcccattagaaacagggtaaaaggatctgccatgagccacccacggatcatcctaaattcttgtatccctacgatcagacacccttttacaagctccttctcttaagatctctttcacttttatcacatttttccagatacaggaatctaagtcattgtagttgcaattaagcagcttctttcctctgagatacttggctttcaagatcttacaataaagagatcaattatcatttagcaagttccatccccacttggccaggaagacctgattcatctcattctctttcctaaaaccaagtccccctagacttggggagacacaatttctcccatgccttcaggtggattctatggtttcctttctcagatccctaccaaaaatcctggaccaagttgtcaatcctggcaataagacggttagagagcttggtagtttgcattgtgtacaaaggcatcaaaagccccattgattttatcaaagtagctcttcctactttcaaaagcacttttgctttctacccttccagctttgaagtgacgctatctagaataaatttgaaatctgcatctttttgccttgatcggaacaaagggagccccaaatatttcacattgccttatgttccctaatccccaactcatcttaaatgcgcttcttcagaactttcgatgtattgttgctgaaaaagatttacatttttagcttgttgacctgctgcccaaaccaatcacaaaaattctcaaagcaaagccagaatcctttagcctc

SEQ ID NO: 168025 - DNA, 578 bp, Cannabis sativa
aacaagagtaggctcttctttgattaattccttggtctaagggtatatcaacttctttgttacgtaatcaggtcaattagcaattcttactgcaggttctcagggatggctaatggcaagcatttagaacatgatgatttgtaaatcaatcattgattacagattgtgatattattgccttttgttaagtaatccttttaaggcctagcatattctttttattattagacttactttagaagagtactttacgatgattggtatcaatatatgaatgtccaatattgttctgtacagtcagcttttactggagagtctctaccagtcaccaagagaacaggtgatgaggtgctctctggttcaacctgcaagcaagcatggagaaattgaagctgctgttatagcaactggagtaattgattgtataattaatttttttaaaagaaaggggagaaatttttttttgggcccctgcactaggtgggccctaggcacaggcctagcacgcctatgctcagggtggaccgtgagaacaagtcattgaggagaagaaggaggaggtagaaatctcggtacta

SEQ ID NO: 168026 - DNA, 1155 bp, Cannabis sativa
cagctccgatcgcgccggctatcagaccagccgtgattttgcgggtcaagggcatgttccccgtgttgggatcggtccacttctgcttcaagatatcgtacagacccatacgtgtggtggagtagagagtctgcctgagaacagtagcggagacaccagagaacaaacccgccattccttcttgctgcacaatgcgaactccgacggcgattgggccgacgcgcaccggcggcgcgggaggcggagttgggatacggacggatccagcagctgagttggggtgaaaagaaagagccggtcggagattttgaaccgccgccgggttgggggtgacggactcgccctggagctgcatacggaccttgacgaggtcgattgggtgggttgaacagccggcaacgatcgaagctatgcctccttcaacaaatcctttgacacccattgttgagtaatttgatttttttcaagaatcgaattaaaaaaattgaggctttaaggtgaatacaaaagaatgggtaacaagaattaatatttataattgttttgtgtttatttaaagaataataaaaagaatgagaagaaatattggggaaagtagatggatcaggaagaccagtaggaattagggttcatctcactggagaccaggagatgagaatggagaccgaaagctatggtggaagagtgaggaacgttagacctttgagacataagctgtaagggtttgtttgggagagaataggaagtaacggccactcgcaatttatagcaaagggaaagtgaaggaaaggaaacaaggtcgaaactcgagagggagactccttacgcgaaccccaccctactaaactacaatacaattttctctctcttctggggtccccttctttcctttccttttttttttaatacatttctttccttttcctttattaaatataacgattattttgtaagaaaaaataattaataatttccttttttttttgacttttctttttgcacttttaaaatcctgtgaggaatgctgcatataccttcatttgtgagcagccaatcatatctaaaggcaaataacctaagtggtcaggtattttcaactaaccctcaattctaaaattttggtagtaaaacctcctaaacttagcttctgttaac

SEQ ID NO: 168027 - DNA, 1288 bp, Cannabis sativa
aaaaactaattcttcaaacaacttcgcgtgcacaaattcatccttaacaataacatcctactgttggaaataaaaaactaccattagtggaagaaatcaaaatacttactgtatcaatatttcgtgaacaagcgtgaagattgatgagacaaattttccaaaagtggattgacaagtatgattcttcaaagagataaacgctgctttttcttttgattattccggcatctttgctttctttttattatatttgggggcaaaaacttaataattgtgtaaaatgttacgcatgtgaaccaaatccaataattatttaataagttgataaataaaagacaaaaaattaactaaatccgaagtaaaaatacatataattccgttaccaaattcgataacaaataagttggtacagagtctaaattaaaacaacgttcaagatataaaatagaagtcctaacaaaactgtgaccaaccctatttgttgatcgtttaacaaaataaattgaaacattagacaactgaactcacacaataaatttttacaatcttgaataatactactgaacaaaaacaacatgacaatagaacttcgtaaagcttgtgccacgtgaggcaatcggtctccacatgcactcccgaccaacatttttctttctaagcgcctccttgacccctaaagacttagcaataacagggtcaatgacaccatggttgaacaaagaacacccctctaagaacagacctttgtcatctctagccaccaaatcgatcacatggctatgacctccttcaaagattgttgcgtccacattgaccttgattctattaactggtggaactgtccaacgctcagctctgtcacttgcctgaaaaccagaccccgacgactctaaactagagttttgagcatttctctattgatcaagatgacctttagcgtaagcaacaacattgtcagccgaaaaacacttaccatttcaaacaagattgtttcgagccccccaaacaacccaacaaatagtgacaaacaagaacttctgcttgagatccaagatcttaaaacaattcatacatcaattaagaaaatatgtaccaattgtacccacagttccaatccccgccctattccataccaactatacggtctgacacgtaacaaggttgtgcaaaatagtctattcagcacagtagaaaagaggacaaagggaagaaacatcaacatgtttagtacagtgtcaatgttggaagacaagccatacatattagaatatttctaattaaggaaata

SEQ ID NO: 168028 - DNA, 609 bp, Cannabis sativa
agtcaaaaaaaaaaaattagaattgcacaacattattataattgcatattttcacctcttttcttgattaaacaattgcatctttttcttgtaaaaaaatggcacctccgtcttcccttgtaaaaaaaatggcacctttccatattgtaagaattggggtatgattaatgagttttatctcaaatttaattagcacattcatcatatatatagtattttatttccacacattaataatgtaagactaactctaatacatattgacaaaccatttttttgctcttcataattatttaatgaatagcaatatactcttaagtaaaaattttacatttagaatattaaaataaatacaaaatataaattcacctatgtcgaatttgtagcataagagtttattaatttaagtttaacgattaaagaataatctcttaactagaatccttttgtttaaaagatatacattttgattcaaattacgatgatatatataatttgaaataatgtgaggaaatttaaggtgaatttgaaattgcgactgaactcaataaatttaattaaccgagctacctacatactctctttatgaaggatcaagccacttgtagt

SEQ ID NO: 168029 - DNA, 573 bp, Cannabis sativa
aagaaaaactatacacgtgcaaatacacgtggtatactcacctagttttctaaatacttcatctaggtggacactataaacatccgggaacacccttcacatcatatgaacaaagagagtatgtggagagtatgtgggtttaattatatgagctctataagctagcaaatactactactaattatatagatataaatggttataactttgtaactaacaaatattaaagaagtagtcattatcaaacataagtaaaaatatttatttcacccaactgatgtcatagaggatcaacaaggaaagttggatccctactggccgcagtagcctactctgctccaagacgacagtaagtgtcgctggtttgctccagaatgtctactacgaatggagtcagatcgatgtcgaccttggtctaaagccttttgaaagccattgaaccatactgattcaattcaaccaaattataaaaattggatatccaattataattggattagattggatattaaaaattagattttaattagatttgatcgattattggatgtcaatctcaaaattcaattaaaa

SEQ ID NO: 168030 - DNA, 816 bp, Cannabis sativa
aaaagctggactttttcaaaaaccgtcgtctctttttggtatgattagattatccttctgattttcctttacttctttcacattgaagattactgtttatctgactatcttatcttgttttctttcaagataactcaagtgatgaaaacatgaatgaggcgggaccacctaactctatgcaaccttcagttgttgctggtgttgcttatggcggctatgcacgaaaggtcggtttgatcttattgctttcattttcctattaatatgcttagatttgagttacaatgtccacagctttgttcagattgttgggagaatcttaagtagaatgcaatctcaacaaggtggtgctcatatagaggaacatccagaccatctacttcaagcacttaaagaagccctttctttagttggaactgtcaaatattatgattcctcccaacaacttacaagataggttttatttcttctattaatatagtcatcaactacaatggtcaagatacatgcgctggaatatccaccaactatgtaagctcattatcaatcataaatacatgtttcattagtcaaagattagtactattgttgcaaaaacattgtatatgtgctagaaatacacttgaaacgacatataataaatttctaatatccctagcaagaaaaaccctttcgtttgaaaaaattagtgataggcatcatcttaaataacactacgaaatgttataatgtcattgatacaattaaatatcgtgtcactttagttactttttagaatgaggatttgcctacaaactaatatgagtgtttttcttt

SEQ ID NO: 168031 - DNA, 550 bp, Cannabis sativa
aaatactgttgctgtaattcaaaattaatgtgttatttcatcgaattttttatgcgatgcagaggtactcaggaggtgatttgcttggtgtcactgctaaagtagtggatatgcctcaccactgtatgtaatttcatgtcactagctgctgctttatattttctttacatgaacaactatggtctattctatctacttgtctaataaatggtagaaaccaaatgatattgcatttaattttttgagaaattataatagacaagtgtcatttaagttagttttgcatggatcgtaatattgtatgtaaccaaatagaactgtgacattatttggcaattacttggaatttcacttctgtaagcttgcccttaaagtttaccctggagagcttgtcttaaagagtaggggttttatcttgtttcctattgtttaaaattttccactcccctttgaattgggcctatatgaatcatgctgttttgaggctctttattactgtaacagtaagtaggaatttcttgtattttataatgaactattggtgttcagg

SEQ ID NO: 168032 - DNA, 1113 bp, Cannabis sativa
  modified_base (1071)..(1087): a, c, t, g, unknown or other
tatacatatttagcattaacttttaacatgttattaaaaaatatattgatggagatataattataaatacttaatagtcatttaatgagatatgtaattaaatatcgtaattcactaaattaaaatggatcattacataataattcttcttctttttttatgaaaattatagttcttattcagtaaattctactttctctacaataactataaaaaaatgtttttgaactataaatataatagttcatacactttgtaattaaatatatgttttttttcaaaataataataatagatgatgagttttgactaatttttgttgagagttgagtttgactaattgattactgatgtatgtgaaaaaaaaatatttacaaagtttactacaaatttaagtataaataatttttgttacttgaaatatatgtaaaaatgttttgtttaaaatataaatttttaataattgacctccctagattgagtcctccctcttgccctgattggagtatttattttcttttttaaagaaaaaagtaatcaaatttcatgtggatatgtggatgagaaaaaaaaaaaaatgtgtattttttttttggcaattacagatgttatcatccattagagatgttataagtgcacatatttattgtttaggaataattacataaaacactaatttttgtaagaaaaatatatttttacatttaaagaatttttttttttatatttttacagttttccataaaaataacaagaaaactacataaaagtaacataaaaataatatttaaataacattaaaatagtaacaaaaaataacagataataaaaaattaacaacaaattaacaagagtacaacattaaagaccgtattttctgtaaataaaataaaaaaatcgtaaaaatatttaaaattttataaaattgtattgttgtaattttttttttattatttttgtgtatttgtaaaataatttctattatttcacccaaatgtgacttgtacaacatagtgcattgtgcaaaagaaggggtaagttgaaaaataccccttttattaatcaattaannnnnnnnnnnnnnnnntttatatttatttgaaacatacctct

SEQ ID NO: 168033 - DNA, 1040 bp, Cannabis sativa
agcttctcgaaccaaagggctatgctaactgctaagagctgatgatcttttttagtgtgaatttttttagtgagaaattaattgaagaaaaattgaccaattttttttttttattttcttttgttgagaatggcacttaggaattgaagcatttcagctcaatttctcagttttaagggtcggtttagtcgggttatattgtatttttatcaactcaatataaatatcagattataaatatataattgtaatctgtctaataaaaaataaaacaagtattactagtccaaaaattttcgtcagtttgattggattaagttgtttaaactgatttttaatgtttgttttttttttaattattgttagatttttagtatttaaataattgatttgaataaatagatgtatagtataagtttcaagattaaaatagttattcaaaaaataaaacatactcaaatgtaaattttaaattttaactttaatatttaaatataatcaagattatcaattataaattttaaattttaaattacatattataaaatacaaacttaaatataaaataatttaactgttaaacttaatttatatattatattgtagataattttaataaaaatatataaatcggtttattctttttattcgagttatttgaacaggttagaataatattcaacccgcccaatatatttattgggcggtttgaatttttcgtaaaattattagggttgtattttttgttagtttattcagtttagtttgagcggttaattcagattggacggtttgtaaatttttttgaatagtcctacttctaattggatttaggagttcaataacacttgtgtgtaattagaatgtgtaattagagaaaaaaaaaaattaaggtggcgtttagtaggaagaaataaaaatataggaataggaatagaatggaagaaaatttaaaatatttttagaaaattgataaaaaaaaattaaattttttctcattatgcattagaatggtctttttttctatttcaaaatggaat

SEQ ID NO: 168034 - DNA, 699 bp, Cannabis sativa
attagcaagtaattaataagatttacaattatgcagatcgcagggtacacctaacggtggtggtgtgtatggtttgactgccaactctaccaataatacagcagatcatgtattgatgaactcacaagtaattatatatatatacaacttattttcaaatggcatataatctatttaagaaataattaattaattacacattatatataacattatgatcttaatattctcaggaaggtggggttggggttggaattcagagcaatggacaggcaactgttattcaaaacaacaatgcagcatctacacaagaggtatagttaatatatcaaatataacaaactaataacaatcataaaatttaattcccatttctgttatcaaattaagttcatgtaattgattttatttatagagtgaaattacttcggagaggcgtggccgtggccgtggccgtggccgtctcactactaaaaatcaacgagatgaaattggagagtcgtcaacgtcttctaaacgtttgaaggtaatttattacaataagttgcttgtacaaagcaccaaaaaaaaaaaaggatttggcatttagaaaaataatactcgtgtacgttatagttatttaagatattgtatcttgtaaaattttgagaaatttaaaataatttacaacataaccaatgttggaacaatttatttcaa

SEQ ID NO: 168035 - DNA, 716 bp, Cannabis sativa
  modified_base (653)..(658): a, c, t, g, unknown or other
tcttcactctctctctccctctctttattattgctccaacttaattaattttacatattacaaatatatatatgaatcttaaactcatatcagattgctctatgaattaataaaataaaaaacagatctataatagtcttccacatattaattttctcttagtcaattcatgggaatatataaaagagaagagtagttaagatcagctcatttaattagattacttatttaatccaattcaaaatatatattagctcaaataattaatcttagtaatcataaataataaaatttcacatatatatttataattttgcaggtgaataatgggaatgaagaattggatgctaaacttgcagatatttgcattagtacttctgcagcaccaacttatttccctgcttataagttctctaacaaaaatgttgaatttaacatgattgatggaggtgttgcagcaattaatccggtgattaataatattttttattatatataggttaaattttatagacaataagcattatatatattaggttattgttacgtgcattatcagtatatttagttatatcttttctttttgttatgtgtatttataaaattttagaaatatattaaaggaaatcacttattaatttttaatttttttnnnnnnaaaaaaaaaaaaaatatttaaagttttaaaaatttgagaaaataaatataaagtttaa

SEQ ID NO: 168036 - DNA, 1393 bp, Cannabis sativa
atactacctttcttaatcaaatgtatgatttgcttaaaaaaaaaaatacttcctttttttttttctagttcgtgctattttttatttaactattttgtaccataatttttttttgttttttgctagtatacagtatattgtttactcatagattcaacttcaaaagtgttactataaattttcacacataaatttcaaatcttgccttttaattttattttaataattttagaggaatttctttttattattttttttttcataattttaatatttatttgttaacaaattgaactttgtgacaaatagctaattttagttgagatttaatttattttaattaatttctcaaatctatgaataatgcacattttattgactagtatatttttacatttgaagacttagcctaataattgaacataacaaattagtttcgataccatagtaacattatgagtgaaaaaagttttccaagctaagttttttgttaaaataataattgtattttattctttatttaaaaattcacaatattataattgtatagggaactccacttttctatatctatttttttgtaggtagttttggttcatttgattgtttatagcggatgccccttgtaggtggtctcaagttgttttgtttaataaattttcgagggataacttattaatcttatataaatatttgtagcaactcatattatgactttgcatatctttagctagacaatgagttttttgactgaaaatattcttctacgtcgataattaccataatgtaattctgatcattctctaaaaaaatattatgatttgcatgctaataagtacgaaacaattatatatatttcatatttttatgtacatcaaatatatatggccaataccattttaatgggtgtattattaaaaaattttgaattttaatatttaatttttttatctaattaaaaatatattattttatgttatatgggtccgtattattatatcagttgaaataaataattaaaaaaaaagtattcagaaaaaaaataaggtaaaaaaagttaagttcatttaaatttttttataaatatacagttgatataagataaaaagaatttttttgttttattaaatagttaaattaaaggaatttttttcatttatagaaattctaatttttgttttattatgattggattaaatttaatagtttaatatttttaaaattaatttgtatagttaatacatcgccaacgttttatttttgtgataaatatcaagctttgatgttttgtttgtaattgaagaaaagtcggctgagggttgagctaatgctatcactgttctgccatcttcgctggtgtattatgctttttagctttcagtccttttcttat

SEQ ID NO: 168037 - DNA, 1890 bp, Cannabis sativa
tgaatttgttgctggtgctttgctctctacttcacttgagtttctgtttgatcgattggtgtctgaggaaatatcccatcttttccaagggaagaaggccattctgaaactgctggacaagctcaacactaagctcttatcagctaatgcactcttcaatgatgctgaggaaaagcaactgagagatgataatgtcaagaagtggcttgtcaagcttcaagatgccatctatcaagctaacgacttggtggacaatatggattatgaagctctcagatccaagattaaatgtgatcaatctagcagccgcgcaaccaaggtgttttaccaactcagatccatgtcaccttttatgtttaactttgaaaaagttgtgaagagtgaagctactgagatccttggtacactagatgatcttcttgctcaaaaggatgctcttggcttgagagaaggtgttcaaaacaactcttctcaaaggccacctgctcctttagtcgaagaatctgatgtttatggaaggcatgctgagaaagaagccattgttgatctgttgctaagaagtgatgatgttgatggtggtgattataagatttctgtcatccctattgttgggatgggtggtgttggcaaaactactcttgctcaacttgtttatgatgatgttcgtgttagaaaacatttcgagctaagagtatgggttactgtgtcggatgagtttgatatttcaaagataacaagagagatctttgagggggttacttcaaccaaatgtgatattgagaacccagacgaaattcgaagaaaattgaaggaagcattgcaggggaagaagtttatgtttgttcatgatgatgtttggaacgagtcttattctttgtgggactctttgaagagttgtttcgattctggagcaaatggaagtaaaattgttgtaactacccgaagtgaagttgtcgcctctactatggccacagggaatattcatcatctccaaactttgtcaaatgaagattgttggaaattatttgtcaaacatgcttttagaaacaacgatgacttgagtactaagtacaaagatttggaggtattgggtagacaaatagtagacaagtgcaaaggccttccattagcaataaaatctcttggtggattattgcgctccgaacgaaattctgaaaagtgggaggacatacttaatagtgacacatgggaggagttgtacaagaaagagggatctattcttccagctttatggttgagctaccgtcacttacctacacgccttaaacaatgttttgcttattgttccatatttcctaaagattacgaatttgggagaaaagaattgattttgctgtggatggcacaaggttttctgcctcttgatcgagaaagcaaaaagatggaggcacatggggaggaataccttgaggatctttcatcaaggtcattgtttcaacattcaaataaagaaaaatcattgctccaaatgcatgacttggtacatgatttggccatactcgtatcaaatgatttttgctttaggttggatttgcataatgatctacttaaactttcaacaaagacacgccacttgtcatatacaaagaaggtaacatatgacatcaacaaagtcaaggaattacatgaagtgaagagcttgcgtacctttctagcactgccattcaaatcacacaggtattactggaagataaagtgtgatatgttacttacaagtagaagttttttaagagttctttctttaagagtgcttccaatgaagaagttgcttcattcaattggcaatctaaagcatttgaggtacctcgacttgtctcacactggaattcaagaattacctgattcagtttgtaatttgtacaatttaca

SEQ ID NO: 168038 - DNA, 831 bp, Cannabis sativa
acaactgcatctataattcataaaagggctatttcaataatctggtccacatataataaatggcacaaaaacatcctcttttaccatcgagccactttcccatgaaccaatcacgccacaaaaaagaaaaagaaaaagaaatgggtaaaaggagaaaaacaatacccagattcccaacatggccattggtgttgaagtcggtctcattcacagtaacagttgtggacccttccatggagttgattcgaacagacccctttgaactatgcacagaaaatcccaaaaacccaggtttgaatgaggaagaagaggaagacaaaaacgtggaacacggtttgatcccaacaccaagaccccgagacgatgataatgatgtgcccccagccagtgttgctgatccacctccaattgcaatcattttctcatagaatcaaaaaaggaatgatatttaatttccacaatatggcaaccccacaaacacaagcggcagtaaaaatcgtaaatttaatttccaaaaataggggaactagtatatatatataggcgaatgaagaagcgaaaatgtggggtttccgttttttatttctttatgggtttttggcggtgagagattcaatgagtccactcgcaaacgtgagagaatttatgaatttgtattgcatcagtggttttttgtggtggtgagggagttaaggtagggtctatgtctctttttatttatttatttatttatttatttatgggctaattagtaattttttatcttaactttgacatgtactaaatcgtattttttgaacttttttagtcgttaaaaattcccttgaacta

SEQ ID NO: 168039 - DNA, 508 bp, Cannabis sativa
ttggtgacttgtgaggaggacaaatatcacaaagctgtttggaataaaaacacaggtttatattatggcaatcggtgcatgtccatctcctcactagagatcagttggctatcttccacatcaacatttcaaactctgagtgtgctgtttgtgggcgggcggttgaaacacatcaacacttattctttgactgattgttttcaaggcaggtggtgcaagagattttcaactggttgggttttcaagcttggagcactcaatttggttgctggaggaattttttgacagcaacaggtgacagcttaagggatagagttgtggtctctttgttggctgctgctgtttattttatttggatgaatagaaacaaatgtgtacatgatgatagttcttatatggtgacttacattgttaaagaaattaaaaagatagccaaatacaggttgtatagtcataagcaaaagaagatagatacttctagtcaaaggctaattaatagaattctagc

SEQ ID NO: 168040 - DNA, 1230 bp, Cannabis sativa
tttattttattgatatgattatttattttacttattatttggtatgattattattgttacatagaccaaatcttatgtacatttataaacatgttttatttatctaattagtagcaatgcgtcaattcttagtacttcaaataattattatcttatttatatatagcttaaaaattaattatttaaaattcgttacaaatttttacaaaattttacgatgcactcttatttattttggtatttaggagtatttttagactaatttttttttttttaataatcgtgtacattttatttatttaagatgttttataaaattttgaaaaaaagtattaatacgttgaacataagattcaaaaagtttattgcatgcatgcatgtttttttttttttttttaatgtgtgaaatagattgtttgaacattgttttctatatcgaaaattattttaaatttctcaaaatttacaggatatcctaaataactacaaagtacactaccatgaaaaaatataaactttaaaattttcctggatgttaaaacaatatgggttgcatcgatgcacaattttctaaggagaaatgctaaagggcactcatggtgtctagcaccattatgaggtgtaatatcgttatttatgcaatttaatattgagttccacttattttaatctaataaaaattataaaaaaactactaaccaattataagacgatatgttatagaggtaatagagacctgtatgcctcgtagcaatgctcgttttgaggaggtgcaccataaaaactccctaaacttttaaatgataagtttcactcaattattaaacaatcttcaacctaatttgttttcacattttaagcacatggatatgtaacacttaaaaaaaaaaatctatatatatatatgagaatgtacattgtaattattaagaattgggacaattttaactaatttacaatggtaaaaatatgaaagatgttatttaaaagtttattttatacactcataaaatatacattttcatataaaaataatttatccaacgttgtcaaaagagaaaacttatataatgttaaaatttactataaaaaatttaaattaattaaataaatattaattatataaatttttttggcattctaatttaatcaaaagagacatatttatagtacaaatttatatttctatggcacaaaattataagtttatgatatgtatatggcatgttt

SEQ ID NO: 168041 - DNA, 943 bp, Cannabis sativa
caaataaaagtaactaaattattacctttgtaacacttaattatctaagatatttgtttcaaaaaaaaaaaaaaaaattatctaagttattttttcgtacttaagcgtgttaaactcaaatcaccatataacataaaaaaaaaagagttttcaaaaaattaattgatgggaaagtattaagtatcaaaatttataatccaatatgtaaaaatgtaaaaataataagttagtaaacatttaaactctgttgatttcactttggattgcttgtctcagattgagaatgttaaactctgttggattcctcgcaacttcaatggtgcagctcactctcttacagcgtgggctgcatccaatgaatgttttaagatttttctgttagggaagtaaaaatgtcactaaaaactttgagttttattaatgccctattttgctttgaataaataatctgtttggataaaaaaaaagttattgaaattttatttttatagattatatatatatatataatattttgaaatccgtatttaatatatggataagatagaatatgttccaaaaatgagatggtagtttcccaaattttcttactatattttttttttatatatatatataataggtaatttttcttatatttatgttaaaatgggaaaaacaatccaaattttttaagttgattttctgtacattaacaaattgtataaaaagtaattcaaaatatgcattattttaacatttatgttttttttacaaataacatttattatttatttattatttttttttacaaataattaatatttatgttttttcagagctagattataggccagtttggcacagctttgctataggaaaaaataactgtagttgtactgtgagaaaaagcaactgcggcagaactgtagaaaaaagctgaactaagtgtttggtaaattat

SEQ ID NO: 168042 - DNA, 654 bp, Cannabis sativa
cttcttcttcttctaaacaacactcagttatagtattaatggtaccattcctagctcaaagccacctaaaccaactccttcaactttcccatgtcgtttcatcctcatacgacatcccagtccactacatcagctcatcacttcacaattcccaggtcaaatctcgatctccaactccaaacttagccaccagaatccattttcatgatttcccaactccacactttctctctcctcaacccaccaagactcctaacaatttcccaaaccatctcataccatctttccaagcttcaattcagcttcgaaaacccttctcagaactcctcacaaagctcaaaacgacagccgaaagagttgtcgttattcatgatcttatgatgagctatgtcgttcaagattcaatttttatagcacccaattcggaggtttatgtttttcattgtgtttctgctatttctagagttgcttttatcagagacgccattggagaaagcagctttgagcccaagattccctctccagatgggactttagatccaagctttgaggcttttatagaaaagcaagttccttttatgaaagcaaacaaatctggtcatctttacaactcttgtagagttgttgaaagtgattttctcgatttcatttccg

SEQ ID NO: 168043 - DNA, 1180 bp, Cannabis sativa
tgagttagtaatatgctgaatatttattagatgattaaagagaaaaaaatctagattaacatcaaaaacgttctttctcttgaaactatatctctctctgcctctcctacaactagcaaagaattaaacttttgataatttctgggtgttttagtaagagttctatagggatttcaagatttaacccaaggtaagctcactcactctcgtctctttgattatctcatgaattaagctaggtttgttagttatttttgggaattcaggttctgtatgatgtattgatgttagaaagtgattttttatgttggtttaaaattatttgagatgttttaaacatgaattgttacttgcagttgagtttggacaaagtttgagctttagagctcaaactttgctctttaatggtgatttctgttttatagggtcatacttgtgtttattacttgaaatatattcattgtggcttaattaggtcaactgaaagatttgactcgatttgggatagaattaagttgatggtgggatttttagggtttcctgcaaggaaccagtcaactagttcaggggatcctgtagaaccagttaactgtttccccaagatgaaccctaagaactggttttccattttgggaacttagtttattgcttctagcagttttagaaccctagtttttcatgttttggcgatacttatggtattgtcatggtatccatcgatagagaaatttttatttttgattttaggtccctaaaaaagtaatttagcgtgtcacttatcagccttatgaatgttgtgatttagggggatgtatttgggattacatgtttagcgtgattacatgttgaaagggggctatattattacttgagatatgcatatgtgattacatgttcagcgtgcatgtctatgaatgtctgttagataacaaattgaaatagcagtataagtatacatagagttatactggataacgatgaatgtatatttggcataagtacatattgatgttatcacatcgacacgtttaaagtaccaagtacatgttgatattatggttaatagtactgtcatatgaacgttctagactcagtacacataggacgtcagataggattatgattgggtgtatggtgttggaaattattttaccaggatcttagatctacttacaagtat

SEQ ID NO: 168044 - DNA, 746 bp, Cannabis sativa
  modified_base (77)..(121): a, c, t, g, unknown or other
gcataaatggggaatgggggcggggttggggttgcattctccactcaatacccactcaataataataataataatannnnnnnnnnnnnnnnnnnnnnnnnnnnnnnnnnnnnnnnnnnnnataataataataataatatatttgcgacaaaactactcaaattttagactttttaacacttaaccacaaaaattaaaattttgacggtaaaacctactgaacccaagttccattttactcattacacttctgtccaaaaaacctcaattaagtggcacagtggactgcttgtgtacacgtgaattttttttaataatatacataatattaattattaaaatattatgaaatataatttagaaattataaaaataaataaattattttcttttctttattttttttctttttctcttttttctttctttatttttttccttttcattttttttattcttcttcttaactgaaaaatccctaatatcccttcacactctctctctcccaatttttatctttcttgtgcgcagcatcggccagccaccccgggggttctctgacaaaccttaagccggctagacaggccatgaaatcaaaccccatgacctagaaatccacaaccccaatcccccctctactctctctctctcgctctcgatttttatctctctctttcttgtgtacatcgccagccacccacccgaggggttctttgaccaccttaggccacacgggccacagaacc

SEQ ID NO: 168045 - DNA, 1064 bp, Cannabis sativa
ctaaccaaataagataaataattagaagcttaccataaggattgccttaatatttacttcacttaaggtagctcttactctagtttgctcctttataattctcaaaagtacatcaataatgtcttccttttccttttttttctctccatgagtagtttacatgaacatcaattaccctttggaagaaaccatccaattcttgaaatatccaattcttgaaaccatccaatgagataattcaaaactcaacaaatgaaatctttggcaaaataccaattttccctcctcccattaaaatcccaaattaacacctaagagtaaattagtcattaataaataactcgcctcaccccataaatccaaccacaacataaaaccttcagtatcgttaaaacatctgctaatatcattgtgatatttctatccaatcaatcgaattctcactgttgtcgcacttgaaaatatttcattgtacaaatactattaatttttacccacatagtctaataaaatctcagtaattaataaattacgcttatttaactattttcattaaaatctctgattgttatataattaacttagtaagattataatctcacctatttatgctctaaatatatattattttatatttaataaaatatattttattaatcataattaagtttttcagaatattacattaatgatctatcttttcatagaaatataggaagttatcatttagaatttagattaagtttataaatctaaatcacattatgaattgttctataacttgtaatacataagaagaagatgaattgagctcttaagagtgaatagtagatgatgataattgtcctaatttatttcttattgttattttaattaaaaatttcttttctaatttttttttttggtttgaaaattctgaatattgtttgatcaattagaaataaaagattgattgattggtgattggtaattcagtttttgagaacgatacttgttaggttatatttagcctatgtttcgagtctttaaagttagcattttctcgtctattggtgccttttgga

SEQ ID NO: 168046 - DNA, 734 bp, Cannabis sativa
ggcttgaatcagttgtgtttgaaggcatgtcacctatatataatatataataatataatcatatcatatattaattaatatgtaaatatcaaggccaaaattaatgcaaataaataaatgtcaagagagaagaaaatataaaatgggggataaataattgtggacaaaattaataactatatatacatatttatatttagaaatatatataattaaggatctatatgtaagagatatttgtgattttgtaattgtaaatatgtaaaactcttcaaaatcatctatttaaaaaattaaatttagtacaatattgttttaaattgcatgcataatttgttttaataattattaatgaattaattacctgttgttgtaaggcaaaaatgtgagcaacacagccataaacaggatctctaatccttgcttgagcttcataagcaatggtaacgacagcttcacacctatcagcaactggcacgtgtaacaacagtttcgacacgttactagctccaaacactttgtgtatagccgcaaacctcgccgcaccttgctccgagcaaaaatacggcgcaaacacgcaatccgccgcgcactttcgcctcaaaaacttacacgcgccgcacggtgaccccgtaccaccactattactactactactaccaccacatgaagccatatatatatagtgagagaaagagaaagagaaagagttagagagagaaatgttgttgttg

SEQ ID NO: 168047 - DNA, 982 bp, Cannabis sativa
tggttcaaagccctgggaggggtatgttgacaccgcattaatctgacctccttcctgtccccctgcctcagtaaccatacttggctcatttgtatcctcccgcctctccggttcaagggccataaactcccttcgggcatcttctgcctccaaagctgaaaagtagtgttttatgcggttgcccagtctgacccacgaaccgtacatgggaaccgatcgattaaaatcatccataatgaggcggcgtcttcgattacacatcatctcaatatgcccaatcattccacatttgaagcagaactgagggaggttttcaaacttgaagtaacaccataaacacactccttcctccataggcagaaagagccccaccaaaataggtttagccaagttaagttccactctgaaccgaatatagtcgtttctaggaaaaccattcttccataatcggtcaatgctaataactccacctaacttctttgcaactgcgatagcatttttgttagtgaaaaaatgaggggatataataaactcttacccataccgggaccaagtccatgtaagcattcctccaacaaccatcatccgggaaaggtttgagtattaaatggccaccacatacttcccacgggcttctgtcaaccacgaattcagcatccgcctttctctgaaactttagggtatagacgttaggctcctcctcagccatattccagcctttagccaaacgccatttctgagccagaacattacgtaagagatctttaaaaatggcacgacgcgagataacttttcccactaccatctttccaataaaatcctggttagtctccaagttatgatccagagacagggacagggtatcccttgctaagatctcaacctcatccagggccgccctgaaatgtagtgggctatagggtaaaaattattttttgggcccttatttagaaaaaaaaatggtatttttcaaaatcagcaa

SEQ ID NO: 168048 - DNA, 747 bp, Cannabis sativa
aaaatgtgtacttctctatgtggttcaatattcagcttcacaagactaataggattatgagaagataataagttattggaaattttaaataattggcattggcacaaaaaaaaaatgaagaagaacataatccaagtccagttgaccgcctaggagacttttttgatagagacttttacttcaatttgttgagatatgtcgcaatttaatatgaacatgtgacatttttagagcaactaacatatccgttaaatgagaaccaacggacttacaagaatcttgagcttggagactattactgctatttttcaagggtcttatctacatcaaagtaaattttttgagaaattttaccacaattttcccattaataaaaatcaaaagtatggcattaatacaaatttatataaataaacatgaggaaaataaaactagtacactagtaactttctttgtgcaaaacactgataattttttaaaagaaaaaaacctacaaagtaataaatttttaaaaaaatgtcgataacaatgttgagttatctcttttgctcagtgtttattgggcttgtgactaccttagattgttttacaataagcaatgttcggtggcgtctttctccacctttcaaccgatggtggatgtctctgctggcgggtcggcatctcggcctccttctcagaaagtgttacccaatagagccggccctagctaggcataggcgggctaggtccgtgcctagggcccac

SEQ ID NO: 168049 - DNA, 2027 bp, Cannabis sativa
ttctttgaagcaacagaggcagctagaataccttgcaccacttccatagctggaggtttaggctccttcagcgttagaatcttcctcttcaagttggaacatgaacccatggcagccaagaaactcatattatttacaaaaagtaaagaccagacattagtacaacaaagaaaaataagtcaacaagtgaagatccacaacatggagcatcagcaacctgctgattccccatctttctctggagcagtcctagcggaggtaacttctctgtcatcctggtctaaaaacatagatattctccctgaatattcttttctcctagttcaatacttacctccccttccttcttttgtagatgaatccgtgcagattctgggaaggtaagaaccgcatagacaaagattaactacaacttctctttaaagatcagcctaaactccatgcagagtatttttcatccagtataagcactacttctagttttgacgattgggaggttttaatcaacgaagctaaaccttccgtaccatctatgcaaaaccattactatctggatcacatcggtgggagcctgtacaatcaattcgtttgggaataaaacaaagggttaaggcagtacctgccttttaaatggatgtacgtagtctgtacaaatgttttgaacacccttccagaggctgacctagagccttctaggagacctatagtcaaagcaacaatagtagttatagctgttgatcatcctttgtccaaacatttgcctagctcaagaaacatggctcggactaagtaaacttcttttaggatcagcgtagaagacattctttcagacaccgatgttgaagtggaagaggtcaaggaaaagggttggcataataggttttcctgcatgttgttccatggctacaaaagtatactaaggaaaggcagcctatcaatgtgtggcatagtcctagaaaggggtctccactatacgaacaaggaacttgaggaggctcaaccatcatactattaggaggagtgtggtttgatgcggacttctaccccctcaaagttgaccgagaagaagttgaggaatttagataagaagggactgctcgaaaatgtggtggtcatccttcttttcgacaggaatttgaaaaatcacaccgaagaaggtttctgggtgtggtccagcctgcacgctcagtagggtgccctcctgctaattcatccatactccgtgaagttggctaactattacaaaattttctcgaggcaatttacacaaaaagggattaagtatctagtcgtgatgtacatcttctacatgcactatagatggagggagccttcaccctacaacataaattggttctttgatttgaagacttgtctaggccatcatcgttcgagctatttttatttttctcaacttgattgcatgtggctgatcaacaaaaaccactcctctgtcttaaagattggtggctttcttcgtgactactatatcatccatgagatggaggttaaccgtcttgccttccagtatgcaaagacttacggccaaccaagttttattctcagacaccgggatagagcctaaggaattatggatctgtcaatatttaataagaatatatatctattgacaacaataaaaaattgtattaagtatgggctctatcaagatggagaaactaaagacaacgcttcgatggtcgagaagccgatccgtatcagggacgttgaggaggagcctacccatccaaacatttagcatgtttttgggaaggaggaaggccatagttgaagagattgtggaagattcttcaaatgatgacgttctttccatccttgtctgagaaaatgcttttgggcgttcagggtagaggtcatttttacacttatcttttttacattagaaattcttcagatgatttgcatgcacatgtttttattttagaaatgctggaagaagatgcaaaaatcccaacaccaattcaggggtacatatgttgggttttgtgccctaaataaaacaaatt

SEQ ID NO: 168050 - DNA, 783 bp, Cannabis sativa
cactgagtgggttagggttcctcctatgtaccgtaccactcctactcaattcttcctacaccatgcgaaagtttttgctaattaccataaggatgagttgaatgtcagggacctggtcacgactgttaactgcaggagggcaaagttaatttctggtcggtggtgacttcaacttatccaaagttcttggcccttatatccccaaccctgagaccgagaaggcgcttcgagaggacatcatttcctccgcagaagacaaatataagaagtacaaattcaagaagaaacaggagttggcctatatcaacgcccaagctgctttagggaggatcctctgggtggaagctgggaaagaacaggcggccatccggcctaagttccctttaccagttcccaactctagggctcctgatgccagcacttttggaacttgtaagtctccattgaccatttgtaacgccctaactaattaggcacgctacccaaaatacttaagaaaccctaattaccgagtccaacctagttatgtcctgaacgcataacccaaaatcttacatattcatatactcatatatatatatatcatggcatagctttcatacaacatatatcagtagggtaataaccctaggcaattaaaccgctcatgctagggtaataaccctaatcccggttactgattaatcacataagcgccaccgcgcataactctatgtgctaactactgtcttacctgatgtcctgcaataatagagattccaaatccccgggtgctcctaacca

SEQ ID NO: 168051 - DNA, 1195 bp, Cannabis sativa
tagcaaatagttctattctaaactcaacaattgtttttgaaaaaaaaacattcgaatatctatgtctttctttaatagtaataaaaatagcaagaatttttgttgtgcgttgtatttatcttatatatatatatttatataaagaaagaagatggatatatatgaatcttcaaatatatatgtgtagaaagatgtttgtttaattgtaatcactactagacaaattgagacagctaggtcaacctcaagaaattagagacctataacttatatttttctgataatttgttcacacctgtgccctctctcataactaatcatatacagttagacacacagacatgacgaattaattaattgatttatttattgataatttaaaggcaattatttgtcattttatatttgcagagtacgtttgagaaaaataaagcgcctgaacggccaattctaatgtacaaatgtttgaagattttgaataatgtaatgtacgaaaatggatcaagatattttgttaaaaaattgtgttttagagtgtattaaaccaatctcattgtgacacatcaattaatttgagtattttaccggaaaaaaaaaactgtatatataaatggttaattttttaataaataaaaaattaattgttgtgtcaaacctagattagtttaacacaaacacaactttttaactagaaaaatcttgattcgtacgaaaatttgagtttttgatattatggagcgtttgaaaatatttcttagagatatttttgtaatcaacaaaaaaaatatattacaagaatattaaaagatcttttttattaactgtaaccttaatatggtttaacgattctttttgggttatctgtttattttaagagaatataccattctttaatagaatatgcattctaataaagaactaaaaattataaatattcttttcaatcgttaactgaaaagataaaaaataatatacaatttagctacaacctaaaaatctagaaaatagttaagtactattgacgattactgatacattaacttctccttgagattaattctctctcattttattcaaaaaaaaaatctctataacattcaattttcattgtatatataaatagataaatcttaaattgtgagtattatgaatttcttaaattggtattttaagtttttgtaattattaatttttt

SEQ ID NO: 168052 - DNA, 650 bp, Cannabis sativa
gtaatagactatcgcataatttttgggttataattttgtttttatcttgagattatgtaattttgctgctcatgttgctaggtgggtcttttttaggaatcttacaggcatggttgatgtgtcaactattcctgaaaatattatatgtaatgactaggagatttaatttctttgtttaatgaatatcgatccttctttaaaaaaatgagaaaatctaacaaaaatgtattatgaacattttgaataacttttccatctataggaacattttggttccaaagaacatcatttctaccaatttatatattatatacaacaacattaagtaaatatggatatgtagactcttcttttctaaatttacaattcttgcattccaattatcttttaaattttgtattcagtgaagctgatgatgccattagtccaagtaacaagaaaatatcaaacatggtctatttagagtcaaactactgctatatacgtagggctattaacactataaaaaaatttatttttaatcacaacaaaatttgtgactaaattatatattataaattgtgactaattataaattatgattaattataaattattattcctatattgtgattaaaaggtccgtcactaaaggtattagtcacaaaaat

SEQ ID NO: 168053 - DNA, 561 bp, Cannabis sativa
agagctttccaaatataatacatagtgaagtaaaggctactttagtagtgagggaggaattagaaaagagagattatgagtttgaattcgagacctttattataaactattaattgattgtaaaataccattacgctatacttaaaaaaaaaattataatagataatatagatacttcatttacatttaatcaatttccgcattcacaaatcaagaataaaaaaaatcttataaattaatagaggtagtttgaaagtggtattatattatatatatatatatatattatatttttatatgatattacattaaattttaatttatcttaaaatattatatatttatatgaatttttgtaaaaatatgtattttgtttgttatctttaatgttatacttttttttattaattaattaactatttctagatgtatatttattaaagatgtatatttattaaagggaaattcggattattattaaaatacctaatttattaagaaatttttacatgaaaaatccattttagacactttattacaaaattaccctcacacgcctat

SEQ ID NO: 168054 - DNA, 776 bp, Cannabis sativa
cctgaagcagctaccttcgacaataacactcctgactccagtgataacatacagcaacaggtatcatcttctaatgaactctctgcttcacaatctattgaacatgattcagctgttagagagcaaaatacaggtgtaccttcaactcacaccagagggtccattactcaacctgacctgcaaaatattgcagcaaacagtccacctgttgctcagccaacttctcatcctatgatcacacggcctaaagcaggaatctttaaaccaaaagtctatcttggccaagcacaatggcagtggaaaaatgatgaaccagccactgtagaagaagctctatgtcacccaggttggaactcagctatgggagatgaaatggcagctttgagaaggaataagacttggtacttggttccaaaaagaccaggcatgaatattattggaaataaatggatattcagagaaaagaagaatgcagatggtagttttcaacgattcaaagcccgattagttgcaaaaggctttaaccaaagacccggaattgatttcagagaaacttacagtcctgtcattaaagcctctaccatgcgaatcatacttacaattgctgtgtccaaaaattgggaaattcggcaattggacatcaacaatgcgttcttaaatgggactttacaagaagatgtctatatggtgcaaccacagggttttgaagatcaaagtcaacctgaagccgagtgtaaactcactaagtctctctacggcttaaaacaagccccgag

SEQ ID NO: 168055 - DNA, 819 bp, Cannabis sativa
ctagtaagccttgattaaagtgaacaaaagaacaaaaccccatttcgcttacgactttagttttagtacagagtaagctccaattccgccaatggatttttaaacctttagcattagagccccaccaaaaattagctatcaaggattcaagtcatttacaaatagttagtggtaaatgaaagcaactcgttgcgcaggtaggaatggattgcaccacaacttttagtagtaattctttgccgctagttgaaaaaaaatcttctcattccacttgtgcatcaatctccaaatcttctccttaacattactgaaaagctcgtttttatccttctctgtataagcaggcaaacccaggtactgttcatgacattcactaattggcattgcaagttgtctatggaaaaagacttaagtcgctaagatggtattaggagaaaaaggtgtaagtgtcattgttttgacagattatataaatagtgagtccagtcatatctggtgtttctaatctgttataactgcataccagcgttctgttaaagtgtgtgtgagtctgttatgtcttaacagttggttttggttattgttaggtcagttgaactattgcctataaatagctattatcattctgtaaatgaattggctagctaattcatatctttggttagttcggttatatcatgtgagttagtgtagtataatgtttttgcttcttcttgtttttcaggtctgattgcatagcttgcaggtgatgatctatggcagaaagatcagagcctgatgttgctgagttcagactgaagggagttcagtatcatcttc

SEQ ID NO: 168056 - DNA, 575 bp, Cannabis sativa
tttccaagaatttgcacgcttttgacggttgcccttctctatgtactcgattacttgatctcccaacgtttacttttggggggaaattgaggcgtttaaatttcaaaatgattataacctttcactaccttgcttataaatagggcaaaaaaccctaataaaccacttttagcaatttcttgtttagtgatttcagagcaagaacatctttctctctcaaatccttcgaggaatttccagaaagtgccgatcagcgtcatccgaacaacctcaaagcttcgaacagtgagtaagttcctcatctttttcttctttaacatttaaatctctaattttttgggtttccatcgtagaaaattcaatagttttgaacttgttctaggaaaaatgtagagaatctaggtttataaatgtgaaacatggcttgcaattgaccataaaatttgacttttgtggtattctgacttaactttcacgatattcggttctcactttgcccattcgtggtttagtgaagattaacccttaatttgaggttttgaaattttggtttatgaacctaaatcacgcaaaat

SEQ ID NO: 168057 - DNA, 661 bp, Cannabis sativa
aatacaccagcgagaggcgaaccatagagatcttgtgacagggcagagagagataaagtgattaaccgtatccccttcatcatgaccacaaaacatacaaataccaggaagatttccaaagatattctgcaatttagacccaaaaggaaggacatcatggcacaatttccacaagaacagcttaacacgctcatgcacccttaacttccaaatcttaaaactcagagcatccttctgttcgaatctaactctattaagggaccaataagccgcgtttatggagaattttccatttggagaaggcttccaacaggccgaatcatgagccaaaagcgactctctattcacctttagaaggttggaggtgataaccggattaaaagtcgaggacactttctcatgatgccaaacgtcatcatccgtggcaactaagtcttgaagcccagtgctatttccaaccagggggtttatagcccccgaatccaccacaaggttatcaccacaagaccatttatgatgccaaattttcacctccgaatgtttgcccaccacccaaacacagttctccctaatgaattcctgcgtagaccaaatccctctggccactgcagaggcatttccaggaatactaaaaccccacaagtacttgaactcttgtact

SEQ ID NO: 168058 - DNA, 859 bp, Cannabis sativa
gtgatatataagatgaatgggctttccctcccattgccaattaattgccaattagttttgagatggaacctcattcatcttatcccaaattctaacaggcccaatcaagacaatggatcgaatccattagcaaagtcaaaccatccagatgacgggttgatgaatcatctagacgagacaaatattcggcacagtaggtatttggatagcatcaagcagtgcttctggaaggataattattgagcctgtaaatgctgagcatagtatctcactcattcattatgaaatctcacaatatcaagactttattttcttaatcatgttcgagaatcaaatattctaaatgagaaaatgaagtaattatcaatcaagcatttatgtgactttattatccacaaatgtacgacacgttttgacaacaatcaacatgatgtggcatccacgttaacagaagattaatgcttcataggctgggctttactaagtaaatccaaagcagtatgttatttgtatttacccaagtgagtaaggtttacatacaggaaccctaggtctataaatataagaaaactcattcatgcaaaagattagaatctcgatactagagttaaggtaaattctaaggttcataatcttggcaaaatacttgtgtaaatcaaagaggattttccaggcatataataatgggtaaataccattttggatcctgtattttgtaaaagttaccaattggactctcgattttgttaagcgacaaaatagatcttatattttctaaaatggtaaaaataggaccctagctcaattttcaataattttattttttttaatatactgaactttaagacaatttctaaca

SEQ ID NO: 168059 - DNA, 955 bp, Cannabis sativa
ctctctcctttgttgatattggctttcggctagcttccctcattttcctgggttgttttcaccaattgggctgcctccctaacccagttatccacctgctcatagactccctccaagtccaacagtattgggctgtcatattgggcctgactatcaaagacatctttcatttatatttatagctatttacaaattaaactaaattttagaatacaaactactaatgcattgtacagctggtattctacttgtgtgtgagtgtgataacaattagtaagtaagcataaaaacagagattttttctaagactgctacgacagcagcaaattcactcacttcaaattaaatcatgtcattcattcgttgacatatataatccactgaagagtattataattttcaaagcgacatggttgtgccaatgctaaagtcaccaccattaaaatagatcactaataaaaatggattagagaaaacaatgaaaatatcctccattaattaatattttccttaactgaattataacatttagaggtaatatttggacaaaaataatctgttataaactactgacgatgtcgaacaattttgataaaaattgtgatatatttgatacaaaaaataattttataaaactatctctattgtgagatgtaaaaatcatattatatttgataaaaaataactttataatatattagttttaatattgtattccttctatatagttaaatatattatttcattagtattttaattaaaaaatattaaaaataataattttatcattaattttattatataaaattattattataaaataaatataaaatattataatttaatcctgttaaccgaggttttcggcaaccaatttaataatatatgagaaagctgtaggaagtttagtgcatgagatttttacgtggttggggcattaatgagctttagtcca

SEQ ID NO: 168060 - DNA, 603 bp, Cannabis sativa
tccatcagtttcatggtgccatatgagacaatcaatccgaggaaaaggtgagagtggaacgctgagaattttttccacatcagatgccaaaaacaaagagtgtaacaaaggaatattccatctattatctgtagttaatagatctgaaacagtgatggttgtgtccactcctttgaagagaagaggtttaaaataagtaaaacctggaatccaggaatcagtagcacaagtaatggtgcgaccatcaccaaccttccatctgaggccttggatgagcagttcttttccccatataattcctcgccaagtgagagaaggataatttcctagtccagcatccaagaaagagttattcttgaaatatcttggcttcagcacacggcttaaaagtgagttgggatcggaaaaaatcctccaagcttgttttgcaagaagagcttgattaaagtgaacgaaactcttgaaccccatcccaccttctactttagaagtacataaatatttccaagttttccaatttataccagttcccgaagaatttgaaccccactagaacttattcatcatgacttcaatttgatcaatgagcgtgttagaaagcct

SEQ ID NO: 168061 - DNA, 788 bp, Cannabis sativa
ccggtggagctctcatggctgggtggaagaaggagaacaagaaacaaaaaaatagaaaagataaaataaaataaatttataattttaaaatatatatcttagtttgttatttttattttaaatttctttaattaaaattattattaagactaataaaaaatcgacatgctgcattttatttgggtttaacggaccagttagaaagtgggaccaacagacttacaaaaaacgtgagcttggaaactattttttcaattttcaaaattaaaaattaatctatatcaaccttaagattttaaaaacttttactgcaattatctttattctttagttgaaaaatttgttaagtttagatacctaacctacctagtagctgcaagtattagacatgtgttgcgtgaaaattaaaataaaataaaggcttattatatataaaaaatttcaacaaataatattttatcatagtacattttttaaaaaaaattaataatacatgaatagtcaactcaacagtgtttctccaaagcaagcaaactttttaagttgttcgttattaattattgtgtaatataaggaaaaaatgggaaattattactttttgagttgttccagtaatttttatatgagttgttatttaatttgttttgttagtggttacgtgggttgttatgtggattttaataaaaatatatataaaaaaactagtttgaagtataaaaataaaataccccttcattttattagaacaattgcacaaaaaatgaaaaaaaaaaaaaaaaaaaaaaaaa

SEQ ID NO: 168062 - DNA, 957 bp, Cannabis sativa
ttctgaccattatccacgtcttgttcttcactagagataacttctcttcatctataccttgtaaccaagtcgttccatctttcccattaattgcttcttgatagctggttagttcagagctatccatttcctctactacagtcaatgcataggcaataaagtcagcataaccaaacttgtttagtggtctactttctcttctttctctatctcttgctagttggtagctacttagatcaccttgacaactctcatcctcaattgtatcttctaaatgtgaagagttgtcatgtgattggtccacctcaatctgccttccttcttgtagtgttgtttgaacaatttcaagaatgaccttagtcttcatagcaatttcctcttccttatacacaacatctctgcttatcaagcatttcttgtgtcctggttcaaggcaccataatttgtagcccttgacttcctctagatatcccaaaaacagacacgttagagcccttggcttcaacttatcttgtttgatatgcacataggttgtgcaatcaaacactcttaagtgctcaaaattaggtggctttcctgtccacgcctcttgaggtgtcttaaaattgtttggcatagaagggaatctatttattacataacatgcagtcttaagggcttctccccaaaatggtctttccaaaccagaacctacaagcatgcatctaactctctttaacaatgtcctattcattctttttgcagtgccattttgttgtggtgtgttcaccactatttttgcttgaaaattccctcttgtgcacaaaacaccttgaattctcctgagcagttttccaggccattgtctgtcctgagtactttgagcttgttaccagtttggttttctagaagctttctccactcgatgaaggtatccagggcttgattcttatttttcaacaagtatacccatacttt

SEQ ID NO: 168063 - DNA, 779 bp, Cannabis sativa
tagtgatatagtatcatttttattattccggagtataagtcattactaatttttctttcatttgcgtttcagcttttacttcactctgtctatttcactttcattatcaggtgcgtgtctttgctattgcaaatatgataattgtgttaattactctatttttataatcagtttgttattgatatcatactatttcaataatatgataataatatttggtgttatttctctgtttttactttcaattttgatcaaatttttctgttgaaaatctcaattacagattatgctaaatattcaaaatgaaaacacaagtgcagctcaattttttgtcatgttagttgttgtaatgtgctacctacaaaataactacaagttaaaaatatgcaaaagaggtgtcgaggaatggtgatgagctctctttaaagggtgtctgagtataaattccatgcttgtgttatgtgttgtggtcgttgaaatcgattgatgtgttgacatacatgttgaagaagccagaatatgtggcaaccttcaattcaagtctatagacgaagaaattcgaaaagcctttgtgaccagagttcttaaagaaattagatcaagttgttgattaggttatatgtgagtattaatatgtgaagattgatttggtcagttgaacattgatttagttggttaaattttaattttggtcggttaaactttgtttaatagttgaaactttgatagcgctacaatgtctattttaggtatgtaaactttgttttttctaacaattt

SEQ ID NO: 168064 - DNA, 604 bp, Cannabis sativa
aataatttttgttgtatatcttgcatcagcagggtattcataaaataattatttcaatccaattcaatctacgtataaatatttgtattatgcggattagatgttgagtaacatataaaagtaaccaatctaattcaatttacacatatttatatatattgcctagaatttcttccaaaatatgtgacagttcaagagtaaatcaggtggcaataggacccacactatggaacattccacctctaatcaatctcggaggatggtatttcagacaaattgtaaaaggaggctatcttcgagagggtctacttggaggatgagaggttcttgccccttcttctctgtaagagagttcgacccggagaaggtgtagaaggacacgggagcatagcacactacacgaggctaaagtcactgtatatgcatttaatgcagcatggggaagatcatccaacacatttctttaaaaaaaacttgctcaatatggtttaaacgcataattccctgatttcatgatgtcccatacatcaattgacaactaaataatgagctatcaaatcataagcaagagataagtcaagtctcactaaaaacctataacaag

SEQ ID NO: 168065 - DNA, 916 bp, Cannabis sativa
accatcccataaaaaacaatgtgcatcccaacttttaagttttaacctttctcctttgtaatagcaattagcaagtaaatgtcaatttcgaggttagtaagtattagtgtggtggtgaacacgtgtcagcaatggcagccgcacgagaagcaagcaatgaggtggacacgtgtccttatgtgggtcttagagaaaggggagagagagagagagaactagcaatgttttattgtgattttctttttttttttggtgaaagttttcttgtggttcttgttgggatgtgaatgtgagtagtctcatcaaccacacaacataacaaaagagtcctccttacaaataataaagaaatcgatgtgtttggaactttcaataataccactattacattacacacactaaaccaatatcaagaatcacatattatttcatactccaaattttctcaaagctcacatgtgcatcaaaatattacacatctaatgatacataattaacatttgagaaaaacaataaaacttctatttaagaatatattaagaatgcatacatgagctaaatttgtgcattgagcacaaaatagaatttacttcttttaaaattgatatttaagtttaactaatttatatggtattttttttatttttagatatttttatagtatttgatatgtcatatatatataaattagatttttaaatcctatatttagtgtttttatttgtttaagtaattttatttgtcactcttgtcagaaaaatcaccggagtttgctgtcggtgccagaaaaatcaccaaagtagcagtcagtactagattagtcgttggagttactgccgacgctgaaaaattcatcagaattggcattgtcggcgaaaaaattactgaaaaaatcaccaagaaataggtttcttga

SEQ ID NO: 168066 - DNA, 831 bp, Cannabis sativa
gataattatagtaagaattgttatttcactttacaactaattgtgtatctaatatttggtggtggctaatggtcgaatcttttactactttcaagtttgtattaaagatcaaattttattaactgtgatatcaagcattaactggtaaaattgccaataaataaataaagagtgcctaaaatatacttttttttttttcaaatagtaaatataattataaaaaattgcattagaaaattaaaaaaaaaaacaaataaatagggactaaaatgtaattttttcaaatattaaatataattatataaaattgtattagaaataaaaataataaaaaatatgggagaagccaagctattacttccacttggtgttgttgtacctgttaaggttgatatatagtttttaagtaggttgattgaatattaaagattaaaattttcagaaaaaaaaaaaaaaagaattaaagattaaaggaaacattatattaatgaatttttagtgtatacaatattgtaaatttccctttttcaattgggaaactactcatataacatttgtaaaatctctatgtattaaataaaagaataaagtatatacaaaaggagaaagtgtaatttttctttttttgacagaaagtctaatttggtaaagctaattaaataattaaattgtataattaattattaattataaaataatttacgatataaatatttaaatttaatttttaataataacacataaattataattttaaaattttagtataattcttaattaatctatcttattaaaattttacttttttttaaaaaaattaatttaaatata

SEQ ID NO: 168067 - DNA, 520 bp, Cannabis sativa
ataataataataataggtattaaaatcaaactgatttaaaaaaaatcatagaaatgatgttcatacacttgtaatttatgtttgtttgatgattgtattaattggatatatttatttaatcaaatgtaataattgattttttaccaattttctttaaaagaaaaaagataatacaaaatgactaagatacatagcctatattttcatcattaaaatctattggttgacataaatatatagtttatgtcaatatcaaagcaaagtaagatatatttgcaaatcatttataattatgagaaaatgttgaaaaacaactcatgaataacgtgagcagaaagtgacccttggtttcttagtaagtaatatatctattctattgtgcttatataacataaattttgatttacgagaaatttgtgggtgactttttatatatattaaaataaaatagtttattattaaaaataaaataatttatgagaaattcatggatcattttttatttacatataataaaata

SEQ ID NO: 168068 - DNA, 668 bp, Cannabis sativa
ctaatgcatcctaaattagttataacataaataatttactttttcatactcaaatgtagtgattttttttaatattcatttagatcaatattgttaacctaactcgttgttagaaaaaactggaaattaaaaattctgagcattggcccaagagggcttgtaagatttataagttaattaataaaatagatgctttagccaaaggacaagaaacatatgttttgaaataatgaaataatttcacttaaataagttacacatacaaaaggcttctctatataatcgatgtggggctagatgagtagaaagcaacttgtttttacctagaaaataataaagtgaaaagataatagtctctcagtgatgattgcaatagcataaaatctagaaaataaaaataaaatgggatgagaactatgaagagtggtttaaggctatctccaatggataatatattttatgttaaatttgaactagatatattataaaattatatttggtccaatttttatatttgtattctaatgcactaagtgaaaattagttataaaagtcaatcttatcatgaatgcttgttgaaaatatacaaaataattaatttatttatattattttaatatcttataaatataaaaatcttttttattaatgaatagtattaataagtg

SEQ ID NO: 168069 - DNA, 753 bp, Cannabis sativa
gtttcaaatgcacactttaaatcatgattcaagagaggtaactgagcattggacctcacctatgtttactaatctcaaggttaatgtgaatggtgcaatttttcaagatgaaggcctaattgggttcggtacagtggtaagagactctttgggaatggctattgaagcattttagaaaagttgttttggtccgattcagctactcttggttgaagctatgggacttaaagaggcattgagttggatcaaaaggaaagctaggtctagtgtgatcttggaaacggattgtcttacttgagtaagcctatggcatctccatatggggttttaactcaaggttgtaagacaatgttatttgaactttttttctgttttaatttgttttgtaaaacgatctgcgaatagagtggtgcatactttagcacgttcctctattcgtgttactgattgtatttttagtaggaactctttacctattgaaatttcattcttaattagctagagatgatttaatttaatgaagatgcatattttttttgaaaaaaaaaatgaatggataatcaacttcaataatggtgttcgcagtgcgagtggcgcaggttgtaatctttctttcaaaccaaattgcatataaggtttttttaatttctctaactgcaactgtaccgtgaaatcttaaaaaatgcaaaaatcacaccgcaaaaatacagtgtggtgtgatgcgctttgaacagtttacactatcatcattat

SEQ ID NO: 168070 - DNA, 590 bp, Cannabis sativa
catatataaattagattttgttaatgtcgtatctccaccatatttgtatatgcatgcgagaaattgtttccaactacggtcatttaaatttaataatcgttatgagttttatccctaataaagaagattcaaatgtgtgtgtatatatataattaatataagttaattaattattatatatacacatgattatatgatattgctttcattaattatcgtctaatttaggctgaattagagtatttatatgtgcatgatggtagcatgagaaatggctccggcgccgtttcctccctactctatgcttggaccattttctttctctctctctctattggtcttattaatgtgaccattcctcttttttcttttctttctaaatgtaactaaatttatatcaatatctaattatcctaaagatccattccatttgtaatattaaataatgtatatgtgtgtatgcatatgaaacatatttaattaaagagtgacagcaactattgcctaattcctcttcaatgaaattctaattcatgacatatatataatatataaacagagaaggaaaaaagaaaacaacaaattaaaca

SEQ ID NO: 168071 - DNA, 717 bp, Cannabis sativa
tggccacaaataaattaacaactaactttttttatagtataggattaaaataaacaatacgagacttagtagttgattaggcttaccaacccttatcttacccatcacctcgaaggatctttcgatagaaagacgagaaagataatggaactttgtgtacaaattaagatcatagagatgcctagtaccttttgggaagaatatgatagatattagagagagtattttatggattttaaaattagttttatttttactattttaacgataagtgagtaaaaatactctttttattttaaaataagtcattttatattatcaagaaaaagagagaggcaattttagtgagaagtattaaagaagaatcatatgtgtaacaattttaattattacagagatttgttaatgtaaatattttcataatttaagtgcaaaaaattattagttgttaaaatataaaaaaccttatttagtacttaattgaacaaaaataattagtaattaaatttaatttaaaataaaattaatcttgattaatattttataaggaaacaaaatattttattaataaaatagaatcaggttaatattatgctataacaatttattattattttaaattaatttctacattaatcacaaacgctcaatcatgatctaatgactaaaagtaaatgtaactttcatagttaatatttaatgtaaccattaaaactt

SEQ ID NO: 168072 - DNA, 1176 bp, Cannabis sativa
  modified_base (586)..(592): a, c, t, g, unknown or other
  modified_base (667)..(683): a, c, t, g, unknown or other
  modified_base (737)..(744): a, c, t, g, unknown or other
catattgtctattcgtattccaaacacctgagctcgaaggctctatagtgttggacttgcataatgggtctttgggcccatttggctgaaggaatgtctgcgatcagtcttgattgcatatttgggcatcctgtattgacaacttaaaacatgtgagttcaatacgagtcgtcgaacactagtcatttggaccaaagttatataaagaattgatatttacttgtcgcaagagagacatacttgctcaactcatataagagatatgcgcgactaatattaacttctcttggtcttgcttatctttgaactatagcgggtataatatgcgacaagacccaatttcagtcgcatcttcccgcaagtttgaatcatgcgagtttggctctacgggagttatattatttaacacatcatcattttctatcaagaattacatgtgtcaatttcttacgaggttgtaactcgtatttttaggcaaaaaaatctcactataacacacataattatctaatttaattcaattttactatttcagtgattgtttatatactaaaccatactccctagactttgatatctaccaaannnnnnnctcaaactatgatatgtactaaatcatgcctcctgaactttcatccatgttaggatttttttactaaaattagannnnnnnnnnnnnnnnnaacaatctcaatagttcgggggaatttataacggtcaaaaaagttcaggggcannnnnnnntacatgtcaaagttcaggaaaaaattactaattatttattattttaacaatgaacttggtatttttttattaaaacatcattgactaataatttgttttctctaataaaaaagtaaataataacaatgctaatacaaattacatacaaatcaccacttaacacatcttttaattacaaattacattttatcttcaagaaacaactcactgtattatatatttatttgagagaatagatttgtttgatgtaatacatgtatctgcattttatgaaatgattaatatttcaaagtagagctcttttattctctattgataattattttatttaatagaaaaaaatttaagggaaaaacaataataattgaaataattgagttttttttttttttcaaaaaaaaaaattattttttttttagactttgatggctc

SEQ ID NO: 168073 - DNA, 1108 bp, Cannabis sativa
ttataggaaaatggccatatggcctagacaatagttcgccctttgtgactcttttttgtaaagataaatttgcatcgttggatgacaaactttgcttttattttatcttttttattgcctcatatttttgcattcaaacttaatatattcgcttacttgcattttttctcacaatttaaataattatacttttatcaaatttgaaatacttaaaggttttccattgctcttattttcctttgatgttttttaagtagttagtaatcttctatgtgcgtaagcagttattatctgctatgctttcgatttgcaagcagttgtcagttctgcttcacgtaaatagttatgatctatgtttaggtaaacttaaatatacttttaataattcatttcgtgaatcactttctttatttttgattgcttgtataaatagttaagccttcttttcacatcttaggttaagtatttcttcaaggcatcttggtgcctcattttaatacattcttataaaatgcgagtcgttaagtattcagctttgcatgtagcttttcgttgtttttatgagctaaatctcatttacaactgctacttttgactttccattgtccattgatgacttcaatcaaccacttaaaagactttgaaattttttaaaatggagggtttgcaatatgctatgtatttctagataaattccagttgatcatacacatatatatgcccctcaagtaattttaaagaatagaactttgtaattacttggaaataattcaactttatttgtaattgaagttcaaaatattacatcagaaaatgagattacaacattggtttacttgtagtaaggtcgcaaatgcttacgttcgagtggttctttattagcgagtcgttaagttgagctaatttataaaccccagttacaagtattgcctcgatcacataaggaccctcccagtttgggttaaatactcctacaaatgcatctctcctatttgaaagtactagccacagcaccaaatcaccgacattaaagagccttttcttcactttcttattgaaatatctcgtaactcggtgttgataggttgcattagtaatttgtgactca

SEQ ID NO: 168074 - DNA, 711 bp, Cannabis sativa
ggtggtatttgggttgatccacataggataactaggaaaagtaatgactataaattagaatcattgttaggttctgtacttgtcggttatctccatagataacaatagtgatatgaatactgggggtggtatttgatttatcctgtgagacaaccgtgaaaattcataactttaaactgaaactgttattaagtttcttacttgtcggctatcctgatttggtagcagttgtgacattattatcgggaagtggtatttgggttgcctaatttgacaacaacaataacatttggatactagggattggtattcatgtttcctagctcagtaataattgtgatatttagatatcaattttgagtatcaaggttgttttattaaacaacaatcaagacattggtatgccagtttaggcatcagatttgtttgttaagaaaatagtgtgactagttgctttatgaagtaacagttactttatgaacatacaatcatcaattaagcacgtaaactaacatgaacatattcaaatcatcacaatcattattttaaatccacatttcatgaaggtaaacaattactatggctctgaggctagatttcagaacttattttattaggatctagatttactaacatatatattgattataatctataatctaacaccctaaatatgaattttctaacatgataaaataaacacatataaat

SEQ ID NO: 168075 - DNA, 514 bp, Cannabis sativa
ttattattattaaagaaaatgcattaatcaaacgaaatgtgataaaaaaagtttgtatcaaaatttcctaaattctatcattagtaacacttaccacataaattaatttttagtggtaaaattttctaaattttatttatgttagctatttagactttaaagcacttacaagagtctttttacaatatggattctcaatttttttttttagcaaaatgtgataaaaaaaatttatatcaactcctttaaattatattatataaagatgtatttaaattaatacaatttgctttatatgtagagaataaacagtgcattctctaaatttattttaataatatataaataatattttatttatgtatgttgtatatatgtttaaaaattattattttaatagtgtaaaaaataagaataatattaattttgttataaatattattaattatgtggatgtccaaatcttttatttattgtcattaattgtaatcaacattcctcttttccttagttt

SEQ ID NO: 168076 - DNA, 701 bp, Cannabis sativa
aaactctaaaccagtcaggaaactaattctaggattttgaaagtaatataaaactaatttcaaaataagcactttatattgtaagtacatatctgatatccattgacgtagatttttatcatctttccaatgcatctccaaattagacacattcacatgaggattccattttgatcttgagataatatacttataggttcctatacatttcaggtagcttgacaaagctgagctcccttacatttctaactccaatgtttgcttcggtatttgggtaagttcttccagccatacacatgctcaagcatacaaataattgcttaaacaaaaagacattaatgcagttgactacaaaccatgactagttgttgttgctcgtttgtgttacagatttttatatttcggcgagactttctcaccactgcaacttactggtgctgttgttactgtgattgcaatttacatggttaactacaaggataagaatagtgtggaataaaacataagatccatataagaataatgttgatgcttttagcagttgacatccaagctctactcacattaaaggaaatctagaagtagatgattttatctgcacacacattaaaggaaaagacacgtgcaaattggtacatgctagagtaccatggtgactgcacgtagtacgaagtttggctgtggaagtttccactcataga

SEQ ID NO: 168077 - DNA, 954 bp, Cannabis sativa
tttagttacaaatttgtagtgatattgagaaatgttaaatgataataatagtgtttcagattgttatttctataattaaatattgcgtttatatattttaataaaattataaaaaaatcttcattcttgagcatgtctaataacataaataactttgaaaaatttacacaaatattttatattttcatggatttataatttttttttaagagaaaaaattaactttgttttcatattactgcaatattatattatatttttgcaatatgtaaataatagttttttttagaacaacctaaaaataatggcatgtaaaaaaacaatccgtaaaaaatattgtattccataaaaagtaaacattttgttgtttttgagtatttttaaaataataattttaatggagttgttggaagaggcaaagagctatttgttaagcttaattaggaaattacactctatattcaccttttatttcttattttaatttttacttttattttattattttttaatttatacccagttttataggtcatatttcattatgtgtattggaaactctaattttgataagttatgtgatgttatatttggtactttaattataaaagatgatgtttatcaattaaaattattttagagttatatttaattaatgtataataaaaatggatagttttcaaatttcaacttatctcatctgttaaagaacttggtaagagttgggcattgtttgttgggttttcatttgggcagatgtactaacaaaaccatataagcttgggtcgtgtgtagcctttgcttggttgggttggatcacattattcataaaatcaagggaaatttcttaaattcacaaaaaaaaaaaaaaaaatatattataaaaaacaaaacagttgtgtggaattttaaatatttttatgattttatttatagaaaatatagtcttttgat

SEQ ID NO: 168078 - DNA, 1271 bp, Cannabis sativa
taacagtattcagacccacattttgatggtggttcatgcgttagagagcctttgtcttttatccattcactttttggtttggttataattaaggattgctagcgtattctggcaagtattggtaatgtttttgttcattttgtataacgatattctgggaactaggtagtttatgttgacttgctctttcacactactataaaattggccttcttgtcagtttaaaattgtcttatatactatttttgtcgatttctaaaatcattggttatgtaggcgttataaaaatacaaaactttaaatgacgaattataactgtcaggaaaaatctctttaaataacggtttataatcgactagaaaaaatactttaaataatggtttgaaactaccaggaaaggctttcgtcgaactgcaactgatggaaaacactactttaaataacggtttataactgacgaaaatatatactttaaatgatgatttataactgtcaagaaagattttcatcggaccataaccatgttgcaggtagctttgtaaacaacctatcgagtatctaccaaacaggtatactcgatgtattggggttcatgttgctttctttctttttttccgaacctcactcacgctttgactttttccacttcttttgctccaggactgacttacgtttgatttcaaaatttccatttgttggctcatctgtgtatatccgagaatgacactacatccggtttgtgccaccctgaagccagaaaactagactgtccaagcacaaacccctaaggttgcgggtctgtagaatgtaggggttgtataatgtgttctgagaggaacaatagacggaataaggagttgccgtgcatttgaaaaattactgacatcgattgaaggtgtcagaacaactctgaaaacatgtaagcatcttctagactgatgaaatcttgggccctcataaaaaaatttgacaaagtgtcagatctttgtctttgcatctcgttccaaaacaaggatcatgtcaaattttctggctgcagggccaataatttcatgtcatcattaactttcgtcttggttgttgcctccatcatccattgaaaataggctttaaggttttccccaatctgctacttaatgttggtcaacgagctgacctcaatatcaaggtcctttggaactataaattgcttttagaacatgggctatagatccttctgttacgaaatttatagacaatacgcaagtgcaagtaatcaagtagtaaactca

SEQ ID NO: 168079 - DNA, 1302 bp, Cannabis sativa
ttttttttttttttgagaaagctttatggttgttgctttgtgtgtttgaatagagagaaaagaaaatataataactaattagatttaaggtttctttgatttaggctgggctgggctggtgtatatatataatttttttttgcttgggcaaggctgaacggttcaatttgggttcattgggttaaaaaaaaccaagccgaaatcaacccaatagcagcgggttggatttttatcaacccatatgtatttcggcccataaaaaatgaccatgtttcggcccatttcgggttgggttggccgggttggtcggcccattttcaacccatatgctcagccctattttgggtattgagttttggttccatggcttttaaatgatttatgataatcacacatttgcttattctatttagatgtgatatactagtacattatattagcaaactgttcatagattgaattgctcgtttttgaagtgtatttgttatgtatatatttatttcaagattttcaatttaaaattcagtgagtgctattttattattttttattctcttattttttttaaaggaaggtttcatccttaaatacatatgaatattgttttaaaataagatatttaaatacatataaatacaatgttacctaagaacgaggtaaatttgtccatatttttttttcaagatttcatatatatacaatatattaaatttcaatgcccaagttcacattaatatacccacgttataatacatttacttaccaatgtaactagattatataatttacatcagtagatagctattgttggcttagctatatatatattttttgtattttttttaattaagtagttaaactaagtataaaaatttaaatttctcttttattattcgtgattagataaaaatttgatgattttaatatttttaaaattaatatttatagttaaatttttttagtaataattcatgggtaatacccattaagaaatgatccatatatatatatatggtttgagtttttagtttctttcttgatacatatgtatgataatattctttctttcaaataattttttttaattttggttatggcactgtattgtgtgtatcacgcaattcttttaaagcttttagctacttcgtatttatcgtttaaaatggatttatgatgtaggatcattgaatttgacattttgttttacttttagtttatcatatataatttatgatttgtggatctaggctgcctagatttactgttttttttttttttgttactttggaaatcgctaatgtg

SEQ ID NO: 168080 - DNA, 1186 bp, Cannabis sativa
ttgtagaattttcctataatatttatgttattacaaacaatatgatattttaatttatcgagttttaccgattttacagtattattatttttaaactaattatgaagtttatttaaattattatttaaatataacaattgtagtgatttttgttaattaacaagaatattttttaattaataaactcttgattaattcagaaaaataaggatattttttagtataattttggatgttgtagtagaaataattttttaaactaaatttattaatagtgtgaccccaaattacactgatatataaaaaagcatttatgaaataattcttatgttatttgatttgatttcatatatcatatgataaaacaattattatgtacaacaaaacatatagattaggttcataggccttgaaataatatatgtacaattaatatatgtcttaaaccctaattttaagattggtaaaaaataaattgggttaaaaaatgaaaaatgctttcattgagagttgaactcaagacctcccgcttactaaacgggtgctctaaccaactgagctatgaaagctttttgatattactcactttccttatttatataaattttgctattaatggtgtcactgatttatggaggtattgtggaatttctataaacctcgccggattcgaagtttgaggtctcgtttctcgacatttgccactcccgatttgttccgaaaactgaaacaggtattatataatttctatagcttgatttggcttttcccttattagttttcgttttgggttttctgattgtgctaaaatatcatctctctttatttgatttcgtatgttgtgctttgtaatttggttttgatgtttgtgtttgtttatataagttggtagaaatgcctcgatcacttttcatgtatgtatttaatttatgctgaaatttcgaattatttctttcttttctttgttggatctgggtttgtggctgagatgtttatgattaattattgtgaaatgaaaagtcccctgctttaggtatcaaaatgaatcattgtgtcatctgtctgttaaatctgcttttgattttggttttagcatttagtttaatttctttcaagtgtagcaattttcgttattaaaaggttggttggataattaagaacagtatgtggaggcacacatggatgg

SEQ ID NO: 168081 - DNA, 534 bp, Cannabis sativa
ctctctctctctctctccagatcttacacgctctctctccctttctaatctgcccaactctctctcaatctcgatatgcatcgaagttgcaccattcgaatccaaagcaaggggaagaaaagagaggaagaattaaaaggttgttcatggctcaatctcaatcgatctgcatcaaatctgcccatttgtttttttaatacattttttttgtgtgtttgaatatgagattgggattgcgatctcgataattgattatttttttattgttattttagatatttttaatctaaaatgtttagaaaattttatatgtaagttgttttagatctggttttgttgtttaaatttagtgtgatttttgttttaatttttttttgtctaatttgaatatgaaaaagagattaggaaggtgatggtggtggtggtctcattggtggtgggtgtgagaccctaactcgggttcgctcattggaccttgacatcactcaatgcttagcttgtaggatggcagcatatgagtgaagtgcacctgcc

SEQ ID NO: 168082 - DNA, 877 bp, Cannabis sativa
  modified_base (249)..(254): a, c, t, g, unknown or other
ctctggccaccctatggccggccagcatacatcctgcaggtgcatggccggccaacctttggcctaataggatttcagtgtaaaacttcatatgtagacagcaagctagaccacggattgggccttaacagcccacgaaattataaggaaaatatctatttttaaggggcattttaatcatttatattttattaatttaatatgtaactaatagcttattttacctatttctaagggatttgaagggtnnnnnntctcctatataaagagccttaattaaacctaaaaccctagtctctaagttctaagttttagttgattaagtctgaaaccttagctctaagtttgataactcatctctctctcacacgcccactgctactcatacttgagatttaccaactctaattcttacattgtaacctttagagaggtacttcagatcccatcactatagtgatctgagtagtattatctcttagtatcaatgcaactaaaagaagagtaggtcattacctgctaactaagggagtaaaacctctataaatcatgtgatcatttactttattgctttaattgtgtaaaacgcggcaagcatcagtattacattcaactccgctgtcgattggctaaatttgaggtcaacaattatcattttccctttaccggttttgtactcatatcccttatcatctaaagtacctaatgagatcaaatttctcttcaaatctagaatgtttcccaccttagaaagagtcctgattatgccatcatagcttctaatagcaatcgtaccaatgccaataacttggcatttgtagtcatttctcatcatgacacttccactgtaaagcccgcttagctaatttggaaatta

SEQ ID NO: 168083 - DNA, 629 bp, Cannabis sativa
gttgggattggtatttttgaaagagctgaaagaacaacaatgaaaagaagctagtaaattccaaacataaaattttaacttggaattgaagtttgaaatattgaatacttacgtataattctaaaggtaatggtgttaattagatgaagtccgatcgtccaaaagaattcttgcttgaactctttttttttatttgggagtcattaatcttattatcattacagtgagacccaaatagtaaaagttgcctgagctgttattcctcacagggcatgtatttaaggcatagaagcacacgatctctacgggatctgggcactcccttactaagatgtggtaaagtgacttttagaagactaaggtctaaatgtattcgggaaaagttgaaagggcgtgaccccaatacaattttagaagtccttgaagtactgattgagaggaaggatgacccctactttaatatgccttatactccaagcgcctatcattgaacaaccactagtgctgcaatcttcttcatttgacaagcgagttgaggacaccaatgttggaaatatattttactaggaacttggatctactcacaagtatgttgatttaacaacctaaaattgaacttctaaaacgat

SEQ ID NO: 168084 - DNA, 1101 bp, Cannabis sativa
atagtttacaatatcgaaaataaagaagttgaaaatagtctgttgcacgctgtttgaactctattttcggtattgtaaactattcataagatgtctattataattataatgtataagaaatctcctactgtaggacatgatatatttaagggaacttgttaggtagtggcatcacttttgctcttcacatcggtctatttcccatatagttgtaatagcctaataggtatcctagccatttttcgtatccactgactttgatatttggcttagttcaatgctttaatgaagtttagccaacatgtagatgtagcgttgtagtcattagttttatgagaaatcatttttggcttacagaaaggatggacaaaagtctaaatttcagctagattccaatttcataatgaatcagagaaagaaaaatcaatatagaatatgctattgctgtagatttataaaattatccaattttcgacaactttgatttgatgcttgaaagataccactgtttctttcaagctagaattccaatcatagagttaaaatagcaactttccagaccttctttctcctactagaactgggtcgtgttccttctccataagacataatgttgtagcaacagtgtgaccacacccccgattctcccaaaaacatggcctataactaaacttagaagatagaagagaatagggaatgaaagaagagatggtgtttggattcttcacctgtttacagagaatacaccaatatatatgaatggttgtccctcttgaagagtcttcttagtgtctagctttactaagagtaagttgccaactgaaaacgtaacaccttcaaatggactagatccttccaaatgaaagggaatggtgaaaagctttttttattattattggtgtaagctattaagctttctaaacagaattttacatgtatggtcttctagtgtatcatgaagaaactgattccagcactaaaaatcaattatgagatttgggctgttgccctttcattttagaaggcgtttggttgggaggaatgaaaatataggaatgggaatgggattaggaataggaatgaaatggaataaaatttaaa

SEQ ID NO: 168085 - DNA, 1128 bp, Cannabis sativa
ttgggtggtgtgacagaaagcatcgacaggagcagcacagttgaaaccaggaggaaaggctgtgacaggattgtctctctctgaggctaggaattcaggagaggggatggggttatttccaaccaggccttgtgaaacagccacttctcctgtaggagcagcagcagaggatgaagagccagcttccacatcctgagtggtgaggaattggttgacagcagcagcaagtgtttgatcaacttgcccctgagataatggtaactcatcaagagggtgagagttagagaggtcaaacggattccgtttaaagttagttttagcaggggccttgagaggaattttatagtgcaaaggaggtgggaggttaaactcatcacacttctttaggtacgagacacatttggtgagggtgtgatcaaacataccacaatggaaacagatattgggtaggctttcgtacttaaaattaagccatttctccttgtgaatgttcctaaaatcaacaaggatacccctaggaataggcttggaaacatgttgatttccttgtttgaaaaatcattgaagtaacgacaaagactattcaatattggtttaagtttgaatatttatataggggaattctaatatagtttgatttttcctcatactataaggaatgttatttgaccaatgagaagatagaaaaaataaattgtacccaaattttattatttagcatgtacgtgattattattttacaacagacagacccaagtgattcaaactattttattactctattcattcaacaaagaggactatctaacgatttcacatagaattgaaaaaaaaaattgccaatgacgggtttaaatgcaatttaaattaactttttaaataataattcaaattaaatattaataaattttttaattattaatattattttattttttaaataaaaatataattaaatattattataatatgtataaagttttaattgtatacatgcactctgtcactcttatcgtaagaatgtacaccttacatcttaataaccacgtgatctaaaatttatagtaaaaaaaactttcctaccagtaggaaacttatgctaaatcgacctaccatagtcttgccctt

SEQ ID NO: 168086 - DNA, 854 bp, Cannabis sativa
ttttttttattattattatattcccgaaattaaaaataaactaactattaaataaagagtaattaaagtgattattatttgtctttagcttagagaattattatgtatatataaaatctatcaattaaataaatgttagtgtagtctctttgtgggacaaggagtgttgacaagcttggcatgcctattacataaaggaaagtcataacattattttttaaatataagtatgtatgtatgagatattattattataatttcctaattttgcgcttcaaattagtaattaattaatccttttttcatataatatatgtcactattttagattgactcgggaatatatgtgggaagctcttatgttttttatactgacactcagagttcgcggtaattcagaagggaagaatttattaagctttgtgaatttatattactcggagaaggttaagtatgagattttaagactatatacgtataaggactacatagttaaatgcgacttaaattaattaaagggtactacttatactaataagatgtatttttttggtagcacatcacttacgaactcaaaatttaagtgtacttaacatttagcaatcttaagataggtaacttctcttccaaaaagcgtgcaaaccaaaatggcatacttatgtatactatgtaggcatgagactacacaagtaaattggggacttgatatattcatagtgtccaattaatgaagctatttttgaaggaacctaccatgaagcatatagatagtgtgaccacatgattcagtgatggattagtaggacaatgtgacagtcagtagtcccgggatccgtaaggggaaacaccgggta

SEQ ID NO: 168087 - DNA, 2357 bp, Cannabis sativa
tcaattaaaatatattaaaagtcttgaatttgcgattgctttcatattatctgagaagaaccttgaagaatgagcgagacactcattagagcgggatactagtatactaccaccaccatcaagaaaagtacaaaatatttatgtacaaatatatataaaatgtggtataagggttattcgagccctaactttgagtttaacaatataaaaccccaccatccaaaccataagtgaatagtaaaaataaatattaggttatttaggaattttgttccctgaactatgacttatgtattattgtgcccctacatttttcagcttgttaaaaatagtccgcgaactatttacagtgttgtaaagtagtcattttgtcaggttttttcacacgtgacaagtagaatgatgacgtggttgtttaggcaattgacatatcaccgccatgtgtatataaaactaagaaaattaaaaaaaaaaaaattatattttatatttttaaaatatgattaaattaaaaatcaattaacatttaaaaaaattacataaaactaaattaaaaacttttattttttttttcaaattaatttcacacgtgacgtatgacatgacactgatgtaataattatttaaacaatcatgtcatcattctatttgttgcgtgtgacaaaattatcaaaaattatattttataagagcacccacaactacttttctaaaatagagaagcttttgttagaatttttttagtattaattttagtgtatttgtatttagttgagtaattttacgcttgttatcttttatttttgcatatttaaaatataagaagattagaaaaatatcaacggaaaaagatgaaaaaaaaagataaaagatcgcataaaatatcactgtgcaaaattgggatttacctagaaaaaaagatagtatgcgttgaacacgtgtgaaaattacacacgggtcgcggcctaggaaagggcatgtcgcggcccgtattaagaaaaagcagcatcatcgtgtggaaattgcacacgggccgcggcccaagaaggagcgtgtcgctgcccgcccctagtctgaagtagaagaaaaagatttctcactcattaccgaggcataacaaacacataaataggatctccattatcatcgagactataacaatcacaatcgttaattattgaaccataagtggtgagtatcactttttcttacctcagtccataaatcaggcgtgcgggtcgacctgagtggaaatagggttggatgatcccggtcctatgttacaataaccaaccaaaactaactcatcaataataaatgccttccttaaaccaaaactttgggaacaaaccctaattccgaaaccgaacaaaaccaaacttctaacaacccaaaaataggtcatacaacacataaccaacctaaatcagatactaggtactaccttgagccaaaacagaacttgaaagaaactcgacaatttcccctacagggcaaccgaccgaccggttctggtgcaccagaaccaaccggtcaatcggttctggcagaccagaaatccttaggtttcttccccaaatttgaacaaaacactcaccaaacttgaccaacagctccagtacagtatattaatcacaaaacaaggtattcaatttatccattaacaacaattcatcaattatcccaaattaacatgttaaaacctaaattagaccctaaaattcataacactaacatagcagccatcaaattcatttaacccaagctcaaacctattctaaaataggtctaaaaatacaatctcaattcaacttaaacccccaaccacgaagtcacaaaatcctagcctaaaaacttgaaaatcttaagttcacaaagaaaggatcttacctcaaagcttctaggttgaaactaggtacaaaacctgttgaaatcaaggagaaagatgaagaaatcacccctgctatggctcgcttctagcttgcttgagaaggagagaaagagggaaacactttggtactttcttaattctaaagaaataacttaatacccttttaaataatcaacattttctattattaaacaatataattcaaacccattaacaaagtggaattaaccttataaatgaccattctacccttcttaacataattaaagatatttaacacttagggttattttggtaatttctagctaatcttaaaccgacaacttaaaattctaaactagtccggtataattcccatgcgatccatattttattatcgtgacagttccgaccactctgttgagttcccatagtcgtcgggctcgaaaatgttttattccataaatggtatctacgatactcccat

SEQ ID NO: 168088 - DNA, 702 bp, Cannabis sativa
gttagttagggtgttacataaaggctactcagctaatgaagacggggtgtctagcattcttagtcagtgtagtggatcccgcaatagaaacgtaactgaccgtagaaaatgtgcacgtagtttgtgcattttggaggtttttccaaaagatctactgggactacctccagagaggtggagtttttcatggaattggctctagaaactgctctaattttaaaggctctgttagtgcagattttccgttaaccaaataaatagcatttttttgcaataaatacactacagaatttaataataataataaacataagatattttacgtagttttatagttaaaatctacatattccacgagtccgtattataaggaatattttctgaaatacaaaatacaaatctcaatatataaaataatagaatttctctctatttttttatcatcccctttcccataaattttgcccctatttataggtatataggttggcatttatttttattgagattgattcatttacaactgctgatgaaacatggacattccccacgtttcatttttttacacatggaataatatctaataactacccaactgctccttctctttatcccttaaatggttatgctgactaggaaggttacattgttggaaatattttaacaggatcttagatttactaacaaagatcggaagagcgg

SEQ ID NO: 168089 - DNA, 1699 bp, Cannabis sativa
tgtggcctgtgccagggcgaccccctatccccatatctattcatctgtgctgcagaagtcttctcaagactattggaagaggcccatggaaagaggaatattcagggaattaaactaagtagaggtggtccagttctatcccatctgttctttgctgatgaccttatcctggtcggtagggccaatttaaatgaagctaagtgttattgggagtgcctagagaggttttgctcttggtctggacagaaagttaataagcttaaaacgttaaatctttttcagtaaaaatacccctaatggtatgagaagaggtatcaacgaagcgctgggtattgattctccagagggggttgtaaaatacctgggattacctctattcagatctagacagaaggatgctgacttcaactttatcctggacaacatcacctctaaattacaaggttggaaggctaagactttgtctaaggctggcagagctaccctcattaagtctgtgggtctggcgatgcctatctatgccatgcaaaccacgaaattatctagtcggctggtcaagaggattgatggtttagtcagagatttttggtgggtttcgagaaagggaatcgtggactacatcttaaagcttgggataagctttgccaacctaagtcattgggtggtttaggctttaaggaaaaaagaagaaatgaacttggctttcttgaccaagtgaggttggagcatattgaaaggttgtcagtcgttatgctgtaaaattttggaagccaagtatctaaaagggaaggactttctcagatgtagatacaaagactcggattcctagttttggaaaatgttgtgaaagttaaagcaattctaaggaaaagggcctgtaaagtggtggctaatggtagggagacgagtatctagaaggatccatggattccccactataaaagttttatcccaaaaccaaatggcattggttcaaccactgacaattgtgtggctgatcttttgaggtctaatggcaactgggatgtaccaaagctaaataaactctttgaccaagaaactgtttctgcaattttgaaaggtggcaaaccctcgggccaaggagtagataaatggatttggaccttggaaagaaatgggcatttcacgtgcaaatcgacttacctgtctcaagctttggaaagagcccctcattgtgaggtttctccatcgctttggaataagttatggaatagcaaaattttggagcggcacaaaatcctttggtggtgtattcactctaatgcgctccctgttagatcagtgattgaaaaaaattccacatagaggacacaagctgtcctttatgtgggatgcgggaggaatccatggaacaccttttcctctcttatgatgtggcagtacatctttggcgcgcttcaccgtggggcatttatcctatctgtaacaatgggattcgggtttggaattggatcaaatttatatggaatctcactaataggggtattcgaggtatccgagtagaagaagtctttctgtatgcttcaattgttgttgaaaccatctggaggatgcgtaatgatttgatacataataactcactttcggatgttttgaaatgtattgaccagatttgtacttcttatgcagagttacatgatgctttattgccttgcccaaatccaaccttgagggtgtc

SEQ ID NO: 168090 - DNA, 790 bp, Cannabis sativa
  modified_base (542)..(566): a, c, t, g, unknown or other
agggcataaaacccaacaagaatcactagggtggttcctccaccccttggacctaggtactttcgtactttgtccttttggcatggtttttcctttaggatcaaaagggcatcaaggctagaaagcatcggtagccttctgcgtccttaagggctggccggcgggattcatgtctgttcgaggaggtttaggagtagacttttgtggaggctcatttaccttgcctttaccattatccttgtgaggatttgaggtttcggcctcgatttgatgaggaccatgttcttcagccattactacaatcgaaggatcattattggaatccgctaagtcctcgaacttattttggagatgttccatcattctcttcattttctcagtgagctttctgttggggattgttttaccaggatctagatttactaccgtatatgttgtttaacatcctaagcatgaatttctaaaacaatagaatttaaatacatttaaagttcaagaaaccttacattggttgcagcataattaaatgactccttccactnnnnnnnnnnnnnnnnnnnnnnnnntgtcgcagagtattatcaagatcggagcccgattctcctttaggtgttggattcttcacagtcttacacacaatgattgagtactagacttgctatatgtgggcatgtactctatcactatataggacaaaaaattgaagagaaagagagagagaaggattcaaaatagagagagaagagagaaggctcaattttcactaaaaggctaatttgcatcatctgtc

SEQ ID NO: 168091 - DNA, 797 bp, Cannabis sativa
ctaagtcgaatattatgatgtaaacaatcttatttgataatacaatttgttgttaagctatattttttagcgtcaacaataatatagggtgaatatgttagattcaacacaaaaagaattaggttaatttgtgtatcagaatattatctagacatatatttagcagttaatataatgattaattaataaaataatgagatataaatattttatttaaaagaaaatggcagcacatatattatatgtgaccacaactagtatatatatacatcaatctgcattttaacaataatataagtaaaatgagtaattaagtataaataggcattagtggtaccataattaattgtagggttcacaagcaattttatttttttttagattagggttcacaaggatttgacctctcatctaccatgaagtataagcacaaataaagagaggtccacttcataaacctctttcaactgtaatacttaaattggaaaatgacactcatctactaatttagtctcataccccactctaccttcgcccttcttctttatattttattatcatatggcatggaaattggcagaggaaactgaaaagaaaaaagaaaaaagtgtttcttcctccatcaacttgaattctacttctaatttaatttctttcatacaaataaatgtaatgattaacgtttcagtagagcctttccatggattccattaatgtctattgacaagtccaatataactccacacacacatgcataaatatatatatacacatgtgtgtgccaaagttgagactga

SEQ ID NO: 168092 - DNA, 699 bp, Cannabis sativa
  modified_base (638)..(652): a, c, t, g, unknown or other
ttttttttttttttttgtatacaaaccagcaaactatatcagttagggggaggcttttctctatctacttgtttcttaattaagctagatatatatacccactttaattaattggggtgacacatgcatgcatgtaatataatgatgataacacacgtgcatatatatagttaattaccctaattaattaatgtaagtatatataaaagcatgtgtcacctctactttttttgtttcttaagaagaaaaagaatctacaaaaaagtctggtctagagaaatttgatgagaaaaaattcaagacgcagtatacatatatatatatatttatatatatattacttactatataaaatgcttatttaatgttaatttattgtgcacttaataatttgttgtgtacaataaaaaattaattttaataaatacttattccataattcacaagtaaaattctattattttcaaagattatacagtttaagataacaattcatatccattcgtacaagcacttatttattcacacaagttataaatcataaataaaataaaaaaacaatcatcttctcaataattaaagaaaaaatctttcttcgccaccatctccgatcaacttttatatatatatatatttannnnnnnnnnnnnnntatctaacggcatttcttggtttaacattcttggtttaacagaatat

SEQ ID NO: 168093 - DNA, 1143 bp, Cannabis sativa
tgtccttacggtggatacaagatgagtggatttggaagagatcttggcttagaggcacttcataagtatcttcaagtcaaatcagtcataactcccatttacaactctccatggctttaattatttcagatttgagtgtaccagctaatacataatattgggagttgtacaattttttttttatttttaaggttattctataaaagaaacttgtaagatttttccttttttgaacatttaataaattcgagtgcttaaaaagtgtaaaataaatagaatcattcaataaatatgagaacttgttattgtattaatatcatatgactactgttgtggctgttttctacaattacgtaattgtaaaccaacagcttgtaaaggacaaaggaggcaagagttcaaataggagcactagtggagtgtcagtcaaaaggactccaaaaatcaagctagtatgattgcaattgaataatgagacaacgataaataaataaaataatgatgataaagaggtaaatcagatggttggatggatgaacggttgaaaaaaaagaagaaaagtgttaaagggtattaggagtgtttaacacttttctacgtgttaatattgctattgatttaactaagtattgagttctatatagtttaatgtaataacttatcgttagccaatcacaaaataacacttttaaaatgtgatagagactattggtacctaataaaaatgctcaaaaaagaaggtggtggagtaaggtggaggtcagatgactggttcgagtgactagagtattcgatattaagtgcccggacggttccctctctcttactcactccctttagtgtcattacttcttctctttaatcacatgtctaacttgctcaccagagttattccataaataactctcgcatgtctttacattccttccaactaattaattagtgtacttgacttcgggttgagttatacaaattactcatgggttaatttgggtacgactagttctatttgttttattgggctttattagttttgactatgctaattatagtaaatgacctcaaattataggagtatgttagtttatgtcctcatttcaaaaaaatataacaaattgtcctaaattataagactatgttagt

SEQ ID NO: 168094 - DNA, 711 bp, Cannabis sativa
caactcttagaatcttataatcgattgtaatctcaaatgttcaatcaattgccatcccgacctaagaaaaatcctaaagagaatgctagtgcagtgaccttgagaagtggtaaacaatatgacccacctatcatccttaaaccaaaaatagtgccacccgaaccacaagatgataacccaggagataaaatagaggcacccaagccaaacaatcttgtcccaccaaagcctacatttagcacaccaccacctttcccaagaagattgaaaaaaactaagaaggaagaagttgacaaggaaattcttgagacattctgcaaggtggaagtgaacattcctcttcttgatgccattaaaaaagtgccccgatatgccaagttttttaagaagctttgcaccaatagcgcaagttgaggggtaataaaaaagtaagtgtggggaaaaatgtgttgacagttctccaaaagaagcttcctccaaagtgtaaggatcatggaactttcactatcccttgcactattggcaatactaggattgagtagtgtatgttggatttaggggcctccattaatgtcatgacattctttatttatgactccttgaatttgggtccacttgaagaaactaggataatcattcaacttgctgataggtcgaatgcctaccccagaggtgtcattgaagatgtgctagttcaagtcaatgaattgg

SEQ ID NO: 168095 - DNA, 1058 bp, Cannabis sativa
aaaactttttttttttttttttgaaaataagcatagtcatatattaaataaagcagttagacatcgcgatcattacaaaaaaagttctccggtaaggagtagatcggaatagatccgtacaataggtgggtgaaggcccactttgccatattatgggcagcatagttacaattcttactaatattcgaaaaattacagctgataaaagagggagatgacttagtacaaaaggagacatagttctcaagagcccaatgagactccttccctaaactcaaaatcttaattagctagaaaaatatgtaaattgttcaaaaaaatcaaatgttttttttaacattgagagagggagaattcaacttagtttggcttaacatgcacttaggatagacaatgaattatgatggtctgaagtagtccttgcactgatattctaatcatctgcaaaaattcaatctcgtgctcattttcgggaagcccaaacgcttcactcattatttatcgtcacatcaattgtagatattttaaatacggataaaaatttgttgcaatttttcatttagtttctaaatattttttacaaaatagttataaacttataaactttagattagataggaaaatatgtaaacttttgttttttgaatttttttatttttttttttttttgtagtttttactaaattccatatttgtagtatttttttcaaaagttttaagtaattttgtcaattctccaaaataaagcaagcttgcctagctttttcatagctttaaataggccgaaaagtttcttgacaaaattaaattagtgtcaattttaaacttgacttatttatatatagtttaaactactttcaaagtgttgtcttttggtatttgttcttataatcatagaccaaactccactgtacttgagtgtgatctataactagtaataagagaccaaaattggtaactagttactgacaacttagttttatttatttttttaatttatcttacacttaattttagggtttctttttatttgaaaaatttacaccaaatactacatt

SEQ ID NO: 168096 - DNA, 635 bp, Cannabis sativa
aaagaggagctaaatatacgctatctctctttcttccccctctcattgctgctctttcttcttcttgcgcagggtgaccattcaatggtgtggggttagattttcttgactcttcgagctccaatggtaatggctgatttctctaagtaaagaggcaatggtggttttttaattctctttgttcatgcttcgcaacatataccttggagtttcatatcgttttctctgtcgaataagtcgctgagatcgatttcctcaagcgcccaatctatttcgaaatcaacatggttttcttagcagattcaaaattaacacccatattcgaaatcaatttcctcacctaacctgtttgaagacccattttccttttcaatctttcgttccccatctcccgaaactccattcgacaggtcatcgtctccgcttcgtctctccaatgcaggtaatcggtcgtcgtctccgctcgtcatttatgcgtttctcgtcgataaccgaagagccgacccaagaaacccaaattttttttatataatattttgattttttttttgttctgggaatattgtatattattctgggttgatttttttcgttctgggattgtatattattctgggtttgtttttttttttttt

SEQ ID NO: 168097 - DNA, 1229 bp, Cannabis sativa
taagcaagtttaatgaacacatttcatttagttgtgtcaaatattcctttaatgttcttctttgaactcttctaatggaaacttagcagcagaagaatatatcaaaccgaattattatggattagtctaagcaagttctaattagcataattcattttggttaaccaaaagggaacactacaaacaacttaactcactttttctatgtacatatcatgatctttcttgttagatataaccaaacatgaatccaatcaaattttattatggcacttttgtattctgtggttgatatttgttacctcagcctttgtcaactataacaacttttttataatcttaaggaatattttcctattttgatccaacttttgaacatccaataaaaattgatatatgaaacaattaacccaaaaaggaaagcctttcttctgttcaatagattctttaaagcatctcataatatattctggtatatcaaattttgtaatgatttgaatcaaagcaacttttcagagagacagtggtgaaatgatatgaaccattgtttgagagaatatgatcaatagaaattgacattataaaccacatcaatctcaaccttttctttgagccattcatcttatgataaatatttatcttaaatgtcaactaagaacatgcaagaattaagataaccaacatgaatgaaaaatcgaacaccataaactcaacaaaacacataccacaaagttaaaaatctaatctttcttgttgttgtttggatctccattgaaaatgccaaaaagtagttggaaaatattataaaaagctctcacttttacagagctatgatcaatgaacagaaagagttccatgtcccatatgtcataataatgaaaaggagctaatttttcacagaagatgggagggaatctctattgtcacaatgtcggcatacagaaagatatattccttgtgggactgactggttgcaactgttcttagattctcatacatttatcggattaagttattcatttaaatcaaaagtgtaaaacattcatacaaatttgccttcttgcagcatctctttaacactaatttttattgagaaaatttagaaatatgttattgtaaaggagaagattataatactacccaaatttgaagttaataactatgagcatgtttggtttagtagaatgaagattgtaatggaataaaagttaccattacaatgtttggtt

SEQ ID NO: 168098 - DNA, 1125 bp, Cannabis sativa
tgatggatctctccaacaaaatggaagccaacctcacattttgctccagaaatggtgcctccaggccctacaacaacgctggaagatgagagcctactgattcctcacgatttccatctcgtggtcaatacttttctcaacaacaacggtcttctagtcacaacaggcctttgtgtcaagtttgcatgagatatggtcacactgcccctacttgtcattaccgttttgacaagaattgggtgaatcctaaatctgtcataggaaatcctcagcctcaagtaaatatcacagaacagactcttgattatgatcctacagcctttgttgcccaaaatgtgcctggctttggagatgatcaaggttggtatgtggacacaggggccacacaccacatctcttacagtgaagccccacttgacaccaccactccctactccgattctgaatccgtggctgtaggtgatggtaagaagctcattatctctcatattggtaaagcttttattccatctaagaattcctctcccttgcttttaaattctgttttacaagttccttccatcactaaaaatcttgttagtgtctcaaaccttactcatgataacaatgtctttcttgagtttcacaaaacttgttgtttcgttaaggacaagcaaacgggggctgttcttctcaaagggcaacttaaagatggcttgtatctccttggtgatgaaggctcgagtttgtccaatacctcaattcaatgtcatatttagctgaatttccatattcttgtacaccaaaacaatgtcctaattcttgttcatgttctgtgtgtaatttttcaagtactccaaagtcttgtaataatgccaatatcaataaaacacactgtcttttgtctaattctactattaatgttgctgcttattcttctactactgttactgacattaacttgtggcattgtaaacctgggcaccctgcccctaatatcctatccaaaatcttaacaacatcgagcattccccactctctcaagaacttgcagttctacagtgcttgtcaaaagggaaagatgttggaaatcattttaccaggatctagatttaattactaccaagtatgttttattaacatcct

SEQ ID NO: 168099 - DNA, 785 bp, Cannabis sativa
ataatgtgccttaaaataggtaaacaacatacctcaaattagataaataatatgcctaaagagttggtggatggcgatttagaaacttaaaacacctccaaagatcaagcattttttcccttttcaaggggatgattgaagcaagaaagtaagcattgcttcaaacatccttaaccttaagcatcacttcaaattttaaaatcagagacttgttgggacttgaaggagcaacactgaacttgtgaagcaaaatcttaaaacatggtagaaatatcaggtacaagatccctaagataaaaggtgcgacaataagccatccaagcaagggatgagcaatacttaggaagtgtcatgtgatgctttttcggttaagactttcgttaaagcattagttgtcaatagaaaatgagagccacaatctggagtgatgtttaaggttaggtaaacaaaattaactatcctaaaataaggtaaatgacaaaccctaaattaggtaaacaacgtgcattaaagtagtaaataacatgtcatattacgtaaataatgcgccttaaaataacgtaaacaacatgccttattaggtaaataacatgccatatagtaaacaacatactttaaattatataaatgatgtgccttaagttaggcaaataacatgccttaatttagctaaacgacatgtcttattaggcaaactacgtgccttaaaataaaataaacgacatgccttattaggtaaacaacatgcctaaaataaggtaaacgacatgccttattagataaac

SEQ ID NO: 168100 - DNA, 3777 bp, Cannabis sativa
agggcataaaacccaacatagggatagctcccaaagagatcccaataaaatatgcgagtaccataacaacattggccacaccaccaacgagtgcaaaaacctgaaagaaaaaattgagaacctaatctgattaggtcacttgtatgaatggatcaaaagcaggttaccgcacttaaacccggttccagtaggaggcccattgcctcagggaggaacagggagtatgcccaaagggcaggtacctcccggaggagcgcttcctcagtaggtgccctgattaccaccctgatcgaatggaagagtggccatgatctctggtgggcctcttattggaggaaccaccaggaacgagttgaaacgttacactgtagccataaaacacgatgaagtgcgggaggtcactcaactcccagcgcaaaggcccaaactcatggaccaaacctatcactttcactgaagaagacacaaaaccggtgcgtttcccccaccatgaccctctagttgtagaaactcccatcaccaataaggttgtggctagaatattggtagataacgggagctctgtaaatttattattcaaagaagccttcatggccatagggctcacggacagggacctatcgcctagtggttcacagctcacaggattcaatgggacgacactcatcccaatgggaaaagtgaggcttcctgtcaccctatgtcctgacaccccacagagcactttcaagtactgcacctttgttgtggtagactgtcccaccgcctacaatgccatccttggccgaccggccttggtcgatattggagcgatcacctccattcgacacttatgccttaaattccctactcgagaagtcgtagtgggaacggtgagggggaaccaaggagaggcgagacaatattacaatgttgcagtttatctatcagttttggtggtacaaagagtcgaagagcccatgtgacagaaaaagatgagttggatccccttgtgggatctaaaacaactatagaacctatggagaacattgaggaagtaagtgtgtgtgacctcgactccactaaaattatccgcctaggaaaaaacctagagccggaagaaaaaaacaagatcatgaatacgttaagggcagccacggatgtctttgtgtggtgccagggggatatgactagaacaagcccccacgtgatcacccatgtcctgaatgtcaacccaaacatgcctccgatacagctgaaaagatgtcctcttgacccaataaaggtcgatgccttggagcaagaggtggataagttgctgaccaatggcctaatccgggatgtgtattacccggagtagctagccaatccagtgttggtgcctaaaccgagcgggacgtggcatatctacatagacttcactaaccttaacaaggcctgcctgaaagactgcttctcgttgcctcgaattgatcaaatggtggacgccacctcaggatttaagttgctatccttcatagatacctactccgggtacaaccagattaaaatgcatgtcgcggatcaagaatgtactagcttcaagaccgataagggggtatactattacctggtcatgccgtttggattaaagaacgctagagcaacctatcaacgcatggttaaccgaatttttaaaggcctcctgggaagaaacatggaagtatacgtagacgacatgctggttaaatccaaaacatgcatgggccatggagatgacctcacggagtgcttcgaagtggtccgaagatatgggatgaagcttaatcccaaaaagtgcaccttcggcgtcaaatcagggaaatttttaggatttatcgttactcaatgcggaatagaagcaaaccctgaaaaaatacatgccttgttgaacatgccttccccaaagaaacacaaggatgtacaaagcttgactagaaaggtggctgccctaagtcgattcatctcccgatcaaccgacaagtgcatccctttcttcaatatattgaaaaaagtgtcaaggattcgaatagactaaagagtgcgacgaggcattcagaaaaataaaagaacacatggccaagctgttgatactgtcaaaactggttcacagagaagacttgttattgtatttggtcgtctccaagaacgttgtcagtgcggccttggtctgggaagaagacaaagtccaacacctagtatattatgttagcaaacgcataataggggctgaaacttggtatcccttgatcgagaagttagctttttgcctcctaatgacctcaagaaagctaagaccctacttccaagcccattccatcaaggtacatacgaatcacccactctggcaggtcttacagaaacctgaagcctcaggaagacttctccagtgggccatggagttaagttagtttgatatacactatgttttgcgtgtctccataaaaggtctggccctagcagacttcatcatagaatgtaatgaagcagaagctagcaccagtacaccagcccaaaagatgccgacgtggaaagtgtacgtcgacgaggcgtcgaatgaaagtggatctgacgccggaataacaatgatatcactagatgggctctagctccagactgccctacactctgcatttttggcctccaacaatgaagtcgaatatgaagctctaatcgtagggctaaggctggccaaagctgtaggggctgcgagggtagaagtctttagtgattcaattagtggtcaaccaagtattgggattgtaccaaacacgtggagaaaaaatggatgcttatgtagcaattcttagggaactgctctacgaatttaaagaatacaaagtggaaagaatcccacgagagaagaatgctcaggcagactacttggctaaactagctatggacaacaaaatagaaaggctgggggtagtacctgttgagcaccttacggagccaagcatcaaaaccaaagaaacagtagctactaatgagcaagagccgagttggataaaccccatcatcaaatacgtaacacaaggagaactaccttaagaaagagctgtatccaggaggttacagtatgaggctcatcgatacgtaatgatggacaacgtcctttatcggagagggcttagcatgccgtacttaaggtgtgtgtcgaaccctaaagctagacggatcatgcaggaggtccatgaagggttctgtggagatcacaccggaggtccgagtctctcaaagaaaatactgagacaaggatatttttggccaacaatgaagaaggattttgtagactatgtcctaaaatgcaattcattccaaaggcttgcaaacataccgagagccccacccaacgaaattgctttgatgactagcccctgaccctttgcagtatgggggataaatctcattggatccttaccaacaggaaagggtggggtaaagtatgccatagtggctgtggattacttcacaaagtggacagaggccaagcccatgaagaccataaccgccaagaaagccttagactttgttatcaaaaatattgtgtgtcgatacggcttgcctcacaaaatagtctcagacaatggaaaacagtttgactgcgagaaattcacaaacttctgcaaccaacatggagtcgtcagaagcttctccgcagttgcaaggccaaaaataaatggacaggcaaaggtcgtcaacaaaatactaaaggtcaccctaaagaaaaagttgctggcctgcaaaaacaactgacttgaagaactgccacgagtatta

SEQ ID NO: 168101 - DNA, 928 bp, Cannabis sativa
gaaaccttgagagctaagtacaatgtgcttggtttatgattttaaattatgtccatgtaatatttgatgtgaatttgactaactttttgtagtctttcatagtttaatagggttatcattactctgtttctcatggtcaataggataaaatccaagttaaattaaaaaaatgaaaaaggaaagtccatgaattgaattcaacctttcagtaataaactttgaagatataatcttgtttttcttctcgcgaatgatatatataaagctgttgattaaatatgataaaattagtgatgacaggtatattttagtggtattacatggcttttatgaggtctgagattcaaatagctcctctccaaatctcaaaatgaaaaaaagaaaaaattatttaatttttttagtaagattaaattatcttattaattacttaaacaaactaatcacatataacaaagattatagaatcttattcactttccaaaatgaaaccatatatatgtatatgtgtagctatatgatgatgatcttaaatcatggtgctacacagcttaccgtaatgaacccattccgaagagtgaagtagtcggcttttgagattgctgagccaatgaactgtcgcaccaagcaaacctaaccaaagaaaatgacattgtgataataagatcaaatataaatgttacatatttgtgggtgagttttctccaaaaaaaaagaaaaaaaacaattaaggttcaaacttttagaaatttcaaatttgttgaaagttgtgtattttccattatgttgttttttcattcatatgaataacacgtgcctttctttgtttgtatatttatgttacataattgactttgaaatccttactattttgggttgtgttggttagaacaaataatttccagttgaaacggaagtaaagggcaac

SEQ ID NO: 168102 - DNA, 3187 bp, Cannabis sativa
  modified_base (3034)..(3034): a, c, t, g, unknown or other
ccgtgacacatagtatgtaataaacttagcggtaatgtaccagagtcattagtttcgtgacgaaatcactaaccgataccgaaatagggttccactgagtggtgccgatgtacaacggcagtagtgacactatcactatcgttgatttggggtctcgtgacacatagtatgtaatcaagttaggggtagtgtcggagtcaatagtttcgtgacgaaatcactaaccaataccaaaatagggctccacttagtggtgccgatgtacaatggcagtaatgacactatcactgccggtgtttaggggtcccgtgacaaatagtatgtaattaagttaggggtagtgtaccggagtcaatagtttggtgccaaaatcactaaccgaaaccgaaatagggttccacttagtggtgccgatgtaaaatggcagtagtgacactatcactgtcggtgtttaggggtcgcgtgacacatcgtatgtaatcaagttagcggtagggtaccagagtcattttttttgtgacgaaatcactaaccgataccgaaatagggttccacttagtagtgccgaagtacaatggcagtagtgacactattactatcgttaattaggggtcccgtgacacataatatgtaatcaagttaggggtagtgtccggagtcactagtttcgtgacgaaatcactaccgataccgaaatagggtttcacttagtggtgccgatgtacaatggcagtagtgacactatcactgtcagtgtttaggtgtcccttcacacttagtacgtaattaagtttggggtagtgtaccggagtcaccaatgtcgtgacgaaatcactaaccgataccgaaatagggtttcatttagttgtgtcgatgtacaatggcagtagtgacactatcactgtcggtgttaaggggtcacgtgacacatagtatgtaatcaactttgaggtagtgtaccggagtcactagtttcgtgatgaaataactaactgataccgaaatagggttccactcagtgctgccgatgtacaatggcagtagtgacactatcactgtcggtgtttaggggtcccgtgacacataatatgtaattaacttaggggtagtgtaccagagtcactagtttcgtgatgaaatcactaaccgataccgaaataggtttcctcttagtcgtgctgatgtaaaatggcagtagtgacactatcactgtcggtgttttggggtcctgtgacacatagtatgtaatcaagttagcggtagggtactggagtcatttgtttcgtgaccaaatcactaactgatatcgaaatagggttccacttagtggtgccgatgtacaatggcagtagtgacactatcactatcgttgatttagtgttccgtgacacatagtatgtaatcaagttaggggaagtgtccggagtcactagtttcgtgacgaaatcactaaccgacaccgaaatagggttccacttaatggtgccgatgtacaatggtagtagtgacactatcactgtcagtgtttaggggtcccttgacacataatatgtaattaagttaggggtagtgtaccggagtcactagtttcgtgacgaaatcaataacctataactaaatcgcgtttcatttagtggtgtcgatgtacaatggtagtagcgacactatcactgtaggtgtttagcggtcccgtgacacatagtatgtaataaagttagcggtagtgtaccagagtcactagtttcgtgacgaaatcactaaccgatacagaaatagggttccactgattggtgccgatgtacaacggcagtgtttaggggtcccgtgacacatagtatttaatgaagttaggggtagtgtaccatagtcacttgtttcgtgacgaaatcactaaccgataccgaaatagggttgcacttagtgtttccgatgtacaatggcagtagtgacactatcactgtcggtgtttagggttcccgagacacatagtatgtaatcaagttaggggtagtgttccggagtcactattttcgtgacgaaatcactaatcgataccgaaatttggttccactcagtggtgtcgatgtacaatggcagtagtgaccctagacctaactttattacagactttgtgtctcggaatactattgtatttagaacattaaacttttttttttatatctatatttgtataatattgaaaaaattattataatctatattctaatgaaaaatattttaatgtaatcttaaaaacttatttaataaaaataattagttttcattattaataaatatgataatttcattaattattaaataaaattacataaaaataatgaaagataaatattaatatgaataataattatttcaataataaatttttttgattacaaaaaataaacataaagacaaataaaacgtaagagatcattttagagagaaaaaaaattgtataatgtgtttattcatttgggcagacttgtttatttggacataatattaggatatttgttgctacatgtgagaagtttatgtggatatttgtttttttttatgaaaaaattatttaacttatttatattttgaatttttcaaatcaaattgaaccaaaccgcccatttggtttgttcaaattacgtcttccaagaaaaaatttaatcgaacaacctagtttgttaggtttgttcaaattacgtttttcaagggattgaaaaaactggctttatttttgggtaatatcaggccttgtttagttgtaccaggtttattaattattattttttaatttgtgataagactacacatcacaatcacatccacaagtactatatatatccctctacctctccttcctaattcacacctcaatttagtattgttttgttgcctagagaagttactcgctatctatagatgtatgtataaggataaaatataaaatttaaaatatgtattgttgttgcagtgaagtaaagatgtgtaaaaagaagaattggtatgtactacatctgtaaagaccgcttagttnaatttagaaattagcagttaatcacgttcaattatgaaattatttatagctatttaaataatttattgtactgttatttttgaattcagagatgcatttttatgtcatgtagtagttttgataatttgcattctggtgcccggtattttggaa

SEQ ID NO: 168103 - DNA, 825 bp, Cannabis sativa
catgaacttcatggagagtatcaaaatctattgtactagccaatttagctggtgagtctgcatttgcaatctgttcacacgacacttatttgatggagtagtgctttagctgcactaatagatctttagctttgcttaagaatgctatcatgtttgaccctcgagcttgatacttgccgagaatatgattaataactagctctgaatcactatagatctctagtgattcattttgatttctagtgctaatcgtagttttgctaggagttcctcatactctggagttattaaaatgagtctagcaccaaaatcgtgctcattggaggatccatctacagtttccaggaaggtctagtgtccccttgagttgtgttaggctatttttagcctatgtttcgggtcacaattatgttcgcttttcgatgttataggacagaattacacttgttttctatgtttcaagtttctcgaagttatggaagctccgggctacaaaagtgcatcaaaagacaagtggagccaagaaaaatgcaaaattgaggtttggtacacttctggccgcggtgaccctattcctggctgcggctaaatactatgggcagagagacggttttgagctaggtcagtagccgcggcgagctattccaccaccgtggccatgtcatcactcgccgcggtgagggaatctatggccgcagcgagattccgtacaagtgagtgcaatttagtcttttgaatacgagaaatgagaaataaaaagaaaactacgaaatgaagagagaggaagcgatttggagacctaaaaaagcagtcaagagcggctgg

SEQ ID NO: 168104 - DNA, 1031 bp, Cannabis sativa
attacctgcagttccagaggcaaagctgaggtaatcttgaggtatcaaccttctatcaaacccaggtagaggaatgaaataaccaacacgactaataataattagtaatgctgtcacaaacaatctccgccgtatctcactcttgaagaatgattcagcagcattattgaggacagaactaaaacgcacaaaattcagaaaccgatttctaaacatgttaggtctggactgcagcttctcatagtcgcttatttgatgtgaactctgaacatttgcctcaccatttagcattggtgaaatagcctcaacatttagagactgtgcagatttgccatcaacattcatacagtccctgcggaattgattggagcacttgctagagaatcttttattcaattttgaaataaaaggtttgtctagaaacatgaattgtcttctgctcaattcaatagggtttgttctaatggcagaataagatagagaaaaacatggacaccagcattgaagatcagaacctgcaaacccaattgtcttttcttgagcataaaaaaatatcttcccgtagataatgaaacagactaaaacccaataaagactaaagttttgtaaaatagaactcagtcgaaaaacaaacaaaacctctcatcttggcaggctttctgagaacgggatggggaagaaaggaagtcgagctgaaaagtgtggcttccatggcgggattgcgaggaacagagaacagcagtacactgctactggagcatcaatataaaatgagtaaaaagaaagagaaaatagagggcttttctaatctttaggtaagtcttctcctttctttattagttgtaacttttcttatatttcaagaacttgtaattttgccgctcacaatgtggctagatgggcatttgctcatcaggtgtttggcaatatcccggtggcctctttaccagacaatttattttgtaatgaccatgaggtctaaccttatttgaatctatgatataaacgttttttatcaaaaaaaaaaaaaa

SEQ ID NO: 168105 - DNA, 980 bp, Cannabis sativa
aatataaatcttctttaaattattaatgaacagggcaactatatatattattgatatatatctctcattgggtacaatataattataacattaattcgtaataataataacaatgtaaatatatgaaactattaattaactaattaagaagaagcagtactaccagatttaatggaaacaattttaggaacgtcaacaggaaactgatgaatctcatcaacccaaggattcttctccttgagaggatcaacggtcctcaaagctttccaaacagcactgttacatttaaaaccagacccaaaagcaatctgccacgtccgatctcctttcctaatccttcctttggcctcagaataagccaattcataccacaaagaactactcgaagtgttaccaaacctataaagagtcatccgagatggttccatgtgccactcactgagttcaagattcttctccaactcgtccagaacagctcttccaccagcatggatacaaaagtgttcgaaagccagcttgaaatccggaatgtaaggcttaattttgttcattttgaagatctttcttcccactaaggtcaggaaaaacagcagctgttccgacattgggagaactagcggtccgagggtggtgatgttcgtcttcagggcttctccggccaccgccattaggtcttttgacagagaaactccaattctttttgtgtcgtcctccttttggaaaacgcagctgtacgacttgtcgtctgctcctttgtgtgtgcggactgtgtggatcagttggtatttggaacgccgccggtctgacgatctgtttgagaggagcacggcggcgccacccatacggaagaggcagttcgacactagcatggaacggtcgttgccgaagtaccagtttagggttatgttctccatgcttactactagtgcatatgagtttggatgtgcctgtaaacaattccttaatttataagtcattat

SEQ ID NO: 168106 - DNA, 862 bp, Cannabis sativa
agggcataaaacccaacacttcactcgatcaagagtcttattcggatgggtaacacgtgtccttgatggtcggtgctgatctgacgtgatttcgattgagggtctcttcatcatttgagaatttaatacctcttgaaagctatacctcgaatcacggtttgatgtttgagcatgcttgatggttgtacttcttgtaatgagtactgacgttacttttgggggaaaacccaaatattcaaattttgaaaatgatttttcccttttctaattgcttataaaaggagatcaaaacttttggcaatccttttagtcattttcattttcaaagaatcagagcaaaaattttccatcaaagctttccctcagatttcttcaaagaacttgctagaaaccctctgacaatatcatctgagcaggtcgagaaagatttgaatcagtgagtaagtcattcatctttttcttttagatgattgcaatgaaatgtatgaattatttccgaattctttgctatagattttgcttgttcttgaacttttcttggttaattgtagaataattagttctagggtttggaaatttaactaatgtttaactataacgtctagttatttcattgcatttcgattttgaccttaaatcattcattcacattcgttcataatgttctgaaaaataccaggttccaactgaagttttgaacttctgggattggaaattctaactctgggtgaaatcttttctttcgattttgatcaagcctagtcgacatgtaaaatcttttttcattcgttactccgaccaactcttattctcttgtctcctaccttttgtagatgaaccctggtgatttctagggaggcaa

SEQ ID NO: 168107 - DNA, 775 bp, Cannabis sativa
tatttataataaattatactaaaatagaaaataaacatgtacactattatcaaaaaaagtatgtttattacatattaaactgtttatcatttatttatctatttaaaagtaacttatatttataaaaaattatatatttataacaaatcataagatcataaatatttatattataactaaaaaaaaaattagtatgtttattatataaaattgtttagtttttcttctaataaattgttatattattattaaaaaattttaaaatattactataataaacatactacattattatattatatatataaattatagcaatttaaacataaataattatattattcgaaataaaatatattgttagtataatattgattttgggtttaattgagatttttctttttattgtatttattgcaatttaaaaaaaaaaagtttattgttaaggatagtattatatatatttataaaaatttatttatagtaagttaaattattaatgtataataacatttaataaattaaattaatttgtatagtttcatgtaaatatgtcttcaaatgtatatatttttaaaattatttttttacacaatttttataattatattattttatttttgtacactaatattttttagggaattaccacatatattatttttttttttaaatttacagtttgagtttttaaagtggctgcaacgctagttccaaggggtttttatacgattttttgttacaatttaagttgtagcgctagttgcaatatgag

SEQ ID NO: 168108 - DNA, 757 bp, Cannabis sativa
ttttgccatgattttatacaacaactaagttttagccaaatatataaggcaatgctatcttttagtttttaggttaagaaaagaaaaagaaaatacttttctaatagtgtattaaaaatgtgttaaatttggtgcccattaaaatatataatatgtgtcaaatttaaaacaataataatgtatattatttagtgtaaaatttacactgaatataatattttaaaatattatttgtaaaatataacagttttaagtttaccaatttttataagattagattgattttttattgtgttttttatgctatatttttgctatattttctttcaaataccatatttgaatttttttttattaaataaatctgaaacacaagaaactagttttttcatttaaaaattgttttgggtagtgggttattggtcgagttttggagtttctgagaaatttgtaattagttttagtttagatattgtgttaaatttgttcaatattccatacaataaactaaaatacaaaacatgtaaaatttatataaattttggtatatattcataattgatttcatcattaaaaaactagttttgattacatgaaaataactggtttcttaattcattgccttaacaaaattatttttaactggtttcttcgttagaaaaattgattttgattatatagaagtaaaatctatgtacgggtttttaagttttttatggtattttttcttatttataatgatttattgcatattttt

SEQ ID NO: 168109 - DNA, 676 bp, Cannabis sativa
gccagggatggatctctaattacatgaaagggtgtctcaccactttcagaggtactcctcctagagtacactcgttctagataatgactccaaaatgagtagtgagttcttcacccttagttatctcttttggaaacttactcctttagtcagccaaccatgcactgatcgtcaaccttcacatcattcaaggccatctcaacagttatggacgcaatggcctctttcaagtcatcaaagtctcctcgaatcaactcatggacgttatccttcactgacatcgcgtcgatgctttggtggggagaaataaggacaaccccctagagactcttgttgattacaaggtgggccatttgtaactccttggatgacaaggaattgtagaaattaatttattcctccaacttcagagtcagaggcgattgaggaatgcaatttagaaagaataaaaatagacataagaatatgaagattcataaaggaaagaagtaaaacaaggacaaaaatcaaatacttactggctatgttgaagctaaagctgagtgttggaactctcctcaatagaagtatagaaccaattgtaacgccttgaccctcagggacgccacatgtgtgcttttataaacttattatcactaatctataaattttagaaaagtgtggtttaatttaaatc

SEQ ID NO: 168110 - DNA, 675 bp, Cannabis sativa
acgtcaacattcacttggtttctttaaaccagaccgggtggatttactatgtttaaatagtggttgtccctattcttattgagggcctccaataggtctccacccctcatgggcctacacgttcaaagattgacccggtatttggcctttctcctacattttgactatcagcccttccatcgaccatgggtggtacttggccatctctacccctttaaggtagattcttaggttgactttacctattaggggcgtacgaccatctggcttggtaaccccccagctcaggatttggttggttgttgactcgacttttagcttcctcatcgccatgaccatcagggtagtttggacgataatcattattgactttgggttcttcccttctccccctaggcctactatttctcaggcgatcgttgcccgctcgtggttgtcacggggttgtcactccctatgttagggtgtccttctaccatttctaccgcggtcaccattgttatttctggagtttccttctccgctctgccttagacagacattatgggagtcatcacgtccgatataataattgggtaggacttgttcatttgtagaggacggtcgattaattttgcggggaaccctattgaaggggtgactcctagccctctcttggttccttggacgctcttc

SEQ ID NO: 168111 - DNA, 809 bp, Cannabis sativa
  modified_base (698)..(711): a, c, t, g, unknown or other
ccacaaaaaaaaaaaatcttagaagaattattaatgcacttgcatgaagtatcttttagtttgtatatatataaatcaaagcagatttaattttttacttctgtatagtattaaaaaaaatatttatttatgtgattactataaacttatactcctaacaatcattgaattcaaatattttaataagcataaaataatcacaaatatatctactttttatactttttaagtatactatttactaatttaattctaaatttttagcgaagactttagtcatgataattatcaaaaatttatagtaaaatttgttctgctattctcttttccatcgtttaaaagataagtgttataattattattatacaagtgacttccaattttagtatattatttttttgtttggttatatacgatttttttaaaatttatttagtttctaataattaactttataattaaatttagttaaaaaaatgtacaattaaattcaaattaaatgagaaataataatatcttatattctatcttataagggtaaatattattttagaccacgtgttttccaaaaattatagattggaccttctattttattaaatgataaaatagaccatgtattttctaaaatagtaaaaataggaccctgagcttaatttttgacagcttttttttttcaatataaccaacttgaagannnnnnnnnnnnnnaacagatacagaaaatgtaaatatgtttgtcatagcacatttagattgaattattattaaattttattttgacaaaaaaatcagtttagggttctatt

SEQ ID NO: 168112 - DNA, 1009 bp, Cannabis sativa
  modified_base (972)..(980): a, c, t, g, unknown or other
tgcttctccaagggactcttagaggtggaccatatcaggttgctggccaacaaggtaatctcactactagttcacatgtgtcttcctattctttgtctgttaaactatttactggtgtagtgtctaaatcaaatgatcaacaagttgttgtatctcaatttctttccctaaaggataagtggcacaatagattgggtcacccttccagacgtgtattgagtcaagtgttgaatacacttaatgtaaatttcgttattaacgaaagagagaaattctatgaagcttgtcaatataaaaaatcgcatgctttactattcaatactaaccctaatcgtgtcgaaaatttgctaaaattgatacacagatctttgaggtccaacatcaattacatcaaatacaaattacaaattttgtgttcaatttgttgatgactatagtcgatatacatggatctatcccctcaaaactaaaattgaggctctctcaacctgtctagtttaaaaccttagttgaaaattaatttgagagaaagattaaagttctaaaaattgattggggtgaatttcaatcttttgttgattgttccattcaaaatgggattaattttcaacattcttgttctcatacctcaaatcaaaatggtagagctgagagaaaatatacacattgttgagatgggcttgaccttactagctaaagcacgcatgccattaaaatttttctgagattctttccaaacaattgtttatttgataaacagattgcctacactagtgttaagcaaatcaatccccttatgaaatcattcatgctaaatttcttaaggcttttggagttacatgctatccttgcattagaccttatcaaacccacaattttttaattttattatatcaaatgtgttaatttatggtacattgactcttacaaaggctacaaataccttagttactgtgacagtcagtagtcccnnnnnnnnnaaggggaaataccaggtaagctgtacaat

SEQ ID NO: 168113 - DNA, 775 bp, Cannabis sativa
ttagcatcgttcccacgatctcacgttctaatgttcccttcagtaacatatttcttctcgttactactttcggtgtattgcatatataatacatctcaaccaacaggagaaacatatctctttttttcactgaaaaacatatacgatatatgcatacgatcatattacttatatatatatttcgagcagtagtcggtttttggatgtggtattttgacaattctctatcgtgcaatagagtttcgatagagtgtgttagactgacctgttttatcctgggaacgacaagactgatagtcttcttgcacaaatttgggcgcgcagtaccgcaaataacttaaagagagcgacctaatccacaactcaactcaacccaaattctaattcgggaaatttttttcttttattttcttcaacaactattttttacaacacaatcttatataacttattacatggtcaaaataaaacacaatgttatatatatatatactagagaaagtaatatctctctaagaagttccccatatataataaaactgaactaattttttaaaatatttagtaaaacttaaaactcccatatatatataaatcataatttaagaacttagcactaaaaggagttcatgaggaagatggaactattgctttcacattggcattaaattgggccgcgatggtacgtaccaatattgtctttgatgtattttgaacccgatggatcacccgtgcattgcctgcccttgaacccgcaaaccctgttggggttgtt

SEQ ID NO: 168114 - DNA, 1490 bp, Cannabis sativa
tttttttttttttttttttcactcgagcacatgccaattgctatgattttagcattacaagagataatctggacttgtgaaaagtcattcatgtgcatgcataagagttataatatcatgatacccaagaggggtagttcaaatggttagttagacatataatttgctctctcaatgtctgagattggagttctttcttggatatttatatagcttgtagttttttggtccctaaatagtataggatccggttgtgggagtctcgtctaaaaaaataacatcttcactgtttatacaagttgacaatcagtaggtgccagcttgaacttttctggactgtgaaacaacctcttttggtttgaatttgtttttctctagtagatgtttggagaatgtgatttgattttatgctttctctcaagctaggatgcatgtattggtgtctctaattatagctttgacatttccaggctagacggagagcatgttgtttttggtaaagttattcaaggcatggacactgtgtttgccattgaaggtggagctggaacctacagcggaaaacccaggaagaaggtgattattgctgattcgggggagataccaaagagcaagtgggatgaggaaaaaagatgacaaagccttggagcttcaagatttttcttttagctttttatgtagatgggctttgtttttaagcttatctatgctctttctatcatcccattacaccttcattattacatggaaaattgtagtaaatggcctcaaatcataagattatgttcgtaaatgttattattttaaaacttgtagcaaaatcacccttttagattatttattatttatattctcttttaccacataaaaaaattaataattttaccacataaaaaaataaattacttaaagattataattgttcagtaaaaatttcacatttaaagtattaaaaataaatgtaaaaacataattttacctaaactaaatttacagcataagagtttatttttcttaagttcgatcctttcaagattataaaaataatgtcttaattacaaaggaaacaccctttgattctaattatgatgatattaaactttgaaataatttggggaaaatttgataagttgaggaatatttcttttttctattcattaataaaaaatatccttatattatatttcattataatatacttacttttgtgagaggattgcccaatatactcttactttctacttaagtctaggatataatttacattaacttaagaggtataatagggacatcatctataaaaatgggtatctcttgaagaatataaaaatgaaagtaaaaattaaaacatgtaaagtaaagtgggtatataatgtaatttactcaaaatttggggtgaatttagaattgcggctgaactgagtcaatttaattaaccgagctgcctacataccttctttgtgaaggatcaagccacttgtagttcagaa

SEQ ID NO: 168115 - DNA, 692 bp, Cannabis sativa
cacgcttcgaaagagaggctgggtaaaaggagagtggcggagaaaagtaagagaagaaaaggaggctattgggatagtgaatccaaatcggccaatcagatgagacaattttttgctgtaaaagactacgttgatcaaacttcaaatcattataataactaaataattcacattttatatgtttttttttttttgtacgttttttgttttttatttaaaaaataaataaaatgttggagtggtcgttaaaacagggcattgtaatgaagttaaataaaattattctccattagacaaaatattagctaaaattatggaatctatatttaatgtatgccgcattatggaatagaatggagttgtgtgtgcgtgtattttatttttttttaccttctaaatagaaattaagaagttcaaatgttattaatcgtaatgtttatgtactttttaacgtcatgtcctctgacatgtgatttgtctctattcctatttttgttattttgtgtcaaagtattttgtttgattctcatcatggcgtctagtagccgatccaccaccggcttagaacaactatttgtttggaagaggaagaagaaaatgaggtggctttcgaagaagaggaagaggaagagattgaatttgatgatcgttggtgtcttgtcgggcgattattgactgggaaaatatctgat

SEQ ID NO: 168116 - DNA, 1859 bp, Cannabis sativa
tccctgtcttgggtgcaccttagaatgattgtaagtgcagtctccatttagtccttggcctttaaccttagaggtcttcatcgtcctttatgtcgtattcacaatgaaagaggccttttacatccccttggatgttttgacagtgaagggggtcttccacttcccctcggctgttattatagtgaaggaggtcttcctcatcccctcggctattagcacagtcgaggaggtcttcttggtgaatgtcaaggatgtgttgtaacattcgcattctactctttggttgtcaaggagacggtcgataccaactactattgagaacttgtcaaacaggtggtagttaagtgagatggctcagaggtcgttgggtgttgaccttctaaagagatttgatgtcgaatactatgaaggtagttacggtgatgtttgccacagggtagttttgactgtgagtggtaatctaattttatcacaaggagcgatgttagatcactagaaaccatacatgagctacttgcatggctccgactctcttagggagtcacccactctttttaaggtctattttgattagaacagttggtgatgcttaattattaaccatcaccttttttgccatgatgtttgaaatttgttggcactgtctgagcttaactgctctttcccctcaacgttgatctctttgtgactggggtgaaaaaactttgaagtttctatgttgaagctatctgttgtgagtgagatagactactgttgaggtgtagtgggttattgcttgtgtgtttggtgctcaatcatgaactcactttatgatcataagtgagacgaatcattatcaatgagtagtgtagaaaaacccgatttgtataggggtgaaatcacaggttgttggagaacctagtttgatgatttcaactcatagatccttgttaaagaaaaaaatccgatggaggaaaaagaaaaaaagacatattggattagatctgtgctaagtacaacgtcccatacttaggaagagtttagccattgaaagaataccacaactagggcagcatcccactcccaaagggttttcttcgattaattagaaaaacctcttctagatgcagcgtcctgcttctagagagctttttgtaattaatgatgcttttattttcttttttatttttgtgatccgaggaggaacacttgcactagtacttcacatttataaacgtggtcgttatattcttatgagacctcaagcacttatatcatgatagtacttgactctggtgagcaaatagtatgtacgtgcggttgttcaacttaatgaacttaccagcactcgcactagcactttacgattaaaaaactaggataacatcaacatttcattaaaccataaaaatactaactcaggtgtgtcaaatgccattgcaacccttggctcttgtataccaaggtatatgtgacatacatgactctcacgtaccatgatttatgttaatgctcatgcaatgtacaaagtgttgggatttatgccctaaaagtaagtaattattagataatatgttagagaatacataaaatacaattataagataaatgatacaataattataatagtataattattaaacatataaaaattccttattcatatggagaatgtataatcttgtaaagacatgcaagagaattaagattatacgatattaataaaataagtcggtggtgtattaaagtattatagaattactaagtatggtttacttacactatatttctagtgtgtgtgattttgattcggatcacatatgtagatagacaagtagtaaatgtgttgtttatttgattatgcatgaatggaccaatat

SEQ ID NO: 168117 - DNA, 1132 bp, Cannabis sativa
ttggaaaataaagaattaattaatttatactatatagttaactaacagcatatgtaactgcatatattgtttattgattttttttattgtcaggaatttaatcgatcagtatatttatcagtctagaatttttcagaggccattttgtattcatgaatctaatctcaagcgtgtaattaggggtgtacattttcttcatggagatggaccctgtaaggacccgtctttattaatagggtagtgattctccgtctaaataagaaacaggataggaacgagaatcatttttcgtcccagaatgttaaataaggcggggatagagatcacactccctgctccgatagagacccatttaactcatcgaattccccgccctgtgtgcaagaccggccatgaaaagaaatgtgcccaaaactactttaataaattttttaaaaaatgggcccttttatatgtattattttagtgtaatatttttgggataaattgataaatacttattttttgtatctattaaaaataccatcatattatattttattaaaatctaaccacttttatgagtgggttgcttaatatattttataaaaatgggtatattttaaagaatatagaattgcattgtatatccactttactttatttgttttaatttttactttcattttttatattctttttttcttatattttttttgttctattggaatcaataacaatttttataaatagttggaattttttggtgttttgtaaaatatataactgaatgataatattttaaaaaaattatttataaattacattttttttgtaggggcccaaattttaaattagaatagggtctccaaaatgtttaagacggccctgacctaagaggtataatggagacatcatctataaaaatgggtatattttaaagaatatagaaatgaaagtaaaaattaaaacaaataaagtaaagtggatatacaatgcaatttttaaaaaaaaaaattgctgaagctttaagtttggtaataaatgggataagttgaaaactacccttttttattacacattaaccaaatctaactccaaaaaaaaattaattgataaataccctcttttataatcaaagtaccaaatataa

SEQ ID NO: 168118 - DNA, 622 bp, Cannabis sativa
tttaatttggataatttttgtggctagcaaagtcatggcagagctctgaactcaactttgtgttaacaccaaccaaaaccttacgcagacccacccagctggaagagagaccaaaaagctgagagaaaacaacaccaatcatatattccaattcaaaacttttttattttgtaatatatatatttattaacgaaaaagattttttgtctttgtctaaaaataagacaagttaattaatgtgagtaacttcggttattaatcaacatattttaactttttgttcaaaaagaattaagcattttaatttgtatacgttagctttcgacaatgtccgcatgcatttgcgtatatatgaaaaatcttactgaaatcactctttccgggagttgcaatttgacgaagattatgtcaaaagagcattttggtaaatggtatttttatttgacaaaattatgtgtaccactggctactaatacggtgaaagaaggggcgcaataagttttgaaatttttacagcacctactcaaattttttacttttttacttttttattatgggcagaattttttgtaaaaaatactaaaaaaaaatattgtagaagttttatactgtgtactgtgtt

SEQ ID NO: 168119 - DNA, 535 bp, Cannabis sativa
taataaaggctttgcctaacaaaatgatttataaaaaaaattgaaagagttttattcttaaacttaatgagtaatacttttacagtctatttctttcccatactatgagtgaaatgaaaaatgtaaagactactattaaggcagtctaagcaagattcactatgtccatgaaaattatgtcctctaagaaagaattattcaattattattcactaataatagtagaattattagtgcaatatctattttaaaggatatgatattgctttaaagaaaatgaattaattggttaatttttttttttgaaaggttaataaaattttcattaataaattggacataatctattatttgcagatttcgcacttatcgagcaaaatcaagctatttaagagaaaaaaaaaacctaacatcttcaattaaatgacctactaatactaccaatgatatgttgcacctttagattgatgcattttaattagaaaacataaaaatcattattaaattgcactatatttcataacaccataaaagt

SEQ ID NO: 168120 - DNA, 558 bp, Cannabis sativa
atttcatccagtcagtaatagccataattttgtctaatttttcatagactcaatgtttccttcttacttgttattccatgtgaagaaatttccattatatttgatgtcttccaatccacagtcagcaacacgtttaaaaatgcaccatttcatttgcatttccttcataaaaaaatctttagctcctcatcaaagtctccctagctattatccaaggtatttgcatacttttataaattgttctaatgtccttccatagatgatctctacctttcctttcattaaccgcatacacaatagttagtgaaaagcttttatttcattttggcttagtcacacaatgtatcagttggctagttatttatatcaacctccaaattagtaggattccaaacaataataatctacctatttagatgataagcaagattagtagtgaaacaccactccttaaacatattaaggttagagatggaaattgggcggttaatgtacggggaatgcaatccccgcccccatccccgctacctatttatacccccatccccgccccatccc

SEQ ID NO: 168121 - DNA, 2289 bp, Cannabis sativa
actcgtgagtatgtggatcaatgaactgaaagctcttactaactaatatgtggatcaataagttgcaagttcttactcacgagtatgtggaccaatgagttgcgagctctttgtttactcgttctgaacaactttcattgtgtattttatttatcctgagatggacttgttgtctcgccaatctcacttaataatagttattatcacatctcccagccactcatgttattaagctcccaaaataaaaggtgtaagaatcattttctctaagaaactttaatgagtaaatcaaaaaacttataatgaacacaaataggagttcatgtatactcacgattctgactgatctattaataatcattgttgtgatatgaataactctttcatggtaaatgacacgttaatgaaagatattatatatcggtccagtcatgcataatcaaattatacaaaacacatttgctacatgtctatctacatatgtgattcgaatcaaaatcgcacacactaaaagtatagtgtatggtaaaccgtatttaatagttccatattagagattcatattattttaatatactttcgactaattttattcatatcgtattcttacaagattataccttctccatatgaataaaaaatatttagatatttattataatatatttctataattaatatattcatttatcttataattatatttcatatattttgtaatatattatacgttaattacttgtttttagattgtaaatcctaacacaaaagcaacataatttttttacaataatacgaagcattatttttttgttattttaaaacaatgttgtttttacattacttttacgagaaatgtaatgtttttttcttaaaaaaaaactaagtaaaaactagtaagaataaaacctgtaaaaatataaataaaataaaatctgtaaaaattaaataaaaaattcataaaattgcaaaaaacttcctattttaagtatattatgtatattatgtaaattttcttatataatatttggtaattatccgttactaaaaaaagacttgtacttgcattatctaatacggttttttttccttttttttttttttaaagagctagctaaaaatattttgtcgtccttttaatttgtaagcacaaaatcaagtttctaattataacttattttgcactcttttttccaaaatatatataacttattttatcacttatatcattggatcgtcttcgaaatagacaatcaatattcaatctttagtatgattgaacaataaatgagattataataataaaaaaaaacaataaattaatattggagaaaataataatgtttaaatgagctatactaaatgcacattctttccataattatcatcaatatgatgtgtatgtgcataacaactactcaagctaaaaattagcataatatattgatgaccaaaccaactaaccaattttttcatctaatgtagtaattaattgtcaacgaccaatatatttataagttgtgaatttattgatttttgttttaaaaaaaataaataaacaacaaccaaagacaacgatataagtataaatattaatcccaacaacttattatgattggaccacaaaagctaaacaaagccaacgaattaatgtagtaattggtttggttttgggtgggaatagattagattacttaattatatcaaattatcaatgactaaaaatacacagtacaaatttatgtatgtaccaacttaattattagaaaatagtacttgtaatttatatgcatgtttgagcaagcagttgaagaaggtcacatgggaggttgagctagctagataaagcaacaatgttaataaaaaatattaatattaataatttttataataataaaaaaactataaaatttaaaataataataataataataaaagaaatgaggggaggatcacattaacttcacagccatgaaatgaaagtagtcttttaaatttaaaaggatatgatatcgaagagaaaataatactacgtttggtaggaagtagaagtggatggaaggagatgagaggaggtaacaattacacttatttggcaagagaaattggaagaagaaaaaaataattgcatagagagcaaatactttcctaattatgaatcctttcaaatacaaggattaatattttccctttacaattatttgaaattacaaatatatcattaaaaatttacatttaaggacgtattagaatgtggaagtgtatggttaaggtagtagaataggtgag

SEQ ID NO: 168122 - DNA, 591 bp, Cannabis sativa
  modified_base (547)..(548): a, c, t, g, unknown or other
acctcttcacccgagacaaggacaatacacgcccccttgcaaatcgtattcctagctcttatgatacctcgccacaaaaagctatcagtgttcttttcttgcacactccaaaaagactctctaggaaagtattttccttttagaatattacaccaaggtcgattaaccttgcaagccaacatccacgcaagtttagcaagtaaggcatgattaatgtcttcgaagcggcgaaacccgagaccccccctcatcttgggttgacagatagaattccacgatttagcagcccacatattctgattttcaagaaaaccattccaccaataccttcgaaccaccgcatcgagctctcgacaagaagagagacggattctgaaagtagacatagcataatttggaagagccaaggcgactgagttgatgtacaccatcctcccagccttagaaagcgactttagtttccaaccctcgagtctctccaccagtttggatttgagaaaatcaaagtctttcctcttactccgactgtaaagcccgcttagttaanntggaaattagcagttgtttatgttaattatgaaattatttata

SEQ ID NO: 168123 - DNA, 1078 bp, Cannabis sativa
gtatctctaaaatcaaattcttcagccacaaaccttgtaaagatgccccataatatgcgacaaactcagcatgtatagtagatgatgtgatcaaagtgttttttaacacttttttaagaaatagcaacaccaaccaaggtgaaaatacagccaaaagttgactttaaatcatctacacaaccatcaaaatcttaatcggaataaccaacaactcgaagattgtcaacatgcttatacagaagcataaaactcttcgttctttgcaaatatctcaaaactttcttggccgcaacccaatgatcatggctagaatcagataaatatctttcacactactacaaaaatggccttttgcttcagtttttaagtgacatataaagaatttgcatcgatttctgtaactgacgctataattgtggacgcaaatagtcttatatttttgcttcacttagtaattgacgctaaaatatttttgcttcagtttataaccgaagaaaatagtaaagcactgacgcaaattagtttttcgctttggttatgaaccgaagcaaaagaataaaaaaatgaacaaaaaaaacaaaaactttcatatcaccacaacccttcggaccaccacaacaaccaaacaacaacaacaacaataataaataccaccaccactgcaacccatcgtaccaccaaagcacatcgatcaccaccatcccttcgaatcaccaccaacccactgaaccaccaccatcccaccggatcaccactactacctgcaaaaaaatcagagagaaagagagagagaactcgagcaagaaagagacaaaccatagctggagctaggcgcgagagatagggaatgagaaaaaaaaataatgaatctaacctttgaaaactccattttcttgagagagacagagagagagggcgagggaggcgaagatggttacgtgctccatgatggccgacgatgagctccaacgccacctgcaaaaaaatgagaaagaacgagttatagtttgagaggttcatgctttgggttgggttaagaagaaaggaagaagatgaaggtgatgatgggtgaagagag

SEQ ID NO: 168124 - DNA, 816 bp, Cannabis sativa
gaggcaaagaggcatagagagtttcatggaaggagagagaaaggatttgagtttttgagaggggtatttttagagttttggaaaagttgtcatatatttttaatgtagaaaagtattagtttagggaaaaaattatccccttatcccctaatgcatgcatagatgcatgcatagaacactgaattgttaaaacatcctgtgtatctcaagggcgtaaagttgagttacgtggaatccaaggatcgatgccacaccgaatttgactaccatttcctacttttaaacataagccttgttgtaagagctctctaccccaacaaattccttgccaaattaaagaagacatgcctccttgcttagcattcatgaaatcattatgagggaaatatctaccttttagaacctgacccagaagtgagttaggatttttaagagtctccaagattatttgctaacaaagcctgactgaaatgaacaaaagatcgaaaccctattccaccatccaattttattttgttttacaaagaagtttccatttcttccaatgagtcttctttttatcaatgtctgaaccccaccaaaactttaccatgattttctcaagttgtctacaaaaagtaataggcaacttaaagcaattcatacatatattgagatagattggactacagctttcaagataacttctgtaatatcccgataagtcttatggtaaataattagggtttatatttatattatggattaatcaggtaataagtgggattatgatcttactaatctattttagtgtaaaatttaaatttgctataagtg

SEQ ID NO: 168125 - DNA, 1181 bp, Cannabis sativa
aaactatcaaatctccttgtttgtaaaattgattgcttggtgcgtgatttttggtggggttttgaaagagggaaccataggcttcacctaagagcttgggataagttgtgtcttcccaaatttctcagggatcttggtttcagaagactagagaaatgaactaggctttttttggcaaaatgggggtggaacatgctgattaggtgcaaatctctgtgttgacggattctggaagccaaatatattaaagggaaggatttccttaattataggtataaaaattccgattcttggttttagaaaactgctgtaaaagccaactttatcttaagaaaaagagcctgtaaattggtggctaatggtagagatatgagtatttggggggacccatgaatccctcatagcaaaggtttcttcccaaaaccaaatggtgctcctgatattgtttttaacaaagttgctgatcttttgttaaccaaaggtgattgagatatccacaaactaaactgcctttttgatcatgagactgtttctgcaatcttaaaaggtggtagtccctctggccaaggcaaggatatgtgggtttggactctggaaagtaatggttgattctcatgtaagtctgcttaccttactcaagccatgaagagggcctcctcactgtgaggtcgctccttcgctctggaataagctttggaatagtaaaatcttggagcgtcataaagttctttggtggtgtatcttgtccagtgctctctctgttagatcaatgatcaagaaaaggtttcatattgaggatacaagttgccctctgtgtgggttgggggaggaatcttttgaacacttgtttctttcatgtgagggcgtttcacttatggcgatcctctccctggggcagggccgaccttgaaaaaaaatggtcccaagacaattttgataaaattaaaaacaaatatgggccctatgtatgcatatatatattttttttttcttggcttgtcaaacaagctcagtgggtgacaagtggggctgggtgggttttaattgatatttattggatttgggatttggggtggggactgtgggccggctggggtataggcagtgtgcctatattatatatatcactaatttttttagtaagatgtttatataaattttgggccctgagtttgggtggg

SEQ ID NO: 168126 - DNA, 834 bp, Cannabis sativa
  modified_base (755)..(760): a, c, t, g, unknown or other
caaaaacaaaaagtttttaacttttaatacattctcaacactcgatttttgtattcgaactaaatcacagaataagaaacaaccaagaatcaattttactaaaaattcaataaattttctaatttcaatttcaacaatttggaaaagattcggcgacaaacagacagtacatgaaccctagaaaccgaatcaatgaaattggaagccaaaattaaaactttctgcaaaaaaaaaaacaataataaaagatgaagaatcgaaattcaccattctctgaaccatttaacagcaggagtcttggacctgagaattggtcgcctctcgaaaagattgtgattgaaatgggtctccattatggtttttccttgtagcttaaaataagataatcaaacaaaggctaaagctttggcatcatccagctatgggtttaggattagggttagggttaggtttcaacatgtgatgaaatttaaggaagaagaagaagaagagtgttttgtatttcaatggcttttttcttcatagattcatttctgaaccggaatcaaaccggtctggacaaccttagtggggcccactcataaatcataattatgtattttttcacttctttttttaatgtcgttttattcttattgaacaaataaacgacatcaacagattttacttctgcccaaacacatagaatatggttttcgggttatttgaatcgggtgggcgccccaacccgttttatatttttatatatatatatnnnnnnactaggtgaatgtacgtgtcgagccacgtattgatagttttatttaatctttttttaacatagcattgtaatgt

SEQ ID NO: 168127 - DNA, 979 bp, Cannabis sativa
atttattttatgtaagacaatgtctacaacaaactatatattagtacactataaaaattgatattcacttcctaaaatttagaagaaaaaattatttatataaatatatatatttctgtaaaaaaaaaaaaactattattgatttgataaaagtttaacatgtaagaaaatgtcataggagagatgttatatatttcaaaagataaagaaaaataaagaacaagaagatagtagtatagcgtggaaagagagatgtaccacggtaaataaataacaattataataatgtgaaattgagtggttatatagaatccaaatagaatcaatcaatagaaggaggaattcgatcctttaatggaagaaaaagaagggaaaaaaaaaaaggttaatatatattatatttatatattattctattggttggttaagagtgggtgatatcattgtttgttcacgtgatcacatttgctagaagtgtcactccactggccactctacttgcctttgtttgagcatttagttcttgcctttgcgcatctaaggcatcttcaatggaaaaatctaaatttagtgttaaattaacatttaaaaactattattttaatactaaattttattttaattccaaccacaatactaaaaattacaccaaatattttattctttattattctattattctattttttattaaatccaataaattatattagtaaatattgaattttttaatttataataaacattacattatttttttatttttaaaaatagtatttaatttactctaaaaattaaaacaccttaattttttctaaagcgcgcaatgcagtgcagtttgcagttttgaatttttaatatgtggttcaaaccgcaccgcacattacaaaagtaccaatttttaaatttagttaggtccaatataggaatgtccaacccaaagcccactaattattgtattattgaaacttattttttt

SEQ ID NO: 168128 - DNA, 845 bp, Cannabis sativa
aattttttttttcaaaattttactatataggtgataaaatccaaagcccaaataatatatcttaatttacttatagagtatcaaattaagtggaattataccaaaaactttacaattatatattaataaattaaattaattaattaattttccatcatttaagagcgcctgttgtgcaagaatcaatggagaatttattattattattattattattattatggaaatataaattatgaattactaggactcttgttttgatcccaaattgttaagctagcagagaagttattataaaataacaaaatttataaataaataaataaatttattttattgtttttttaatatactataaatcacaattaaataagtttcattaagaaattaatatcaataattgtcaacgtccaaagatcatagtggtcggtgattagtgattaaattgaaaattatttaataaactcattaattaattaactcaggggtttcaaaatattaattaataataataataatatttttgtatcaaccgactaaaagagaaaaatagaagaaaaataaattaaaataaataaatagtgtcaggaatgtgaagctgaaacatatatgagtagtcttgctgtattgaagtgtgtaataatattaataataagataataaaaccaaaatattatatgtaactaattaagaagtttgaaactgagttttgttatattctaaatttgacatttttgtgcttgttgtttatgtcacagcacacaattttggatcaaatttttgtcactctcaacaacttgaaaatataatatatattatattaattctatctagtatatatatat

SEQ ID NO: 168129 - DNA, 1605 bp, Cannabis sativa
  modified_base (1567)..(1576): a, c, t, g, unknown or other
gccccatctttctctgtaaactttttccccgactatatatatttaaaatacataaattaaatttatgtctatgtgttcgtatatatagacaaaacccagataacggctagggtagtgaagtcatttgcatcccctattgaattttaagatcccagccgtccatcctaaagaatcttttttctacaatgatcggagatcacggaggtcatacaaagggtatcaaagctcattgcgtacccacatgcatattgcattatcaaaatttaattgggaaatttgagtttttatgcttactaggaacccacaacaaaattgacttaacttggacacaataacaaaatggcttaggcttatctttctatgtgtttgttaaattacactgaaaacattgtaaggacttgttagtagtttattaatagtttcatagagtattagtaataagtgaaaaaattctgtgtcggtttggacaataaattaacaagatcaaagtttcgatctttttcagcaaaaatactccaattagtaaaaagagagattaaaaaaaaattgggtatatatgagccggaagaaaatataaaatatctaggtcttcctctctttaacacaaggcagaaagatgctgattttaattttattttgaaaaatcttactgctaagctccaagggtggaaggtgaaacccctctccaggactggtcgagctactttaatcaagtctgtgggcttgtctctgccgatgaattcaatgcatacgactaagctctctaatcttctggcgacaagaattgatggaatggttagagatttctagtggagatttgaaagaggaaatcatgggatctacctaaaggcttgggaataactgtgtctgcctaagtctcgaggcggtttgggtttccgtaaaacaaaagagatgaatcaagcttttcttgctaggtggggttggaattttctaacgagtaatagctctctcggttgtaagattggaagcaaagtatttgcggggtaaaagtttcttctaatgtgactacaaggattctgattcctagttctagaagaatgtggtaaaagcaagagagacaatccaaaaaggtgcctgcataatggtatctgatggtaaagacaccaggatctgggaggatccttggatccctcatggcccaaacttctatcctcgctccaacgacaatcactcatttgggctcaatgtagtcctgaatcttcttacagaagtggtaattgggacctccataagcttcattctttgtttgatgaggaaacaatccaacctattttaaaaggaggtaaacctcccaggaaggagagggattcttgggtttggacgaaggaaagcaatgggaagttctcatgtaagtctgcttatttaattcaggctctccagcgggccccaatttgtgatgtcgccccctccctctggtacaagctttggaatagtaaaatactggagcgacataagattctgtggtggagtattttgtctaatgcgttcccaattcgtgttgggttttgtgccctaaataaacctcatttcaatataatcagatttnnnnnnnnnnaaagataagaaataacattttatgttgca

SEQ ID NO: 168130 - DNA, 1488 bp, Cannabis sativa
aaacagtctgtgagttttgttaatgcgactatctgttcctctagccacctagtatgatcatccaagagctcacatccacagattctgtcatcgatattttttctcaaattgtctatgtgaggccttacttttttacccttcgctctttcccttcttactttcaggtggtccctaaggtctgccatgacatgctatcttctaattctagatcttccacatgtatgctctggttaatagaatcggtagggcagtttttacatccctggacgttgggccattgtacttgagtacttgatccatcgttccacacgactctgacctatatattgattggttggcttaaccctggggcttgagcgtctttttctttccactgggattggtcggttgtgtttctattgttctgtggagcgtcattcataggactttgcggaggggtgcccattacacccttctctttgtcattttttggggtggagggcccaactctatgatggttatttttttaacaaaagggttttcatcaaggaggttggctagagcttgtagccatgcaagagcttcttgcatctgacgctagacttcttcatgatccactaatcgcctttgggtgtctgcaagctcttgttggagttgtactacttcagggtcttgctcgtagtagtccttttcataacccttgttaggatttttgcagtggtcatcttgagggtcatctttgtgaccttctttctcatccttgtcgatgggatcatcatcgacctgctctttgtgatgctggttttctaggtgcagacagttgcccacctctaatgcttccctgtcccccgcaacacccacctgatcatttctcggggtgagctaattttcactgttgttggcggcattatccttaccatctcgagtaggtggtttgaccattgcctttcaagttgcaaccattgttgtagatgataactatggttaatctttcctcaactctcaacgaaagtaccaaaatatttatcgagatttttggaaaccaattataaaataattaagctaaagaaagaaattatttaaagaagaaaatcaagattttacgtggttggggtattaataagcgttagtccacgagtcaatattattgagctagaaaaatttcaaagtatctttacacaagcgtttttaccctagttgaagaaccctaattctcagttcttgttttcatatagtgatttttcaagctttgcatgaagagatcatattctatttataggctagatttgggcatgggtaaatctagacccagtagggtctagaggtgttaactaggcccattgatggggtaaaatacaatatatattaatttttggccaattgggtgagggccaactcacgagataacagtcgtccgtaggcgtggggactgattatgatgccacgtattgtaataccctagaattaaggaatggattagcaaaaccctaattagataattatgaataa

SEQ ID NO: 168131 - DNA, 1101 bp, Cannabis sativa
agatctgacccgatctatttacacttctagcccgaatggggcccccgcaacctcaccatctcgacctaatagggtcctcgcaccgtcaccatctcgactcaatggggtcttcgcgccctcacaaccaatagtgtcctcacgcgctcactaccaatggagtccttgcgccctcatcatctccacccaataaggtcctcacgccctcaccatatcaccccaatgggtcatcgcgccctcaccaccaatgggtgtcctcgcgcctcaccatctcggctagaatgggagcctcgcgccctcaccatcatctcggccaaagggggcctcacatgcacatcaccttagcccaatgtgggcctcaacatgcttgtcgtcacgacccaagggacggtcctcaccttagcagtacatgtctctcatgacttaccaacatgaccttgaagatatatttaacttttattatttttttagatatttattttgaaatgtgatttttgttatcacttgtatttcaaacctaactcggctatagttacaaggaggtgcttctagggttcagagattttaaatcctagatgaaaatctatataaggggagtgaagtcacttttaaagggaccccaattttgattctcatgaaattattctctttagctcccactctctcattttacaaactcacttatggattgaactcttggagaacataactgtggagaactcttatcaagcatttaataacactctaattggactagcccattgctgccgaaagggaaaattctcctcaagctttgaaatcaataatacttcaagtgaactagtctattgccaccaaaaggggatgaactactataaaatcttcgtgttcatctttgttaattttttttacaaatcggtttacattgattaattagtgcttgtgttcatcttactcgtttacgatcttataaatttattgatgaaaaattgtatcaacagtgtgtataaattaatattatatacttaaaatattgtaaagccttataaaccagagaaaaaaaaaatgaccagaaacagagaagagaaagagagagagcagtaaaggagtaatggagagaaaagt

SEQ ID NO: 168132 - DNA, 1551 bp, Cannabis sativa
taaattataaaatatttttgttaactgaaagatgccaaaaatagaattaacaatctctcactttggcaaagtgattgacaaaatattttataagaagaaaacataaatcaagtgttaaaaacaaaaataatagagtataaaaatactcacattgcatgaaagcatactaacacataaaacataacaattttttaaataaaaaattcacaaaccacaagcaaactaccaactctccctgtgttcaacacaactactctccctgagtaactgataacaaggcacataaacacttctcccccttttttgtctatcaaagaagccaaagacaaaagtaaagcaactctctctctttttttttttgtcaataacaggagaagaaggcatagacgttagagtagaaggcaaagacgttagagcagcagacagaaaggagcttcgatcgctagagtaaacggagcaagagaggacgatggtgaggctaaggaggactcatgagcaatcctctttgagggttgggcattcttggttttgaccattgatgcttgagaaccctagaaatttttctctcaaccgataaacattaaacctttaggtaaaataaagaatgagagaagaagataatggtgattgtgggtaatgatgagaagagagtgagtagttagatatttatagcaaagaataaaaatcaaaacccttaaaaacaaaataaaaagaaaaaaagaaactattttcttcttacattgatctccatgtgagcctagaaaaggaaacaaagagattttctcaatattggtcaaatatttccaaaaattaaaaatattaaaatcccacatagtttgtcttcatgataatcatgcattattatttaggattgtcctatatattttatgtatattgcatttagtgaaatggataacataaattggtatgttcatttaaaatagtttaaataatttgataaatcacaccaagtgactatttagtcacatttttaacagaactttattttcttaaatagtttttaattttttttttgtaatatggtattaattaaattatttttagacctataatatagaatttaattaataagttacaaaaggttaaattaaaaattaaaatttttttcaaaataattttaaataagaaaaacacatgctttaaaatagtgagtgggagagagttgttatcttattatgaaactcatagtctctattattagtccaacactaagagtatgggagggcctcgagatggctttatttttctcccccttaggaagctgttgaaccatacgttgtcaagattggcttcctctttaagataggacaaagtgatgtattttagtgcgataccgattctaagacagtgttactaagggccagtttggcacagttgtgctgtgggaaaaagtagttgtagctgtgctgtgagaaaaaacaactgtagtagaactgtaaaaaaagttgacctgagtattttgtaaattataaattttaaagtgttgtgagttgttaagattctattataataatgataatattttaatct

SEQ ID NO: 168133 - DNA, 1107 bp, Cannabis sativa
actcacatgtcactaggtcagtagctgagattttatgggccttagtaaaaattaaaaaaaaaattacataaattattatttttgataaagaatttaccattttacgtttaaatttttacggtatttaccaaaaaaaaaaatataaaaacaaaaaaaaaagttatataaaaataacatcaaacaacattaaaaatatacatataaaaaaattataacaaaataacaaaagtacatcataaaaatatatcaaaaaatcatattttatgtaaataaatcttaaaaattataaaatatttaaaatttcacaccgttgcatttatatatttttttgtttgttatttttatatatttttgaaataattccaaaattgggttcttattaaaaaatatgcgatatgcgcctcatcgacaatggctaggaagcatgttatggcctaatgtctagaatggattgagtggttgaattacaagaaacccaagaaccttttgaataatgtcttctaaacagcaatggctgatgctacatatggcatatggttgaatagaaacttatctgtatttgaaaataaatgtgtgtcacctcattctattaatctacttgtccaagagaatattaagacaagagttttatttgttaaggtttctaaattgtctaaaatgaaaaaataaattgtagaatgtgttaagaatttgtaagaatggttgggtaaggggtatgtcctgaatttaatataatttgttagtgttgattaaggagagtttctcagctggttttgcaacattcttgtgcacgccagttaggttgtagcagaggaggttgcaatgattttgtggcgtatttggacagcacgcaatgatctgttatggagtaataaatcgaccaaagtttctgaggtgattcggtcggctaagactaatcttgacaattggcaaaatgctcaatcaaatggatccattccattactaaatgttaatgttggtaatggaagagagcattggacgaaaccaacttttacaaagttcaagatcaatgtcgacggggtcctatttgaagctgagaatcggtttggttttggcttcattgttagagacaaggatggtaagctt

SEQ ID NO: 168134 - DNA, 811 bp, Cannabis sativa
agacgggtacttgggaaaaaaggtacgcgttgtgttaaagtgttttgacaaaaaatgagttctcttttgatctattagagttagcctcacattccttatgtgctgaaataaattatcatatataagatgaataggctactcctcccattgccaattagttttaagatggaaccccattcatcttatcctaaattctaacatggtatcagagccactggtgatcgattgtgagcccaaagtgccatcggtccaaaaagccatttatgatccgttatgagccaaagtgttgttagtctaaaaaagatactttccctgtctcccgtttaacctccatttgggacctttcagccaatgtgtgccaattttcaatgttaaggtctttgacctgtttcaaaattcacaaattgtgctgtcattagtcatttattacctttctttaacacgtattgcttattcttgataattaataaacttaatttttaattatatttgatattgattttgtgtatatattcatttggttaattttttttttttgggctttagtcaattttattgtgatgtgtgatatctcgacttgacaggtgcatggttgagtttagtttcaagaagagaaagaagtgtgaattgtcattgattgtcaaaagtagtacaatagtgtatatatacacatatgacggtaagaaaggcaagagcacagttagttaggacactaactaactaagctcatacaacacacacgcacactaactaacttagtacaacaaactcaagctaacaacatatacacacaacaccttacaatctaata

SEQ ID NO: 168135 - DNA, 573 bp, Cannabis sativa
attacgaaaaacttcctaaaaatggcaggccgtttctgtaaaaatggcaagtcatttttctggttctgtattagtaaaaacggtagaccgtttttgcaaaaaagatctgtcgtttttcactgcagaaaaacaaagtctccaaatcgactcaaaataatcccaaactccatactaggctccaaatcacctaacaacatcataatagaccattttcaagcaatagaatctcaaaacatacaaaaattttaaaataccattgttgagccaagtttgagctcttgaactcaaacttgctccactttagaatcaatcaacaaaaccaactaaaacaagcataaaatatcactactaagctatagaaaacatccccaaacaaaaccataaccaacagaacctaatttctaacttacatggttaaaactttcaaaacttcacaaaagaacactagggttattacctttagttctagctcccaaaccttccaaacttctactaaattctctaaaaatggtgctgaaatgactgggtttcttcttcttgttctagaggctgaagggagagagagagagagag

SEQ ID NO: 168136 - DNA, 1037 bp, Cannabis sativa
caatttttctttggcctcaatataaatacataattaaattgtcattaaaaaactagtaatttaaagtctacccctgatttttttgtttttattcccggcagcaacaaaattaaaagcataaaaatatattaattattaaaggaatatatgatgtctcaaaattcaatttcataattaattaaagtaatattatttcttgatataaagatggggttagtttaaaagggatttgactatatgacaaagatcactattgagctccatggcatttcctataattaaaatatatattatagaataataaataaattgtagtgactactatatagttcccaaatcaagttgtagctagagataataattatttaaaaaatatatataaatacattaaatcaaattataaaatgagatttatagtacaccacgtaaaagattgttttagtagattttttatctgtttcgacattcaataaatttttttactttaatattttttttttataattgtgtacgttactgctataaatttaagattacttataaattttcaaaaagaaaataaatattttatagtgttaaacataaagtttaaatattttgttacacacacaagaactatttttttttatacgtgtgataaacaactatataaattatatttttgagaaaattttcaagtgattctaaataaatacaacatataagatcataaaaaaataattaaaagaattttttttagatgtggaaggtctacaataacactttttaaaaagatgtactacataaattttcaataatatatatatatatatttaatttactaaaaaaaaatactagctatgcatgagtgaaaatttatagtgtctttcggtattattacaattgtttttaaagtttgtgacgaaaattattaattataagttggatatttgatcattaatttttgtttatggtgtttgtgttcaaaaatcatttcaacatttagggtctgtttggaaacaacggtgtaattactatgtagtgtaattactagggta

SEQ ID NO: 168137 - DNA, 1524 bp, Cannabis sativa
ttccacatgtttggtgcgttcatgaaacacaggattctcggagatgtggattgctgcgttgttgtcacaaaaaagaagagcaggaagtgatatgtcgactctgaaatctttgagcagtgatattatccattgcaattcacaagtgacattggccatagatcgatattccgcttcagcagaggaacgggatattgtttgctgctttttggacttccatgatatgagagaatcgcctaggaaaacacagtaaccagatattgaacgtctggtgtcgagacaggcaccccagtcagcgtctgcaaaggcttggagagtgagttttgatggtgatgaagcaggaaaaaaaagaccttgaccaggggagttcttcagatagtgaagtattctgtaggcagcgtctaagtgaggttgtcgaggtgattgagtgtattgactgagtttgttgacagcaaatgtaatatctggccgagagatggtgaggtaagtcaatttcccaatgaggcttctatattgagatggattctgcagcaaagttcctgagtcgttatttagttttatgttcggttccatgggtgtagatgctggttttgagcctaggcagcctgtttcttcaagaagttgcagagtgaaaggccggtgtgacacagagatgcctttggagcaacgagctatttccagaccaaggaaaaaacgaaggctaccaagatctttcaatttaaactgtgcatcaaggcagcttttgaatttggttagttcatcaagattgttagtagcaacaacaatatcatcaacataaatgagcaaggcaaagaaaacacctggtgtgtgtctcaaaaataaagaatgatctgatttggaatggtggaaaccttgctgaataagatgagtgctgagtttagcataccattgtcttgatgcttgttttaaaccatacaagcttttttgtaatttacaaaccgcatttggtggaatcactcctttgggagtgtatccttgaggtcgtttcatataaacatcctcatgtaaatcaccatggaggaaagcattgttaatgtccatgtgatgtaaatgccaattatagatggcagcaagagaaaaaaggattttgagggtattgaattttgccacaggagcataggtatcgaaataatcaataccgggctgttgtgtataccctttggcaacgagacgtgccttacatctttctatactgccatctgggttatatttaattttataaacccatttgttgtcgatggcatgatggccatcgggtaaggtgacaattatccaagtgtggttgtcctcaagtgctttgatttcaattcccattgcattgttccagattttgtatttacaagcttgggaataagacttgggttcaaccaatttatgggcagcaagtatagcagctctgaaattgttggaaaacctggtataggccagggtgttggtgagtggatgagaagttgaagcaggaacttgtaggaaatcgcacatgtattgctctaaatgtttaggctt

SEQ ID NO: 168138 - DNA, 1806 bp, Cannabis sativa
  modified_base (1158)..(1163): a, c, t, g, unknown or other
tatatatatatatttatattatgtaagcgacactataaaattagtttaaaaaataattactcttagtgacaatctcactatatttttaagaataaatacataagatattattttttgtaaaaaaattacatttttagaatttttcatagaaacaacacggaaataacaagaaaaaatatataaaaataacatctaaataacatcaaaagaacaacaaaaaataacatatagttaacaaaaaataaataacaaattaacaagagtacaacacaaaaatatcgtattttctgcaaataaaatcaaaaaaatcgtaaaaatatttaaaattttatgaatccgtatttctgtaaattttttgctatttttatgtatttgtgaaataattcaaaaatttgattgcctatcactcatttcaactcaggtccaaccctagtaaaaacgtaataaattttaaacacgtgaaaaaaaaatcaaatacctaagaattggccctcttcttctccgatcgaatatatctctccaattaaatgtcattatgttgttgcatgtctgtctttttttttttcttatacgtagccactactacaaaaatgggtttttctgacgtttttaaacagtcgtttaaagtatactcgtcagtttctataaccgtcacctatacgaccgttgtaaaacgggcagaataagtaacagttcaaaaccgtcgctaatgtgagtttcccgacggtttaaaatcgtcgcctataacttggtataggcaatgattttaaaccatgccttatagtctggctccgttttgttaattttttttagcgacacgctcttttttttttcagtcattacatttgaaaaatagggaaaaacagattttctgtaatttttttcatgcattaatttttaaattttgtacaaatctgcataatcacaacaattaaactaacgctattatcgtctaaatatattaaaaattttgtatagtcacaataattgaattaacgctaatatcatctatgtagtaacgataaatctagatgtatacacactgactaacacggtaactgtttcactccgcttctgctttcacgtaatgaatacatcgatcacacataatacttatctcaccattagtgtacggagtggagaacctatcatgtcggnnnnnnagttgtattggatcttctacgatcatgaagatttcaattaatttcatgacgtagtatccacactgtttgtcgccgggttgttgaggacatatagtagtcatccactgggtaggtcgattaggtcatcctatcatttggttatacatggtgaacaatgtatgtgttgatagattcattcaaccatatatcaaaaagactaaataccaatacgtgttttatatatggatcatgtgttgatagattcatttaaccataatctttcaccatcatcacgagatgatatgatatcgttcccaatggtgacatcaacaggtggtggggtgatttgatgaatttgatcactaaatatgagatcattgccattaaactcttgattatcataatcttttggttgcgtcgtgcatctaatgtatcgctcatgtgaaacacttgactggcttgggacgccattataaacttatcgaacttgtgtctgattcgattcaagtccaccagcttgaatccaaattcatcgttttcaaccccattatcactcctaacccaatcacaaagataaatagggattcgaaaactgtaatctaattcccaaatttcttgaattacaccgtaaaaagacatgtcacattcaatagggtttttgtct

SEQ ID NO: 168139 - DNA, 877 bp, Cannabis sativa
cactagtggtatccaagcgcacatcatcatggctaaaatgtgtcatcatactgttgcatttccccttcaactaaacacatgatagaaaataaagagaatactcttcccttattatgtttggtatgagatgaatgagagacgaacaacagcctttcacttgtctggtgaaacggaagaggaaatcttttattgttaaatgacacatctatatgagtaaaaaattattctcttctaaaatctctccaatatcgagagagtaaaaatttgttcaaactaaaaattgagaatgtaatattcattcataaatctgttccccctaaaaataattcttaccaaacaatcatcctatccaaaatacatccaataattcctttactcactatcttcccacttccccctccctccgtacaggctcttaaatatgcatacaattaactatgaacagatcttctcacagagatactaatttcgttctcttagcagcagagcaaaatagttgttcttataagaaacacagatccaaacaaaaacagcgaacaaggagttgattagcacctgcaaaatggcagcacggacagctcgagagcatgcagcatttgtccccatgtaatgcacaatatcctagagttgaaaccaaaaaaatttataccacaaaaaatttgaacttcataaatgaattttaaattttacttcacaagtagtttaagttaagaattatagcactaacctgacagccagtactatgaccaagtagaacaacaccctcggagtcttctttgtttataagatgacttattagttgatcaacctccatagcgtccttaatgataaaaaggtgataatagcttggtaaataagacaaagaagtagatctact

SEQ ID NO: 168140 - DNA, 776 bp, Cannabis sativa
tacttgttatcttcgaagctatttccatcttgctcgtgctatagcttctaagacaaccctagatgtaattcaaataagacctgcatcccccaaattctcagatttgtatatatgaatatcatatatttttattaaaattattaaatcaaacctcttccccactcctcccccccgcaattcgattaagagaaataaccccatttcgattaaactaactcttttagcataataaaccctaaaaccccatttcaattttaagagaaatcaaaaacagggtaacaacccagatggagaaagaagataaataatgagagagagagagagggaacttgcctgagatgatgagatgagagaccagccgtgccgctttcgccagagaaggttcaaagagatgagagggtcgaaggaggtagggtcgaaggtgaacatctgattagattttagggatttaagtttttgttctatcggtttacaatagtagacagttaataaaagacgctaaaggaaggtaactttttattttttttcctttattcgtcggtttagttattaccgtcgtttaataaaagacgcaaataaaatagtattagtgtcatttttaaagtgacgggccaattatttaattactattcacgtcggtcaacgctatgaacagtagcgttgaccgacgtgaattgtataatttgtagtagtgaaaacatcatttacaggtaactaagtgttcaaatgggcaaaatacattgaggggcgtaaacggtaaattggtcccgtctcga

SEQ ID NO: 168141 - DNA, 624 bp, Cannabis sativa
ccgccactctcactgctgctcaggcggctaagctacgcgactttgctggggtcatctccgttgttccagaccaagcccgtcagctccacaccacccggacttaccggttcttgggcctcgcagatgggtttgggctctggcccaattccgattacgcagaggacgttgtgattggagttttggacactgggatttggcctgaacgaccgagtttctccgattccggtttgtctgcggttccgtccggttggaaagggacttgcgagagcggacccgatttcccggcttcgagttgtaacaagaagattattggagcgaaagccttctacaacggctaccttgcgaaattggggggatccattgttggatctaaggaatcgaaatcacccagagatacagaaggtcatggctcccatacggcttccacggctgccggagctgtggtctcgaacgcgagttttctccattacgctcagggagaagccagaggaatggcgaccaaagcccgaatctccgtctacaaaatctgctggagcttgggatgcttcgattcggatatcttagcagccatggaccaagcgatttccgatggtgtccatataatttctctttccgttggggcaa

SEQ ID NO: 168142 - DNA, 543 bp, Cannabis sativa
attaggctaagcacctaattcttttatccagagaacttgtcaagaccacataattagactcctggcaagaatattacttgattcagtcccagtcctttttaataaatggagagattatagttcccattatggacatacttaagtcttaagactagagagagagttttttgtaatttgatctcagaaccaattgaatgtgattttggaaccctttgttagtttttacatttaaaaggccacctactgggaatgtgtttacataaagttacaagctttttgacaaaagttttttacctctttattcgatttgataaagtaaatgggaatagcagtggctttatgaggtgggcagccatataaatttgaatatcaataaacagatgattcaacatgttcatatctattttacaacatagtacaaaacttctaagcaatttgagtaagagaaaaaatgagatcgatagcacaaaacttttgactacaaaagaaatgaataaatctcttaagcttttttcaggaatgaactagccttagactgattga

SEQ ID NO: 168143 - DNA, 1593 bp, Cannabis sativa
aaccatagaatctaagaaccataacccatagaaccctgaacccgtggctatgaagaaaagagaaataacaaaactatagaaatcctaacctacccgtgtttagtagaagaagaggaaaagaagaagattaaaagaaccctttagaacacttaatcctgccagaaaaagaagaagcttgaaacatttttgaaactctagaattttttgtgcgactgttagtaggggcggacccacattgaggcgaggtaggacagtcgccctgaaaaagaaaatcgagaaaaactatatatgtatttttttttttatttttgagtagaattgtatatgtattttagttagtcaatatatatatatttcaaacaaaagtgatatttttaaatattatacaagttttgacctaatggttaagttacatgtcatacttaaggagatcatgggatcaaatcctaaaaagagcatatctactttacaagttatatgtatttaattctttaatcatcaaattttttattgttactttttttttttacttaaaccatattcaattggtaagacttggtttgttgggctcatagttgattgggctgaaagtaaaattgtaattgtgaatttttaataataccatattaatttatggacacataaaataatagaaattgaaaaaaaaaaatactatttttgcattattgtattaattttgtatctttgaaattgtggtgggataaaagctggaaaactttaaaaatttcaacaacaatagtaccagagcaaattaatttgcacaaataaaaattcaaattaatacagaaacaaattaagaaaatatccaagatcaagaataggaggaattaaatattggggatttggctccaaaagggtagattctaatttggctgcactccacttttgacctcggattataatctttagagcaatacatggtcgatttataaataattggacacttattgtacatcatatacactaaaaaaaaatagtgaacttagttatagtcatgctggccctgaaatttagtgggccataaggaaaaaaatatttttggactctcatttagaaaaaaaatgtagtatttttcaaaattgataaaaaaaaatgtgtaattttaaaagaggataaattttttttgggcccctgaactaggtgggccctaaacacaggcctaacccgcctatgctcaggtcggccctgattataatggtaacaaaattagtttactctgccaaaagaagacaaaaaaaagttatatttacactccataaatgataagtgcactattattattaaaaaaaataaataaataatttttaaatattacttttaatattttttttaaaatttttttctttcacgttaattttttttacttattttgatttatttttatatatattttaaattatatatattttagttataatattctaaatataatttatttttatttaataaggtatattcaaaatattcaaaatataattaggatttttacctcttgaattttaacatgtactaaatcatgccctctgaacttttcaggctgttaaaaaatccccctgaactattaaaattgtt

SEQ ID NO: 168144 - DNA, 579 bp, Cannabis sativa
aaaaaaaaaaaaacagaacaaaaatggtgaccttcttttccgtactgtcttcagatttggccatttcattgagctgtgatttgagcaacggggcatttaaatcagattgatcttgcttcttcaaagaggaagtgctcatcgtaatctttgaaagttagttcttcccgggaatcgaagaaatgcagcggtcaaattctgagtattcagtctggaagtacctagggttttcatagtaatcttctgcaagaaggtacatgttcatgttgtacatcaacgaattacttagtgacacgtcattcgtttaggggtatatttggtagttaaaaatattagtgctcgttgaatgacaataaaacccttcagtgaatggagtggcgtgattggaatgaaatagtaaaagaagtttatgtaaggtcacaccgtagcagaattctgttttttatttgaccgttaatatgacaggtatagctttttctccagtttttaacgaagaggagttgtcgtttttagtttaaaaaaagagaacgacacgtcgttgcgctggctttaacctttttttttttagtttatatatatata

SEQ ID NO: 168145 - DNA, 604 bp, Cannabis sativa
aaaaaaaaaaaaaaatagaatagtgaactgtcacacaattcagtacatgaatatggacaatatccagtactctttaattgattattcaagaaaagaacaaactagttttaacttgcactagctcacccctctctttcaaattaaatttcaatcataaaagatatcgtacatatatatatatataagaataatattttcataattatcaaaacatgacaaaccctttatggatcggtctcaccccatgataaacatttaatgtatgatatggtacatatttgcaagcttccacaacagatttttatagagagtatatatagtcgtataatactattaatttatgtacatatatgtatatttatattaagttttaatagtgattattattgactgtagcgagtacataaacagtgatatatatacaatatgatgattatatgacgtgaattatgtctctcatagtatagcagtagcagagatgataagggaacgcatggaatttgtctggaaaaaaggagacattcaaaggaaattggaagaagcagcgatctacacatcaatttatataaatatatatctgtgtgtgtgcatatatatatatata

SEQ ID NO: 168146 - DNA, 1420 bp, Cannabis sativa
gaagtggacgaaagtaacggctctgcagagccttgtacgatttgctataattgtaaacgactcgtcgttttagttctaattttattaatttgttttttgttttatttattttattgtttcaatcaatcttgctatattaaattcagttaacaaagatagcatgtactaaaacaaattagaataataggaatgaagaaaaaagaaccatcaattccaggaagaaaagagaaacaaaaatcacttcaaaataattttctttacatttttacgaaattctacatagaaactcatattgcaattagcgctacaacttaaattgcaataaaaaatcatatagaaacttcaattgtaactagggctgcaactactttagaaactcaaaccgtaaatagtatataagataattctcttattttttatttttataatatttaaataattaaacagatgtaacaactacaatgtaataatcttcacgtcagtaagataagttgacatttatcacatgtcctctaacaaaatagtagaaaccacaatagaattgaagtttagaaagttttgttttcaaaattagtttgggatcccactttggtagggtagtatttgttcttgtgagtttaagggatattcttgttattttttcctagtaatattatgttttcttattatttttatgttgtttattgttattttcttgttattttatatatatttttttatatataaaacaacgtaaaattataattagaaaaaaaaatattgtaaaaatgtaagaaaaaatatttaattgtgaaaatattaaaattttgtcaaaaataacatttcgtgtaaatttctcaataaataatctctcatgatataaggtgaattatcttcacattaatctttcatagagatcataataaatgtagttaattttttttacattcactaatgtcaaagctaaagagatgggatacatataagaatgctaaggtgactctctgccaagttaacgaatttcaagtgatctatcgaattcgaatttgccagacagagaccaacttaaccttaaggtggaaagctctttgagttttagtgcatttttataaaattgaactataataataagtgtataatatgagttaaataagataaagattaaatattgtgtctagcacaaaatataatataagttaaatttacatgataataaataagagttattatatagaaaatataaattaacactttatttacaaaaatacttttataaggtgtggacaatatttatactttttatatgattttaattactaaaataccacttatactatcacttacacaatcatacaatagttatagggtgttatagtgagatttctctcacctagaaactcgagaccagattcctccttaaaaggacacgtgtattcagatt

SEQ ID NO: 168147 - DNA, 1025 bp, Cannabis sativa
gtggatattattattttatggccaacaaaaaaaatctcaactggtaatgaattaaattttgcttcaaattgcgtcagaaagcctctctaggtgttcatgtaaaggtaaatttatttcattaaaaagtgtaggcgcatatatttataaataatacaaatgtgattttacttctaaattcaactgcaacaaatcatcacaattttattatatatcctaaattgataaaccatcagtatataattgagtacaaatcacaattaaagccaattaatgctatatttatacgatagagtctcatattaagcatatatataaaaatgtctgattatataacttttttttatgaatcagtatgtatatattcacatcaaaaactcaattaaaaattagagccaaactcaaagagaaactaattagtagaatccgaacttagagtagcaggaacttgtctcatgcaggtaagattgtgctcataaattctgtccttcattataaatgtttactggtttcaaatggtaattttgccaaagtcaattaccagcaaaattaacttaatctgtcgagcttatctttggaaagggagtgagatgtcaagcggcccgggtcatgttgcttggtccgagatttgtagagataaaaaagaatgaggccttggtttcaaagatatagctgtatgaaatctttgtgctattgaaaaacatgtttaggcaattgagaataaaaaaataaacttttgatcaagtggatcatttcggtgcatattaatcaagatgattggtgggactatcaagtttcacaagaaacaagttggtatcgaaaaagaattgtgcagtcgaaagaaaatataaagattgtttactcaaagtgagtttcaaaattttcacttttctattgctagtctttagaataaaatgcataatgttcaggtgtgtaaatggagatatgatttagtatcccaaaatatagaattattatgtggttagctcttcttgagagactaccaactagagattggttccacctat

SEQ ID NO: 168148 - DNA, 1137 bp, Cannabis sativa
taaatctttgataggctaatctcataatttacatgtgcatgtttaattttacatgcataaagtgactttacttatgaaaatttaattaattgattttagatataattattaattagtatattaattaattaatgaattaataataataataatataattcatcatataaaaatgggattttataaaaataccggatttcgagtaaaaatttacaattttactgccacgcggaattttttttataaaaatattatctttttataaaacaattgtaaacaacaaaacagaacaattaaaataacagttgaacaattaaaaaacaatcgtgaaataacaacgaaaacttaatacagtacactgtataaagcttacacagtatttttttaaaaattcagcctcacaataaaaaaaaattaaaaatttcaatatataatgtaaaaacccctaataaaatatgtactactatagtggacttatgtatagtattacctagctatagtatttaaatatatttaccatcttgatacatatttctatatttttatcttctcattgtttaagaatttgtaaaattgtgctagttttccaattatttttatttataatgaattctagccaataatgtatggaggtagaatatattggatgtggctttagaattgatatagtaatacatgcatttttatatattgttaaagaatgccttattattaagataccgtcttataagtggttaataatttttttgttatgaaattaaaatatatacaaaaaacgatattaaattatactaataatagtacaacatcttaaatgatattaagcagtgctaattttgtcacaaaaattataatttgttgtcactaaatgtgtttttagctacaatatttgtgactaaaactatatattagtgtgataaataatttttgttgtaactaaaagtaatatttaataagaaaaaatctatattgtgactaaaaatttatcaccaaaaataacatttttggtagtgttcagtgatttttcatgacacaataatgtaacattgtttcaatttttcaaataattttgtagttacagtaaaattatttaattttgagtattttttatttatacttttataattaattttttatt

SEQ ID NO: 168149 - DNA, 708 bp, Cannabis sativa
tttcttttcttttctttgaatattcattttttttgtttttgaaattaaatatccattatttaaagttaaaatagaataatttcacctttgccaactgattagctaatctattattacgggatacaacttttttagttgaaaagaattactatcctgtttggaatttattcattaatttgtttttctaataatacatataataatgacctggataatattaaggattatgtgatcttgagatatatagtaatatagacttaagatatgtttcaaatgaaggctgatgtgatatccacagtatatatatttcatttatcatttaataaaaaattaaaaaatatgctatgttttatttaaaatatgatatccacagtaagtagattaatggattaattaataagtttgtaaagatatgcggcctcggccaattgtttagtatgtaaactatgtccaccttatttattaccatatgggaattaataattattatttttattttgaaaaggaattataatagagatttgtctctatactcatttacagtaatttaagttgtacagttattaaaaaaacgagttggtaatgctaacaattacttaaaaaaaagtgagaaagagagaaattacacttttcaaattattgtaactaatatgatgacatgttattttttaattagattttaagtaaataacggtataagtatttaaa

SEQ ID NO: 168150 - DNA, 721 bp, Cannabis sativa
atggtcataacgactacactttcttagagagaacctctaggaagcagacacttgcattcattcataattatctcatgcagaacaagagagtgaatacaagaaggatagtcgggccaccatacatatattgctaacagtaattaataaagcatacttaactaaagtatgagccgccatattaaaaattctaagacaatacattagactcaccaaactgaagttattaaaagttaaactaaaatcattcagaacaagtcctaaagaagatccaataacatatgattgctaaatttaaaaaccaaatttagacaatttgactcaaaaataatattattaaaaccaaataaacaacattgagcactcacacttcgaagaacccaaagcttatacgagttcatgtaagaaacctcccactaagaactaagaaccgaggccaaaacctctctttgtgcagggatgaggttttgcttcaatataatgtaattaatattttacctattatatatatattttcttttaaaggtaaacgtaaatatttattaatagataaattagacataatctattttcttagggtaaaattatttaaaataggctaactgaattgttaataataagcgaaaaaaaactccaatgattacctcaactaattattacttttagaacaagtggacttagttagttagggttagttttgggttgttaatcttgatattttgta

SEQ ID NO: 168151 - DNA, 980 bp, Cannabis sativa
attttgttaagtgagcttttagctttagggagagagctgggtctctcgaatacccaacaacttgttattctcttcttttatatcaatatacaactcactattttcctataattgctactgttatactgagttgataggaaattcctatcacacacttgtgccgacaaaataagtggtcggtataagtgttacccaagggaataaattggccaccttttgctggcgaggtgcatgaattgcttttaacggcgtagttcatgaacttcgccggcaaaagatcttttccttatagtgcgatgtacactcttatgagatactggacccaaccctcctctatactagctagcactccctaagttgagaactgcctttttttttattacacattaaccaagtataactggaagataattttaattgataaaaaccatcttttataattaaaatactagatataatctcacataacttatcaaaattagagtccctaatgcacataataaggatataacctataaaactgggtgtaaattaaaaaataataaaagaaaggtaaaaataaaaatagaaattgaaaaatagatatacagtgttatttcctcaatccctattgtgaagacttgtttgttgagttaaaactaattgtatttagattaattatattaatttaacctaataatttaattagcaacaaattaattctaaataattaaagggaaatttggcttagtatgcttaaatgtaaaacatgttgttttaatataccacccaattagaaatagtatatatatacatttaatatcttttcctcctaaaaatacctttacatttcaaaaaaaacttctctttctaactctctcactctccggcgttaaccccgacccagaacccctaccgttgaacatacagacctagaaccccagtcgcaaggcctcgtcatcgtcttctctcacggcctctctcgttttctgcattttttt

SEQ ID NO: 168152 - DNA, 1060 bp, Cannabis sativa
tggtcttggttcagaatagggtttgggtttgggtcttggcacgattcccaaatcctgacaacgtttactggtcgggtcaaagcccctggtcctaggtcctgggtcaagattcgtatcctgatcttgggtcccaatcatgttccagttcaagtcttgtgtttcggttcatgtccgtgtctgtgtctaggtccgggtctgggaccaagaccggggttgggtcttaggtcctagtccttgttctaggtatcaattttgattctgagtgtagatttgggtccccaatcattgtctgggtcctgggtctggttctaggtctaagtccgttttagggttcgggttcgtgtccttagtcccggtctgagttttgatccaggtccaagatacagtttgggttcaagtccaggtacttgtctgattctgattgagggttcgggttcgggaccaagtcctagtcctagtcccattaccgggtcctagtccgcttccagttctacttttggttttgagtcacaaggtaccggtctaggtctttattcgggtcttggtttaggtttgggtccggctctggatctgggtttgagacctggtctaagtcccagatccagaagccgactacaggtcaggtccaagccccaagtccagatctagatcccggtctcggttcctgttcttgttccactttgggtccaggttctagtcaaggaccgggcctgggtgccgatctttgtttgggtcttggactggatctaagtcgagttctaattcgggtttgggtttgggtcttggtcccgttcttgttcctattccaaggtcctggtccggttatggttcaatttataattttgattcctggatctgtaaccaattcttggtctgtgttagggtcctagttcgagtcccagatcccacgaccgactacaggtctagtccaagccctgattctcggatcgagtcaagattcatatcctagtcatgtgtcccgatcttattccagttcaggtcctaggtcctggtccatgtcccaagtctgggtccaagttcgggtctcacaccgagactg

SEQ ID NO: 168153 - DNA, 617 bp, Cannabis sativa
atatgcctatggtggagaatggcaacaagatgtaagatattatgaatcactcgccaaggaaaaatgttaacctttcgaggcaattttagacgccaaaaccttgaccaccggctacaggaatattgtgatggtaaagggttgaagcttctcgcaagaaggtagcaagatgatatcctaatttaacagcataacacccccgtagcagtatgatgccaaataaggcaatccttgggcggataaagagttagtggaatctgaaggatatggttaatagataagacaattagtgtatgaaaattatgttcataaccattgtattcacaattaaaaataagaacataaacaaaattagagaaagagaagaagaagaagataataaaaatactaagtagttgctattaatgagtttttgagtttagagctctcaaaacatactaaaaagatttagaatttatacaggctaacaaagttctctagaagatactaaaaagatttagaatttaaacttgaaaagataaaaaatgtgcctaggaactgcaactcgaggcaccgaaatcgcaactccacctaagaaagtcatatttttttttgcaatctttttatcttttttttttttt

SEQ ID NO: 168154 - DNA, 667 bp, Cannabis sativa
ggtaaaggcttagtaaagaactaataatgaacaaaaaaatagaaacaaatatgaagcttacaatacatatacatgagaatatatatctattatatgtatataataagaagagtgagcaagtaatatcccacaaccagaaattgagaaaggagaatagactttaaatgcgttgtgattctcgaatatttaatatcagttcaaacattaataagatttgttttattataattttataatatataaataatattttattattttattaaataaaaattaaaagtaatttctcataaaccaaaaatttcagttatatagacacactttatatagaatagatacatattctcataaataagaatgacgtccagaagtcaaaatcaatcaaaaacaaccaattccactgaagaatcacagaacgaattaaatacatatatatatatatattaccgaagccccatcatcccataaattaaaatttaaacatgacaaaatctaaaaaaaccctcaaaaaaaattacggcagcagtaataatataattcaaagaataatcaaaaccttaatttataaagggaaatttcaatttttgcccttaataatataacctatatcaaaatttatacccctttataatttgtacaaatttattcctataattttaaaagtttc

SEQ ID NO: 168155 - DNA, 584 bp, Cannabis sativa
gccgagtggcaaaatatacacgtttctaagagtctgtgagttcggtgtactacgtgtattagcttgtgtaccccctccgttgtctcttatctttagtctgtgtactacctttagaagagctcttactccgggagctttgttgggctcctgccatgctagtggccggtgcagattgggacggaagctaaacgctcccccgagagcgattgcctatgggcgccccaaagtgtgatagtgtcgagactaaggtgaggttctggctgtatcctggagtagcggagaactgtattctgcttgtttgaggagtagcagggagtgcagccccagaaagttatgctcctactgcttatcctgacactccagtcgagtaatatcctcagtaagccactatttgggcctcctgcaggttaatgtatatctggactctcttttgaaagccttagaggctagccgcgccttcatgttgtaactcgttccagaagggggttcctattcggatcacggcatggagtagggccaactgttgtccatcgtcaaccatttttgtcttcgaggcctcctccttgaacctttttatgaaattc

SEQ ID NO: 168156 - DNA, 558 bp, Cannabis sativa
tattctcatatatagagattctctaattgttataaagagtaaatttgtaacatgtgttatatgcccactcataagaaaacaaataaataaataaataaaaattcctagctcttatattttctgcttttttattttttttaatgtatggtaattaattggtaatatcatgtaaatggtagacgtttttatcaaattagaaatataattaattggtatgattaattactttcaatagaatgattcctaacactaagaatccttctagattggccaaaaaatagcaatattattattttagtcaaaatgtaataattaatatttgtacatccagtaataaaaatttgagaatatataagaaaaaatatcactataagaccatcctaatcatctttaaaattttgattaatcatatgtattaaaaaagcaataaattattgagttatataattatagctaaaccttttttttagagtcacaaatattttattttctggtcaaagcttaaaagtgacaattaattaattaaaaaatatttatttattaaaaaattattaatat

SEQ ID NO: 168157 - DNA, 2052 bp, Cannabis sativa
aataacaggcatcacaaagtatcataggaaattctactatgcaaccaaaaactttatgtttttcagcattttcgaaatacagataattataattctaatcttttacacaaaaatattcaaactattgcacgtttttagacggtttaaactcaatattttttgtacggtaaataaaagcatcaaatttgttattacatataaacagttcagcttttttaatgcattacaaacaccaacaatacaataaaaacaaatcaagtaagaactattcaaagatacggttttagaagccctagagccaaacaaataaaaagaaaaaacatttctttttttttcattaataaataaacaatgtcaagaattgagaagtagagaagctaaccaagatgaaatcggggagggacttgactgggttagaacgctccacagtagagagaggctcgagtctgagatggccgctgtggccggagaatccgacccgataatttagctcgttcgctgctttaatcgggtccatccttcaaaattgtcgctttccagattattatttttttcttgtttaaggtgtttggtttatgattttggaaacttttcgcgggtttggaaaataaaaagaatgtgtgtatgtttggttacttaagtttggaagtaaggttccaatcaagaaaaacaaaaaaagaaaaagagttagaagtaaggaagtgctgtggccccctctcactctctctctctctcttacttatttcacaatatgggagtagccgtatatttttctttaaccaagattagctaagatctgtatctttcaggttttatagtgttttttttaattaaaaaaatataataagttaaacttaaacgaattatacatacttttcattatcttttatatcttatattaaatattattatatcctaatcttatattaaatatgattatataatataattattttttttaatattttaatttaaatttaaactcaaacacatatttaagaaaatatctttttattattttattttaacccaatgcaaaatatctaaaaatatatatatatttccatcattattttccttttaaacaataaaatataaaaaatatttatatcttattattataaaaagtagtttaatgggatgatatttttaaaagaaatttttacaccaaaaatacaatttacatactttattacaaaaaaactcacacacgtacctttcctctttcttttattacacatataccacttgcacatcaatttcatgcacagacacgggtggcttcctatcaaccatcaattaactttcaatcacttccctctcttttttccttttgtttgaaagattaagtaacctccattgttgaagcataacttcccacaattcctcaacatttttttcccctctcatttttgttcttccaaaaattttcaactcccactaaagcaatcccataactgtttccctctttccttttctttccaatctctatttaaaatagttgtgacccgttcatcctcatctccttcacctgttcagaaaaaaaattccaaaatgggattgaaatctctagctaataaagttaagggtaaacgtccaattattgaagaggaggattctgattttgctcctcctttaaccaagcgtgggagaccacatcctaagaaaaaatcaaagctcagtgtggaagagaaaatggttgatgaagtttctgggaaaaaagctagtgttgctgccgatgttcgaacagaggtttgttttcggtttcattttcgtttcccccttttttgaacattttattgtatttccagtttcagcgtttttttttcttctagtttgtgaatttttagggtttcgattttaaaatttcgtttgatattctttgattttttaggtctttaattttgtttgatcaattttattttgttcttttctgggtttggcattttgatttgattgttattactttcgttacagtttttgtttgtgttttaggttctgtatgtgtttgtaatttattgttaaatattttgaaacttctgttttcgtttt

SEQ ID NO: 168158 - DNA, 877 bp, Cannabis sativa
cctaaggaaattccacaagagaaaatttactgataataatatgtaataaacattgataacgaacggaccaatttagtgcattcaaagtgggtgagcaagcttagctataaacaccaaaaatccgagaagatcgtaaaagtgtagttacctgaggagtcgataccaagttcattggcggagctatcctcagtctcgtatccggaagaggtagagcaagcttcagcatcatcccctttaagttgttcaagggaaactccatcaacatcatcatcgctttgagattgtgcttcaacttcggagtcggaggaggaagaagagtcgtcagtgacctcgtcgtttttgtcaccatggtccatcttgtagaaacgacgctttatcatgtttctgttatataatatatactgaaattgaaaaactgttgtagagcgacggcggccggagagagaataaggaagaagagtagggaagtagggaagaatggaaaaggaaggtaaacgaggtgaataggttctctctctttctctctttctctcttaaccaattccactttctcgacctggcccaatgttatattcccctattatgggctgacctattataagagttttactagagtgggtggaaattatgtgggctaggagtttttcttgttatctcttctcataaatacagattttctttttttaattttttaaaaaagggtgtcctgcaaaaatgatctccttttttaaaggattaggattgggcttatatctgtttttatgtttttgggcttcttatttgggtttttcccactttgtataaataccacatttttcccattattgggtaatgagaattttaccacttttcactaatatggtatcagatgacatac

SEQ ID NO: 168159 - DNA, 1078 bp, Cannabis sativa
attaaaaaaaaattaaaacttaaatattaatttacttttcttctcttactaagagtaaaagaaaaaagattacgagaatactaattcatgctattaaaaaaaatttataaaacaagtcaaaatttcaattttgatataattttatgagttaataatcaataaataaaacataactgtatgtgaagcgcaatttgtttcctatttttttcttgtatattagaatacatgttgctattatctaatgtatattctttttttttttttaaggaatggtacttttattaatcaataagcatcaactattacaatagataaaagtttagtaagagcattctccaaactaaaactacgatcaggataaaaacaagagtcacgaggaacactatgagtcgccttgttagcagaacgtttaacaaaagataatttaataaatagtaaagaagctagaaatattccacattcatgaactaatagaccaaaaagagaaggtatattcaacgaactacaaatggcctgaactgctaccaacgaatcattttcaagcttcacactcgcccaccctttagccttaatccaactcaatgcttcttttatccctaccacgtctgccaaagctggatccatgtgaccagaccaacacaatgaagctacttccaccaattgaccaacactatctcgagccacctttctaaagctgaatttcttttttgacatgaaaattggtccatcgacaatcaccttaatcatattattatagtttagtccaacgctcaaggtcttcacccaaatctgtaggtgagaataaataactcctccttttcaattgagttgtcgtccattgattaagggacacacgagctgaaataaccacttcagttgctaaagtaattttacttcaccacacccaagtattttggacaagccatactgcccaagtaaccatggccacttcctcttgaacccacaaactagcagtatattgctacactcaattaccaaactaggtgcatgtaacgccccagtattttgccttattttacaaaaatactattttcatgcataatttgaaaagataaaa

SEQ ID NO: 168160 - DNA, 993 bp, Cannabis sativa
  modified_base (948)..(961): a, c, t, g, unknown or other
tgaagacaaagaaaattctagggacatttctttagtttgatgcttggaaatgccccacattgacacaatgtagcctaggcactaggtgcatgggtacctggtgctttgggtactcaaaaatgaaagtgctccgaatatgattttgatgcctcaaatatgttcgggacatgtctatttcatgtccctgtaaaacatgtgatccatttgtactaagacaatcccatgaaactgaaagcttaattaggttgtcaacttgggcattgggtgaaatcctaagcgcccaggttgactttcgaggtgttgttttgtgtatttttagttcctaggccttggacatgcatgcttcatgccttcatagtacagaatattgaatgttagtgagttgtaaataacttggcaggatctaaaaatctatttcggagatcccgtagtcaacttgagcataaggctagggacccctcccaggtcgactgcgatggctcatgactaatcaactccgagatattttctttcttatcacgtgtcaaatatttatatccatatcaccgagataagttagcagattaataatattactttagcttacattgttcagttgacataacattaaagaaataaaaggaaccttttacacttttcattttattttttaccataattttttttttctacatgtcaagttaacataaatcttttgtcgattttatatgacatttaaaaatatttacactcataattgtctaataaaaatttttaaaagatattaattaatgtgtataaatatattttatattaataatagctaagtgatacaagtattgagtacataatgtataaaatctaaccatatattttataatttgtatcaagtagactattatcattttaatgattaatcatttgtggacgttacatgtttacttataattaatttaggtggcgtttggnnnnnnnnnnnnnntcagttttctgtttttaaaagtagaaaagtga

SEQ ID NO: 168161 - DNA, 1509 bp, Cannabis sativa
attatgtatacgttcgtggatcagtcaataattcacactgagttaggcacatcattttcatctacttatcatcatcatgatatcatttaataataacaaataacgaccacgtatatcatacattcatttaatatttaattaagcaaaacatttttagcttactcacacattcattattaataattattaataatcttgttagtttaaaaatttatttaatattctaaaatttattaattatataattaaaagtaaaagttttatttgaattttgagtattgtttaacatattgcaaagccaaatcataaatgttcatattaattttttttttttttttagaaaagcaaagcaatatatatattaaaaaagataacagttagacctcgcggtcattacataataggtctcccggtatagagaaaaccaaaataacaccaaatgtcttgtgggtgaacgcccacttggccacgttatgggccgcgaaattacaggttcgattaacataagaaacgacacaacttgataataaaggagaagatctattacaaaatgagatgtagttctcaagcgcccattgagactccttcccaataagaacattgataaccacactcgaattattttccacaataacaaaattagccttaagatctaaagccgtttcaaccgccaagcagcaagctgccgcttcgccacacaaagcatcaacaaaatattatgaatattagtgagtactctcatgtaaatgaaaaatggaaaataaaaaagagaaatggtgtagctccaaaggaagaatttagaatctttaatctttagaaacatccaaatgattcaacttgcattagtggatcccatcgttttacaataataaaagagagagagagagtaggccctacgagaatctagatcacaatccattgtctcgggacccactcccactctcactctcttatttattaatgttctcttctctagatgtacaggaagaagtgacccccactacgcacatccaattaatcttacctttcctttttttctttctatttgactgtgatacgtttctgtttcattttgactcttcattttgtataaaatattaactaacttttttagtttgtttatttttttaatgaaaattaacttcattaagaataggcaatcagtaaaaagttacattatactttttggaatattaccatttcaaaccaactccctaccaattcctagtgccttcttagcaatactagttggaacaacacgtgctagacacgtataattttaatgtatcatgtaatgtacttaatagtaaataattttcacttagcatattcattataaaatataattatcatatgcagggtcggccttgaaaatttataggcccaagactaattaaattgtggggccctaaaaagtatatataaaaaaaaaaattaaaagaagagtgttatgggatttgaacccatgaccttgaacattatgcgatccacctcaaccaactaagctat

SEQ ID NO: 168162 - DNA, 1209 bp, Cannabis sativa
gtaaaataatttccaacaatctctcctccccattttgaccatgtcgaattcaatggtttcatcggattcaacatttaagcaattgaaggcagcatcctaggttaattgtcaacttgggcgttgggcccagcattaggccaacctaggctcttggccctatttctagggactcaagtttatggttttctccccgattttacttgaatcttcgctattttttatgacggtgaagatgcctagagaaatttttgccgaattgaattgtaaacagcccaggttgacaaaatgtcaacctgggcgcagggtctagtcccatgtgtcaacctgggcgctgggtccctcttcttcccctttgtaagttctgtttggtccccaaaaatagttgattctctatatttaatgaatacatagatgatgttcgaaagaattttgggaaactccatttttgtggcccaagtaggtaaattttcgacctggacgcaaggccagtcccaggtgtcaacttgggcgctgggccctagtttttatgcacagggattgttgtttttcatctagaaggacctattttgtcgtttttgatgaagatgaattcaatgcaaaagtcgaatctttgatcggacacttggcaggcgcctagattgacagattatcaacctgggcgctgggtgctcggggacccctaggccctgggagctcaaaaatcatcttgctttgaatctgattgtgatgcctcaaacatgtctctagtatgtctagttgatgtctcaatgcaagttttggccactttgcactagatagttctagaaactaaaaccctagttgaggatgtcaacctaggcgctgggtggaaaccttagatacccaggttggttttcgggttgcaggttcgtgtaattttagctgtgggaccttggattaaggtgctccatttcttcatggtacaaagtaggttgtattcaagttattgaagtccaaacttccattgcagagctcctagagtcaacctgggcgcatgggctagggtcccctcccaggttcactactatgactcgggtctactcaactttgtgacttcatccttcatgatacgtgtcaaatattgatgtccacgttaccaaagaaagtttgtgtgtgaacaccttgcttagtaaaattcataaataacacatagttttacttagaatcataattgattaattaaatcaatta

SEQ ID NO: 168163 - DNA, 872 bp, Cannabis sativa
  modified_base (833)..(840): a, c, t, g, unknown or other
gttttatgggttggaaacaaaaaagaatctgcttttcattcattggtgtccttcattgatatatatacctggggccgagaaaaggagtttgtgagctgagggcgataaggcagccctgcgcaggcgccatggctgcattgacagccatctcgggtagggttgttgagccttccgctctctcagtccctcagcagacttctttcttttcatgcaagaaaatgacccattttcataattttatattattattacccaaaaaaaaaatatatatcaatcatgttataaatcactagaccattctagatttttactccattcccatgtagatgatttattgagttaatctaaattttttttttacttaattcttattttatatataactttctcatttatatttttatcatttattttttatatatttataattaattttttattcatttataaaaataaaaataacataatttcaaaataaaaacaatataacatcaaaatttaaaatagaacataatcttgaaataaaaataacataatttcaaaataaaaacaacttttataaaaattaaaaaaatatataaagtgaaaaaaaataaaaaaataccatatatataattctcctaatgtttctttttgagacattcataactctcaattggctcaaagcacgtttgtattagtagcataactattattgtgattcgacgattctcatattggcctcatgatttatggtgctattgtttgttacgattgttagtgttatcacttcaaaaaaatagctacctttagtgacaaatttttagtcataatataaattttttgtgactaannnnnnnntttagtcacaacaaaaagttaattatgactaa

SEQ ID NO: 168164 - DNA, 971 bp, Cannabis sativa
tcttttgtaaaaactctacatggctttctgagcctcttaatttttttcacctgaatcttgcattttgtgaattaacgactttgtacattagggttgtctggctaatagccttaggtttaggctagttgatctatcctttttcgatgtctttttatttcttttggttattcacctccctctactccctctacctttttacacaaatgaacctacacgacttttggggaggtgacaactagattgaggaacactttctaatcttctccacgaagaccatcatccagtccagatagctagttattcttttgagggtttttcaattagttcctcgagtaatttcaaggtcagcagtggttccccgaaacctaagattcagcaccaccactattctaaggaaataggccatgagttttatggttggttcatctgggatctaaactaggggtggcggcaattcctccccaggtcgtggacttatattatccaagacggtgtgcctgacacgtttccctctggacgggtaactctgacagttagagatctcctcccagctaaagctactgttaccgttgttagacattctgagccctatcctatcgtggctaggacaaaggaaatgtgtcatagggtacctcccaataaccctaatatttctgagttgatgaccaaaagaagtgttaggtccttttttgccaatttagttatcaaaacattatttaattaatgtgcatttaaattattttttgctacatcgattttgtgcctctagttactcttttcttctaaggaaagattccttctcagctgatctctttttgtttaggaaacttcttgtaagagaagcagtgcctttagatctctttctctccttcgagttttgttaccactatcttactcacttactcactatgattgagtacttagacttcctatgtgtgggcatggctgtaataccctagaattatgaaatg

SEQ ID NO: 168165 - DNA, 552 bp, Cannabis sativa
taaaaaaaataaaaacaagaaaatctcagcatggccaatctggacaagagcccaaaccgtttagatttagtatagtgggccaatgaaaagcaatatatatgggcctgcccaaacccggtagagttgtgaacctgactagggtttttgcgtttcgtcattggaataacaaaggggtttaaaacttgttagggtttttgggtttgttcagtagaggattgaaagcttgaaatccttagacaagtgagaaatggatcccttttcttccccatcgcctggatcttcttccagccaattcaatcccgatgtcttcaaggaccagctcaagaaccagcttgcccaggcttatgccgaggaattccttgaggttcaaaattcttccactttaactttgtctcttctttgattatgtattcatcctaattttcgtgatggtcttgggtttctctaacactcacaagaccgttgattcttcagttggaaacttcattgcctttttgggttttttttttttattttattttcaattttgggtttgtaatttaacttgagttt

SEQ ID NO: 168166 - DNA, 2342 bp, Cannabis sativa
  modified_base (2276)..(2284): a, c, t, g, unknown or other
gccaactcagccaagattccttcattcaaggcacctccagagactggcaatacatgctttttcttctcaaggtggtttcttaagtcaccatgattcttgttaattttttgccttagatcaaccggaggatacctccaacttttcctccccctttccccaggttcttggtgcacggatacgctctttcggtcctctcgatcctgagggccaagactatctcgagggagcttgcccctctgtggacctttcccttttggaaaattagagcggaactttcgcggatcctgtgccttcttgtttctctcagggatcgaggtaggatttttcataggattttcctcagaaggatactgtataggacttggctccctggttttgggcctctgagtgcttgacgaggattcctcttgtgtttcctctagtccggcaggcatgggtttggggtgcacaagcactactacaattttacattttagtgacactatttagtgacatgcacttttgtgcgcgtcagtaaaaagataggagttatttttagcgacgtgcataactagacttttattgtttggtgttagtcacttaaaacgtgtgtcattaaaaatatgaagggtcattaaagagtaaaacccaaatttttctaatttttattaaatgaaaaatattgacttatagagacataccgcgcgtgactagataaacgtgtagctacttgtatggcgcgtcactaaaagtgtggctatagtgacacacttagtaagtctttacatgatttccgagtccctcattgtatgactctatatgctaatacaatttataaaatttaaataatattcatcttatttatttataaaatataaaatatttgatacattgtaaaaatatatatataggtatctggtttgtttattacataaataatataataaatatataaattatatatataagaaaataaatcctagagctaactgtacatctctttttctcacacctcctcattgcgcctcctatctctctctctgaaatctcaacattttttttgctcaacactcaaagacttagccatcggaagagatgatctgaactacattggccatgatcggcgtttctcgatgctagtagtcaaatagcctagatcagcctcttcgctactcaaagcactgctcgtcgctgttgacccaagtggaccactatcagtcgctattggcccaactagagacccatttgactttggcgatggtgctatttttgacgactagatctgagatttttgccaccggaacatttaggtattgccctcatattcatctttttttttcttcattgtatcatatttttttccctacgattttcttttttcttttattgtgtatagatctctattatagtgtcttcactccctgttttgtttgactagtttctctacaaattttcgttttggtttggctcccaaaaaattattgtgtttcttagttttgatttgggatttaataatgcttaaagatttaagaattaattaattaagaaaataatattgaaaaaaattatatatggattttgacggaatgatttacatatgtagtagataaatacgtttatatatacattatgtatgtatagatgtaaaagttaaatatatatattggtacttgtgttaataattgtaatgagtgtagaaaatgtgctaattgaatattccaagtaaacaaaactagtaatgttgctgagttgtttgataaggtttcacagaatgtgaaagtgaagcgttacagtgaggctcttgttgacatcaatgctacaattgaggcacaccaatctctttcacaagccttttcatcgggcatcaattcttcgacagctatgaagctcgttggatctgattttgttttaagttttctttttgtttcactggtctatttctggttttttttactattatgactatggtgtttctatatatacttcagggttaattaaggcctaataaattttaataatttttgttgtatcgcttgttgaattagtgagacatgtacataactataaaaactgcttagcttaaatttagaagttagcagataattaggatttaattatggaaattatttattaatttttaattattaatttatgttgatttatttgaattcagaatgtatttttatgtcacatatagaaatttcataattttgcatactcaatgcccggcaacaatggaacgtagtgtttggctattagaatcacatcttggtatttttagtatagcggggcaatannnnnnnnnattgggaatgtcgggaatagtagaaattttagaggtgaccaacatacccctaagtgac

SEQ ID NO: 168167 - DNA, 1372 bp, Cannabis sativa
tgtaattgtaattgtaattgtcgtacttcatcatttgcagaagtggcctcctctagctcttgctcgaagtttcatttttttggagttgttaggtctctttagttagttaccactttacatcactagtactatgtagaaccttgagattcaaattatgtattaatatatatgattatatgtgcacattttcatgccagctgttgtctaaagaaaatcacaaatgtcggcctaactttaaaggaatagagtcatatatttcatctcatttatcaattaattttgagatagaatttcatgttttttgacatggtatcacagtcatatttttagtgaatttttgatccatacctattcagataattagtcagccacatgaaatttagatagtgtaaagacgttcgagatttgaataaaaataaaagcgagcgaaatagcacgacttgtgataaggtgattcaagattagtgagcaaaaatagtcaacatcttaaggggagtattggagaacattatcctatatgaattaaatgttaaagtattgagccatattcaagaatatgagctactctagtcaccaccaattgattttgaaatgaaactccatgttaggagtgaggtttacaaaacacaaagtgagcaagtgaaactgctacttaatgtttggaatacggatggagaaattataacaaatgaccccaaatcataatgttaacgcagattgttaacgatataagcctatttcttgataggatcaccacaaaaataatagaaaataaaaataagaaaaataatgtaaagatcacactaagttttttacgtgattttgtagttttgtagttaaaaattttgcatagtccacgagtctaacttattagatttctctcatacaactagggttttttctctcaaggatttttcgtccattttttagtacactctgctcctatttatagtaagatagagaggcagttaattacaatcagactcatatcccataacaatatttccctaaaattatgggatttaattacgtcccacgtagaataaatacggttattaattgaaaatcatacaattatgatttattcacttttactgggtcaatattgacgtggatttaaatacgcttcaaagtgtatcgcactgggatagcaacaataaccctgacagtgagctggagcttttttcatgtctttctgaggttgataatgtaaatcccgtcgtttatgctattgaagacataacacttcatctaacaatcgcaattcttggttacaaggtgaacttcagcagtcaacatcatttgaatgtcagcttctatttgagagagctgacttgacggagcagtgaattgttggaattatattttacca

SEQ ID NO: 168168 - DNA, 1588 bp, Cannabis sativa
ataatatttttaaaaaagtattattattgatggaatgttaggggcatattacggtgggctgtgataattttttaaaaaataaactttaaaggccttaagcctaataacaacatatacattactttcttaagcccaactaccacactttcagaaaccaatttcacgaagcactcttctcttcttctccgcctctatgacgaagctctttctccacctccttgacgaattgtgagaaacaatatgagaatgaccaacatgtttaatgtgcaaacctgatccatctcccatgtatagctgatctgaaccaccatattcaacactgtttccaagattttgtgcttgactggtgcaatgattcgtagcacctgaatcgggataccaatttgtatcattgtaggtgctgttggttgcaagattggcttgagcttgaatctgcgattgagattgaggtgtggatagagagctgctgctgccattagctaagggtggtcctgagaaagacttgtcaaatcgaagaggacagtcttgcacaacatgaccaaatctcaaacagagttagcactgaggccggttaggaaaattaaagccaaacctattacttctgataggattgaaattaaagttacctcttcctattgaattctgattgggattgggagaaaaatgattgaacctgatatttggattgggattcctattaaactgtgcagaagaattgttgagttgggaattgccacggccaaattgcttgaatcttcgaaaagcaagattggcttcagcattggaatccagatcattggtcaccaagttctcacttagatcaatttctttattggatttttcaattcttgacttggatgcaagaagtaaggcttctatttctcccactgtatagttttcaacccttgtgttagatgaaatcacaaaggtatcgtactcacttggcaaccccttgaagatggcagcaacatggtctcgatcactaaggacttcaccaactgaggccaaaagatccacggtttgcttgaccttaaggagatactcattcaaactcatcgatcctttattaaattctgaagtttcatcctaaattcgagaatcttggaagaaacctgtagtgtgaagtgtttttccagtgcattccagatctgaagagaggtattgcacccaaccattcgtgtcaagagactttcagtcatagacgacagtaaccaagatacaaggagctgatcttgaacctcccaatctgaataaaatggattaattctgtcaagatcacgatctgcatctatcaaaaactcagctggtggaggttctttgatatatttcagcaagcgatttcctctgatagccgcaagcacttgttgcttccatagcaggaagttgtgatcgtttagtcgaatagagatattgtggttgaagatcacaggttcttgatgtgttcgagttcgcacagtagctccatttgcaccagcaggattcgcatcggagtttccaccagaatttcccacagttgccatattcacgcccaaaggagggaactgctctgataccatgttgaagtttctagccattgatgaacaccaag

SEQ ID NO: 168169 - DNA, 505 bp, Cannabis sativa
aggaatcaggatgtgctagctttaagccattctgacatgaaagggaatgatcgtaataccattttcaatgctttgaatatctaggaagatgtgatccttgttcaccaaaaaaggaggcccttagacccggtagggctgaagtagtaaatatggaagtggacaagttaaccgccaatgatttcctctaggaatcattatactcgatatggcttctgaatctcgtatcagaactgaaacccaacgactaatggaggatgtgcatagactttagtgacctgaacaaggcctgcccaaaagattgctttttgcttgcccaaatcgatcaaagggtagatgtcacatctaagtacaagttgctcacacaaccaaatcatgatgcacatcactgatgaggaacatactagtttccatactaataagtgtgtttactgctataaggtgatgttgtttggacttaagaatgcaggggctacatacaaggagatggtaaattggatgttcaaga

SEQ ID NO: 168170 - DNA, 734 bp, Cannabis sativa
  modified_base (671)..(693): a, c, t, g, unknown or other
ttataaaaaattagtaagtattgctatttttttaaggtatcttaatttatttgtttgtttattttttttacttattattagttatgatgattttatgtgtagttcggtcaaattaaagataaatttatagaaatttggtgagatgttcaataataatttgtacaagagagatggtgtctatttattcataggaacttctactactattaaaaaaaattagaggtaattatttatttagattctatcattcaatatttgaatatacaataatatatgtttgtgtatgataatttatatttactctaaatagatgaaattaacttctctactacaagtgcaatcaaattctacgtaaatcttgctttcaaaaattctacataaatcttcaaatagattatgtagtatcattaatccaaaaagtttttaccaactccaagagagtggaagtaaagttttaatgctaacttttgaaaaagatatgttccttgacaagatgactattcaaaaattattagaggttgattggagtgatgacaatggatgaaatatgatgttgaatgatacagtgatgacagtaggtaaaaacgataacaacaatgggtgaaatatggtgagacaacgtgtaacaccctaactaacttaggcgcattacgtgatttttaaacgtactnnnnnnnnnnnnnnnnnnnnnnnaggtttatggaaaaacgtgattaactaaaattttgcttttt

SEQ ID NO: 168171 - DNA, 1190 bp, Cannabis sativa
  modified_base (1133)..(1145): a, c, t, g, unknown or other
tttttacagcaacaagtggcacaacaaggacaattcgagtcgtttcatcgagcaatgatggttggatttgggaaatgggagttcgatccaatggatttgaagaacccttttcccaacaatgaaggaagagtccatctatggcaaggagaggaagataagcttgtcccattggagcttcaacgttacattgttgataagcttccatggattcactaccatgagttgcctggtgctggtcatttttttataaatgctcatggaatgggtcaagctatcttaaaccaattcttaattcacaactagattataatgctcactttagtactattctataattattatgagaggagggaattaattaatggactgaaaatagtttttattaagtacccaatgtgttatttttgttgtgagttttcttatgatatccttagtgcatcttatattacatgtggtgtatatgtatatatatttttagcatatttataaaatttaattttaaaggtggtgtatgatttggactaaccaaatttagtagagagaatatagcatggatcaaattttacactataataagtattacttttttatttatttttttgtcactgattaatataattaataattttttaatactttcatttacatattaatatagttttaatatatttttaataaaaatttaatgttttaattgagtgatttttttacaaatttctatgaaaataaagtttgttttacttttagtggattgaactataattgtaaaatttaagccaaatataatatttatttattcttgagttaaatttagaacaaaatttacattatcattatggtcttaggaggtaaataattttcttttttgtaaaaatggcttattaattaattcaaaaatatatttctataagagaaaagtataaattttttattggggcatgtgagaatgaaaacaattttttttatataaaattaatataaaaatatgtaaaataaaggtaaaatttatatatttacaaaaataaaaatgaaattttttattttgtagaagcaaatatgaaaacatataaaaaaatgaaaagttctgttctatgaaatcaaatataaaaatataggaaaattctacaatgcannnnnnnnnnnnngatatattaatgcactcctatctgttttagcatccgaaataattt

SEQ ID NO: 168172 - DNA, 1177 bp, Cannabis sativa
  modified_base (1129)..(1147): a, c, t, g, unknown or other
ttttttttttaattttaaaaacaattagcaacagatttttaccagtgaatcccaccattaataaaaagacaatttgaccatgtaccctattaccgacgaaacccactaatacagataggtctctaccggtaatagttttatatacataaaaaaaaattactgaaatcatttcaagcgtcttccattattctcttcttcatcaaatctttcttcatctcattccatctctttctcttactccaacccaagctatcatcaccatcccagctctagcctaagctcccaccactatcccaactgagtaaactttttggtaagtgaatggttttttatttcagatttgaagtcatatctttctatctcgtacactctgatttattgagttttaaacgattttttttattttttttagatctgaatttttctctggcaaggaagctcttccaagctgttgccctccgccgaagctccgtccataaacaaatagaaatttttcttgaaaaaaaaagttacgtacgaatttttttttttaaaaaaccaaatagaaaaaatgagcaagataattaatcaaattatatatttataaacttaatagaaataaaaaaaaagaagagaaaattaaggagatataatagaaaatattatatcaactataatgataatatagtattgtgttatcactaacacataaatccattaaatttagaattacgcattgaaatccattgattggaattatgttaactatttcttcttttagtatcatcaataaagttgtagccaaaaataaaattttatagttatttgaaagtagtctatacttactcacctgttattccaacaatcttcaaattttgtacacaaaaccctcactcaataggttcttaaacatataaactaaaattttcttttttgtcaagtgtattagatttttttgtaaaataaattacatggcatattaatatagcatgattgacaaataaaaaaataaaaaaaataataatataaaaaaattatatgacacataaagtataaaataattgacaaaaaactaaaaagagaataatttatacaactttctcataaataaaaatcatatctagacttattaaggtgccgtttggtaacnnnnnnnnnnnnnnnnnnnttaatcacaaaatgaaagtaaaatgtttgt

SEQ ID NO: 168173 - DNA, 981 bp, Cannabis sativa
ctctctctctctctctctattatagatagattaaggttatagcccacctctataaattgtattatcacttcataaattgtattaatatcattataaattataatgtacaaatatagcctatattaataaattataataacctcattatgataagagagaacagcaatatacatagtccataaaaaaaatccccaagtcttttataataataaaaaaaagttttgatatatatatggcatgcatataaacttaattacattaaatataatatttttaaaaaaaataaaaatatgagataaatcatcaaataagaaagaattaataccataaaaaaactcaaaacctcacatatatatatataaattgtacttttaatataatcaaaatcagtttttttatgaaaaaattaatttcttaacgaaaaaattatttttttgaaaaaaaaaaccgatttcttgataaaatcattataaataaaaaggattaccgtaaaaaaatttaaaaactcataactaaaaccagtttcttaataaaaaaattagtttgaagaaaaaaattaatttctaaaataagatacctttggcttctctggtttatgtcaaacaaagagaaataaactttaaaatattaaatattcaaaaaaaaacatttacaataatataacaaagttaagcccattaaaaaagttcaaaataaaaaataaatgctataaaaaatagacaaagttaaattaaaaaaaaaaaaaattaatcctatattaagtgtagttttttctttatagtactccataaaaacatattaaacataatatggtgcattttcagactaataacaaagaagagtgtgtacattatgtgaataattgtaatatgtagggtttagggtactttatttgtaaagaccgcatacgaataatacgttgaattatttaataattaaagtttatatatgagattttattattatcaataatattatgat

SEQ ID NO: 168174 - DNA, 3010 bp, Cannabis sativa
ccatgggctggtcgcgaccaccacccagatttctatacaaaccgaatttttcccccaattcaactataacccaatttcaaatcttctcagccgtcccacaccttcccccttcgaaaattcaaattttcttcaccaaatcttcaattcttcccatttatctaccaatttctcgatcccaattcatcccaaaacccaattttactcatcaatcttcactttccatcaaaaattacacaaataatcatcaatttcaccccaaatctaaaaataccattgttcttcatcttcaacctcaagctttcaaggatattcaacaatggaggtggagtagtggcgtcttcgggtttgtaagtatatttctctattacatttgagaaattgcatgagaattttgagtatttttgtgaaaatagtgattattctgaaattattggttgatagagggatttttgggtttatattgtgattttggactgtgcatcaatttgtctggattgttctggtgtagtttttaatttttgggaagtagcaatttaaggggaggtgctgcccaatttttcttagaattatttgaaaaaaaaaaaggaaaaaagaaaacagaaaaaaaaagtgaaaattaagtgaaaaaaaaatttctaagattatggggcccaaaagaactaggcacatagaggaaggtggttcatcatcaaacccaccatctacgggtttcgaccgaacccggtttgcaagtgaggcggcacaaaactgcttcatgaggcttaaggttaggccttacattgatgataggggtattgaattccctaagaaccccttgaggcatcaacctaggttcgaagcaattcgagcccaaattgggaggatgaaatggggtagttttgtggatgctcagggccgggccaacgtaactatggcatgtgaatttctcgccaattggccctagtgcaggaatggggaggtaaacgtgcggggtaagaaagttccgcacactaccgatgcatttaatgttatgttctctgtcccggattactcaagggaggaacaacggctctgaattattgaggaggaagagcagtttgatttggtggatgtagcggaaactgtgggatttccgcggttgagattccacgacaatgatgggcaagacgggtcgcccaatatcctgcatagatgtgaaataaacccggtcgcgaagacgtggctgtacttcgtgagttctcggttggtgccgagtaaacattttttagatgtccaaatggatcacctcaaatatgtgtacgccatcatgaaggagtacaacattaacattggacaagtcatccgaagcaggatcgagcgaattgttcaaggagccacgggtggtggtcttggtttggctggtgtgatcactgaactccgcagggcgtacgatgtgccacaactagagtatgacaacactgtggtgccgctacgaaagatggacatcacatttgtcaacaggctaaaagagccacatccttatggacagcccccatctgatgcactgcaaggccgaaggcggaaacgagagcctagtgttgaagaagaggaggaagagccccgacaactgcttgggcccatgatgcaatatactcatgcacagctgaattatataattcagtagaacaaccacatgtagaactatatggtgcagcggagtattcatgatgagggacaagttcaccaactcaactctctcatcaacagaatgaatatcgggattgatgacccgaactacttggcaccacctcctcagttttatccgtatgatcagccgccgccacccaaccctttttgaaagggtctcaggtaagtctcttctctttgcattttattgtatacattggggacaatgtaatatttagtttggggggagagatttaaaattttacttttctgcattttaattttctgctttaattttttttttatgttttagttaggaatggcaataagctagaagatagttgtatgctgctgcttagtgtaatgtactctgaaattgtaaaaataattgtgtgcttaattctgttaactctttggattagtttggatgcttagaaacttgtgtttgaatgcgattggttacctgtgaaaattgttataattgttttactgtggtttgtggtaagattgataggatagcttagaacttgcaatgtttattcttttgaggcgaaatccttgacaatgttcaataggaatataggcatttgttggatagtttgagcctttcaagcctacacttaaattttttatccctagttgaccctcttgagcctaagcctgttttgtttctcatctattgaaccgaaaaatatatatccacactcctaattttatcttcaccattttatcaatgatatcataagctatacaattagtttgggggagcgaagatacttagtgtgagagaaaaagagatagagggaagaacttgcaagattgagaaaaaaagaaaaagaaaaaaaaatgtgtaacttaatgtcactgaaagaagaaaaaaaaaaaagaaattccacaaaacacaatagaaagtgagttgtgtttgaaaataaatcattcaaagaaaaaaaaaagttatgtcagtgacgttaggaaaaaaaaaatatatatatatatacatcttttctcaatcttggtgaatgtgggaacactatggggttatttgaaaaagcaagaagctcgtgggttctgtttgtgtgcttatgatatcttgagccaaaactgtttttttttcgatttctgaatatctaagccatatgttctaaacctcgaaaagcctatttattcctaaaggatgttgtcaacattagtggagagagttaagtatgcaagcttatgagctatcaggctgtggaacaattggagagagtaaaacttttatgactgttaacttcgcttttagcaaacgacaatgagtcttttttataagcgataaacgatatgtcgtaataagaatatgtaaataaagcaataataagaagacaca

SEQ ID NO: 168175 - DNA, 2635 bp, Cannabis sativa
atgtttatgaatgtctattagataacatatcagtgatagtggtattagtgtatatatagttgcactgaatatcgacatatatatgtttgacatagtacagattgatgctatcacatcggtatgactagagtaccgagtataagatgatattatggtcaatagtattatcatatgaacattctagactaagtacacgtgggatgcgagataagattgtaattgggtgtatgggtgcctagttatactccgatttatatttatgttataattattcttttcttactgactctgtcgactcacatatattgtttatatgtataggtaagggcaatgctaaagctaaacagcagtgaggaagagcggatgaagattgtacatattaggcagttagacctggagtgttcgatctttgggacaacaagctttatttggatagccaataggctacatcttttgtaactaaatattttctaaagtagttgtaacttttaaaaaataggatctcaaattaaaatgccatcctatattatgtaaagtatttatatattcaagcttaatgtttaattaagaagttttaatttaatcatgttttccataaaccatttgattagcaaaggagtgcatagtattaagaaattacaataacacacctaatctagtagggtgttacagttaacccagaaactttccttggtgacatggacatcaatgtttgacacgtgaaaagaaggatgatgtcacgaagttgagtagacctgagtcatagtagctggcctaggaggggaccttagcccttcgcccaagttgacttcgggagctctgattggaagttcagacttgaataacttgaacctaactcacaatctttcaatattctataccgtgaagacatggaccaatcaaacccaagccccaaaaactgaaatcacatgaacctacaacctggaagccaacctgtgcacctagggtttcacctagcacccaaattgatattcctaactagggtttcaatttttgagaccgtcttagagaaaatgggtcaaaatttgcattgggacatctactagacataccaaggacatatttaaggcatcgaaatcaaatttagagcaagttcatttttgagcactcggagcacctagtgtccaagttgacaatttgtcaatctaggcaccttccaagtatcaaatcgacgatatgacttttgtaccttcttcgtcttcatcaaaaatggggaaattagtaattttggggaagaaacaacacatcaaggtgccaaaggcaatcgattttgatgatgtttttcgagaactctttcgagtatcttcttcgttttagaagagattaagattcaactatttttgaggactaaacagaatttcagaagggtcataattgggacccaacacccaagttgacatattgttaacctaggctgtttccaatcaagttctcaaaaaagtgttctatgtattttttctgccataaaaaatattgaagattcaagcaaacttgggaagaaaaccacaaacccgagcccctggaaggagggcccagcgctcagattgacttggtgttgggcccagcgcccaggttgacaatcaacttggtgcactcctttcaatttctcaaatgcaaaatttgattcgactaatgaattcagaatggtcgaaaacggggtagaggaccttgtcgtcaagtttaagaaccttggaagtatcaaaataagatcccaaaagctcgagaatgagtacctagtgcccaggttgacaaatggcttggtgtgatgtgctctgcttatctgattctaattctatttcgactgtctgtctaatttttcacaatcactaagatccatgaagttagtcaaaatcacaactttccatttctcatttcaaacatgggaaattcactcagaaatgaagagttttgagtctctcatttccgcataatagcaacatctttgagaagtagtgaccaactttgccaaaacacaaaaacagactaagtggtgttaaaatatcacttaggcatcttaaagtacatcccttggatgtttttacacttacacagtgtccaggttgatgtcatatgtcaacctgggcgctgggatgtcaacttgagtgagatgttaacctgggccctaggtcatgaattgccttcagtaaaacagtcataacttactcaatattgatccaattaatgcaattcaacttgcattttgaagctaattcaatgctctattaagttatgtctcatacttcaatcacaattctgaagctattggcacaaaattatatccccaagggagttgtgaaaataaacttcgggtttcccgcaataggtcccgccgggcttcaaaaaatgactatcaccatcagaatctaattttcaccattggatcatcatctacggtcaaaaatatctaacttgtattttccccctatttttgtgggcctcctcacctataaaaggagagctcccttagctcatttttcatatttaaaaaactacccacaaggttatagcttctctctctaatttctctcttaagaaatttgagcttctgacgcttaatatttttctgtaataccatcttgtgagaaataagaactcgaagtagatgtagctccat

SEQ ID NO: 168176 - DNA, 1006 bp, Cannabis sativa
tatcaatctcaatagttcgaaagggaattatttaatgccttgaaaagttcgggtgacatgattagtacatgacaatattctggggtaaatgaaaattctaattagcctaatctttttaatattttgtaaaaattaattttcaaaaatgtatttcaaacaaaacgtttggatgatacatactttttttttttattctaacaatatttaaaagaacgtttaacttttattgggttccatgttaaaagaattttgtctcaaaatttcttacccaaataatacttttggaaagccactactagaaaagagagattttctgttggttaaaatattgaatttttttgaggaccaatagtattaaaattgagtgactgtccaaaaccgtaaaaaaaaattactaatagaattgactgtaaattgatgctaaccattagcatcagttataaattgatgcttaaaaaaaatataagagacacatactactttggtcacagacatcactaaacatctttttcaataatggtatcactacatattctttgtagaattttggggtgactttgaggtgaattttgtgtgggaatgtgtaaagaaggtcacaggagatttctactatcaacaaatgaataagctgttgtgtacagacgtccaacaattctaaaaaggagaattgatgagttgtagaagaatataagtgagtacgagaaattgcatgagtcttcttcatcaaaggaatccatgaaagaaggagtggaagaggcaatcaatacccagtggaagttcgcaagccaaattcaatttttaatataataaacttaattttataagctatctataggcatgcatatgcatgcatgaataattcactacaagaaatgagacttttgccagtgtatttttgcgttgacaaaagttagaaattgtactggtaaaacaacatttactttgcgagtacatttttgtgctggcaaagagaattggaaaatccatgttggtattgaaacttttg

SEQ ID NO: 168177 - DNA, 1117 bp, Cannabis sativa
tccccatctctagcattcttccaaattaggcagtctttttcaggatgtggtagtctagggatcatagctattctatcccccagctgccttccaaatagattgtgcagcttctgtttatcccaagtattcccaggaagggaaagatcagctacatttctcaaacttggatttcggggcaacaccgaactcattaggctggtaaactcctgataatctagccaagggatccaaggttgattccaaatctcaatgtctttaccatctcctacaagcgccatactacccatccgcacaatacctctggcatgtaaaatccctctccacattggggaatcattgcttgctgtttcaacagaccagaaggatttcttcttacagtattttgccattaagcaccttacccaaggtttgtcttgactgttagcaacctgccaagcaagcttagagagaagggccttgttgacatcctcaaatcttctaaatcccaagcccccggatctcttgggtctgcatagtttatcccagcttagggtagcattgaatctttccttctccgtccccccggtccaccagaatttccgagcaattgcatccatctcacaacaagtactcaaagggacttttgaagtcgacattgagtacaagggcaggttcatcaccacagattggatcaaagttgctctaccagcgtaagacaagagttttgatttccgtccctcaagccgagacaacatcctttccttgagtcgattgtaatcctcatttttccttcgcttgaaaacaaaggggtttccaagatgttgctccttaccggaacattcattgacctccatcaaacgaagcaattccatctttaaggattggttgatatttgatgaaaggagaagatttgacttcggtttgctacacctttgtcccgaccatttctcataagtttcaatactccgacagatagctctggcattatcagtatttgcccaagcaaatatgattgtatcatcagcaaacatgagatggttaatgggaggagcattacgggcgatagagatcccctttaggttgccccattcttgttcctttaggagaatttttgataggactgttgggttttatgccc

SEQ ID NO: 168178 - DNA, 534 bp, Cannabis sativa
tctagtagctcaattcccttcacatataattaataaaaattaattaattaatggccacaccaagaaaaataaaataaaaagtatgtgatttccacaatgatcatagtattattaacactctctaatatatttaaaataatgtgattccattgaaatatttgagaaatatcctatcaaattttcatcttcacattcacatgcataataaatcttactatatatatataaattctttttagtaaaattcagacctataataaataaaccagttaataagttgaccatttttgtgaacaataaattagaatagaagcaaagtaagaagatatcttcatttgatatctcattcattctaacttgagaaatatctatcaaattaagcatgtttgataggcaaacatataaatatatatatatataaacactaagtatatagtaaaaaatataataaataaaataaaaagctaattagtaatttttccccccgaactttgacacgtactaaatcatgccccctgaactttttttgccgtt

SEQ ID NO: 168179 - DNA, 605 bp, Cannabis sativa
gttctcgtcattaaacttgatccaaagtgtgtaatatatgattgatgagatgggtttttgtgtaaattgagaaatggacaggtggcaattgtcaaactaccctttggcatgttatgttaacctctagtctagtgattatgttggtctataatttgactgttgaattttctacacatcaataattgttaattttcgttctagacactaattaatgccaaaagtttcaaacttaaaaggtaaattaggataattatgcgttttacattattaatttaattaagtttgaattatgattaactatggttggctatggctagtgtagtgttttatgataattttgtaagatgtatactatttgacatatttagcattatctagaaatggagttattgagattgattagcaatactatctaaaagttattacattaaattatatgaaattttatatttagttatattaatagcaatattacacattggaagatgctagaaacttttttttatcatttctcttgtgtaaataattaaaatgaataattacataagacactattttttgtaaaatatttacatttttacattcaaagaatatttttttttaca

SEQ ID NO: 168180 - DNA, 1142 bp, Cannabis sativa
  modified_base (1028)..(1030): a, c, t, g, unknown or other
atttagggcataaaacccaacattttgccgcagcaaaaactgggtatgaaaaaagacttttgccattgatttggaaaagttcgcctgctgcaacattttttagcaaaaatctagcaaaagtggtacaagttcaacgagcagtcaggaaggtttttgctgaatttttgtgaaaaaattactacagcaggcgtgtttgagtttcctttgcaagttgtagtaatttttgtaaaagaaaaaggcaaatgcttaattagtttttccccaaaataaattaaatgaaaaaaaattgaaatgcccaaaattcctaaccctattttcccctcattttttttctttttcacccatcttcttccccatctcagaatcgtccatagccgcccaagatcaccaccttgcttgaacacccatcttctccctctcggtcactccctttcttgcttagccacgcacaaatctccctcaaactctcgcaatatcaccatcttcacctttcctcctccacgccagaccccaaaagccctaccacgttttttccattctgcccaaaacccgaccaccacccaccgtcctccactcgcatgaacgtaacaccccgcccaaccctctccatttgacccaatctaaatgtcaaagcctatcacgacctctaatttccccttgaacccatcttctttcaccatctctcagtcgaacaccattcaagctccattccactgtgtgcagcatccttcatggcccgttctcacctttccaaaagttcacaatactgatttgtattttcaagttagaatgatatattttgtcaggtgctctgtgcattgtgagagttggttagtttttagccttggtgactattagggatcccttttgttgcttgggaaggaaatttctatgagtatttgttatggtagttgctacatcaagatccaacaagcatcttgttggttgtaatttgagtttgatgaggctattttgaaaaagtatctcaagcctgattcagcctaatattgactaagcatttctcaacnnnactctccaatttactttcatttaattatttttctttatatttatttttatgtattgggttggtggttgtaactattgttcttgttggtgttattactctttgtttttttttt

SEQ ID NO: 168181 - DNA, 1821 bp, Cannabis sativa
gcttatcatatgattaacccaagagctgatggattgggtgtgtcttcatgtatattgagtagcctagaagatgttggtgtgtcacctgaagaggtattatcatcatcatcgatgtttgtcttaccattcatcgatgttagaggtatcatcatcttcatcatgtgtgcattgggtatatgtttttgctttgaaacttcaattaaaaataaataaagaagttttttgggtttcctactccagacaaagtactgttgatgactatatcattgacccatgattagagtttgttaatgcaaatgatgattggtctctaaagtttggtcggtccttgttatgttttgtgaaaaccagcagattgttcctttatattagaagctctgaaccacaatacaagagggggtaatcaatgattaatggtatccattagaaatatgttgtgttgacttattgtctcatagaaatcctacttggagattcggaggtgggttttttgttgaagataaattaaggtgtagatatagggtcttttggtggaggggagcaattgcaaggacagggagaatgtgatgagaaaatctttgtttatattcggcttagacctttgaatcagaaggagcctacaagaaattatgtgtcagattgggagtgtatcaatgatacaaccatcatttacaggaataagctttcagtttctgagcgctccatgtacccaactgcctatacaattggtaagggtgctttcattacgacattacctttctgtgaatttagttctgttttgtcaatcaaatctgtctttctctatctttttctcaattggtcaaatgaaagtacaccacattgctggttagattggatataaactcaattataggatgtttttagtttgacaatttttcaacaatgggaatttctgatcggacttttcttctttttggtaatagacagagtatttagctttgattcttccacaaggcaggtgtatcaagaagggagccaaggatgttgctcttttagttgtcggttgtataaatggtgactacaggacaagcgcaatgccttgttccttttgatttttttccctttgctattgtgtcatgaacttttcttgaacataggttgtttgtccaaaaaattatggagaaattatcagccaaaaaatggagaattcagttgtatgtagatccaaaacgaatgatgagtccaaagtacaatcaatccgccattcaagcagctaaaccaatggaagattaggaagaagtttcactattgtctttttaatttttctaatagtattccatatattaatactttttttaataattttttattctattttaagatagcatattttctttaattttattcacataatgtttgctttaaattttgcataacctatatcttgttgttttaaattttctataagtaagtaataaatattattttgttatgacttatatatacccaattatattttactaactaaatataaaagaataaatattactttaataaaataaatcattcacaaaatcctttacttacagaaatctaaataaaaataaagaactaaattatttacgtgcctcggcacgtaacttttaactagtatatatatatatacatgcatagatgtgaacaaaaaagtaccaagcctgacttgaattgaatagaggaggcaggtgcactgcttttctcctgacgccgatgatcaaacaagaatgaagaaagagagagagagagagagagagaaatatggtgtgaggttgcttgatttttatggtatcagaaaccaaaaaaaatgaaagcacttttaaa

SEQ ID NO: 168182 - DNA, 689 bp, Cannabis sativa
atttgaaagcatgtttcttgtgatcatatatatactagccactaggtttattgtgtgtacacctattctttcgtatagttatctttatttatagatattaattaatgggttaagaatatccttgatgattaaaaatatataacccaaaattttaatatgattgtaattgtatatatagaattggtcaaagtaaaatagttggtgtgttcaacttcaattaaccacacaaaatgcttggacttggaagaaagaacgccataggaggaggcgacctcaatgccaataatttgaccatcactttcaaatacacaagctttgcactcaagtctccatcaacctaatttgaatctcacataataataatttttttttgataaatcatgtaattttaataataacaatcaactaataacaatcaactaattttaataataagtcaatattttattttataactattatttatgtattaatattcttaaattaattttttaaattattaattagtgtaattttaatttattaggctattttgaagactaatcatacatttggagttattaaacaagattttaacacattttagtgaaaaatagtaaaagctggcgagctcaattttacaaggtagaatttaattataaattttgacaacctaagaagtagaattggacttggagctaaacataaaa

SEQ ID NO: 168183 - DNA, 903 bp, Cannabis sativa
gagagagagagagagagtttctatggctttttccttctttttattttctttaattatttcccaaagaaaatggtgattaatctacttctaattcagctagtgactagctgtcactctaagggcatgccacaaatttaattaatgcaaattcccaaaaagcccttgacttcataactaagcactaataagcctaggggtaaaatggtccaaactataactccgcttaaacccgacattctaaatatttctaatatttgtcccgctaaaaaatagattctaaacttacccttgtaactctaacgaccatccatcacaaattttccgtcgtcgccgagcaaaaatcataaaaattgcataattcatatttaatataataatactcctagagtttaataaaatcttcgaaattaaaaaattataactgtaatgcctatttctaaaaataggacccacaataatataaaatcatatacaattataaaatatcaataatttatgataattgcctttactaatccatattctaacatgcggtcattacaactgatgattagctttgctagaacatagaaatagactaagtgatctcaaaatattacttatgcatcttaaagtacatcccttggacgtttttttacttacccagcgtctaggttgacgtcatatgtcaacctgggcgctgggtgatgaactaccttcaataaaacaaccataactcactcaatattgatctaattgatgcgattgaacatgtgtttttaagctaatccaatgctctatcaagtcataaatttgaagcaatcgacctcaaatttcaccccaagtgagttacgaaaataagctccaggttacccacagcgagactccgaaaaatgactatcaccatcaaaagttaattttcac

SEQ ID NO: 168184 - DNA, 1173 bp, Cannabis sativa
agggcataaaacccaacacacagatcaccagccgcctccatcatcaccatttccttccattctcgtgtgcaagcagtcaaggaggctaacggatcacttaaacccctctggtttgtcaagaataacctgctagtatttttttttcttcatttggactttgttttgggtgccgagtggtaaattggtggtgtgtgggtgtgtcaagttggataatattgctaattggagttgttgaattggttttggaagtattagtgaaaattttatcatggctgctgagtagtgaatttaattgtggaaatgatttaatttgattacatggataatctgaaatgagtggtgtgactttgaaattcttggtgtgatattggaagtttggtgtgattagaagtgttggtttggtgtgtggatagattttaatatatatattgtgggaatgtgcaatccgagtagttgggttaagtgtaggtgacttttgaagttggtgaagtgtgatgaaataattggagtagttttaaaattattgttgtgatcttagatagattggagtggtggttaaaaaaaattagtggtgtggtgttggacaaattttaaaaagagaaaagaagaggggaatttctttgtggttttgtagtcttcaaccgaagaaaaatgcctaacattcaagagggtgacgccacgcatttgttgtggctgccaagttcccacagattcctcaacaggttctcgacccgtgggaagcgccgtcagtatcgaatccagatgagccccacgaggactccgggtaaagggagtttcctaatacctaaactattttatatttttctgttatgtgtcgtttttagtttgtattgtgctaattgtgtgttgtcttttgtgttttaaaacttttatgtcatgtcatttatgtggttgttagtttgacattgagagatttatgagtttttatgtggcctagtgttctgctcgatgatgatatgttccgctaattccatttatgtgctgcctacttatatatgttgcatttgcatgttaaaattgttggatatcatggaagcttctcctcagtctctcctcaatggttaatacttttattttcccaccacactttgcatttttcatacgattgcttcatatgtaattttagcatctaaaattggttagtgcatctcc

SEQ ID NO: 168185 - DNA, 1002 bp, Cannabis sativa
ccaaacccaccatcatcgaccaccacaacccaaaaatgaataaatcacttgtaaaaatgaaaaccatcagtatttcttccaccacaacacagaaaaagaaaaataaaaataagaagaactcatatatgagtgtctaaaggaaaaaaaaaatgaaaaaatattctaaaaaacccacatctagctgcataaccagcaacatttcctccaccgacaataaaaaacctgaaacaaaattcaaaattaaacacacaaaagaaaaatcaccaattcataaactcaaaaaacaaaagataaataaaaacgtcactcccgattctcgttctcgaaattagaagatcttgaaatgaaaaggaacaacttgatgaatttataaaaatatcagttttcgaaccgatgcaaagtagtgccactttataaacgacgcataattttaaagtaattttttgtgttgattttgggcgttgacttacgtgttaactgacacaaaaacccatttttgtagaagtgtaattaagtcatacaaaccatccattgaagtttaattacaaaattagatttcaaaagaaagtttaatatcccaaataagactaaaataataacgaaattctttctcaacggtaccattctcgtgagaaaaaataaagcccagtaggaaatatttagtaacgcactctgaggtatttaaatttggtgctctgatactatttttttgtcgcgactcgagctctgagttttggaagatatgtaatatccataacttgagtggttaaatgtcacactttgacctttttaggaaaataacatttacaaattatcctttaatttattttacaaaatacatatttaaaattaatgaaataactcatgtaattatacataaaatattattaaccaaatcaggaccactcatcaatataaaagaacaataatatcctcatagttatgtaatcacaaaaaagatagatttaataagtcaataaataccaaactaatatctagcat

SEQ ID NO: 168186 - DNA, 1263 bp, Cannabis sativa
taaaataatttccaacactattatgtaaaaaccataataacagtaacattataggttcagtctttcttgagctctcaatgaaagtacccaaatttgaccgagatttttagaaactaaatatttgagaactaaagaaataataaaatgtaaaaattaatgtgatggagatttttatgtggttcgggtgttaattaaccctagtctatgagtcagtctattagtctctaaggacgtatttgatgtgtttacaatattttacaggaaatcctaactctacgtgttctcagtttctctcttgaagaagaagacttaagataatattggcagaacttcagctatttaggttgtgatcccccctttgtatggaaatagaagggtatttataggctaagggcgggtatggacatggccatgacccgcctagggtttttgctgaaagcccactgatggggtaaattacatgaaaaagagagctgaatattgggtctcttggaaacaattgtgcttgtgcgtgcagcagctgaacaactagggaccattgtatgtcgtggacacgtctcgctcaaaggtttaacctttaacagtagagggcacgtgtcaccaaaagatttcacctttaaaaatagaggtctgatataaccatctggaaaaaagtggatgaggtgcatgcactaccatgcctgggcataggggacaagatctgatcttgtgttagaaaaattatacccgtcgctaggcaatccaggttacacaaaaggtagacatctgcgacactcttgagcggtcagttcccggcgacaggtccttcgagtacccatctagatatcaattggacaggcttccacatttggaccactccgagtttgggagagaccatatgtcgtttgtgtccggtaagctgagataaggaaaaatggactttcgtgtatcactcactcttgacttgtttccggttccttgaggataagattgtagtgagagattttaattagtgagattatgaggttaatccattctgtttatataccacatttcacatgttcagaaacacagataacaatatatatatataatttttagtacctcgcaaaatatattattattttttcaagaaattttttgtcaagctaaaaaattcgatcaaacatatattagtataagtgatattatttttctttctaaagtttacatatttaattttatttttggttttctaacttagctaataatatttatgtgggatatttattttaccaggatctt

SEQ ID NO: 168187 - DNA, 1091 bp, Cannabis sativa
ttgtcatgtaatataacaagctacagtttttatatataaattattttatatatttttttgttattttgaaagctaattagttatcgtataatataatataaacaaaattataaaatgaatgttaagtaagatgtatacagggaaagaagattccttagtacatatgaaatactttgagatccaaatagatctccaaaaagtatatgtagatgtgcgatgccaaatctttccagcaactctgactgaaatagcagaacactggtatttcaagcaggcccaaagaagatttaaatcttgggaagaattctcccgagagttctatatctagttctcttcttcaagacaaataccttcacgattggaagatcttttagggataaagaaaagacaagacgaacctttgaaagaccatattcaaaggttcttggctgaggctgatagatggccatacttggacgcatcttactgagtgaattctagaaagatatcaacgagcaatatgaaggagttcgttgagcgagttgatgacttcataaagttagaagaagctatccaacaagcctagacaagggggtgggtccatgtcgaacaaacttagggcctcatagtgccccaagcaccgttcgacgtgtcaaccaacacagacgatctctgccaattgtcaaccaataagaatatgggaggcaagcgcaacaacaatggctctgaccaaaataattacaaaaaaagggaaattcaatgattcccttatgccatgaagtctaagggagaaggagggaaagaatgcatgcttcactcttttatcaaaactctcaatgcaatactttccaactagctatggggacaggtgtcaccaaaacctgaagcaccttaccgaccactcaagtggaccgtcgaggctcaaccaatataaggctacctataaacctagcatttccataaaaggaaaagctctcaccagcttcatggataaacataaaattatatctcctcaaagctctaaaggtttgggagaaaagtaagaaccaaagaagtagcgagagcaagagcaagacaactcaacctagaacgtgcattgaccacttgcccga

SEQ ID NO: 168188 - DNA, 1157 bp, Cannabis sativa
attcttatactctgttgaatcgccccacaagaaagttctacggatatgatcaaccttattgagcactttctttggtaaatttattatagcattcactaacactattcgaccagcataagataagttcttttgagctccaaatgcgaaaacaatgcaccattttctcaatcagcaatgtaattgtaccaatagtttgttaagttttttatttctttcttctctgaatttataacaatttggattttttttttttctattatgaggcatttgtaaaagattctacccatgaagttattggtggagtgtacaaatgtggtctcctattttcatggccaaagtgtggaaatattttaatattggagtggctattcattgatgccataaagcttttcagatttatttagtttgtttttttaactagttttttttcttctggtttgtctggttttgactgttggagagattttttctcttgtctccattttggccaaaggccttttacaatgcaccattaaaaagagtttattgatgcacttcttatttgttacggtatttgagaaaattttttaatccacttttttttatagtcttttacgttttagttatttaagacattatataaaattttgagaaattcaaaaaaaattaacacgccgaaagtagtgtttaaataattttgttacatgcaagactcttttatttatacacgtgtggaatagattattagaatcctattttcagtgtcttattttttttttttaatttctcaaatttttaaataactataaaaataaaataaaaaattcttttagatgtcaaaataaataaagggtgtgtcagtaaaactcttttcgaggtgcattataaaaatttacattaacatatataaaacaatattcggtaatatagagcttacataaacaaaatgccatactgtgattttagaaagatgaatttaaaatttttttttgtatgttttatttataattttacagtttaaaatttttatttataaaaatattcttgtaaaattttaaaattataaaaatataattttctcaataaaaaataaaaaatatcgaaaaattaatctcatgacaattataaaataattaaaaataattaaaaaataacatcataacaactataaataaact

SEQ ID NO: 168189 - DNA, 1146 bp, Cannabis sativa
agaattaaaaagagaacaaataaatagaaaattactgtgtatacgttttattttttaaattttccttttaactttaattattttatttttttccatttttatactttctcttttatagttttatatttatttatgagttcatttttaagatattatcttttttgctcattttttgtagttctttcttttacttccttcctgttattttcggccatggaaactgaaacttggctttttccaaaatcaaaattgaacttacaatacatgtcacaactctacaccatgatcaaaaccatattgcaatctcatctcctttcttcttcatcatataaattatttcatcctttgtggttgtttgagatcgtccaccacgtgaagcttccctatttaatttctaaattaagttgtagtcgatcgtaacctaaatcgcaaccctaaatcaccatcaaaccatatgacaatctcaatcatgtctcgccacttgaatcgcgataccaccatgtgaagcttctactaatctctataacgaaattgaagtcgcaatagcaacttaaatcactatcaaactatattgcaatctctcagctatgcccagtcacaatctaaaatgcaaccctcaattaccatcaaaccatattgcaatttcagctatactggagtttcagtgcaaatcacaacgtttcttcttcttcctctaatcactctttgattgatcaccgtaattttgtaaaaaaagagtcttatatacagtataattgatttagttaagtatatcttacttgaaaaaagccctaagtagagacatttgaagcgattttagaattatttaatttaattaattgatatattttttgaattgaataaaaaattaagaaaataagagaactaaggagagaataaataggcacatttgaataaattttaaaatatcacgtcaccatttcgtgtctcagctttatatatagaatcaatttatatattttttaatttaaataaaaaattaagaagatgagaaaatcaataagagaataaataaagataatttaagcaattttagaatactacatgaccacctcatgtcttatctttatatatatatatataaatatatactaggtgaatgtacgtgccgagccacgtattgct

SEQ ID NO: 168190 - DNA, 546 bp, Cannabis sativa
tctctctctctctctcaattcttttcctttttttttcaattgtaatagagctaatgacgacggaggcatggtgttcaagcccgaactatcaagcatcattctcttctctctttaatttttatttttcattttttgatattatttttgattgtaaactgttttggatctaacatgtgtatttggtttttttttttgattcaattttagatgagaatacatgtattttggattgggatggtaatatagattagatattttgatttgaatattatggatttcttatttaagattcagctcggatggagtggttcatgtcggaccagatttgatttttttttttgttagtttcagttctaatcgacgcctatagtctcccccttttgccgtcggttgaaaataattgctcatagccgactgtttatagccaacgtctattccatctagttttgtgtcgatggcaaaggtgtgggtcataagaacagatggcaaaaggttacccgactatttaaaactgtaaaaaaaaactactttttatagtagtgtatc

SEQ ID NO: 168191 - DNA, 1416 bp, Cannabis sativa
  modified_base (123)..(125): a, c, t, g, unknown or other
aacttctttggccccttcttcgaatattttgctctggtagttgcaggggtttacatggtatggatgtgatgaaggtcgaggatttcttggtcaaatccaaagaaaccgtgagtgtgaaggtcnnngagaacttcactcatctgaaacagaaaatcctgcagttagtccccatatcaaaccctgtgatcaaaaaggggaatgggagtcccctaaccgctggaaagaggccccgtccggatgcctaccgaaaaagggaatctagagaatctctaaggcaagcatcgggtgcaaaacatcctagcaaaaaagaaaaagggtatggaagtcgcttcgaacacccaaaagcaagcgaacaagaaactgccattttcaactctcaaaaaaagaaagacggcagtgcacgtacaaagaaatcaatgaaaaacataaaataatataaaagaaaatacaacaaacaacagtggtcgtcagacgccccactttgaggggcatcgcaatgacatccaccatagcaaccgtgcccggaaaccaagcacaatcaagtgaaaataccgtcatttatatttgccctaacaagcaaaggaaaaaatagagagcatttgaaaaaaacttacacaaaggcagtaaggaagaggttgacgaccctcagtggtaatatttcgtctgatagcggcagaggaagaacagaagaaaattagaggtgtctggaattttgtcaaatgggttggatagactaacaattgcaaggtggtgaaagtgacccaatagagaaaagccctggcttttatagaccattaggggtgtaagacaacattgatcaggcaccatcgtacagtgaagatttgtaacgattcaaattctatgatccaactgatgggatgaacggttgtaaaaagaagaaagggtggttgaaacatttgagtacctctctaacaccaccattaatggaagagtctatcaatggacggaaagcaaatcgttacctgcaaaaagaaataaaaatcaatgatgacgatcataaatgttgcccacgcgcctggggcacgtgccactttatttattaagaccggagatggctcacaagtctcatttacctactactaaataagacttgggggaaatgttgccttgattttttcccaaaatacgtggccgctgctatgtatgacacgtggacaaagaagacacctcacccaaagattagttaaaagtcgtataaaagagacaataagtatggttcagggagttagctctcggataagtgcaaaaggtatgccttcttctccaggagttaagatagagtaaagcacctttgggacgagagggacctattcgaacagtcaccttgcatttaatgcagcatggggaaatcgtctgggaacgcccataagaggacatgtcagacatcgtaagcct

SEQ ID NO: 168192 - DNA, 1234 bp, Cannabis sativa
ttacgaagcagagtatgaagcaatcattgctaaactaaaacttactcgggaagttcgtgctgaatatccagagatctatagtgacttacacttggtggtaaatgatgtcttgggggaatacagagctcaaagagaaacaatggtggcatatcacagtaagatccatgacctgctcgcacagtttagaaggtacaccctcaaacaaattccaagagaaaaaaatgcaacaattgatgcactagcatggttggcgagcaacatagttatagacaaagcaacttggttccaatctagtttctaaaagaacccaacatcacatgcacggaggaaattgagatgatagacaacacaccaaactagatgactcccataacagtctatcttaacactagagaacttttaagcaatagaaatgaagctcaaaagatgatgagaaaggttgcacggtacataatactgaaatgtgtaatgtatagaagaagtttctccatgcccttgttaaggtgtgtaacaaatgaagaagttgcacaactcttgtctaaagttcatgaaggctttcgtggtaatcatgttggggcaaagtttatctaagaaaatattaaggcaaggttacttctagccaacaatgattgaagattcaaaggcccatgtgaaaaaacgtaacaaatgccaaagatttttccaaaatcccccgagcacctcccaacgagttgatgtggatgcaaagttcatggccctttaccatatgggaaacagacttgatcggacaatttcccaaaggagaaggtaaagtacaatatgtagttgtaggagtagattacttcactaaatggacagaagccgaaccgttggtaacaataacatccaagaaagttttggatattgtggtgaaaacatcatatttcggtacagacttccacaaaaaattgtttgagacaatggaaaataatttgagagctagatgttcacagacttctgcgcgacacatggaattatccaaagcttctcggtagttgcacacctccaaacaaatcgacaggttgaagtagtcaacaagatattaaaagacaccatgaaaaaattgctcaaagaagccaaagggaactggccgaaggaactactaaagctactttatttgtacagaacaactgaaagaatggcaaccaggcaaacaccttttgccatggcctatggctatgaggtaatgtttcccgttgagttagaacctccatcc

SEQ ID NO: 168193 - DNA, 1615 bp, Cannabis sativa
ggcaagaaccattggagtgtcacactctttagcatcttcaaaattgactttgtgtaagagatctgtagcatatttagattgtgtgagataaatgccagaatgatttctgtaggcttcgaatcccagaaagtaactgacagaaccgagcgatttcaaagcaaatttactgtgaagatctgctatgagtttggagatggcttgaggattagcacccgtgattagcaaatcatcaacataaaccaagactaacaaaagagatccttgctggtttctgtaaaacagagatgagtcagacacagaaactttaaatccccaagttaaaagtgtgcttttaagtgtgtcaaaccaagcccttggtgcttgtttgagaccataaagagatttggtaagttgacaaacataatctggtttggttgtgtcttcatatccttggggctgttgcatatagacaagttcttttaactccccgttgagaaacgcattgttgacatctatttgttggatgtcccaatcatatgtcacagccaaggagaatataattcgtatggtagatgctttaataacaggactgaaagtgttatgaaaatccaaaccaggtgtttgttgaaaacctcttactaccaatcgggctttgaatttgtcaagagagccatccttattatacttcaccctgaaaatccatttatttgatagcacattcatgtcagcagttcgaggaactaatatatatgtttgtttccttgttagagccaaattttcatgatccatagcttgcttccaatgaggtaaactcaatgcctgtttcacagtttttggaacatcataaatctgattttgggaggcagtgacaaggaatatttttggtttatatataccagattttgatctggtttgcatggggtgaccatgtggtaatggtggtggaataggagaaataatgggtgttggcatatgtgtttcctcaagggaaaccaaggcaggatcaagattgggaggagcagatgtaatgttatctgctgatatgtttgtggtagaaggaatgttatgagatgaagagactgctgggataatttgggagggttcagacacagaatttagagaaccaaattgaatgtgagagtgagtatcgagaggagatgtatgtggaatgatgaaagcaggtgctgtgagattgtgatggtaagtggactgaggtctgttggaaaacagatcagaataaggaaattcatgctcattaaagttgacacttcgagcaatataaattcgtcccgaagggtgaagacacctatagcctttatgaaaaggactatacccaagaaagacacatttagatgtcttaaattgaaatttatgttgattgtagggcctaagaaagggaaaacacgcacacccgaatgtctttagaaatgtgtaatcgggtttaaggccaaacaaactttgaaatggagaaatgaacttattaactacagtaggcaacctatttatgagatacactgcagaaacacaagaatcccaccaaaaactcaatggcattttggcttgagctaacaaagttaaagccatttcagttacatgcctatgttttctttcaactcttccttgttgttgatgagta

SEQ ID NO: 168194 - DNA, 733 bp, Cannabis sativa
ttcacgaggtgaagattgtcagtacaagcgggggccattgaggatcgtatgcaaccacatctgtgctgagaatgtcagagaatatggcgttggacaaaaatgtgatctttttttggtagcgtgtgcatttcgcgggtccgaagtaagggacaaactctggcactgtggggctttgtgtttggagggttttgtgtagggtgacgtctagaagccttctgagtgcctcttcaaatacttgtatttggatagccccatgaatccgaatggtgcagatggactcttcgtcttctaagccgaatgacatctcctagattgagactgtctgaccttgttaggttagtgagctggacccacgtccagaatcgtagcatgactttgccaagaggaaattatattgtatacccactttattttacatattttaatttttaccattatttttatattatttaagatattgcccacttttatagatgatacccccaatataacccttagactaatgtaaattatatgttagaattaagttgagagtaagagtacattgggcaatccacccacaaaagtgagtatattttaatgaaatataatataaggatatttttaattaatgaatacacaaaataagtatttctcaacttatccccttcgccaataagtatgtaaatttggaattcaaattaaaagggaaatttacatagtatactagcttttgtcatttttttacaaaaat

SEQ ID NO: 168195 - DNA, 937 bp, Cannabis sativa
aggctctttaggttaccgagctcatgtagaatggtaccttgaatgttgttttttagtccctatatgagaaaacacatacaacgaatattagaaaacaacactaattcgactacttagtaagaagaaaagagaataataagaacatacagatactgtagatgctaaaaaaaaagaacgatgaacttgaccagatccgtgccagatctggttcaaatcacgaacaaaaaaataatgttggtgtttgtatcagtcgatggagctaggaccatatctctttctccagcattggtgttctttgaggttcattcgctaccacggtacagaatccaaaatgctcgatgaagccaagggtgtcttctccgacattggtgatgctatggactgtaatcattgtcatagatcgaaccgagattgactgcgatctacttggattgaagagttggaaaatctcttcatcttccatggttgagaattacagtgaatctctctgtaatttctctaaaaaaaggatttttttactttaagaatattgggatgttcttaattgtagaaataataagggaatttttgagtttgattaacattgaaaactttcattgttctcaatcataggaaaaaaaaacgatttttgaattttagaaaagaattttcagatttaagaatagaattgaaaaattgtaatagttaactttcattgttgtcaatggaaggataaaagttctcaatcgcaagggaaagaaaggattttattaaatttttatttttttcgtatattttagatttaaaaatgacattcaaaattttcacccaacaaagtcaaccaataatttttcatagaatagattatttttgaagaggaattttaaaaaaaaaaaaaaatcacccaataatttctcataaatcaaaaattctgtgtttttttaataaatttttgtta

SEQ ID NO: 168196 - DNA, 746 bp, Cannabis sativa
tattttatccctggcgatgtctctctgaacactaacatcaagcaacagccgagagaatccctaaaagcttacttgagtcgctttagtacagcaacagccaaagtgagaaatctaaatgatagcattcagttgacagctctctaggctggaatatcgactgatttatcaaccttgggaggagaactatgggatgatctgcatggtttccctattagaaacattaatgaatttgatgaaaaagtataaatcttcgcgccgaaggaagaggcgcgatgcgagatgaaaatgctcaaacatggaaacatgaaatacattatgcactgctgacaaagctggaggaaaggctataaggtaagctaccaatccaatcttctcaagaatcataaaaggccatgtaaatctagggcataacttgccctatttcatgaaatgtttaacccctttcattggagatactcgtaggaagacataatctcctacttgaaactctatattcctacattttgaatctgcataactgttctgcctgctctgggaggcaagcattctgactttaattttctctattgcctcattggtctgctaaactgactccggacctaggtatcttctttctccactttcatcccaatgaattggagatctgcatttcttgccatacaataactcgtagggagccatcccattgtactctgatagctattgttgtatggaaactctatcgatgacaaatacttactccagga

SEQ ID NO: 168197 - DNA, 1325 bp, Cannabis sativa
ttttagaaggaacgatacgtactaatccaaaccgctgcttcttctgcattccttcggcggaacaccgattttccggccacctacttcatcggagttttcctccacatcattttccgagcgacctctcttctattcccaagttacaaaatcagtgggattaaagataaaatttaatattaggaaatggtttttctcgtgacgaagctccaataaaccacggagaagtaagtacccactcgaaacctcttcggctaccctactactccatggcagagcttatggatatggcagaactcggcagtgacccagataaccaaccaaatattaatttcaacaatatcaatatgaatgggcagagtgagaggccgaacacgacggacggcgtcgaccatggcagtggagataagcaacccaataatggtaatacaaatggggaattgatatctgttcctaggggcggacctctttacattcccaatttggtgagtccactcaccagtgttcgtcactttcagtcttgtcttctccttgaacttcaggtacatgttttcaccactgtctttgttctgtataatataatgggttcaattaattttaagggtttcttcttcttcttcttttgttaatcctttttctagaatttagaggccgaactcagtttggatgcaacatcagttgaagaagatatttcgtatgtttccattctcattcttgtgtttttatttattttttctttttttaaagagtaagtattgattgaattgctttattggccatttcactgtgcagagtggatgaacttaaaattttcactgatgaagagttagtggatatggcaatgaaggaagcatttaaggttcgttacaaattattttgttcttcctcctaaagctctgaaaaaactatttttatgttttctcagtttcccaattcagagtttggtaacttttatggtggtgaatgatttgtaggaaggtgaagatgtggaaaagccttcaacagtagtagccagggtctccaacaaagagtcagtcacctaataccataatatcttttttatgttcataactcgtgtagacctgcacaagatatacttctttcagttactaactaattgtgaattctgaaattgaaaagatgttacgttagtttgtggatttcaagttctatggatgaaaattaaagtcctgcatttcctgattctggctcatgtgctacagtttcgttatcttatttgttcattatgcaacatgaccagttcggttcaaatttttaatctttattctaccatgttaaattggtaggtttagtctgagtaatttagt

SEQ ID NO: 168198 - DNA, 1312 bp, Cannabis sativa
  modified_base (1274)..(1285): a, c, t, g, unknown or other
ttatatataatactatataatatataatcaatatgatctcgggtgaggtgaggtgaggtgaacaatgccttactagttatactactctagcttgtttgtatgaatgaactaaaaccacttttgatgttggtttggttgggtagctaatgaattttagtttttagttctaaataactcttttaacaaaaaccaacttttagtaactttttcttcacacccaaaaaaaaaaaaaattacgagaagttaaaaacataagctgaagcctagctaaccaaaaaaaattctaaataaatgtggtatgaagagtactgcgataggttctttgtggtgttgtgagtttccttgtccatatcgtagctatgcaattgggttaaaatcaaacacggcacacacacacacacaaaacacaaccctttgatctataggaagacttggactttgttgtgtaatatatatcttttattctattaatcatattaagtcaacatatatatatacacgtacaaatatgctaataataatagtggtaggaccaagtagtactctctattaaatgtcacgttgaataattaattgagagaattggacatccaatactattgataagttttggggaatataagcaactggcctagccaccttaaccctctagtactctacaattatctcaccaattatacactctcggttaacttttacaaaaaaaaatattgtatatttataaatcaatagtaaaatacaaaatagaacaactaaaaataacagtaaaacaacattaaaaacttaacacaacacacagtatttttgaaaaaaaattcatcccacagtataaagtaaaaaaattaaaaaatttgagtatgtagtgtaattattccttataattatgctaaaaaaaaaggtttattagagcatcttcaattaggattgctcatggagttgtttttgtcacatatatattgtggtcatcatttttaatgtaattttatcaatactattatttatatttaacatcagctatattattttatctttctttttttcaaaaaaattattttgtggtattattttataatatttaataaaatttaattatttaaatagttgcatgtgcgattatagtgggtaacttttagagtcgtcaactatttaagtaatttttgtacgtattagaagttatattatgtagatgagaaagaaaataaaaaaaaaatatttatagaaaatgtgtacatttttaacaattatgggctcatttggaacgtcgtattaggtcnnnnnnnnnnnnattatattgaattgtattttatgcaat

SEQ ID NO: 168199 - DNA, 863 bp, Cannabis sativa
tctgctttaaaatctattgtaatgactgaatgtttgaatcaatgaatgatctacttttttattcaaaaaataaattaaaaaattatgtgggatcctatataattacatagtgatatatactctatttttaggtggtgttagaaaaatactaaataacactaataatgcctaacattatttaatatgtcatattttaattggtgtaattaagtattgaattctacatgaccaagaatggaggcaaacttgaacattagcaaggccaaaaagaaaagggggccaaactataaattttgaaagaaataagaaaaatacaaaaagaaaaaataaagttatttttgtttttctaaaattttgaggaagccataattaaccacattttacacaaaggtggctccgttcatcaatgtaataacatttataaaatatcactaaaaattcatttaataaactattaacatcacctactactaattcttcaacaaatatatatgttataaaattttaaacaatcatatattcatgtaagattatttgttaaggcaaaaagtatttgtaatcttctaacaaagttccaaaaacaaaattcattgtgactttattcatactcaagaaatctcttattgtttgatatatgatattgttgttgttgttgttgttacacatgagatgtttagttcaaataataaggaagaattgttgtccattcatttttaatgtgggcaagaaagaagaagatatatgattgagaaagaaagttatattagatagagaaaatggcacatgtcatcctataataaattatagactacaaaaccaactttatttatttatttattattattattattatgtaaataaat

SEQ ID NO: 168200 - DNA, 777 bp, Cannabis sativa
gagctaaattttaatgacaacctaaaaaaattagagaaatgtctcattagtgtctattgtctagtacatttttaagtatcgtattgttagtggtgcaattaagtactggtctcatataattttaattttgttttactaatagtctcatataatttaatataatagtttttaaagaatatcgctaactaattgagggagacatatttaaaagatgttggataccactgatgtccaataacaatgctaaagaaataatttgttggtatgtgaaaggacccagcagttggcaacatttgtttatttgtttatttgtttatttttatttttttaagatatcatttacataatgtttgaaagtttatagtttaataatttatttttttaaaaaaaaaaattatttaattttttagacaaaataccccattttaaaatttttccctaatccctcaaaaacttgagaagccctcaaataatgaaattataagtttattaattagtatataattgtgatgtaacaattatctaagaatggaaagtgaatactctacactgttataccatcaaaatgataataaaaaaatatggtggagctagctagatcaatttgatacaagatgaaaatcatgctgactactatggactcaataatgatgatgatgatattaatgacatcaaagctcaaggatatggaattatatgtatgatcactttctcaacagttatgatctttacatcgatattccatttgcaaagaaagataatggcgaacctagaaat

SEQ ID NO: 168201 - DNA, 657 bp, Cannabis sativa
tctctctcattctaaatccaaatctaaatgtaaatgcaaattttaattatgatttttatttaggactttgttttgtgatgatgatagacataaatgaaaaatggttgtccgccggtggcctgccaataatgattgaatttgaaaatgtccaaaatgagtaagaatgggacccaaattgcatatgccagcgttttgagaagagaaagtgccatgacatcccataattcacgctcattactaacgtacgataaatctctgagattagatcacaaccgttggttaaattaatgttccaacacaaacatagacgtgctgtctcgacagttacttacccgcctcttttttatttgagttttttaatgttgtattattattattatttaacaaattttgattgaacaatattttcaaccaaaaatcatggaaaatagaattaaatttgttttgtcttattctgaataacattattttctgtttttgggttccataaaaagaaaagtaagaacttgggaatttttttttttataaaataaataaaaacttgtatgtttataaaaagaaaaaataataataaaagcttgagaagaaaacgttatagaaaatttaaaaaaaaaaaaaaaagaaaaaaaaaaccttgctagaaaaaatatgtaacat

SEQ ID NO: 168202 - DNA, 2123 bp, Cannabis sativa
ctaggagacattcaaatataataataaccattaaacaaagaggcttaagtacaactacgaccatatatcaattttattgtgtacttgccactttgagaaacaatacacataagaagtgaccgaatattattatgcatgcatggattaatctctttaggtatttccactttaaagctttctgaaacattaaaaactatcaaactttgaggagtcaaaactttgagaaactatgtttaagacaatcatatgagggagatcttaacaaaggagtaacaattactcaatatttctcaaaattttatacatgatactgtagatcatgaaaactttgtggacaaacagattaacatgatcaacatgtgtactatccttagataagataaggttttaattcctctattctttctatttataattcaaagctgatatgaagccatcaatatcttcaaattttgtagcaacaatgatgtgatatagagtacacatgcatcatatatactatcttaaatacatcgtgtttacaagcattcacaaataacttgattatcacataagaatagacaattgggatcatacatctactttaatattaataaaaaacttttccacttatgatttatgccttatcttgatcttcaagcataagaatgtagtaatagaagattcacaagttctaccgaaactattttcaggaacaaaaccaatgtactaatctcttgaactcatcattgtaaaacaaacataagaatatcacttcacatgtccaagaaaaattcctaaaaaattccactcccataaaatttgtcaataaggaatgatcaacacatatatatacctcactaaaactaactgacacccattacaatattcctactgagcatgcggtaacttgacatctttaaattcaaatgtgattttaagagtcataaatctcgaggcctagtctaattttctaatgaaagatcaacatgactaactatattaatgtcacatctcataactaagcgataggtttaaggattgcttaaagctcaaagaaaatattttagcgcagtgccactatgtgaaaccaaggattatgcaatctgctcgtctttttagctttctcaatgatctataaatgaaaataatcatgtcaagctagagtcgttcaaacaaaataaatgactcttacataggtaaggacaactacttcaaatgtcataactaaaattcagttaatccactactgatagggtagaaaaaattgtgtggttaatgacatctaatgcatttctttcaccatctaagcatcctacctaattataaaatcattgataggatgactaaattgtatttatggaacttagtattaattgtgattgatacaagagaaaagtatttacacgaattatgatttttgataattcacatgtgaaaacttatgataggtaagcataacacatttaatgaataatttaatctcgtaattatctaataaggctaattttgcatttataaattctaataaaatcctattaacgaaaaaaatatttaaacattggtaataatttccataataaatgcaataaccataactaatatttattcacattatccatagtatatgttccaaaaaaaatcataatgataataataataatattcacaaaaaattcttgaaatcaccaaaagcatatacataataaaattatggaatgataatcaaataaaaatggcctagtataagattcaatttattaacgataaatttgtcacaattctcaccatcttatgattaacataatcactactagggaaaaggcctttatcttcggtgtttaggccagtttatcttcagattttattaaaaatcgcaaccgaagtcatttgaggcgatgacatatgttttaaaagtcaaaggtgagactatgtcttctgttattataaaaaaaccgaaaataaaagtaacctacatcttcggttattatataaaaatcgaagagaaacgtaacctatgtcttcggtttttatataataaccgaagacgtaggttacatttctcttcattttttatataataaccgaagacatatgtttcgaatatcaaaagagaaaaaagacctatatcttcggttattgta

SEQ ID NO: 168203 - DNA, 2264 bp, Cannabis sativa
tcgagagagagagtctggaaaagtatctttcttagtataacattaatttgattcttacactattaggaaacacgcaaaacattcaatttattagaaaatttttagaatatataaattatataaaaaaaaaaaaaaagattacataataagattttgctcattatcctttcttgtaatataagaatgtaaaagaaattacatgaaattaaaattttagaatttttcgttaaaagaaaaaaaaaactttaaccttctaaagcactgaagaatttaagaacacttgcaccaatttaaagagctagtcaatattcttccttttgagatcctcatcagcaattttaaaactgtaaattcaataaatttgtctactattattataaaattccaaaattatattcaaaaatattcttgataattatatatataaacattctcaataatgaatcaaaaataattttgactcatttacataaatattagaacaaagcatagaacaaaaatactatacacttttgcaatatttttgtttttgagatcctcatcagtaatcttaaaactgtaaattcaacaaattttttctattctttattataaaattccaaaattatattcaaaagtattctcaataattatatataaacattctcaataatgagtcaaaaacaattttgactaatttacataaatattagaacaaagcatagagcaaaaaaaattatatacctttgcaatatgatcacaaacgcctcacccaaaactaaaaaagaaggtacagcatttagtcttggaaactaacatcttcaccttaaaagagaaccttgattgtgtttgtacaattttatttggatatatataaagagaaagaatgatataagaagtccaacttctaaattgcacacaactaatacatagtaaacatataaagaggggagagaaagggttatataagagatggatagtcacacattataaattaccaccaattacaatataatttatctatttattagttcgtttctataacctataattaaatgatactaaattgtaagagaaaaaaatatatttatatatatgttattactattcgttttttaatttttaatattaatataaatagatataaattgctagtttgtttttataacctacatttataggtttaaatgatattaatgtaagagaagaatgtatttatttgtattattactcttattattttttttatttactttaatatagatagatacagattgtttggtattaaatagaaagaataaattaaaaaaatgagagaatgaagattagagaaagaagcttatttagattgccacatgtcctcttttatactttactttatatattgttatattgatttgaataattggtaagttgagattcataatttaaaataggaaaatcaatgttttatgtctttactttctgattaaaatcgttgtttgtctgtttacttttctgttattttattatttcattcttaatcattatttactttctattctctaattaaagcataaaaccaaatagtataataattagtgaaatttaataatcaatctatgtgggtttgacaaccttttaattaaaactttgatataataacaatgtatgcttgcagtaaaaattgtgtatcactcacatacctaggtctgggtctaaggctgaggtccaggcctgggtttgtggccaaggttaggggttgagtcctgggtcggggtccaggttcgggtccgaggtctgagggctaggttagggtcacgggtttggattcaacggttgggttcgggaccgagtcccgtggctgtgtatgggtctagatttggagctaggtatagatctcaaattttgaatttgaagtccgaggttagggtccgggtgaaaggttagggtttggaccgagattcgggtcttagggccaaatccgaattcatgtcgaggtcctggggccaggtttggaccagggttaggtttggatttggggttttggtctggggctagagctaggtcccgaatccggagtctggggtggggttaggttcatgtcatattatggtgtagagtattgaaatatttttttagtaaaaaatttaaaaataatttttagaaaacattagccaaacacaattaaatttttaaaatagaaaaactattttctattctcacttttaaaaacacaattctaaaaacttaaaacaaaggtggcgtttggtaacacttttttaattagtttttaatttttaaaa

SEQ ID NO: 168204 - DNA, 574 bp, Cannabis sativa
tatcaacaagccgtgggttatccccttctttgagtctcgtaaagatgaatggttttcgatcataggtccatggacttccctcgattaccctctgaatatcgatctcgtgatagaactggaaaaggaaaagattcggattaagttcattaacatacattcccatcccaggctgccaaaggaatgccatcatgttctgaaaaacgttgaagtcggaaactcgtcccgttaagagtttttccaccaaacaccatctagtatctatagccaactcttcttcccttgccaccggaacccttaaaacctccgcctcctcctcctccaaatacaattgctcagtgcgggccggcatatttctcccatcagcactactagaagccataatcttctcccagaaatctgaagctaagaacaaactcccaaagatgagaaacaactcacgtatcagaggatacgacaataatatcgcaacttgcaactcgcaattgctaactgtatttctttttagtgtagcgtaatggtattacaatcaattaatagttaaaaaacttaggttcaaatccataccatttctctt

SEQ ID NO: 168205 - DNA, 1462 bp, Cannabis sativa
ttcacacaacaaaatctgggacagcaagagaaaacaaaaactctaccaaatataaaaacatatccaaccaaaataataaaataagacagaatacaggtactaattataaaattagtagagaactcaaaccataatataaaaaaaattatgcgtaactacaaatcttatatatgtatatattttatctgttgtgtactatatagctccaattaaattacactcaaaattacattattagcactttctatttgtgaacaaaataaaaaataaataaaaaaaaaaaaaagacaaagaaaagtactacagcctgtaacatccaaatcacgtgattacaaaatcagaaaatctggcggatagggaaaactctgtaaaattttataaacaacacaaccaatttattgagatgttaatacaaaattataattttgccttattagtgcagctttgatcggtaatacttctagtcgaaattcgcacattgaaatcgcatgaagatgtggttttgacatgaatcttgaagataccgaggatcttaactttgccggacatcttgatgtaagtgttcatgggcatcaatccagcgagcacatcggagtagaacttggtttccgagaggagtcgatccaccatgatagtcagcgttatgttcatccgtttcgtcttgtcggaaggaatctcgtcggcgggaaggtcgatcgagcctacctgttgacccctgtagttcagggcggcggtacagttcttgtacttgaatccaaccttattcttattttttatggacacatctaaaccgagggtgagattgagatcgactctgagcggttggatgtcgagatccagatcttttatggagaaggtgttgacagtcgtggtggggtcctttggtttaaacactgtcaaggctaaaatcaccaataccaagattagtagggagagaacggaacaagtgcagaggcaaatgtttctccgcttccggtaccgggagtggttgggtttggatgaatcggaagcgatggggatggctttgactgcagctgatgatgtttgtggtgacgatgatgtcagtgctacttccattatggaccgttgttttggctttgattgttaattaataatataaaaaaaaaatgggttttacataaatatatatacatttcatgctcttcttttcactttagctatactcgtgaggtgatggtagggtgtggactcttattaattagagttgaaaaagccatagtttatttatgaatatttgctttcaaaattttaatattttttttttgaataaatatcataaaatatattaattaataaattcgtttaaaataataaaatgcacttcagaagaacagtcctccaactgaagcacacgacctctagagaagcaagagtctcttgtcaagcaatgagccaacttatttgcagatcgttttacaaacacaaatcaacaaaagataaa

SEQ ID NO: 168206 - DNA, 876 bp, Cannabis sativa
ggataggagttagctaagcctggaaagggctagggaatagcaaaatcgaacattgtatttcgtcaagcaacttcaacttgcaaccaaggtggagatttattggttatggttacaagtttcgtctttcagaaagctagatctgggaagctagttgttcttccagaatttagttttgggaagctagctgtccctctgaaaaggagttacgggaagcttggtgatcttttgaataagcttgttccaaaaagcttattccggatggtcattcgggatagcttgtcattattctgaaacatccttttggagtgcttgtcgtcagtctggaacgctcattttgaaagcttgtacccatctggattgacccttctgagtcgtccatacaggatgcttgtttacttacgaagagcgtgttgttggagctaacgtggagacttaaaggcagtgttagttaagtaatttagcgccaatataagcctacatattgccatcatctatgtaatcaagagtggtgagttgagttagagcttgagagtgaaataaatgttgtgtaaggttagagagagagagtcataaacagtagagagaaagttcattttgtaatctcagatacagtttgtaagactcttgtaaccttgtaaacaattatcaataaagatatggttgttgttgttccaaccgagatgcagagcattggacatgattcaaactcgttaaatcccagtgttatcttctccttgttttactaatttaatccattatatgtttcttgtgattatctattagtaatttagtattgttcttaaatgcgtgtttgttgatttggtgttctttcactacaagaatttcagtcattagcggcggggacattagcggcgg

SEQ ID NO: 168207 - DNA, 551 bp, Cannabis sativa
tctctctctctccccctctctctactttccctctctcagtcctctctcagcttactctctcacaatcactaactttcctatctttcaatctctctcttagtggtggacattggacaaccagaccacaacccaatctcaagaaaaattcaccactataatagataaattgtgttttaactattttttttagacattatgaatagtctgtagtttctttccattatatatgtgtggtgtttgtttaaactggtattattttgctatttttggtctaaaacactatatctcgttttctctcaagtttttctacagtttatcgattatttatcgataacatatcaatataatgtatataatgtcgatgatatgtaagcaaaggtcattgatgaccactatcaacaagatgtcgattacttgttaacatattattaataattcaactaaaatttatttgtcgacaatatatcgacataatgcatgtcgatgatattcaaaaaatattttgcacacaaattgacgataatttatcgatgttggattaaaatcctcaa

SEQ ID NO: 168208 - DNA, 556 bp, Cannabis sativa
acaagtattgtttggctagaaaagcttcagggctagatgagttaagttgaatggttctgttccaattttgtaacttcccttctctttgtgtctgaagttacatcgtcaaaaaaaaaaaaaaatattactcataagtaagtataattagtgaaatttgatttttttgtacttaattttattgtttaattaaaaaaaaaatttatacattatataagctgagattattccatttgctaaaaaaaaatttattgataaaatatctatatatatattaaaaaatgagtttcactaaattcaaatttttcttttattattggtcattgaatcagttaaactcaaatttctctttttttttaattaaaatttatcttttatatgagctgaggttgttctatcagctgaaaaaaaaaattattcaacaaaaaaaaagttttacttaaatattttttatataaacatatttttgataagtgtaataagagatatttcttaattatctaaattaaaccttattgggtattggattaaaatttaatggtttaatatttctaaaatt

SEQ ID NO: 168209 - DNA, 1156 bp, Cannabis sativa
ttataatatatatgtatttgacctagttcagaggtaagttctgcttagactcaaactcaaacatacataaaatagtaatcctgaaccgcctgttcattagactactacaaaaactagacataaaaaatctttcatatctctttgctgctagctagacatgatatcaacgctataaggttattttgcatgtctagcaatattataaaatttttatgtctttactttaagcgaacaacttataaaccagtttatttgataaccataaatagttattttaattttttttcaaagtaataaccaatattattgataactaaataatgccatacaggctgaagggctatacatatcaaagaataaaataataggtagatatttagccaaacaagttgtttatctatccgaagagttttccaagctaatctatgtgtagccacattggccgaccaatatacatatggatgagggccacactcctaaaaaactgaataacatacttgttacatcctctaacaatgatcctagatcattaaaaaggaatgtctcgtaacaaaagtagacacaatagttaaagggttagaatcaaccagcagtacaacaaatttgaaggaataacacctatccaacactacttatgttttcaaacaatatgcttgaattactgaaattctccatcttctagtcctaatgttaactgtcaatgtttgtttcactttctccaaatattttaattgaaaataaatcattattaatgaatagcttttttacgattttcttcgattagcttacaaaaaaattatgtcaacaatgaaaacaaatttcaaaactaacatgcgtggacttggagttgattgttttgaatcttgttttcatgaacataaattattcgaaatcttgcatgttataattataatatacatcattctgaaaatgaatttagatattataatttctccatataaagcaagcaaaaaatatctcaaccaatagaacaaaagtaatatccctagtatatataatcttgttctatatatatatataattcagaatgatgagaaataacatctagagatatattgaacaaacatgcatttattcatctgaaagtaccaattttggtatacatcttatatttccacattatgtatataataac

SEQ ID NO: 168210 - DNA, 901 bp, Cannabis sativa
cgcacctgggacccgaactcggacctgactcgaacctagacctagaccgagattttgccctagacccagactcgcacatagactcagaccaggactcatacctagacccaaaccccaacccaaacattaaatcaaagtcgatactgggactatgacccaaacacgaatatggacccagatcgggacctaggacccggacctggattgaggacctagacttgggcctcagaacacaaacccagatcgaaactcgggactcgaatttgaacctgaacctagactcgaacccagatctgtacccaaacatagatcagaacccaaaccaagactcaaactgggacatgaaccccgatcgggtcgtggactcgaacatggatgtgggaccttgaccaaggacacgggcatcataactaggactgggacccaagccccaaccccaaactaggatcctgacctaggacatggaccaggacctggggcctgaagtggaactagactggaacctgagactgtaacccaaatttggacccaaggcttggaactgacccgtagtaagtgtttggatctgggacccatacccgaactcaaaccgaaacctggactcgggccctaacccaaactcagacccgcacctgagacttaggtccgagtccaagattgggtttgagtccgggaactagaatttgactaggactcaaacatagacccggactaggacgcaaacccaaatcaaaactcagatcgggacttgggatacgaacccaaaccccagaaacaaacttggacacaaaccccgagcgaggacccagaccgagattggagactcagatctgggcctaggacccagacctagattgggacccaaactcaaaattaaaaccagaatcgggacccaagattg

SEQ ID NO: 168211 - DNA, 1568 bp, Cannabis sativa
ccttatttatatatctctatttatagacataggattttaaaatattaagtataatgagttgcccgagactcgaacccgaaactagtcggatggagtagattatttttagaaaataaaaaatatataataaaaaacttgttgaaataattctccatataagttgacctgtcacaagttataattaaaagacagttagttaccacaaagcctaactaattaccggttagacatcaagatcaagaatcggttagttaatcctaactaacctactcagctacaacaactataaatagaaggactgaatgtagagaacacttactacttcaaattactcctctgaaatccagagaataagagatgaaaagtccagatctagacagagggagtttctctcgtgtttaaacagaaagaaaaagagaatagttagagaggaagagagaaaagaagaagaggatctgttagatcctgagagaaaggaaaaataagagagattgagagattgagagaagttgtacatacctgagtgaagaaatgagctaccagacgattcatgtgtcttagagcttaacaacttgatgtaacaattgatcttgatagtggattgtggctgatcttctctgaggtagctcaccaaggacgtagccccaatttcaggggtgaaccttgtaaaaaattctctatgtgtttgctctctttcaccctactctctgtacttgcttgattgcttcattttgctgcatatttttctcagaatccagctcaagatctaagctggttctctcttctctaatcactctcttgaattttgctttgccctaattttgtgtgtgtccttagaagtctgttcagacataagcataattttagtaaagtaaaattaataataaaagcattatataaaatcaaatacatgtcaaattggtgctcatttatttcagtaaaggaaaggtcaaaattgaccttgtgagataacatgtgtgtgtgagttgtgtagggataattgtgtaaaatcctacaaaactatataatagatattatattaacgatctctccccaagtcgtgcttgtattttttcattgcacacggctttccttatgtatacatctaaaattcagattcttccctagacaagactttgaatactcaattgatcaacccttactgcataaacattttataatagcaaaaaattatattttcgctatctcttccttcataaataattttttaacatatataaatataattggattggattaatttttaattagattttgagattgacatcccataaccgatcaaatccaattaaaatataatttttagcattcaacctaatccaattataattggatatataattttttgtaattagattggattggatcagttcggttcaattggattggattggatattttctatccctacacatactcatacttatagattggaaacataataataataataataataataagactcgtttagtacgccgtattgtattgtattgtgttgtattgtattagtattttttaacacaatactatgtttggtattgact

SEQ ID NO: 168212 - DNA, 946 bp, Cannabis sativa
caagattgtgcagtttgactttaaaacttgccacatcatcttagttctgttttatgtgtcaccaaggtggtcagattaaccaatctggaatattatgagattgcaatttgggattttcttgctattcggttaacacttaacacctcaggaaaccatagactctaaatgttggaatagagaactgattcgagtctccatcttcacgagaactttgagtttgcattctttctccttaagccatgaataacaagatgaacaatagacaacgaagaaaaacaatgaaggagcacacatcaattgtggctctgataccatatcagtttagaatccattaaaggaaaaataaaaaaaaaagaagaagaagaaaagagaaatgaatttaaaccaatgattaagaaaattttagctttcctttgaattcttttcagtattattttagtttgtttagctgacattttaaccaagccattgttttctaaccaattcaatctgttcaaagacaagattgggcttaaaggatatagcccatcttgagggggagtgttgagttgtaattggttaggtttttcagttagaagtaagttagttgattgtgtcttagctgtcattgttagttgtcattggtaactgtcattggtagttaaagttagttggtactgtaactaactttagtagctataaaaggctactcgagtgtactgtttcatttgatgaataagagattcattggttcagattcatttctcttctcttcttctccttttctgtatttttccttcaatagattctaaactgataaactataataaaaattgacctataaagaaacgtacgtacctgttaacctctgccaacttcttagacgcactaccaggtcggcccgataatgtccatgagtattccaactcatggagacatatgagtccccttgtggtcctcatatgcc

SEQ ID NO: 168213 - DNA, 1098 bp, Cannabis sativa
agggattgcttgaaggacagctttaatgagagtctccttacctgccttagaaaaccatttatggtgccaggaatgaatgattgaagaaattctatcctttaaaaaagtaaaagactgatatttagctcgagaaaaacattgtggcaaacctagatacttaataataaaaggtttatcttcaagctgaaatgtcctaagaaaaaggtctttgatatcattttgagtattaggagaaaataaaatagaggacttagtgaaattaatcatctgccccgaagcttgagaatacagggatagagcctgctgcatagcgtgacaagaattacgatcagcagtacaaaacaaaatactgtcgtcagcaaacaacaaatgagatataggaggggcatttcgagaaattgtaataccatgaagcaaacccgtatgatgatattttctaagaattgctgaaaggccttcagcacacaaaataaacaaataaggagataaaggatctccttgcctaatacctctcgtgggcttaacattaccatgcacagaaccattaatagagaaagagatagaagccgaagacagacatttaagaatcagagaaacaaaacgaacaggaaaattaaaatgaaacattatactacttaaaaaatcccattcaactctgtcaaaggccttagccatatcaagtttcaaagcagcccatcctctcttaccaacctttctattattaatagcatgcaccaattcattagcaataataatattatcaaaaattactcgacctgaaataaaagcactttggaaaggagagataaccctatctagaacccttttaagcctattagatataatcttagatataactttataaaaagtagtgcaaagactaatgggtctaaaatcacctaacttattggcatgttgtttcttaggtattaagacaataagagtagaatttatctcggaaaaatcagtatccctattaagacagtctaaaatggcattagtgaaatcttgacctaaaacagcccaattcttttggtagaagtaagcattaaacccatctaatcccactgccttatccccagacaattgaaaaacagc

SEQ ID NO: 168214 - DNA, 605 bp, Cannabis sativa
tagattttattggattttgggtttttgggttcgggtgtctagaattagtaacccgaacccactcgtttgtgtgcccgagtttttgggttttgagtgcgggtgggtcgggtctgggttgaactgggtctgagtaggttttgactgaattcacgttaggctgacctttctttctttctttctttctttttttgaaaaacattatttttatacatattttcataaaaagaaaaagaaaaaaataaaaattatatatcattgtttagaattaagtctttttttattttaagtttatgttttcatgtataaaaaaataaaaaataaaaagtttatacatatctggatttcgggtaagtttgggtgtaactcgttttttttttttttttttttgagttttggattgatgaaatccgaactcagctaatgatggaccaggtgtaaccagaacccagtttactaaaattaaaacccatttttttgagtttttttgggttttgggttgggtggatttcgggtctaaatgtgcacctctagttttgtctcatgtagggatgcacattttctccttggcgatggggcctcgcaggaacccgctcctaatagagcag

SEQ ID NO: 168215 - DNA, 1149 bp, Cannabis sativa
attatagtcatccctaataataagggtatcatggatgactttttacacttcagggacgacaatatcctctctatatggtttgttgtttttgaaatgtgataatttgaaatgaataggatttttctctcttgtacattagggatgacaaaaataatcttgacacatcgtcgcaaagggataaaggatgataatattttaaactatagtgaacaacatcgtcgtttgaaatattatcagagatgataatattttagtcttgacacatcatcgcaaaaataatcttgatatatcgtcgcaaaaatattatcagcgatattatgatccatgataatcacattaataataataaaataatattgtctcttcttcttcattttgatgcctctatcactcactctctctctctcccctctctatgtcactcgatctcgcctctccctctcttcgatcttgcctctctctctaatctccgctccgtctatctctcgctatatcttgccctctctctgtcactcaatctcttgcacctctatctctctcacgcatttctctgtcacactctcacccttgcatgggtcgggaacgacaccagagtttctccgcttgtatgctcatcaaacctctctttattttttatatatattattttgtaattatatatatatattttaatatagggagctaatataataagtattgtagtttttacctattgaaaggtacattaatttatagcaattgatttaatcaaatgactcaaattaattttagaaaacttaaacataattaacaattttttatttataatttattttaaatattattaattagctctaactaacaaaactgcacacctaattccaaatctataatttttttttacttatttaccttatgccttataatttttaattaattacttttttttttttaaaatttggaatttatatatttattttgaattaacttgatttttctactttaacccaataattctagctaaaaaagtacaaaatattcaagttatttaatcctacaataatcagtacaactaataatataatcatggagtaagctgtaaaattatcttatatcaagtacaatgacatgagttcaattctttcaaaagacatgttttttttttttttt

SEQ ID NO: 168216 - DNA, 1056 bp, Cannabis sativa
gcagtcccaaagaggggctggccggccagtgttgtaatttgacactgatgttgtcttttttttttgttttcaagccttaattaagttaagcttagtacgtgatagctcctaggggttcttggatgcttttcgcgagtaggtgaagaccctagaggctttccttatggcaaagtacaaagccatgtctgagatggaggccctcattgctgagagacagagcatgatttctggcttggagatcatgctcggtgccaaaaataaggagaacacctcgttagttgcctttatcttttaggttgaagtctgaatttactgagcatgaggagagattgagggaggctcttgatggccagcaggccataagggaggagtatgctaacttgtcctctgaactcacttatgagttcaagttgcgcaaccctagagctaatctgtcatacatgggcaatgaggcttttgtggagaacatgttgccctaaggaaaggcactcttcgagagctggatggaagcggaccaggtcgctgcctatcgagaggggtcatcatcaaggaaccatgatgagaggctaactggcccacctgctgaggaggtggtcggccagcttggtgatgttgtggccaacctagaatttgacaattctgatctcgtagcttcaaacttggctccacctacccctgcacagacatatacaatatttttttattagtagtattcaacatcatatttgtataatatagacaatattttcatgttctgtatggcttgtggccttttacatttagaacactacatattttcatgttccatgtcgcctatggcctttttagaacactacttatttttagccccaaggccttcatgtttgtatctttggtctataggcccactatttttgaacactactattgcttgaccttgttgcttttttattatggattgtgtgaccgaccgggcggtcttcaatcatgattatcttcttatggccttgacaagttagggtctaaatttactttgtcaagtcaaagtatgcccgcacgacttagaggtaggtttag

SEQ ID NO: 168217 - DNA, 934 bp, Cannabis sativa
ttcttcccttcatcacttaccatttgcttcttagggagacatttttgtggccctacattgatccttttggtgaccatatataacctccacacttaaagcatttggttggaagttattcaaaagcaataggaacgtaatctaaaacaccccattcattttcaaaattaataataggaagacaaatcttctttaatctccatatcaactaaaacgcggacaaacttgacatatgatccttcgtaatctgatcgaccataattggggttccatttgtgcttacaaatgtactaaaacagttagttctccaatattgcaaccccaaaccgtgaatttttatacaaacgagagcaattttaaccagcttcataacatccaaatcagggctccaaggtcgcatagtcactggtttatcatcaaaatgtaccacccctgcctctagcacaaagtctctggttgcttcgtaagaaaatttcactagagcaaccccattattcatcctcacaatcctttctagccccatgttttctcagacacatttagcaaagccctcaaaaaaattcaatgggggattagctcccatcaccaaacataatatgattattttccagtatttcaattcactctcaattcatttagatcaagtttagcaaacacctaaccattttttgctatcagagaggtatagtgcaacctcactccagtgtattagactttctcaatgagcttggcccaatgatccttcgatttctccaacaaatcagtagccaatgtttcatcagtcgaacgttcctccctcgcactaccgatatcaaaatggttcaatttctgtccgatttattttgtaattaattaaaataatgtatacaaaattgtaaaatgcccaaaaaaaaagttatgaatagttataaataataatttctatgttgtgactaaa

SEQ ID NO: 168218 - DNA, 917 bp, Cannabis sativa
tgatttttttagtattttttttatgggattcaaagcttgggacatcattaaagttagtagctaggacgtgtaatttatctttgaatagtggactcaactacgcagaatggaagttcaatgtggactaatcaatatctaatatacatatatgtatagcctcgacaaataacgtggtgcttaaataataagatggagaatttcataaataatatatgcaaagcaaaaatggagatcaatggaagaattattaattttttgtgtttgccattaatgccattcatcatttaagagggttgaataaacaattaggaggaacaatataatttaaattactgataatatacatcccagttaaacttaaattgtgaaagatcccataattaataggaccatcgacaatgttgtcatagtttgcattcctcccataagagctggttgaaagccatcggtactagaaggcaactgtttatacattaccaacacccctagtgtaaaaatagcttgcaacttcgttgagttgccttgtacaaaaaagaaaaaaagcatcaaaattaggaacatatcaacactaaagaacatgatgcagagtactatatcagccacataccaaatcccaaaaacaagctgataaaatgaagaatataccattgtcaaggtaaatattgtggtagtatcaagtgaaatcaaatactttggggcagttgatgaggttctattgattggatataccaaaagattatgtccatgaaaattgatatgaatctcccttaagagaattttaccttccattagttaccaagggttgacgtgtgcttttttgttggttttttttttttttttttgagatttttacactaggtaccaaatttaattacttttttacatttttaatacttatcaatttattaaacattttt

SEQ ID NO: 168219 - DNA, 772 bp, Cannabis sativa
atgtgtattatatatactgtgtacctagacacattgaattaggtttgggttatttccaggggaggaatagtgtgttgattgaagtgtgggatttatgacagagtttgtagggatagttagatgaacaatcacaatcacaatcacaactcagaaaagggtcgctgtgatgagttataacaaagtaatctctagtcttctgccaacaaaaaattgtaatataaaacggtccagatgaagatgtatacatgctagctaattcaatatatcaccatctatattataataatattcatatcaatgacaatgagagtaactaaatatataaatatatgtgtgtgttttatatgcttttgaaatattttctttacatgcatgtgtattgtttaacgtgtatatataatatatgcatttaataagttttttttttatctgtgtttaattttgggagtaactaacagtagtggtagttatgtaattatttaaacttgatctttttaaaaataaaaataaaaatatatatataatcataaaaaatgaaaaaaaaaaatcattaataaggtcaattaattcatacatggttgaattatttactgattagtaaatttaaatgagggaattttcatgctttttttagaaaaagtttaaaatatatctatataagaaaacagtttaaggtgactagttaccttgttaggccgaatatactttatactgtttatcttcatagttttttttttaaaaaaaaaatcataaaataactttttttaaaaaa

SEQ ID NO: 168220 - DNA, 565 bp, Cannabis sativa
  modified_base (484)..(484): a, c, t, g, unknown or other
gagagagagagaaagagagagatccatatagggacaaagaacacaaagaagagagacaaaggtggatctaagatttatcggacaaaatggaaaagagagaaagaagaaagaaatcaagagagagagaggaaaaattattttttttttctctttttgatttttaaaatttttaaatgttttaattaattttaataaattattaatattagttggaccaatgaaattttgtcatatttacacttgtgtatacagtgacaatctactttgacacttaatagatcaaagtagacagaatgagtatagagcaaaacgattgtggagattgagaagttcagccctaattattttagtataggagttgatcgtaccaaactctaaagtttatgaaatttggccccaaagtacaaaaaaaaaaggctaattaggatccccgaagtttgacatggaccaattcatgccttctgaatttttttggccgttaaanattccccctgaactattgagattgttaaattcaaggacttttgtctaattttagtaaatattaaagtttgagggatatgat

SEQ ID NO: 168221 - DNA, 910 bp, Cannabis sativa
tcatgggaatatcagaaaacaaatattatttttcttgtgttcttgttggttagagtatctctagtggtgtatcatttcattaaattagtgtagaattttcacattaatttacttcattgacacattaaattatgcactaaattagtgtgcaccaaattttacatcattaatagtgtacaattttgagtctacactaatttggtaaattttagtccttattttaatttattttaaaattaatcttacatttgagtcatcaaattaaaatttattaaattaatgattaatttaaaatactaacatattagaaaatacaaaataacaataacaaaaaactaatattaaataatcacactaagttatgaaattaaaacgatgaacataaataaaaataaacatcaagtaaaataataatttaataaacactatgtgtaagtttacttatatttttcttagatatgtaatgttgacttgatttaataaatattttcttttgatttgatttaataaatattttattttactaaaatattcttacatgtagtcatgttaaaattatatcataaattagctatttgaggttattgttgcaaataatataaaatgcgagatcttttaagtaaaatatatttatctagtgaaatatttggtgtgaatcattcgagttgttgcaccaaaagtagaagattctatactaaattagtgtaactattaaaaatggtcttaacttaagtatgtctttcagatagatgatatgcattttaaatagatgataacaatttttagctagtctgtgccattttatttgactattttgtactataatatttggctagtttgcattatgttaactcatttgctcatggatacaatctcaaaatgtgttcttttttatttatgtttttttttt

SEQ ID NO: 168222 - DNA, 833 bp, Cannabis sativa
ttggaaatcttagttccgatgcttactggtacttcaagattggagatattgacttatgttggctgtgttttccaacaaatttggaagtggaggaacaaggttaaattcaaaggaggaatgcctgatatcaatgtaactctaggaacaattaaaagcatctgttttgagtttcttgaaggcagatctcggccttccattcaggatactccccctcctgcagaccaacagattgagactttggcaaatgcagagttcatcatctttacggatgcatcttggaatgaaggtcaaagtggtctggcggtggtagttatcaatcttgtagataattcttggttttacaaggttgagaatctgacggctgatagtgccatggaggcggaaaccttggcagttcgcatggctttgagccttattgcagagaattcctggagaaaggtgcatgtcttatcggactgtaggaatgttttgagagcctgctctttaaagaagtgtcacttggattagaatttttttaattcatctttagaagttagtgagttaattgattcggtaatggattgtaagtttttttatattggtagaagccagaacactatagcggattgtctggctagaaacattagaaggtctaatattaaccccggtttgtattgtggggagggtgatcccccggtgatccccaattttcgctccttgccttaaatgaactaaagttctttcaaaaaaaaaaaaaaaaatccaattgaaccaaaccaatctaatccaattataaaagttggatatccaattacaattggatttgattggatgctaaaagttagattctaatt

SEQ ID NO: 168223 - DNA, 599 bp, Cannabis sativa
atgagttttgtgttaattaattttgttcataggtacctaactttttttcctatgtaaatgtgtataactctattggattactaaataaaaatatattattttaattaattttttatatatataaaattataaataaaaatatttttttaataaataacatttatatatatttaaatttttggatattttatatttattaattatttaatatttaaaatatttgttgttttgatatataatgtccatcaatattggattagaaatgtttttctagtccaagaatagtagactagaaatatactgctttttaagtccaacattattggactagaaatttttttctagtctaacaattaagtttcacattgcgggaccgtttttcaagtccaataatgttggactagaaatatttttttagtccaatattgttggactagaaaaataccccttttatgtcccaggctattatgtccaacataaaatggactcaaaaaatctatctagacccacattgatggacttaaaagggggtttttgtagtagtgaagactttcagcaagaagaagtttcagcattgaagaatcaaagaaagagatcca

SEQ ID NO: 168224 - DNA, 689 bp, Cannabis sativa
tttggaggagtttacgttctcaagtattcacaacatcatattgatttgcacattcatattggtgggatgtaagagtatctggtcacagggttatatggggagcccaataaagcgttaacgaagcatacatgggacttgttggggaaatcgaatgaagaatctgagttgtcttggtgtgtagttggtgatttcaataatgttttgagccaagatgataaaagaggggtcaaccatacttaaattggttagtgcaaggtttttgagagatagttggagattgtggtttaattgctcttaagcttgatggatatcaatacacttgagaaaaaaggtgcgacactgataattgggtagaggtgaggctcgaaagggcgctggtgtctcaaagtcggtatgatattttcaatatggataaaatgtttaatatgtgtctacctcatatcgtaatctgttgtttttaatctttgtaatactgtttttgtccctattctcaaaaaatttaaattcaaaattcttagttaagggagccattgtgtaagcaaattattgaagagagttgagagatgtgtcatcatagtgatttcattagaaaaatttacgtggtatactaaattttactatttttttacaaaaatactaccagacggtattttttacttttttactgtattttttttataagtttcata

SEQ ID NO: 168225 - DNA, 785 bp, Cannabis sativa
tttcttaaaattattattattattttatttttattttggaaatatttcttcacatatattgctttgcttacctctccaaggttcactccaaatattcaaaaatactaaaatatattattggcactactagtattttatttttattaatgtaattaaatattgaattatatgtaaaagttatattttagtacacttaataaaaattattactctaatagtattttaaaaaatatattaaatttaacgcatactaaaaattatatcaaatttgacttataataaatattacttttttgtttattataatacacactattcataataattcattaacttttactaaattttacactctatatatactatattaccattatttaaataataaaaaaataatgatttttatatattctcaataaaatttcaaatgactatcaatataattaagtatttatttacttattttacattttgtatattgaagcacaattataaataatgagctaaatataatacaaactcattttttgtgccaaatttaatacaaattttacatcttgcattagagatgatcgaagacaataactttcaagaaatattactaattataattataagatgtcacttgtaaaaggtgctacccaccacttgtgtccagcaccctcagaacatctctaatgagaggttctatagttgtcaaaaggtaacacatcatctcaaaatattttttttattttctttctcattcacataagatttggtatatttttttttacaaaaaatac

SEQ ID NO: 168226 - DNA, 787 bp, Cannabis sativa
aaaaaaaaaaaaaaaaagaacgagggggagttcataagctggatatgatgtgactattaatagatatatatattgttttacctaactatgaagtatgtgtcacacattttgtattctataataatatatgtatttatatttttatgatagtcggttagcataagctataatttagtgttacatgcaattctactacataaatgcaaatataatataagaaaacaataagaatcatgctattttatttaaatttttatttatttacctataaataatacaaatagataggtagctagattcaataggaggaactatatcaaaagaatcatgctttcgtttaggcatgactcattcaatcaatacaccacacttatgtgagcagtggctttttttttagcttcctaagtcaattatatatagagataaataattaagagattatttcacaaatacacaaaaataataaaaaatctataaatatacagctatacagaattttaaatatttttataatttttaaaattttatttatagaaaatacggtctttttatgttatactcttgttaatttgttactgattttttgttgtctgtatgttattttttattgttgttttaatgttattttcatgttatttttatgtaattttactgttattttcgtgttttctctatataaaactgtaaaactgtaaaaaaaaattaaacgtacaaatgtaatttttttaaaaaaaaatagtaccttatataattatcccataaattaatgggctatttacaaaaatat

SEQ ID NO: 168227 - DNA, 828 bp, Cannabis sativa
aactattgtttataaaatggaaacaactatcctttaaatagaaatacaagacataatatgtaaaaattaatatcattgaaagggatacaaccattaattattgcatgaggtcccatcgagagaaaaatgcttgttattgttatgtagtgtttttgacataagtcaaaatgtgccaagtggtgctctaagattttccacttttgaaagtctattaagttagttggtgggggaggggcggaatccttatttttgttcaagctatatataacacaagtttggcccctgttttggggggagaccaactaaaaagatttgagagaaaaataaaaggtgagttagattgaatgagagggttcaggagcaagtctccttttgtaattcgatctctcttggtgttgagtgatcaatttgtaatcattaataaagattcaagagttgtttgttttccggggatgtaggcacaagtcacattgacttggtgtttgaacctcgttaaagaaatgtgtccattatattctacatattgccatttaaagttcacttttagttcatgcttgttaattgttcattgcttgttttagcttacatcttgagtactggtttatgttgatgttctttgctgtatgtgttcttgaatgaggtgaattgtgattcaccacaaatggtattagagctcggcgaagaagaggattagcattcaagaactgttttaagatttaaagaactcaatatgaaaatgtcatcaacaaggtttgaagtagacaagttcattgggacaaatgacttcagtttatggcaaatcaagatgaaagcattacttgttcatca

SEQ ID NO: 168228 - DNA, 514 bp, Cannabis sativa
tatgatacttgtagagttttgcacctgaattatttttttcttaaaaagattctttcgaattaagaaaataattgtaaatattttcctttagttatattttgttcattttgtaagataatttattgatgtggctatgagtcacgcactagaatggtcttattaactcaaaatttatagagtctcaaatttttttgctatagtattatttatgaaattattttttgtttgggctcttaaattatagtagttttccttgtattagtcttgcattaggagactgtaagactgtaacaaaatgtaactgcagaggaaattatttctatagtttaagggaaatttcttacaaagaaaaaaaataataattgaggggcaaaatcttgtcacaatctggagtaaaaatcatatctattcaaaattaaaagttgtttttatatgaatatataatattttaatataaattaaattttaatataatattatataaaaatatagtatataatctaatttaatataa

SEQ ID NO: 168229 - DNA, 878 bp, Cannabis sativa
ttttttttaatgacatagtgctaaaatagttgatgaaaattccattattgttttctgtataaatatattttaacattaatcacgtaagtgctaaaaaaatcgtacgtacagtactagactatagtagtattcattcattaaaaaaaaatattttgtcaagttggaaaaataaagaaaatattttgatttattttctatggttgttgggtccgttcattatatgctatcagaaaaaggtgacaagacaactaccaatatggttggtggagcaactaaaagctttcaccctttcacaaaatcatgattcccaaaaaacaaaattggaaaaattattacttacaaattaataacaaacacataaaattattaaataaatatttatgaaggtaagattgaaaattgttgcacatattactctaataaataaaataacagtaaaattttatcttataattttgtggcaattattaattactaattcaaaaagaaatgataaatatattattaaattgctcattgaataaaaaaattatattttaaaaaaaatcttttttatttatttaattaaaaaattatattattttttgtatttaaatttgtatatttttttaattaaaaataagataaataatagtattcaataatatgttacttattattatttttatgttgtcatttaacactttagttggcacttagaggtacagaaataaaattataaaataaaatatttttattatgttttttatggagttatttcacaaatacataaaaacaacaaaaaaaattaaaaaaaaatataattacatagaattttaaatatttttattttttaaattattttatttactaaaaatataattttttgatgtattttt

SEQ ID NO: 168230 - DNA, 556 bp, Cannabis sativa
aatgaccttaaaagttcaaggaatataatttgatacttgtcaaagtttatgaagcaaaaatcctaattagccatacagaaaaaacatggatttacatcttaatccagattctaaaatcattccaaggtttaaaactgactcaaccacagttacatgtatcttgttgtcaaaagataagataaggattcaattatacactaaagcaaataatgacacgattttcagtgctcctggacactggatcatcatctgccaagtatgatgcactgagttcttaaaataatgctttttctttagagagaaagaattagagcacctctaaccataaacactataattatgctaatttaatataaaaataatgtaattttagtatcatattatttttttcactctacccatcaactactacaagttacacaaaaataatttttaattaaatataatatttttgtgttattatataattaaaaatggcaaaaaaatatacatatatttgagctataatattaaataaaaagaaaaaagtgttataaatattaataattatgtggat

SEQ ID NO: 168231 - DNA, 917 bp, Cannabis sativa
gaattattatataaagaatattttaatgaaagttattcaaaatgtttcaatatcattaaaaaaaatgtgtaaagcaagaattaactaaaaaaaaaagttctcaaatggtctcttgagaaagaaaggaaaaaaaaaaagatatttttatttcttctttaaagatctttattagttctagaaatataaaagttatgaacgatttttattaggagtggcaatttaggtcatgacaccacaacacgacacgaactcaatacgaattattgcgggttagggtcataaaaaatagatgtgggtcaaaattgggtcaaacccgaacgacaattattatttgggttggattagagttcacgcatgtcacacgaaattgacacgaatagacccgtttatatccaatatattattaaattattaatttatagttaaattattatttatttctatagaaaaacatataagttagaaagaaaattacttacaaaaatataagatagataatttatatctgatgttaagaattttattcattgtattaataatttgtgataaattatttttgtaaaaattatatatgcgataccaatcatgttgattaatatgtattgtaacataggtataattgacacgcaaatacgacaggctaacacgagaacacgacgagtcgggtcagggtttgagatttcttgacacaaaatatatataagtcggattaaagatgaccaattaaacatatcaacctacataacacgaattcaaatatgacaagtcaacacgaattactacctctaatttttatcttgtttgttagggttattaattctttaaagaaatatataaatcacagatccaaacatatttctaaaagtgctttaatatagaaaaccctaaatcataaatctataaagcctttgctaaat

SEQ ID NO: 168232 - DNA, 1223 bp, Cannabis sativa
cttcgatcacgatttaaatgttataattaaacataaaaaattacaatgtatctttgaaataatgatatgtcaacttttaattacacaaagtatatataaatagaatacgcagaacgtacggcccagttgtcatatgcgttggatgctgctgctggtccctccctcatctctcgccaacaaaaccaaaaatccataataatactcaacttgtagaaatccacacacacatacatgcaaccgatagagtttcgtggaaattaattaatggtgccatttgaccaatgcagcaacttgtttatatagtgtaagtagtgtgaatctaatattatatattatatgtacatagtggcatctaaatatctaatactattttgactccatttctagctatgatcgtgacaaaagcccatgcgctgtctctctgtgtctctgctctgtttcggtctatcgtctattttctaattttctgtggaaattgttttaattatattacatcacttgatcagtgttgatctattacatgataacgagtgcgtacgtattgtctattaatttgagtaggttggacactagttatttttctaatcatcattcatcaagcacttttactcaaattaaggaatactatttaattgatgatcgaaaaaagttatggaatatatgcactgtaggtagtcatcaagccatatgataccatggccatgggacaaattttccaaaacagtagtcaaacttgcacggttgcaccaactattgtctcaaaaaatgtaccgatcgaatgcctaaaattaagatatacatacatttttaatctataaatgtatatattatatcttgagcgcgctatcataatttgcattatatagaataattatttagacgtctaggtttgacgaaaccatgcattcgttaatttgccactatattttgttattttatattttacaactttcattaatgttagaagatttcatgatgtacgtcacaaagtatgtttcctttgaggtgatcatgatgtcatatttatactttagggttttggaattgttcatatatttttaggccatctagagatttatttattatcttatttttttgaaagggataggccataatagatatgctttgatattttaatttgactaattaactaacactacaaaaaaaaatattatttttagtgacaattatttagtcacaacataattttttttttttttgac

SEQ ID NO: 168233 - DNA, 809 bp, Cannabis sativa
ggtttacttcatgacaaaatatatatatttaataaagaagacatgaagaacaatatataagacacatagcatttgttataattaaatatattttgctcaacttgccatttacaacacgttgatgctccttttttataattatattatcatctctatataaaaaaaagaattaattattaatgagatgttaaactgtatatatcttgaaatgacgtgattctagatatttaataacacattgtgaaaccaatatcttctagagatttaaatttttaccgacaataaattttggattttgtgttaagtccgattatttattttgttaaataataataatgtattgaacttaattttagtaaaaaatggaacataataataataacttgatcgagttgtattaaaaaaaattattttagtgacaatattttagttataacataatttttttgtgactaaatgtgacttttagtcaatagttacaataaaaagttacttgtaactaaaagatagtatttaaatacaacgttgtcactaaattagttttagtctgttgtatgatttgtctcaactaagctattgccacatcatcatactatcttatctttgttattggttagttaagttagttatacaatcttgacacctaagaatacctatctacttaattcataaccaatgcctataaaaagaaaggcaccaaggctgctaaaacaagtagtccaatccgagcctctcacctagaattctctctctctttctctctaatttctgtaccaatcttgtgagtgtttaggagggttgtaaaagta

SEQ ID NO: 168234 - DNA, 2145 bp, Cannabis sativa
tgggaaaattgatagagtgcggtggtggattatgaatccacgtctatagttttgtacgagaggtggaagaagcggctatgtggtcccatggttggcgtggcgcttttatacttcggtaacgtagttgtccttcgatgtgggatactttttcattttggattaaagtagtcaaaaataagtctaaaaaaaatagtattcaaaataaggagaacttattagtctctatgtgcgtgcaaatattagggcacgtttcattgaccaagtaagtagattttaagagcatttctaattgtgatgcaaattatataaaattaaaatacaattcacttaattaggggtgattattggactatatccaataattttaagtgttaatgtaactttttgttaactaaatataattttttttacgtaataaatatactacagaattaatgataacaataaataaaaaccaaatatattttgtggttttgtagttaaaatttacatactgcacgagtccttattattagggatgattatctgaatacagagtacaattttctcaatcaatgtaaaagatggttttttttttctctaatttttcgtccctttttccctggatgtcccaatttataataggtgtatagggtagcagttatcttcaatgggatctaatcatttatgagtgcttatgaaacgtggacattctccacgttttatttttatgcacataaaataatatttaacaattacctaaccgctcttttatctttatccttaaacgattatactgactatgaaaagttgtttcttgctaaatacgagttgtccttctttatcgtctttataggaaaaaatgctaagtataaatatacttctccttccagtcttcatgtataccatggtggtattagcgagttgattacttcaatgtatagagggtaagatagatgaatgtaattattctttctacgtgcaaatatgtggatcaacaagttgcaagctctttctcccaagcatgtgggtcaataagttgcaagctcatactcccaagcatatgggtcaataagttgcaagctctttgttttctcgtcttgaacacttctattatatactctgtctatcccgaaatagatatactatcttgtcatgcatacctgttaatagttattattcttatctcgtttatgcttatgtggcagcgagtttgaatatttctatcaactataatttattgagacgagttatttaagtcgcatttaataatgccatttaatattataatcattgacctaattcatattcctcatgaagtacacatgttagcttttggttgatagccgaattacaggtataacaattgtctccgaaagagtaatttttaattaaaaaggactttttaaatatcttcaaggttataattgtatttttcccatttaaaatttgcatgcttaaaatttggcagttcaaaacttcgaggcacatcatttctcatttaatactctgaccattaattttttttgcatagttcacatccatttgatcatattacagttgatcgaatggtttccatcctttaggcatatatttgaagttgttccccatcttcgtcatttttcaacccacaaatttttttagcttcgaagaaatctcaaccaccttctaatctgactttgcatgccctctttgttcctcacattcttcttgtggatttcctctacttattctctttttcttcaaaatcatcacaatatccagcctttcaatcatcagaatcttcatcacaaagttcttttttacgacgaacatctcatcaaatcagtaagtggcatttctctttgttgatttttcttttgtgctttccattttaatttcttggtgtgtgtttttcatgtctgcattattttgctgcttatgtaatttgattttgagtgtttggatatttctagggctagaaaatttatgattatacgattcacatattttttaggttttcttcatgctctatttttccaggatttggggcattattttttaagcatgtcccattttatcccagaatatacagtcccataacccttaaaatatgtttgccctcaactttcttccatagaatttaagcccaaaacttgaagacctcaaaccattcttaaaataaat

SEQ ID NO: 168235 - DNA, 1097 bp, Cannabis sativa
gtcaagcatatttctgtcatgaactcattaacttgtatatcacatatcagctagtgtgtataacttggcgttcatcttctcgtctcgacagtatgctataatagttatatttttaatatttattttaatgtgcaaatcgatctctcggacatgttgttgctcgtagttctactgttctttatttggttcgtaccttttgcttaattatcatttggtgttatatgtacatgtatataattgtgtgtatataataatacatatataaatgtaatgttgctatgaaattgtactattcattttatgaaattaattgataaattagaattagggtttggtgctttcgtgcttcaaaactcatttaatatagataggtaagtatgtatatatatatggttactataagagtatctgatattgaaatgtgtctcataagatcttatggtgcttggcagctgcctgtattattttccaaactatatataatggccatcaagtgtcactaaagcgatgaaggttgaaatttacttttgtggttagtccaacaattgaatatgaacagtttttcacaatttcagatttttgttctataatttgcttattttagtttgttgttgtctttcatatatggctacgttttaaaaaatcaccttaatgagcggctcttcgacacctatttaatttgcttatttaagctgtttgtatatgcaattatataattcttaccgtcttataataaatggattaaatttatcatcatagttcataaacaagacagaagtattaaaattaaataagtaacacacaaaaaaaaattaaataagtaacacaaagagtttcttgggtcttcactagtggaacggaaatttgttgttaattagatatgtttttttttgtacataaatataaaaagtccgagttaaacttgcgaattcgcttaacttggaaaatatcaccagtataaaaaaaaaaaaaaaatatagttttaattagtcaggagtgaagccaccatgaaaaattagagggcaaactatattgtaaatttaagtgtcaaaaatttcaatgttttattaaattcataattaaaattaaaatacaga

SEQ ID NO: 168236 - DNA, 1402 bp, Cannabis sativa
gaaacatttcaaaaattagccttaagaacatgttttagcttgtataatttgtagatgatgcctccaagacctcttttatctgtaggtaagtaccatttctctaaaactttggctttgtagttactgttaagcatccaccaattaaaaaacttcaaaaggtttgacaccaacattacaaacatcattattttttattatgcagtaactacggtcagaaatatcatcccacttacaaatagcctttgtattggataaatgatcacaccagagttcactcacgaaaactctgtctagctttgaatggatcctatttcctacttcatgtttgttggtctaggtgaagctagaaccggagtacttaagctcttccacttgaccttgagccaaccaattttgagcatccagaacgtcaatagccgtgatttgtctcccccaactctgtcattataactgaacatagcattgaaatcgccaaaaacaagccaaggatgactcaaacatgcacccaaaaccaaccaacttttcccagagaattttactgaccgtagcagaattagctttcaaaataataaaaagttatataaaataattggtatataaaaatggtagcttattatattacatgacaacttattaatttcaaaaatatattttaaggttacctaaatgtattttaaattataatctaccataatataactttaaaataactaattaatcattaagatgtatacaaataagttttagaggtaaccgaaatgtctctcaaattatatgatataaaaataaagtgtttttatataaaggtaactaattagtttcttatcaaccctattagtaaccaaaaagttacttttaaaaatacaagaaaaaaaattaaaacaaaaaaacaaaaaaaatcataaaaagtaataaaacttcagctgtggttgacgtgatacaccagtaatagttgtaacgttactattgtaaattaggtacaaaaaatacatattgttgtaaactttactaagaacagaagaaacaaaattatagattgataaaagacaacatataagttcggcaaatacttctcttgatcattggagaaaagctcaggatattacttctctctcatctatattttttttaacaatttaggtgataggaatgagctttgggtcaaaccagtgttggaaaccatcaagattaatgttgatgcagcttcatttgagcaggaaaattcttacgggttcgggatggtggcccgtgaccatcttggttcctctattcacattcatgttgagtatcatggcggttactttccatctgaagtggttgaagccatgggcatcaaagaagcacttagttggatcaaggcaaaccattggaagggagctacgattgagagtgacagcatgct

SEQ ID NO: 168237 - DNA, 1015 bp, Cannabis sativa
aagaaatcacaagttgtaatatttaagttaagttattttgtttatatatataagaacatagagattggccggtggaaattgatacgcgtatcttcatggacggtccagatttaatcattatttatttttttatatttatattttggtcctctaaactttatataattatgatcagcagcgaagatcgcggaaaatctctctaaaagaaccttttttattttttaattaatttttcattaaataaaataattaaaattaattttgtgttcttgataattgtctaatcctaatccaccgccccaagtcccaacgagactttattgctttttttaattttaatttaattaattgttacttaaaaaactgatttgttattttaatattattatctaaattaattattatttaattaatctcacttttttttttctctttctctctcataaattttatttcattttatttttttattatttttttggttggaaatcttggtgacattgtcctaatgtgttgtttttatttatttatttcaaatttaattaattaattattttatgtcattaggggctctagtcttaattgacattaaataataatattaatgtctatttcaatttttgatgtggtacatgtacttttatttaagtaaaagggaattttaatttttcttcttataaatcatttttttttatatatataaataaaaagaaaagaaaagttttgagtgagatgagtataaggttatgactcaacttattagaatttgtttgatggaataattaattaggattttcttttaaataataattttcttatacgtagttttttgtccaaaaaacatttttttttagttatatatatatcatgttgttagttaggtattggtaattttaagcatttttctatggggtcttttcaatattatacctaaaattgattttatttataaaaatacctttaagaaaattatttgcacaaataccgattgccacgtcagcataaataccgaaat

SEQ ID NO: 168238 - DNA, 799 bp, Cannabis sativa
tctctctctctctctctcttatgacctctcttgaagaaaaactaaaccaaactcaacctaaagtcagactttccaacaagttttgaaggatatttggaataacaaaccaaaggtaaaaccctagactcttttcttcttaagttttcaaagctttggtttagttagaatatgtaaattttaagaaaaggttatgtctgaaccaaggattagcttcggttgatttctaggataaattgaagttgtttaaagtttgtgtaaggttaatttaatggctggttatgttgttgagaaagtttgagttcaagaactaaaacttgactcaataatggtggatttaggaattctgagctatacttatttttattgcttgaattatacatactaaacctcttttaggtgttttggatagtttcatgaggtttggagtcgatttggggtttgaatgagagttggtgagatactgaagcagaaaacggcagaccgtttctaaggaaatgatctatcagttttactggcagggacctagaaaaatagtctgttgtatttacaaaaataacctgtcgtatttacaaaaatagcatgccatttttcagacagcttttctaaagtctcattttttcgtgttttctcgatattaagagtatttctatgctatttattgttgggctttgtgccataaataaaactctatttcaatataatcttttctactcatttatcaacaaagaaacatattcatttttattacttatttaatgtgttatttagttcatgtgatcatttatttatttatttgatt

SEQ ID NO: 168239 - DNA, 704 bp, Cannabis sativa
cacaaatatataatttcaacttatcactgtttatttagttagttcatattttgatcaaaacaaaagtacttctctgtttttttggccatggaggattaccaaaactacatcattctcttccttctttggctagtgtccacaattgtggtccgagccatattcacatccaagagtagtagtaacaataagggtcgactcccaccaagcccatatggtctcccaatcataggacaccttcaccaccttggtcccttaccacaccaatctctccacaaactctcaaaccaatatggacccttaatgcatctttaccttggctctgtcccaactgtggttgcttcttcaccagaagtagccaaagagtttttcaaaactcatgaatccgccttctcaagtcgccctctcccgagcatcctaaacaccctttcttacccttcccctgacttgacctttgccccatacggtccttactggaaattcttgaagaaagtgtgcatgtctcaacttcttggtggcaaaacacttaatcttcttcttccagttaggactgatgagagaaagagattcttaacttcgattcttaagaaagctgagtcaaatgaatgtgttgatgttgggaaagagctgaaaaggcttaccaataatatcatatcgagaatgattatgagcaaaagatgtgctcataatgaaaatgaagctgatga

SEQ ID NO: 168240 - DNA, 914 bp, Cannabis sativa
ggtcgcgacacctgggttgaagacgaagaactttgaaggaggcggactgcgacgcccagtgaatggggccgcgactactgtgttccaaacccagaaagcccaaaaatctgccacacgaattcatgttcaaacccaacaaaactcacccaaaagcatgcacaaactcagagacaatagcaaaataagcatctaaggtaacaattctcaaccatcaaaataagctcaaacttgagctaaaatcataataatttccttaatcaaaaacttggtcacaaaaaccatattttcagctagttcataacaacaaccaatgtcaaaattagattaaacccaaggccacatctctaataacacatcaaaacattcctaaaaacaatatccatgaattatcaacacaactatacatataacatcaaaaccaaacaaattcccacatacatgcatacatgatcaaaaattgaaagtaaagcatgcttttcaagctacaacaaatctgaaaaaggttcatcaagaaaactttaggagcttaccacaaattaaagctcttaatcacaagagattctactccaaaacacctccaacttcaagaacaatcaacaaaattcaaactttcaagaagataggtgaaagaggagatggggggttcagtactgggctgtaggaaacaaatcagaaaatgcatctcataattatcaaatatcacattttgttgaaaatagaaaaatggtcaaaaagaccaaaatgtccctaaggtcacagaacaacatagtcatgaaacaacggtacaattatcatttaatcacatataacactcaaataaattcagattattcattcaataatagaatgccaaaataaaatctcaaaaatatattttggccctgaacccggttcagcccgaaatacccgattgt

SEQ ID NO: 168241 - DNA, 1340 bp, Cannabis sativa
aaaaaaaaaaaaaaaagaggggaacagagaaataattaaagaaaagacaaactgaaacttttcagaccccaaacctaaaaaggtctggtattcaataaagactataagataagagaatatatatataatatttatatattgaaagaattaaaatagggagtatatagtatgtgtatatataaatttatatataaaaaactggaaagaagctcaaggtttgaatttaagatttgtataaatttaaatattgttatccaaacatgacctagtcaagtacacacatgtccacacacacactcacaatccaacaaataccacagaataatcaataatttcaggttacgcgcgaaatcccaaaaatctaaaaccctttcagcaaaataaaaacattctctggaaaacgacgaatctttgaggcttaatctttctgaaggttttaattaataaataaatacacaaccaataagcactagcaccggttcggagtttttgatctgttttaaattctgaaaacgcaaagggaaattactcttgtggggaaaaaacaaagaaagtgagcagatatcaccattagattagatctacgcttcttggaatcaacattgaaatcttcttcatcatccacattcgactttaacggcaggttatagcaatcggaattcgagttaaggccaagtagaagcttatgcttcttctccttacgctcgtcgtcatcgtcgtcagcggcaataaattccggtgagtcaatgttagatgtccagtgagaagatcctgggttagagtgagggttttctatctgtcgttgtagctcttcttctctttgttgttgttgttgttgtctaataaagcgtttttggagatctatgagggaaggacggccctttttcttcttcttgtccaccttcgtcatcgtcgccgccgtcgtcatctccggtggatgatgcctcctcctcctcctccttctcagccctttgttctagtatctactttttctctattctctaaagtctagtggcactctattttattttattcatttttttttggctttttctaaaaaaataaatatataaataataataatacttttttttattaatacatttcaaaatatttttttataattttacaagggacaaatttaaatcgcaactaaaatatatatagaaactataaaagcaacctaaatcataaatttaaagaaaaaaaaaaatagtatatgagctaattttttttttttttaagaattacccgttgtaccatttattttggttgcaatttaggttgtctcattagttagtgtgtgggttttatgtagatttttgtaaaaatacaaaaaa

SEQ ID NO: 168242 - DNA, 1937 bp, Cannabis sativa
  modified_base (917)..(937): a, c, t, g, unknown or other
  modified_base (1030)..(1036): a, c, t, g, unknown or other
attattcccaaggacattgtcgttgggattaatttttattcccaacgacttaaaaagtcgttgttaataatcgtttttcccaacgaagtattcccaacgactttttaccaacgaaatgtcctcattaatgcgcaatactgacgaaaacatgagtttttaccaacgaaatttgtcctcagtaatgctcattttcttgtagtgtgaaagtattagtttgtgtggtcagtgtaaagatttttttgtatatgcaaattgtatgagtaaattaccacaaaagtgtagaattttactatatgatttagattttatatgccccaatataagaatatagattggattgtaatatgctatcacatgaaattaaaagatatataaattagattcatattgatattattaccacaggaaattgatgcaattgaagttaaattttttatatttttattttgtggttatttattatcttgttaattttagtttaattttattagttttaaacatcaaattttcaatcgtcaaataaaactaaaaattcaattacttggtacttaattacagtcctcgtaataacaatctcattttatcataattttcttattaattgctaattaatatttaatactacataacacaaattttaacatttaaaatataaaatacaaatattacttagaaaaaagaattccacccctcccccaacttaaatctcaggtcctttactaataaaatatgaataaaataaatttaaaatcttcttctcatcttatattttcactacaattttttttttacttttagtcacaacaaaatttgtgaataaaactgaaaaaattgtgactaattataaattatcattcttatactgtgactaaaaaagtctatagctatatataggtattagtcacaaaaattataannnnnnnnnnnnnnnnnnnnntttagtcacaatatttattgtaattaaaactaaattagtgacaacttaattctaaatactatattttagccacaagtaatattttgttgtgannnnnnntcacatttagtcacaaaaaagttatagtgtgactaaaaaattatcactaaaaataacaattaatttttgtagtatcttaagagaaacttctaatcttatatttagatatgaagccactactaatatttagaccaatggaaaaaaaaaatcaacaaagacactaaattatttttattaataatatataaaacccatattaaatatatcaataaaatataaaaagtatgatcaattacatattaataagacaaaaaaaaatatatatttattttgtttggaacctcctcctttgcccctatttcaccaccccacacataaaggttacattcaacactcactttgatctttcctagtctaggcatactccttagcaaggaaactcttgattcctcaactctagtaaatggagaagagatctctttccagtgtcttgaatttattattattattattatgtaaaactaatgctaaattttatgtaaatttaacataacttttagtatgcataaaacgtggcttacatacaataattataattacaccatcatatattagtgttcaattcaatgaaaatgagcttgaaaaatgtatatttaccacatttataacaccttactaaaaatgctctgctcttatatataaaaatgtatattactaatttttgtattgaacattttaacgtagaggagaggactagaacccctcctttgggccaacgtacgttctatataaaaattaattagttaaatattatcatgcaagtaagacaagaaccccaagtggaagaataatatatattaattaataggttaattagtaattttttctctgaactttgacatgtactagatcgtatccctaaacttttttagtcgttaaaaatttaaggacttttgtctaa

SEQ ID NO: 168243 - DNA, 775 bp, Cannabis sativa
tttcgaaaagaataaataaaatttgggtactacattgtaatctcgtgagatgcactgatatttcatctacttgttttgacgtttaaaagaatttttagtcctatttttttttttttttatatattagtatatattataattttttaaaatatcttataaaattttaaaaaattcaaaagaatttataatatactaaataatgtttaaacagtttatttcacacacgtataaaataaaatagtcgtacaacatattgtttgaactctgtttttaggatgttaaatttttttcaaattttttaaaattttaccgaacgtcttaaataattataatatacacgaccatgaaaaaaagaaattaactaaaaatttattttggataacaaaacaaattgaggtgtaatacattcctttaaaggaggtttattgtagaattttctataaaattatatccccaaacatatacttgtgacttatttattttgtacatatgaaataaataatttgaagataactttttatattgtaaattattcttttcaaagccactaagaggtgagagagggatagaaaaaaaggtgaagtcaagagttcaaacttagaaccttaaaactattaagctattacagattgtaaaataccattacgttacactaaaaaaaaaattattcattttaaattttataaaatatttttttttttttgagaatattttataaaatattttaaataattataacttatacaattactaaaaaaatttaaatttttttata

SEQ ID NO: 168244 - DNA, 556 bp, Cannabis sativa
  modified_base (197)..(198): a, c, t, g, unknown or other
  modified_base (251)..(261): a, c, t, g, unknown or other
tgagtgatttgtatgtgcatgaaaccatttctgttattgatctttgatgatcaattttgtaactctgagcaacattcttctaaataaagattcgacacaaggtggtttctctcggtctcagcagtggcgaatccaggcactacaaaaaagtttagtttagtcacaacaaaatttgtaattaattataaattatcatnnttatgttgtgactaaaagatttgtggctaaatattagtcacaaaaattacaannnnnnnnnnntaaatgtgtttttagtcacaacacttatatattgtgactaaaattaaattagtgacaacttgtagctaaatactatattttagtctcaaataagtttttgttgtaactaaaaatcacatttagtcacaaaaaatttatgttgtcactaaaagtagcagttttttgtagtgaggatttaaagttagagagagtagtattttttttgtaaggcgatggcagaagaaaatttaaaaagaaaaaacgatgttcttggtgggatttacactacaagaaaaccagcttttaccggcgcatt

SEQ ID NO: 168245 - DNA, 1073 bp, Cannabis sativa
  modified_base (762)..(766): a, c, t, g, unknown or other
ccattcattactttgaggtaatatcttaatgttataaatctattcgcacttgcatagtataaaattaaaagcttcccattgcatgaaattatttaatcttttacgtaacagcacaatttttttaattaataagaaggaagcgccagttgaccagttccaaggataaggaagaagaaaattgagactttttaaaagaccttctaatttattattgaaatgaataatggtaacatcctacaagtatgataaacttcaaaactattagaaatactaaaaacaaacaaacattaattagtaaaaaaatttaaaaaaaaaaaaaaaaagaaatggcaaggaagtcaacttggagaaagtctttgattatatagagctgtttgatttgttttgaacatttttcttgtattttattcgagctctttttgttttatgctcctgttctgactctctttggaatcccaagctatgtaatatttgtttttctttacttttcccaggttttaataaaggtaagatctcatactgttttgtaattaattatcatatctcacatatattttaattgaataattattacgaaaaaaatcggtatacattcacaagacgctacctcatagtagtattaaacactactagtaccttatatccaggacatatttgttagaattttttttcaattttaaccaaaaaaatataataatattacaaaaatacttccaactggccaaataaataaatttacaatccaaataaaaaaaattacannnnnaccacttacacacaccttcaaccacccaacaaccttcatctaatgcaaccttcggtcaaccacccaacaaccttcatcccatgcaaccttcggtcaaccacccaataacattcatcccatgcaaccttcggtcaaccacccagtaactttcatctggtgcaacattcaatcaaccacccagcaaccttcgcctgattgaaacctctatttgatgcaaccttcggccaatgtaggtgctaaaatctacaatgatcggaatgaacgtttgtgggcaccaacaacctgcgaaataaagacaaaggatgac

SEQ ID NO: 168246 - DNA, 1538 bp, Cannabis sativa
tcaatatgagatgtttgtgtcattttgcttttgtgagacttgagaattgtaagaagagaaaaaagagaaagactgaaacttttattgaatgaatgaattgaatgattacagaatgcttagaatttatagactaaactaagtccattacattaattaacagagtaaataagagtttaactattaactgacaacaaaaaactaaactatttatgagaaaattaaaattaaaatgcaaaatcaaatcaattaaaatctaatcatcaaacagtttataataacaagaaaaacaaatgcaaaacagtaatcgaagaaaacaaagatgaacatgattaaaatcaaaaacaatcaaagcaataaacaacaaaatcaacacaaaaacatatactagttcaagtctaatagatttatgtgatctatagctctattcgagttctagaacatcacaaaatcttctttattgattgagcaagaacaggtacaatatagtcgagaaagacctctattggattctcttaaagtgtttcaaatttcacactcttatcgaataatcttcttcatctacaaatattcttcatacataacccaaactcaatctctctcttttctttgtacctctctctctacctctcaatctctttctttctcaaacttaaagactcctcttgaaactcatcaatcaagcgtattgaaatgataagtgttggtggtatttatagtctcgagatcaagattctaagatagtagatgcaaccgttaagttgttaagttagttacgacttaacaaacttaacaaacgcttcgtaacaaaatctccacgccaacacaagaagaggtgctttcggaagagacacactttctggacaacggacagaattgaatgctgaaggggcttctagatatgaaagacgcagctggagatgactatctagaacacccttctaggaggaacaactagccaactgaaactccttttcagaggaaggttggctctctagaagactacactcgtagtggacacgatagttatccatgaacattcatttgaatggcaactattattctacgagacttcttttgaatggacaagttagttatccgggaacatacttctgagaaacaactaacattccattactgggacagtcttatggagattttttatttagaggaactacaccacaaaccccacctagttaattcaaattaaaaaatattgacagcgatgaagaaagaacgcatctatcatagttagtgttccaaaaatctccgtttactaatttctgagattgatcaagtccaagcaaatgcttgaacgtgtttactgttaagaccttagtcccaacatcatcagaattatcttccgttttgaccttctctacatcaaccagtccttcttcaatcttctccctaatccagttgagtcttatgtctatatgtttactcttttcatgataaactagaatcttgcaaagatgaatggatgactgactatccgagtacacaatcactccacctttatttgtttcaattcaaataga

SEQ ID NO: 168247 - DNA, 609 bp, Cannabis sativa
ccccataggagaaacgctagctactttggtttccaacttccctctttttgccttggagtctttcttcactgccacctttcttctattttcttttgcaatgtttttcgaacagtttcctaccacaaagggcgtagatccatccaaaatgtgtgcttcttgtgcataggagactggtatgctatagagagattgatcctgaatttctttggatagaaccgtggccgatttcttcagcttcccgtaacttaagtctccatagtctttcacaatttgacgtttcccccgacttccatcatcactctacccctgagattcctctctacctatgtcccctgccttcaaaccagaatcccttgataaataaactgacccttcttctaagcactgctgtatcttgcttttattagcatccctgctaaccgcccctatcatgccatctattttgccctctcccgtagaaataaaagaaggagaagaagaaacagtattggcccttccaatggtggttgtcgattgctgtatagtatcttcgagagcattattcgttcccatcccatttcgatcaccttgtatgccttctcagaatccattgccaaccttcaaccattt

SEQ ID NO: 168248 - DNA, 1940 bp, Cannabis sativa
catataggacttgggtttagttataccactttgggatctggtacgcattgtgtgagtgcgagttgctataggagctggttgttgagatactggtagtgtttcggttggttgctgagtgtcaggtgaaggttcggatgttgggataataggggcagggacagcaggtggagtaatggttggtgtagtgggttgaatggaagcagaaatagagggaatattgagttgaggattaggcatttggtgaagttgctcagtgacaaaagaccccgagtgtgtcacaggaggattaatcaagggaggagcaatattatcatttctggaaaatgaaaatgtagcagtaggtagattgacaattggttcagattgtaccttagaagctgaagcagaggatattgcaggaaaagtggtttcatcgaagatgacatgcctggcaatgaacaaccttccttgggagttttcacaaagatatcctttgtgtgcagaggagtagccaagaaacacacactgttaagatcgaaattccattttatgcttattatatggcctcaaatgtgggtaacatgcacacccaaatggtcgaaggatagagtaatctggagtttgaccaagtaagcattctaaaggtgattgctgctgcaaaacttgagttggaagcctgttgatgagaaaagctgctgtatgaaaggcatgccaccagtaggagaagtctaaccccgattgtgcaagaagtgtcaatcccatttctgtaatgtggcgatgtttacgctctgctcgaccattttgttcacttgtttttggacaaggatgagtgaatgcaatgccttgatctgagagaaacttagcaaaaggccgatactcccctccccaatctgcctgcactcttttgataggaaggttaaattgcttctcaaccatacttttgaatttgatgaacatttcaaaagcttgggatttaagggtaataggatatatccaagtaaacctgctatggtcatcaagaaaatgaacatagtaggagtacccatctttggatttaatatgggaggggccccataaatctgtgtgaatgagttccaaaggttgggaagctctggatgtggatattgagaaaggtattttgtgacttttacccaattgacaagccttacaaaattccaattgatgtagagaataccagatgttgaaacttgctgtaagattttgcttaaaacttggttagagggatgcccaagtttttgatgccaagtattaacattagaatgcttgtgagaaagataggcagtagaacaactatgtgaagaatcaacatttttattacttgagtcaggattacaagtaggagttgtattaataaggctactgccatcttgattagtacatatcatagcagtaggattacaagcataaaagactggttttgtgttcttgacagcatctggttctcgagtttgatcagcaagcacatacaatccttctttaagcattcccttcaagagcaccttcccattttgtttgtccttgacaaagcaacatgttttgtggaattcaagaaacacattattgtcacgagttagttgagaaacactaactaattttttttgtcatagaaggaacatgaagaatggaatgtagattaattggaattgaataacttgtaggtaaagaactggaaccaatatgggagatagataatttcttaccgtctcctatagccacaccttcagcaccattgtaaggaacaaccatatcaagattgtctgtaccaaaggcaatgtggtttgtggcactagtatcaacacaccagccgagtcatccccaaaatcaggtaagaaaaatgtagcacacgcttgcggatcataggcaaattcatgttcagtgacaaaagcacgaggaggaggaggagtggaattgccaggaggattggtggtgcttgattttga

SEQ ID NO: 168249 - DNA, 889 bp, Cannabis sativa
ataaatcaattaaaattctcaaataagttaattgatctaaaataagactttgtcatatttgaaaaatttcactaagtttgggcaaatttgagaagaaaatagaaataatggtttatttattgattaagagattaataaatatatttaaatttaattttttataattattaaatagataaaatcgatatttaaataaatagattagataaatgataaatttagaaaacgattcaattatttttttaaatgaaataaaaaagcaaaaatcaaagtctatggacctatatttccaattcggccatggagttgattttgggtccattattccttttcctggaccattttataacgcccaagctttaagcctttattagatcctttcttccacggactcataacttttacacacgggtacgttatttggctacttcttgaaataacgagcatcctactagtttaggcatgtaactgtgtttcttaattattgtactaacttttagtaatcaaagggtttaatataaaatcatatttaattaaaactttataataattaaaatacttccataaatttacattgtaaatgcaaactatttacaaaacctgtgatcccgaaatctattttttaaatgtgaacataatgtaatataacaaaagtgtcgcccagtgattaacaaaattgaacctgtgttgtcccgaagatccgaacactccaaatctaaccatccagatacgtacaatcttaactaatctccaatattcactgctgttctattctggccttttacctgcacatgaaacatatctaatatatgtgagtcgacaaactcaataagaaaagtataaaatataaacgtgtaacctaacttgcaattaggcgcccatacaccta

SEQ ID NO: 168250 - DNA, 1170 bp, Cannabis sativa
gatttgggcaggaaagcgaagggttgaggcctcggacattgctttctcaatccaagcaggcttagcagttctgggggataggagcttaaagatgaggcagaaggcgttggggtcagaagaggaagacagagagatgtggtagaagtcatggatgaggctttcttcttcagaaaggggagtgagaatgttgggattggttgaggaggaagccattgaaggataagtggaggatagggcaaaagagaaggtgagagaaggagaggataacgatcgaacataacaaacagagaataaatagacaaagggaaggaaagaagagcgtagaaaatacctggagatgagggggcacgtcaggtgatgagggaggttgtgaatcatcgcttcgattcctgaaatggcaatctgcagaggcggaggagaaatgatgacccaggagtaaatgttggagaagatagaaaagatggtttgggtggatttaagaggctttacaaaggaatagaggagaagaagggtctgatcaaacattaaatgcccaaaaaagggtgccgtcagaattaaatgcaactgggaaagagagatcgcattaaataaatgctgagcacgaaagatacgggggttatttgtaatgattaaggttgacatggagaagttaaaggagaaattaatgcaaagaaagctgaagaaaaacggagaagagggggaaagagaagaacacgaagacaagatgctcacttactgtaccagagactaaacctggaagaagcttcaagaagaagaataatcatttatctccccttttgtattgtagaaattacggtatatatgggaaaattttaaaagttgcataattaaataaagttaaagggttatggattttttttttttgttttttttacatttatatagatttttttatgccatatttttataagaaaaaaaaagatggaaatcctatatttgtaaacaataataagttttgccaaaaaaattaccggaaaaactattggtgccggaaaagtcatcgttgtcagaatagtcaccgtcctcggaaaaagttactgaaaaagtcactaaaaatagatgtctcaaatataaacaaaaatagaaccggttataattgaaatataaccgattctgtaacataaagaataaaaacaaataaaacaaaat

SEQ ID NO: 168251 - DNA, 720 bp, Cannabis sativa
  modified_base (694)..(695): a, c, t, g, unknown or other
tcatatacagtaccaattcactccataccgcaactgtactaatattggtagtatacaaatcacataatacaacatgcatataatacacatgcatatatacgtattcacattttatactaatcttatctcatttttttaattcaagtgtgtcggtcaacctgaatggaaattcatgtgctcaacggaggccttatgtcataatcatacaagtcgggtaaacaacttgctaaaaccttttcggggatctagactcaaaactagaagtttttctattgataaaagtatggaaatccctaaatatcgagaaaacgcgaagaaataagactggcaaaatttcctgaaaaaatggcatgccattttataaaaatggcagactgtttttctgggtaatctgccagtaaaaatagtatactgtttctacataaacagtctaccattttctgctgcagaaaaatacaaagtctcaaacataatccaaaataaccccaatcttcaaaccaagctccagaatacatatacaaggttcaataaacatataccaagcagtaaaaccatatataacacagaatttcacattccaccattgttgagccaagttttagttaaactcaaacttgctcaacaactaaactaaccaacaattcctacccatataaatgataattttcttcgagtttggcttaatagagataanngattgaggcctcatttcagtaatta

SEQ ID NO: 168252 - DNA, 594 bp, Cannabis sativa
taatattaaaatatataatttcaacatatatgtgatgtgctgcaaaataaaaatgtgatgacatgtcctatttataatagaattgaatggcaatttattagtttctagaattaattgttttcttataattaattcaaatgagtgtgctgctaaaattcttcataattgctaattgtgttgtatataaagcgtgacattttatcataattgttcataatttaacgtttacctgctttcatattcataccacattcatctttatgctttgatataataaagatattttttccttaaatatattatttgtaatcaatagaaaataaaaatggagaaaagttgtacatttagcaaaaacagattatagaaacaaaaaacaaaaatccagctattttgggtcaaaattgctcccttgtgtagaaatatatggttgtaaatggagatatttttatttgaaagattaaggtctttctctattcacattcacatgaagagaaaacgagtttggtggcaaaagagtaataaatagtaaaaagagcacttcaaacaatttctcacttttctttttaaaaaaaaaaacaaacaatttctcatttt

SEQ ID NO: 168253 - DNA, 582 bp, Cannabis sativa
ctaagaaacttaacagtaatcaaaagaatatatataatcaagattcggctaatatttaatttacttttacttaatgaagttatcgctatatacaattttctttttttctcttttttttttttttttttgagaaaatattgttcattcaatttttcgttttaacattattttcattttattactgataatattgaaatgaaaactcttaaaaattgaagtaggagttgggcatactcatccactttctctataattttgactttatcatttgagagagattttattttattgaaaaaggaaaattcctccttgtcgttgtagagtactctatcgtagatgtagttatattttggcacatgcatctcaaacaatttaacattttttcttatgaattattagatccaattcaattagcacttagatttgaaaatactataaagatatcattcttataaatttaatgtaactaaaaacttaaaataactaaaacaaaaatattattaattaataaaataaaacaaaatatgaaaacaaacacacaaaccaacctaagccttacaaattcaaccaaaaaaaaaaaaa

SEQ ID NO: 168254 - DNA, 763 bp, Cannabis sativa
ttctgttaataaagcacaaagccataagtaataaagacaattcatagagaaattagacaatatattaattaatcttctagacaaatattttatcctttgttcttatgtgaatttaattttgattttggaaaaaaacattggtattgtgaatatagggcacgtttggagtgtttgataagaggtttggattaaaatattttattttatcctatgtttggtacattctttggatatagaagaattggacaatataatccaatcaattaggttagtcccataaggaggggacaatataatccatcaagaggatgggttaaaatagtcataaccattattattattattattataaaatagtcatatttttttttgtatttttatagtccattttagtatgtgtttttagtaggttttgatttatttttgtttaggttcacacttattttctttttattttaggtggtcaaatatatcatgtgggttaaaataagagaaaatatgctttataatatgaattttatggatttagcatgaattttggagttacagtataccatgggtgaaaaattctaagttttggatactgaacacgctccgtttgtgactgaaataaagtttgaaacttcaagccagttttttactatgattcattcacttttaggaaaatatttctgaatgaaagttctagatctctattttatctttccaaaacatcttgaatcgtccaattctaagctatatcgagagagttatgactaaaata

SEQ ID NO: 168255 - DNA, 596 bp, Cannabis sativa
agggtagttggagctccatatgtacatttatgaaattgttaataatattggtgtctttttgtttatgatatcttcataagtcactccttcattaaatatatttatatatatatatctgttttccatttaatttatattaattgtcttgattagtaacttaagataaggccagaaagaatgtaggctgggtagagatttaacttatattgatcaaatgttcttttcaaatcaatttgtagatgtattttatattatttttatatgaagagcttttgtcgttgtgtagttagtgctgtggtaggtagagatcataagtttgtttaagataattaaagaaatagagaatgctataatgttggtttagtttttgtcaatcatatatcaatttgtttaattagagtgagaatgaaatgccaagatgacgattatttactactttattattattattttgagaaaaatatgactcattaaaactcgctacaaaaaactgcgacttttagtgacaacattttagtcacgacataaatttttagtgactaaatgtaacttttaatcacaacaaaaagttaattgtgactaaaacatagtattta

SEQ ID NO: 168256 - DNA, 896 bp, Cannabis sativa
  modified_base (715)..(716): a, c, t, g, unknown or other
attaaaactcccctaacatgattttagtggcttaaataaaaaattaatgacatcaaatcatcatgctagctacatgaacggctactatagttcaacatatatagtatatatattttctaagggtatcatgtatacatttaacaagtaatttctaaggggttatatggccaaaaaaacatgacacgtcatataaaattctaattaaaaagtgttattagcagtatcattaactattatatattattattattatcctgaaattaaattatatatatttgaataattagttataaaatatatatattgacttcttgaagttattacttttcaatataatgttagtggttacaattagtttctttagttttttaaattaattgggacctcacaagtcacaatgctatatatatacacctgcattggatacgtcttttgtttttgtttttttttttttaacttttttttataacaggattctttaaaatatggaagtaattatttagtaattaacaatcataatttatgattccaattactataaattattaaataattatacaaaaactaattatatacatatagagagtaacaaataataaataatatacatactctaagagcaaactcacaaacaaattattttaatggctaattgggatttttttctcccgaactttaacatgtataaaatcataccccctaaacttttaaggtnnttaaaaatgctcctgaactattgagattgttgaatttaaggacttttgttcaattttagtaaaaaaattctaacatatatgaaaatttaatggacataatttagtccatatcaaagttcgaggggcatgatttggtagatttcaaaatctggggagcatagtttagtatataaataatca

SEQ ID NO: 168257 - DNA, 535 bp, Cannabis sativa
cccacacgaaggaagccatccagaggagactacccatcaccctggaaaagaaccttagggatcgcaaagaactaatatcactgaaacaccatgttctgagaagaacaatggaaatttcattcaaactgaagaatagatcccagagaggcaaagtgaagacgcctatgatcccatcaaatatgttccacttgtggaattggaaaataggtaactattgacaatgtctggctgaatctaaccagagaaacgctgagttggaacgagaggctgcggtagtgaaggctgcacagggtaacactccttaaactcaacgtgatccatctataaggagaccacgaggaagatctcgaggttccaggactaagaggcaagaaaataatcaaggaaatcacacaaatgctcacgaagaataacctaggactacgagggatattctaatgaatagagaaagtcaatctaatactggcaatatgagaaatcaggagcatcgacgtgatgttccaggaacttcccattgttaggctatttttagcct

SEQ ID NO: 168258 - DNA, 665 bp, Cannabis sativa
aaaaaaaaaaaaaaaattaaacgtgcatcaatgtcactaaatctcacaatcattacaaattgagtgtgggtaaagacccacttaagcacattatgggcgacaaaattacaattcctactaataaaaaaaattacaagtagtaaaatatcgagatgattaacaaattcacaaaacaataacgaataaccagtaatacagtgaacaatccaagaatgctaagtggagagaatcaacatattttttatttatactttattatgccaaactttatgtgggttttagtagatttcaattttgctactttactaaaattcatctttctttttacaaatatcatattttaattctaactctataaatactaaatctatctatttaataattataattaattatcaaataaaattattatttaacttatttattgattagactttacaaagtctcttaattaataaacaaatcataaatccttttttcttctcaaatagcctttcttaatgaaaatttacaaacattttattcaaaattctaattgattaattaaaatcatttaattgagtctacaagataatattatctcaacataagtagtttaaaatttatcaagtaaattctctaacttattaattcctcatgaccccactatagatttggaattgcac

SEQ ID NO: 168259 - DNA, 1215 bp, Cannabis sativa
ggtggttacaacgaccaaggcatggccatcttacgagaaaacccgtcgttcaaaaatttcatctcctctaacgcaagtggtttcgttttctcatcagcctcggtattgctcacatttctatcagtgctctacggtaccgtttttaaaagacaatttcgaaactcaacctccttttatttcatggtcattgtcatttccctaactatcggatccattgcttcgtcaataacggctttcatgtactctatgcaagccacaatattgaattctttctggatacttttttttgaaaaagaacctcagttcggatattagcaccaaaagagagtgggattcacatggggaaatccctcccctttacagttcaaagaaccgccctgagaatgtctagcattcttagcaagttcgtcaacaaaagtgatagcacatgtgttggtgctctgatttacacatgtgttgtttttttatttgggatatagaagaagatcctacatattacgtaggtcggtgctcttaaatattaatatcttgaatgaattatgtggagaaaatttcaatactttggagtaataattttagtgatactaattgttttgaaatactaattttggagtgaaaaaacttattacattcctcaattacatctttaatactcattccaacgttcttgttgttcccatgttctttaatttctttaatactccggctttttcattgccttgtctcttttattaattgatcaactcctttaaaagagtttgcacttgacagtcaatttgcttcatcctcctcttcaacttagttggcacaaatctgcatatatagaaatgagatgtgtactcttggtgttggtccaatccacataaatgaatctttgcctgaattaatattattattggattgatcatcaaaacactacttatatggtatatatttaaataattaatctcttgatgaggtataaaaatattgcacttgatttgtatgtaatgttaatatgtgtgattaatttttctttcataaacatgtgtagctacacacttgattagggttagatggatattgtttgatattgctttatggtattaatatgatttatttttctctcagattctatgtattctatttcattcgtgcttaactacttttaattgtctgatcaccaattaactgtctataattttgatgcgagatctgagaagtgagtgtcaatta

SEQ ID NO: 168260 - DNA, 1009 bp, Cannabis sativa
tttatctatggatcagatttggacttgattattttactagtgtatgtcgatgacatactagtaactggacctaattcagcccttatttcaaagttggttgctgatctcaaccaatcgtttgcattaaaagatcttggctcgattcattattttcttggcattgaaatttatagagactcgggcggtatgtatctctctcaaagcaaatacattgctgatttactcactagattgcagcttgatggagtgaagagttgtcccaatcccgctagctctactcaaaagttatctctaaatgatggtgaaccatttgaggatcctacactatatagaagtacacttggtgccctccaatacctcactttaactcgacccgatgtcgcctttatcattaacaagctcagtcaattcattcacacacctacggttactcattgggctgcttgcaaaagattactccggtatcttaaagggaccataacagatggcttgcttctaagaccagctgcttcgatggagatttctgcatattccgatgccgattgggctagtgctatagatgacagaaaatccactggaggttatgttgtttttcttgggggaaaccttgtctcatggtctgcaaaaaagcaaaatgttgttgcaaggtcaagtactgaaagtgagtttagaagtttggccaacactgctgctgaaataaggtggctggttcatttgctctctgaattacagatctctccctctcatccaccagtcatatgggttgataatcaaggagctgctgctctcgcagctaacccaatctttcatgcacggtccaaacatatcgagatcgatctccattttgttcgagatcaaattatggcaaaggagctttcggttcgctatgttccagctgttgatcaagtggctgattctcttaccaaagcactctccactgaccggtttctatacctcaaagacaaacttaaaatggctgcaaccccttttcgtttgaggggggatatta

SEQ ID NO: 168261 - DNA, 527 bp, Cannabis sativa
tctcaaaaattgattgatcactcaagcccaacacctcactttgctcccactctaatgcagtttcttcaaaattctcaaattggacttaaaagttaaaaggtgcaaatctatttcgggccttgagcacatgtatcgttcaactttgggccttgagtgaaaaagggcttaaaaaagtccagttagtctaatgggccacaatgccctccatttgtgggccaaatttcaacaaagggccacaacttcaattgacactttggtttagccttgtccttttcctccgttgaagggtcattattttctgaccaaacaacccaaatctggattgtggcccaagggaatccacttgcagctggtctcatccaaatggtgcgtaattaaatataaaccacgtattatcgttatatagtttattaatccacttttctatatttatgtattttgtaggcagttttggtccaattagttatttatattagatgatttttgaaggtagtctcaagttattttgtctaaattttcgagataat

SEQ ID NO: 168262 - DNA, 752 bp, Cannabis sativa
tcgggggtttggggtttggggtcgagtttgaggctggggtcggggtctagtttagggttgggtttggggtccgggtctagtccaaattattgataaaaataattagatgaaaaacaaaccaaataatcaatcacctaattcttaaatcgtttgacataaaaattaaaataaaatcagatgaaaaagattgcacagttaaccttaagaatatctatattctgtttcatccaccgctcagaagacacaacagtagaaactattacagcaagttcaaccttgtagcttgagcactcaactattatgtgaggtacgtaactggactactaacaaccatttcagtcacaaaaattttgttatttccaaccattaacagcggtttaatggcaatccattgaagaacaaaaaagaaccaataacgaaacaaacaaaataaaaccatgtcatatagacaagactaaaaaactcaaaaccatatcacacagacaaactaaaacactcaaaattatgttacaaaaacaaaattaaaacactcaaaagcatgtcacatagacaagactaattgcagtagaaaaaaatgattgatagtagcagataacaacccaagtcaagccgcaccaagcccaaaagaggtcagcgggcctggccagagaaataagataaccttcgatagctataaatttaaaaacgaaaaatcctagtgcatgtttggcatcataactaaaaaattgtttttttgtttttaaaaacagaaa

SEQ ID NO: 168263 - DNA, 1298 bp, Cannabis sativa
  modified_base (1229)..(1242): a, c, t, g, unknown or other
  modified_base (1269)..(1270): a, c, t, g, unknown or other
ctctctctctctctctctctctctattgcctgtgcacgcaccaccctctctcccctcgttctctcttcctcccatctccagtcgctgtgttcttaaacaagtaccatgacggaggtccctgccccccgaacatcccacccctcactttattctctcttgcctgcgcactcaccaagtccaacaccggaaggagaagatgcatcagcaaccattctcacttcctcctttctccgaccgtttgcaccatgatggaggtccttgcctacataaacttcaccctaaatcttttctctctcttgtttgtgcacacaccaagatcgaaaggagattaaaaatctcaaatctattcatttgaagctgatgaaccccaaaaactaacctacagtgtcagatctcccagatcatcaatgacatatgttcataatttcattttcttttttcttatttattaattttctcattttggtattttatttgattttggtaagatgtttatgaagagaatcaggtagatcttattttctaagtctgagaataaggcagagagaattgggtagaatcgagattgttttctgggcgatctgagattgcttttggatttaatttttattttgtgttttttaggttgatttggatctaataaatgaaatggttgttgtggtgtggttgcaatggtagtgggtagtggtggttgtgtggtgacgatgttgttggtataaagaatgaagacgaagaagaagaaatagaatatggaaaaagaaaaagaaaaggaagaaagaaaaagggaaaaaaagaattttttttttttaatttgtaaaatgatttatgtttatttttaattttttaaaaaactatttatgtggaccaataaaattgtgctacgcgtatactgtgtctacgtagacagtccaacttgacagttaacagctaaaaatagatggaaatgatgaattactaacaaaacgtgagtttaggacattttattgccaaaaagagagatgtaaaagtaaattgatagcaaggtgaaacttttagggattttgccgtaattagctaaaaaacaaaaaatattcgaaagagtttgtatagtacatgttaatccgaaaactttccatggtgatgtggacatcaatttttgacacatggcatgaaggatgacatcacggagtcgagtaaacttgagtcatagcggtcaacctgggaggggatgttggaaatattttaccagnnnnnnnnnnnnnnaccaagtatgtttgattaacatcctannatgaattctaaaacaataaaaataaaca

SEQ ID NO: 168264 - DNA, 1603 bp, Cannabis sativa
atgttttctcatgcatgatcttataaatgatttagcaatgtttgtatctggtgagttttgtttgatgatgaataatatcggtaattgttctcacaaggttcgtcatttttcgcacatacaatgggcaaaagtcaatgaccctaaggaatttgaggagttatttaaagctaagtgcttgcacaccatattgtgggaagaaggatcaatgaatgattgtctatagttgttgatgacaagaaaatataggtaggtattactcttttctcttctcttctcttctgtcctacttgtttaaaagatttattcaatattgaatcaaagtcttcaaagtcccttattaaatatttgttgaattactataaatcatatcaatggtacattgctgcatttaattctttgttttgcaatattaatcgtacttactgatgagaatgttgagtagtttttcaaccaagtctagaatggtttatcgtatttaatgatttaattccgattatatttaaatgtttgcatattaactacatattaactctacagaggtaactaattctgtcatttgacttaagctgttccaaaaagggtgttcgatctcttaatttgcttaattacttgttgtaatgtaatcaataccaaatacaattttgattggttgatgaaaataaccatgtaatgtacaagcaagattttgattaatctatatgtattattattattattattacttacagatttagatattgattatctcttatcagaggacattaattagttatatatatgtgtgatgatgagatgtgtaattccaacctcacattttcttatgattgaaatttcttttgtgctactttgtaactaaaacaataattgcttggaactatttttgattgagtcaaattgtgattttagaaaaagactactcatcagtcagttatggcagctgaatgaatattcaaactcatcaatcaattactccaaagcaatggacccattaattgttgtattattattattattaatcaaattttgctacacaaatattttactcttaattacattaatcctttctgaggtgtcactcactgtgtagcactaaagatttgaaccacacttgaaatattaaggttaagtttagttaaagatctactttacaagaaagaaagatttccatgaattatggctttgatgaatgatgatatatattaattacaatcaacgaatttttttgcttttactatatctataacaacagttaaaattgtgataacgttgatcccaggatatggtgttcattattgacctctaaattttataattcaaaatcactactacaacacaacacaacacaacataacataacactgctactcaaacattgtttgctacaatttctgttagttcttctctgttttacaattactatttgtttgaatatctgatctgatggctgctgaattggttggaggagcgcttctctctgctttccttgctccgttggtggaaaagttagcttctgagatgaaggacttcttcaaagggaaagatgccattctcaagctgctgaaggagttgaaaactttactgtcctctgctgatctgctgctca

SEQ ID NO: 168265 - DNA, 509 bp, Cannabis sativa
ctgataccatgttaaacttcttagccattgcagagattcaataagaaagaaagaaacagagaaagaatgtaaagacagtgaaagagatgagaaagagagagaaagagtaatctcattgattgtaatagagctgtacaagcatatatataaagagactaaagaagacaagagactcaataacagaattgagtaacaaacttctaacagactctttaactaactgaaaccaacacagctaaccaccactcatctgcataacagaattaaccaacttcagttgtcttaacagtccccctcaaacttagaattgaggcatcctcaattgtaagtttggctctgaaattgtgaaacctttggctggaaattgcctttgtaagcccatctgcaatttgttctgctgctggaatgtgatgcacagtgacaactaaggcattaccttgcaggattaaaaagaaaaaagataaataaatcattagcaacaatttttttttttttttgtttctgatgaa

SEQ ID NO: 168266 - DNA, 1130 bp, Cannabis sativa
  modified_base (1084)..(1104): a, c, t, g, unknown or other
aattgttttatgctccttggtgttggggaaacacatttagacaagtttactttagtagtttgagagtagagacttgcgccatctttttgtgccaaaagattatacaagttggccatgccatggaaaatttccttcttgtgcaatcttgagtttatgttcaagtttaggcttttatgcataaatgagtcaagttcttgttggtttccttattagattaaggtctcttggatggaaacccttgcgcagttgcattaactttaggttgggcacccttgggtgtgggtccctacataaaatggttggtttgtgttttctactgcaaagaagaatactttttaggtagaaaagtaactcttatgatgaaaagacctcaagtgttgctgagctcaaaggtcaatttcttcaccttgagggtcaagtggcagcctcagaagcaaaggtcattgtggatgtcactatttatgagggctactatttcgatgtcgtttcaactcatggttggccaatggtggatcaattttaactgggcaacctttgataaaaactaggttggtttcttggctagtgaatgtgagcgacataccgatgaggctactctttgcgatatcaaatttaacttgaattgtgttatctcagatgttagagatgctacgggggtcaaaggctataaccctgagcatctgaacatacatgagctctcaaacatgcaccaaagatgactacaacacatatgaaagagcttttgcaaaactatatacttgctagttttttcaaggatgttgtcttaaccttttttttattagcatttagctttagtgtattactcgaccatcctgagtggcctttcagtgtagatatgccgtagtagaaatgtgattagaacttgttccaatttaatcagagattaatccaatctaattagactttgttctaatgttttttttttttatgtttctactttatccgtgacggaatgacctctaacacttgcacagtatttaatgtagaaattcgatcactgggagtaacatcaacattttcttaatgtttaattaccatgaaagtgttgggttttatgccttannnnnnnnnnnnnnnnnnnnnatcagatttacttattaatataggtc

SEQ ID NO: 168267 - DNA, 1155 bp, Cannabis sativa
tatttcagataactgattttggtaatattggtagttttgttttctaagtaataaggttttcatgttttgtttcttgaagaactttaccaccaaatgcttgcaagagctttagctcatcacttcaaagctaagctgctgctgttggatgttaatgccttttcgctaaaggtaaactacagcttccttatttttcatgaacatgaatttttatacagtaatactaatgttagattactcttaattccttacagatgcaaagcaagtatggttgtgccaaaagagaagcagtaagctttttcattttgaataaattatgattacaaactgagcttctcttaagtggaaatgttcctcaccatcactctctatcttcttttgtagtctctcaatcgttccatctcagaaaccgcgatggaacgcgtgtctaatttgttcggttccttctcaattcttccttcaagtggagacactagaggtatgaaaagtgaataaatgtgttctggttgtgttcaatttcaaattctggttcatttatggttttcataggattttgaataatgattcccaatggctgaataagaagtcacatccccatatgaaacaagagcttgttattggttctttctcattcatggttagcttttattctgatacaaatgtcttcttacaggaactttacaacgacagaacagtggtatggatgccaaatataggtatggcaatggacattgtttcttctccattgttcattatagcaagagccatataggttgaggatcataccatttactaacttgttgcatttgcaggaatagtgaaggttcaaatactccaacacttcgcaaaagcggctcaagtaactctgatatgagtagcatggcttctaaatattcctcttcaagctcaggtacttcttaatatgtttcgaaaagacataggtgtttgttcttcctttccttcccttgtaataaagctatgtatatgaataaattgataagtttaatgccttttctcagctcccttgaagcacatgagtagcagctggtgttttgatgagaaagacttcattcagtcactttacaaggtaagaaatgtgtgaaaatcctagttagttgaatgtttcctttgattatctcaaaatggatttaacaagat

SEQ ID NO: 168268 - DNA, 553 bp, Cannabis sativa
tcgttaacactatacatgtcaaattttaaatcatatacaaaaaatatctatataaatttggaataccaccaacaactataataatatatcaataatcgcatatccaacaacaaccaataataatattattgaaatttattttactaagatattattcactaatcatgtatgttaatataacatttgatttatatgatctaacattctaatctaagtatgcttttacataaaataatgaattatacacataaaagtttaagattatcatattaggatcacaacagaatatcatatctccttccgttctaatactataacctttgattctttcctgtaacaatgtataatcaagtgtagaacatgaatctattctcgaagttgtatattgagctctacacaatctttcacaattccataactatcgtcttgataagtgtagattcaggggcggatccactcattatgttagagtggccatggccccccctcaaattctcaagaaatagatgtacatatttaagtgtatataaaataaatgtaaataattaatata

SEQ ID NO: 168269 - DNA, 1051 bp, Cannabis sativa
ttcttcccttttacctgagtaggcctaacctgcttcttcgaagagttgactgcgggagttgtgacaacgtcactattcctcttctgccggatgatgggagattcgttgcagttctagtcttgggtttgcgattgagaactggagcttgcttcaggaaattcatttctgcgtagataaaaatgttaagataagtataaatctatgttatgttatactacggatatatgcgatgttttacctgatgttggtcgagaagtttgcttgaatagacgcttgtctattctctctctttgtttcttagaaggctccttgtacactggttcctgatgaaggctggcgtcctcggggattagcttatgttctcccaactttacagttgtgctcagcaatcgccaatcacaatcttaaataggtaggttaccgagaacctcatcgacctctttaggggtgagatccaaagcaggacaagctgatctatctgcgatcaatgagaagtaaacattaacgacttcataaggtaacacaaatataaactgagtattaagatatgcgatgtactaggacgacggttgaaatctgtcctaacccttggtactctgaacacataaaaccacttagatttccaatcccccatattggaaaccatgccttctaccccattaattttagaagtggcccacttgctgaaacacttgaagccattgtcgtggcccacactctttatatcataaaagtaactgaaatcctctatcaagggctccctccgagcatattccataagcatcgcataaaaccctaaggctatgtgatagctattcggggttagttgaaagggagaaacatcgtatcgtctaaggatagctgtgacaaagggatgaaaaggtattgacaccccacatcggagaatgggtattgagacaaccacatcctctgtggggattattgcaggattggtaaagggaagatgtggcctttgagaggtgcgaggacacatggtactaagtcacagcaaattcaacctcgtaaacgtattgaggtcggatttggtaac

SEQ ID NO: 168270 - DNA, 1666 bp, Cannabis sativa
tatttgatgtgttttaacacatttcgatggaacataatagaagctgaaaagttcgatttaacaaattagagtgtatttgtggattttgatgactttaaaggcaaagggttagattattgttgcttgcgtgtcgtaacgagttgcagatagtagggacactcgtatttggagaaaccttggatctctcacatgaataatttcctctctaagcctaatggatctcttgatatggaccacagtatagttacatagcttttttccaatgatagtggttaggatatccacaagttgaattgcttttttgattgggagactatttctgagattttgaaaggaggtgctctctctggcacgggtaaagataagtgggtgtggactcttgaaaatgatggtcgtttctcttgcaaatattcttatcttactcaggctttagaaagatcttctcttcgtgaggttgctcccttgctctggaatagtaaagtgttggagcgacactagattctttggtgatgtattctttccagcgccctccctgtcaagtctgtgataaggaaaagattttttattgaggatgttagttgtcctttgtgcgggagggaggaggaagctttagaacactttccatgtctgccgatcgtcaccttggggtatttattcggtctgtgacactggcgttcgtatgtgggattaggtcaaattcatttgggactttatatacaaggggattgttgctgaggaggttttcttgtatgcgtctcttgtggttgataccatctggtgcactctcaatgacaaggtacataataagtatacagttgatgtgaagaaatgtattgactttattcgaatttcttttgcagatttacatgttactattttcccttcccctatcccatgcctaaaggagagctggtctcctcctcctcaagattgattcaagctgaattgcgatgtaaaagtgagtcttgatagcatgtgtgcaacagttgttgccaggaaccatcttggtagggtattttgggttcaaacgactagagtggatttttcttatgcactttgcgggaaagcggcggcttactgtttggctatttcagctgcaaaaggatattgatgccaagtttgttattagagagatcgacttgagagtagttatcaatgctctcaatgagaatgagtctcattgggtattggaatctatgtttctttttgtaatagttactctcctttgtttactagttgtatcttctctaatattagtaggacatgtaattttactgctcataatgtggctaagtgggcgtttatccacaagaaatttggtgttatttcgttatcaaccatctcagtaaacatattatgtaatgaccgtgaggtctaactagttttagttataaaagtacgtttttcttcaaaaaaaaaaaaaaaaaacgtgtcgtaccgaattgtatttaaatttatatttttcgtgttgtataatgccaatttgtaacaccgggccatgtcatgcctaagcctatactttttatgttgtataatgtcaatttgtagtaccatgccatgtcatgttatattatattgttataatataagatagattaaaatattaaaatgagacatattatatattaatatgagattaatgtatataatatgattgagagttaca

SEQ ID NO: 168271 - DNA, 1067 bp, Cannabis sativa
cagctacctgaattgaactccagtcttaattccaagcgacatgtctatgctcccaacggcttcgagaatggcaaagtactcggccgggtcttcgagcaaggcgcggaatggacgaacgccggcccccaggaccagcccacgaagctgcatcatgcagagctcgcggtgatcgtccttggagatctcaatcggggtctggagctccggcttggagttgaagtagtcgaaaactcgctcctgaacctctcggtgctttcctctcatgtaattcgacagattttccgagtccacgttaatcttcggcgctcctttggagcacttcagcatctcaagcaggtcttcgttgtcggcgccggaaaagggacgcgatacggggctcaggtgaagcgagagccgttcgattcgcctcgccatgggctgagattcattctcggccgtcggatcttgatcggggctttccattttttttttcttttttaattatttgacgctgcaagagtgatcaaatggaaaatggaagaggtggggggaagaattgaataaggtgactgttgtgaagtttacttatacggaactggtgatgacgtggctatctaactggttatctacgtggcggatatttattggtggtgaatttggtagttagtttggcgcgcattccaatatggatgggattgacgataaattcgttcgggtttggaagcaaactcagatatgttagctctcttctgacgaaatttttgtttgttactagttatccaaacttgctctcaacacttttgttatggtagagttttaaattaaagtgtaacgagggatgagaataaaaataaaaataaaatggaataaaatttaaaatgtataaaaaattattaaattttatcttatattacattagaatttagaatgatagttcttttcgtttcaaaagggaatagtcattctactaaaatggtacacagaatattcctttataagacactagggaactaagccgcacttcgcgcggtattgcctaatttttataaattatacatatatattatacttatcaagtaatataatct

SEQ ID NO: 168272 - DNA, 693 bp, Cannabis sativa
acgttgagtacttatactgttttttactcttattttcattaaagaaatgtgacaatttgtgttgtgatatttttaattaatcaaaaagaaaattatagctttttttttagagaaaattatagcttatttaatcacgtttagattagtgttcaacaaaaattgaacgttcaataaaattgaatgagaaatcaaaggaaaaaaaaaagattattagcactttaggcttcggttattagctaataactaggacttatttagctccgtcgaagctcaaaaactttctcttctcttccctttcactttcataaccttctctctctaaaaaccaccattctttctaatgtcttcctcccatattctccatttagcttaatttttcctctttatttgaaaaaaaaaagagttcacatttcatagtcgaaaaatacatctaaattacaaaaattagtttatacaatattttttacggtaaaagttgtgcagttttaaggtgtggtcacctatgagacagaaccactctcgctaagtgttgtagcaagtccgaccccaagctaagatagactaaacttaaaaaaaattgatccatatgaactttaagttaaaaagaaggaatattggcggctaaaccacatgaactttacggtttgtaacagttaaccacaaaaatcgaaattttggcaacataactatcta

SEQ ID NO: 168273 - DNA, 807 bp, Cannabis sativa
ccaatagcagtaattatctctcttctttcctagccactcagtcccattgtgtcaataagctcaaagagtgaggtaaaaataagcgtcatttcaaacataatatttaacatttacaaaactctttggacaacatctatttctcccctattctcactgacgctgacattcaatgagccaaggccattcaaaatgatcttgattgtgcactctataaagaggaaatcttttggaaacaacgtgctcatgcttcctggctcaaggctggcgacaaaaacaccaaatttttccatcaacgtgcttcttctcgtcgtagacataataatatttctcacattactctggataatggtactactatccatgattttaataacatttgccatcaatttcagaaacttctgtgcctccctcttcacttcccagggcacggattcaactgcaatcaattctattctccctggaatttctcgtaccctcacctctagccaataccttcttctcagtcaacctttcacccctgatgaagttcattctgctttgttccaacttcctggagacaaagctcctggtcctgatggtctaaatgcacaattctaccagaagaactggtccacaattggccaatccctcactgaggctgtccttgacgtccttaataaccaatctgacttctcttcgatcaacaacactactttggttctcatccctaaaagaaagaatgtctcctctcttaaagacttcaggcctattagcctttgcactacaatttataaaataatttcaaaggctattgccaataggcttaag

SEQ ID NO: 168274 - DNA, 867 bp, Cannabis sativa
agtaaaaataaaaacttgaacttatcattcgtaatataactctagtaatttaaaattaatatgcctaaattagttttaatgaattaaattaaaaagaaaaacttatatctaaaatgattcactcattccaatcgtcaccttcatcttctcttcaacggtagaattcgaactccaaaaaaaaaaaggagaaacagcagttaagcgacgaaccaaacctcaaactccgcatgtctcatccttccactcaccgacgaactaaaccataaccaaacccagttgaccatttccccatttctcaattgcaagaaccagacgggaaaaggcggagccacaaaaccattgttaatttagagcatagtcattattaatttagattcaaagcaactcaaccagaaaagtcatacaagccaagccattcatttcaatgttagtacctgaattttaattttctctttgggtccataatgtttgaagattgttaatttagtcatggagcattgttgtggtggtggtggtgtggtcactacactggcaggtacaggtgttctttttttagcccaaaacccatgaatctaaaatccagttaacccgctggatgctcagtcttatacgttagtgttgcattaacaacttatttataaaactgagtgggaatatttgcaataatttttatagtttaagagaaatattcgtaacaataaaagaaataattagaggacaaaactcttcaaaaatcaaggttcgagatgacattttaagtagactcttaaaggatcgttctagtagattttctatatgttttggcatctaaaatagtgtcttagtgtaatttttttatggtcgcgtacttattttgactacttgtaa

SEQ ID NO: 168275 - DNA, 1445 bp, Cannabis sativa
  modified_base (1374)..(1394): a, c, t, g, unknown or other
agcgtcgtccccggcacagttcgaggagaaaacaaagatcgagagttaacaaacatggatttggctctcaagtttcattacatcaaaggcctttacttcttctacaacaataacactactcaaaatataataaccattgaagagcttaaaaagcccatgtttgaacttcttgatcgattcttccctgtagcgggaagaatcaggagatcagaagccgataatccgtacatcaagtgcaacgatgccggtgtacggattatcgaagcttactgtgaggagtttacggtggaagagtgcttggatatggtggaaatgggttgttcgtttcacgatcgtctttgttataatcatgttctgggacctgatcttggtttttcacctctggttcttctccaggttagttaattttttttgtttttatttacttaattatttttttacgttaattatttttaaatatgaacacatacgtacttgaatttatatatatatctatataattaattaatataaataaatgggaaaaaatgaacgaggacaagttaagtgatttctctattttggtttttagtatagattacgaaaaaaaatctacaaggatatcgttgattcgcttacttttcccaatctttggggccgggttagtttttggtaatagttatagttgttaaaaagtatacatattatcttaaaatattattttgtattttctctcttatcatttgatatctttttttattgaaaatactttaatagtttacatctctaaaaattatcctcatggtcctatatcacattaaaataatgacttgtttggtaaaaagtagtttatattgaacaataatttacataaaattaattttgaaaattagatcgcattgcatataagaccactctaaagggcaaccttcattgcatataagaccagcagtgataattaatatcatttaaagttgacgtctgcagtcatattttataaaaattatattatgtattattttaatatttaattatattgaaaatgatataatattttagaaatgcgacgtattttttactatttatctaattatatgttaaaattgaacatatacgagatcataagataagttatatatcattaatattaatattttcatgcaaatagccaaagtatatagttatattaccaattaatcagatctgtcaagagagactttttttattattattttttaaaaaatgaacaagggtttaatttttttgaatgcgaattggaattttaataatttgttaaatcaaccaaaaaaaacaagactgtaattcactaattcagtatgaacatctctcctattgaaaactcgatttggaaaagaatatgacgctttagcaaannnnnnnnnnnnnnnnnnnnnagatcgtttaataaaaaacaaagaaacattatttaaaatagatagaagctt

SEQ ID NO: 168276 - DNA, 1606 bp, Cannabis sativa
ggctaaaagcgatgtcaatatttttgtattttcattaagagcaaaaagaacaatgtttatcgctttgatcctttctatatcatctgaagatggttgtaactatcaaaaggtcccaaactactgaaacaactaatccaatggctacggatcctaatgtgaaaactcctcctaatcgaagcaatccaatggtcacaaatcttaacccaagcacccgtttgcctccacgagttccaccattagcaggacagggagtaacaaaccctctagcttgatttactccgggcacacaggaaactggaaccaccactactcatgacgaagagattgggccggttacaggagatatctattagagaacctcgagtggtgattcgtgattggagatgatactaagttgtaaaatatgcaagattccttagggcagatgcaagaacataccaacactcttcaccatgattaggaggatacccaagcagctatgaatctggcattcaaatagcaaaaatggatggatcaatagatggagatcatgagagcccaacaagaaatgattgataattgttctagactagatccgaatagagggaaagaaacctatatcataaacataccgtagtatggcccagaagaacgttcgaccaactatactcaataaacccaagataatggaccatccaatccgaggccataggatcaaactgtgtgtcacacgctagacgagcaagtttttccagtctattatctcaggggaatgattagtttaattttcttccttagacgaatataccgaactaatcaactattgataacgtccaaaaaataaggcctccaggtgaattagtcttcaacaggttgggactcgtacatgatttaggatacgatttgaatcacagaagaggaggttaggatggacatttcatccctcctgatattcaaccaattaatgtggacaactatgtgtctggtgaagttctaaggggtttataggtcggtcaataggcaggtcaagttgatccagtagtgcatacctaattagattaacttaagagcctcatacaaagcctaacttgcccaaaactcgccgacctagaacttgaccgaatatgaggataaacctttttaccacaaatcaaggccctcgatcttccgcacaagttcaaaatgcccacatggaagatctatacgggcaaagaaaattcactctctcatatcaagtactttgagatgcaaatagatttacaagttgtaagaggtgatgtacgatgtagaatttttttcaactaccttggtggaggccacctagtagtggtacttcaagttattccagggaagttcagttcatggaactcctttatggcggagtttcacgcacagttctcctctttcagatagctcccaggtcagttagagcacctagttaaagtaaaacagatgccgggagagcccttaaaggactacattagtagatttatgacgatgctacaaaagtgaagagactagccatggaaggaagagtttcaggaatcttcttgatgggctcctctttcttagatttttttaatctacttggaaaaggtggaggagtgacataagttggtacaattgg

SEQ ID NO: 168277 - DNA, 667 bp, Cannabis sativa
ttacctgtgtcatagccaaaaagaagaccaccaattccagcggagaaagcaaggcgaagaacataagggttcttccaagccaaagagaaacaatctctgaaagcagatgtgtctgttggatgaataactccttccatattataattttctcaccatccaaacacactatttttactataatattatttatataagagagtagaagagaagagaggagagtgatgatgagaagaaaaataatgagagagatataatatatatatatatatatatatatatgtagttggatatagggactaaagaggtgtgtgtgtgtggggagtgtttgcgtgttttaatttaattttatttttatttgtgtgatgagattgaaatgttttaaatgagtttttctttatttattttttataaaaatataaataaaaggggtctggtctaccacacaattttgtcgtctatccttattatgattaaatactagtacatcacaatgaatcaaatcttgatctcccccactcttgttattgtgggcaattgtcaggtgagaattgttatttcacaattttaagtgtgttcaaacacttgggacacatttgatattaaattgtactaatattgttactataaagttatgagattatttcacaaaaacataaaaataacaaaa

SEQ ID NO: 168278 - DNA, 869 bp, Cannabis sativa
gcttcctgggttgatgaagggcgatagagcactggggtatggaagagaaataattgcaaatttttttggtggatttttgatagaggaagaaaattttgctctcaagagtttcttatatggccaagcctacactacaccttttgagtcaccagaaaaatggggcaaagaaagcatttgattttaattaatagtcattattaccgatacatgtcattctttagttctccaatggtgactcaacatatttatgggataaggccaattattgctaatcctctattttcactttggttatgtaatgataaagggggttatccactaggaatgttgagacaaatcatccagcatttaatttcaagtgctgttgctaggaatgtttatgttctcatctggagagtcaacaaggcttctcctattcttcttattcatcttcaacagtggcttcagctttctttggcttacgatattgatataaaaagtggcaaaaccactttttcctcggtagaaaaagaatttaaacaatactcagcagggttggagtgttttgttaagaagaaaactacagtaggcaagctcatcaacatcaattttcaagggcataacaaggagttgaagagaaaaatgcatttgttggactggtttttcaatagaggtcgacttgctaaaacttggcgcttttctcacagcttgctcaatatgagatttctcctaggttcttggactgagaatgaccaaggttggcggttgaagcttcacgttcttcaccttgaggacaaggtgaatttcgggcggccggtattgttaggccttaggataataaataaagagggtaattgtaatggaaagaattgatgctatatatatgagtg

SEQ ID NO: 168279 - DNA, 817 bp, Cannabis sativa
agtattttgtaaaattaccttatgaaattttttattagcaaatagatcttgtatggttgcaaaaataactatagttacatagagtaaattaaggtgaggttattttgtaaattttagtgacaagttaaatgataggttttcatggtatatgttataaagataaaccaatgcaaggttattttttttcacatttgtagtctaattttttctcatggttaagtacgtagtagagtagaacttttatccaataatatatttgggatcaaacaaattatattctaatgaatttttggcggctaaaccctgccaactatcgttttacttgcactcaaccctctaagcttaagttttggcggtaaaaccttccaaactactaaactgttaataaatttaaggtgtcatctagttactggcacacgagatttttgtacaaaaatactatctttttataaagcaactgtaaaacaactaaacagaacaattaaaacaacagtgaaataactgtggaacaacattgaaaattttacacaatacagtataaaacttacacaatgtttttttagaaaaatatagtattttttttcaaaaaattctatcccatagaaaaaataaaaaagttaaaaaattgagtatgtggtggaaaaatccacaaatgacccaactagtaagttttaagaaacacaggtcaaaaataatattaactctaaactcttttggtatttgactatgagataagttgaaaactacccttttttattacatattaactaaatataactctaagataattttaattgataaatactttattttataa

SEQ ID NO: 168280 - DNA, 787 bp, Cannabis sativa
tgcattctaacctaacctaaaacctataaattcaaagaaggagaagagaactagcttaccttaggctgctatctttaattcttatcaatttccctagaagaaaccctttgatttactgagaaattggctaaagaactcaagcttcaatggctctaggtgatggccaacccaagagagagagagagagaaaaagggtttggaattctaatttttctaatatcttcctaaatgaaataaaggaattaaattcttcttatttagcttaaataaaataaacctaaggattattacaaatccaaaatcttattaaagacaaaaacaagggtaaaattaccaatttaccctttttcataaccttgaaataactttgccacctaggggtattttggtcaaacctaataactctgaacaatcccaacttaccaaaagtctatctataatgttccactatttctaaagtactaaccataataaagtgactctataggccatatgtcgcattctactgttaccgggcataagatataaaaaatataaaatttcacatataacataattaacacatctagaattcaaatatatctccacaattgcataaattataattaaaattctaattctaaatttaagtcttaattatctactaattctgatattaaagttaagcatttattacaatgataatcaacgataaagtttacttacacttgtataagtggaatatcctttccaggacattggtaaagtatactagtatctgatttatggagtatacatcagactggat

SEQ ID NO: 168281 - DNA, 1298 bp, Cannabis sativa
agagctttttaagggcatacatactcacttttccatgtattattaactaactcgacagacatgttagttttgaaccagcgcaaataaacttttttgtggtagtaatataaaaataattgttcaaaaatgttgcttctctacacgtaaagagaataagtcatatttattcttttaatagttatttaatactttttctcttttttatttttctaattttttattcatttttttaacttttttgtttgcataatagaatttattgagatataaaagcggctgattggtttaggatttgaatcctattttatcattttgaaaacttaaaagttgtgggccccttaagataatgtgattggttactctatttccaagaactttttttttttttgaaaatgaattgaaaacttaagcttaaaattaaaaacaagaaattcacgttttcagtgaatttgaatacaatttttttttaaaataagttttctttgattttgtttttgtttttattttgtttatatattctattattgtgcgtttctttcttttttttttattttttattttcttgacgattatttttttttctctctcttttttcatttcttaatcgatattttagttttcttttttctttcattctcatttttacatttttctctattctacaattatatgactaaattattttcaattataaaatgatacaatttaattgtaatttatattaagattattttattttcataatatttataattgatattcacttttttaatattttctcatcattctctaattttcagaaaagtacacataaataaattatataatttttctaaaggaaaataaaaagttgtttaaataagtgtatatcaaatatatataaatatatatggctgactatttaatggttacatttttttttttacgaataggtaaaaaatcaatttttagaattaattaattataattaactatttttaagtaattaaataaatatttaacaagactatttttagcaattaaaatttataaataattttttatttatatataaatccacactataattattttaacagttaacccatttaattaaaatatttacaattaaacatattttaacataaattaaaattctgcccttataataaatttttaaataattaattttgttttacaattagatgatgaggcctcaagcttataataaattttaaataattacttctttttaaaataaaatggctcttgagctattttctaaaaaggcatttagacatgagtttaatggttgttgc

SEQ ID NO: 168282 - DNA, 1075 bp, Cannabis sativa
agtaaatgtaattagtaataagaaagtttagaatatgatgcatctttactttccgaccttcaaaattcttattatctaactaacattaaaccccacaacagattattctcagatctctccctgggccactgaagcagcgtagagaatccaacccacttctacaaataggccttaataaaccttactgaagttcctttcaaaattctctttcggtgtggctaatagtaagaggtagagattacacacacttttctttttcttgctttcatataaatatatatatacatatatatttttttaaatattactactcattataagcatcttcaggaagaagaatcagaatatagttcaaaaataaattattagaggcatcccttccctcaaaatataatattattttatagatatacagaaggaaaagtcaattaatatgtggccgaaagtttgaaattgtgattttatttatgtggttgaaaccttgttagggtgcttaccaaaccaagaataaagcaggctataggtgctttccctagcaacttgttgtagtaaagggtcttcattgaattctttgcttacttcattaggcaatgagcataccaatttttccaagtgacatattctttgttaaatagagtagtaatattatgtccaactgttgtggtattttcaacacgtaaatatacatatcattaataagttatggactcataaagagtgaggccgatctcacaaggattataattaagtactttaaaattaaatctttacttctatttagttatataaaatataagagaaaattaatattagaaaacaataaaaacagtgaaaataagaagcaagtaaattgataagaaaattaacgatgaataaaagttagggcttttgatttcaattgcatctattgattatggtttaacatgattctattcatattaccaaattctatttaatagcaggtttactatagtaatttatagtcttctcaaatatataaacatcaattacatgccaattttctactatcgtgataaattaaatatgtaaaatgcattaaacacagaaactctat

SEQ ID NO: 168283 - DNA, 528 bp, Cannabis sativa
gattcaaagagatttctgtatacttatattactatgaatgttagcaattcttagaaggtttattaattaccaccaaaaaataaaaagaatatggagacttattatttttattaaattgaaaacattcaataatcaaattaacactaaaggcagaaaaacaaagggagagagattaatgaaatttaaatcatattttatatataatcaaattaattaagagaaaacctcgaaaagaaaagagaaagatgatcaaaccagatggtgatattccagtgcctattcgcggggtgtagagagatgaagtcagagaatctgagaaaaggttttgtaaaataaataagcaatggaaatcctcataagatttggagctacctaatcaggaaagttactgtaaaagcaaaagttttgtaataaggaaaatcatcaaaatttaaagctaattaaatgataagaataaaattaaaaactcatataagctaaaaaaaaatattaagaaaaatgagattaattatccaaaaaaaaaaaaaa

SEQ ID NO: 168284 - DNA, 668 bp, Cannabis sativa
aataaagtgccctcacccgcataagattcagaaaacgaatataatgaaaaaggactgacgagacatcttaagaaatggctaggggtacctcagtaacataatgatcataccggaatatgaaaattaaggtactgagacacacccaccatttcgagaatatagtcaatccttgtaaaaagtaagccgcgaagttaaaactaactatgtaccttaagaaattgtttggggtatcccagtatctcagtatcccatggggcatgcattcctcgcatgaacattaagttaatgggacacacccaccatttcaaagaacctagttcgtcttaatcagcgactataaaacaaggaaaatgaaaactatatgcatgtcccaaattgctgggtgtatctcagtaacccaaggaacatgcaagatcttgcataggcattaagttattgtgacacgccaaccattccaaagacttggatagttttcataacagaagcacatactgaaaactagaaaccctaagtatcatttaattctaacaaaaagtgggaattaaaaaaagcttaggatcgattttatcgagttatttctaggtattcacatgctcaaaggtgtatgcgagtattcaaagtactcatcaaaaactcgtgagtatttgaaatactcaacaggaagtatg

SEQ ID NO: 168285 - DNA, 623 bp, Cannabis sativa
  modified_base (596)..(596): a, c, t, g, unknown or other
cgatatatatgtctcttggagccccttttttagaaaaacattgcaaaatgttggaaatttatgggaatatttctatcatcaattaccaacaatcctatttccattcaatgtcgtatttcggaggtgttgcaactggatgaaatagatggacctgtgatcaaactaaacaaggaaagcctcgaagattgtagaaggagattggaggtttgtttggtggggatggccattagtctgaaaccagctagtaaagaaggaattgaaaacgctatgaaaagtatttggaagattaatcattggttttaggttgagaaattaagtgcggacaatgtctttcgattcttttttggtagcaaagaggatagacaacgtgtttttggtggtagaccttggatgtttgagaagcaattaatatgctttgtgaaactaatgggattaggagaagtttctaagatgacttttgaccatgcttctttttggatctcgattaagaatgttccccttgcatgtatgtctgagttatttgctcgtgacactataagaaatgtcacttttaccagcatagttcgctactgcgctggtaaaagtaacttttaccngcgcatttcgcaaactgcgctggcgaa

SEQ ID NO: 168286 - DNA, 1744 bp, Cannabis sativa
  modified_base (1659)..(1686): a, c, t, g, unknown or other
tggttttgatggtgatgttgttttatttttttttaggccttgatgaagctaagctaagaacatgatggctcccggggatcctcggatgctctttgggagcaagtgaagaccttggaggcttcccttgttgtgaaggacaaagccatatctaagctggaggctctcttggcagagagacagagaatggtctaacttacagaatgcttggtgctagaaacacagagaacatcgcataagttgccttcatctgtgagcttcatactaaccttgatgagcacaaggcgaaactgacggaggctattgatggccagtaggccataagagaggagttcgcttacctgtcctccaaactcacttacgagttcaagttgcgcaatccccaagctagtctgtcatacatggtagtgaggcttttttggaaagaactttggcccatggaaaggccattttcgagagtcggatggatgctgattaggttgctgcctatcgagatgggtcatcatcagagactcgtgatgaggggatagctgaccacctatggaggaggtggacggccaagacactaaccaccaggtcgaccaacatgttaatgctggggctaacctaggctctggcgatcttgacctcgcgacttcaaatttagctcctcttgcccctgcacacattaggacaggttttttcagtagtagctaagcattatgtctatgtaacatagacaatattttcatgttccgtatagcctgtggctctttatggtcggtggcctattagatttagaatactacttaatttaatgttccatgtgtcccatgacctttttagaacactactttattttcacggtccatgtggcatgtagcctttttagaacactactttcttttcagcctaagggccttcatgttcgtatcattggcctataggccctctgtttttgaatatttctattttttagccctattgcttttttatcatggattgtgtgaccgagcaggcggtctttaatcctagcaatcttcttacggccttgacaagtaagtgtctggatttacgtttagtagcttatactaagtgttaaaatttctctgcataaattcacagtgtgggcgatagagttaattgtacaatgcatcgaactagcacaaagaacttatgtagagatattttaactcttagtataacccccaagtgaccaagcacacaagtctcttggtcacttactattcatcaagtttcccaaattggcttgggttctatcttgtgaaggtaccatattacgcacgtggaactaaaagagtaactttaagaagttagtctatatgaaagtagtttagacacaataaatagaatataaatattgttatttattcattaattcgtctttgttgctgtgcaacttacataaattgaatctacaagcttacatcacacaaattttgcttctacatgtcaagtggctaaccctgcttgcctagtaaagcagaggccaccatttaagaatggtgggagaccacgccaaaatggttgtgggtactagcgcttttgtactagaatgttgagtaggactaatgctacttttgaatagtgttctgtaacctagttacttgtagtatttgtgaagatggactccattccagtatctgttgggttttatgcccnnnnnnnnnnnnnnnnnnnnnnnnnnnnatttacttattaatatagatcataaataacatttaatgttgaatggttcacatgattt

SEQ ID NO: 168287 - DNA, 569 bp, Cannabis sativa
aagcttcatcggtgtattgagtgcctgtgcttatgctggtattatcgaatttaattatataatattggtgcaagttgttataaatttgaatattttgtcatcgatccacttttagtgatatctttaaggattgtaaacaacttttgttttttattaatgatgtctctttacgttttgtcaaataatctgtcaattggattgttcactttatggttaaaacgtctggtttatatgctgatcttatttatttagagtatgatatctcttttgatattgatgacattgttgaggccaaattggtctaattgaataaaaacttttagttaaaaaaaaacacatacaactaaaagaaaaagtcatccctttaaaaagaaaaaaaaaacaaaaaagattataaaagttgtggtcttacctaacaaacttaactcttataaaccttgacaaatattaaaactctattcatggtcttattttatttgtccaatagactatgcttgttagaagtttttattttaatttttgtctttagttatttttaaataaaataaaatcagaaagtatcatatatt

SEQ ID NO: 168288 - DNA, 831 bp, Cannabis sativa
acttttataaaaacgagccgagctagactgagctgcccaaatatacaactttacttctatttacacaacaaccaactaatgatgtacagtatctaaattttattggatataaaacagccataaatagaactcaattttgacaaccttaccgtggtcctaaacaaaatttgatcatgaaatacaagaatgtaatttagtaggtagatataaaaactttgtttttggagtataacgtaatgaattataatcaactaataacttaagaattttatattcgaactcatgctctcttttttaattcttctctcactactaaattagccctaattacttggtagatataaaaattttaccactaaattttaataattagattaatatttaaaatgattgaatctataaaatatatatataaacaaaacacacataatgtgatattttagaaagatgtaagtacatatatacactgacatattattacttttatcttcatttcaaccatactagatagattctcatagaatattgctaattatggtttcctcatttcatttaaaacactaaattaaaatctttcttattgtatttcttctcttcaatatatacaattaattaattagagagagaagtaatataagaacatgtaaaatttatattccattttttttaagcatgtgtaattcaatattctatatatatgggtgcacttttaatgggtattattcataaagggataaaattagaaaaatttgaatttttatgcttaatttttctatttaattaaaaaaaatctctcatttttatatagactgagattattctatcggtaaa

SEQ ID NO: 168289 - DNA, 1042 bp, Cannabis sativa
ttgtgtttttgaggtattatatatcactagtagtaccattctaaacatgtagatttatgtcaaatgttcatatatgcaactttgattatactaattaattcacttttgttgtgattttattatgtgcagctgctattctcacgggaatcgttcgagaaaacaaaggctgaaaagaaatatatcattgcaggatgggagccaaaagtcaatccatgaactatttctggaaatatattaagatttcaaagctatgaatcctggttgagttggaataagtgtaagccattggaatttggaataaatgtttgcctattagtaatagtgtgttctgtgacttgctctattaattatatggcaatggacattggtaatgttctctgatcatgtacacattaacacatattatgtaagtgaaacaaaaataactaaagggtatatgtatatatataggcaatcaacaatacttaacaaagaaaaaaaaaatagaaaaatgaatatatagaagacattagttttagcttataacctatgaaggtgctttcactactcggtgtataaaatattcaaataattaatttcttactgtataacaaaacaatcaagcatatgatttctaaagatctcacttttataaattgtaaaatctaaagattcaaaacaatgaatatgaatggtcaaattaaattattcataacaaaacaataaagattatgatttcttactgtataatatgttgaaggatgttaaacactactaatatgttttagtatttcttatttataaatttaattaataaatataacaataagtaaattaatataaacttacttagtaaaagtgtattaagtttattatattttaaaacttataaatagtagtatattatagtgtgtattacctcttcagttagtgttgctcgtgcattttaacacgacataaaattggtacgagcacgattaagcacaacaaaatataaactttggcacgatacagtacgatgctacaaattccatgacaaaatataaaaaatatgtgctttagc

SEQ ID NO: 168290 - DNA, 2169 bp, Cannabis sativa
  modified_base (2120)..(2124): a, c, t, g, unknown or other
atgtctcctccttactttacaaaaacacaatctataatctgtataactctatataaatgtgttggtttactattcaactttcgttcacttattttgtcagtgtattcttatttttttttaagaatattagcggcaaaatttattaaattttatattttttaacgcttaactacaaaaattaaaattttaacgataaatgttgagttcagtaggtttgtcaaattttttatttttgtggttaagtgttaaaaaatataaaattcaagtgcttttaacggtaaaacctaagtttaaggcaacgacaagagacttgtgatagctatctaaatttgtattcaatattgggggcattgatgttggttacccctcttcaatctagtttcatactcggaggtggatagcagaatcctctattctcactcaagagatagtgttaggctatttttagcctaagtttcaaatcagtttttgagttatttttcttctttaatataaccatttagaatatttttacgcttgattttcttaattttaggttcccgagatgttaaagtacaaattctgtcaagtgacattaggacaagacgagctaaaagtgaagaaaaattcgatgcctaagttccttagctagttctgaccagcaagaaccatagttgtgacgaaataactggtcacgactaggccattatgtagtcacgattagccaactgggcaggggcaaggaaattcgactttacacatggtcgcgactaggcatttcgtggtcgcgaccataggcacgaacgtgatttttggacaattttgtaatttgaccattttgagttgtaaaaattgatgtctataaaaagatttcgagttttcaagcaaattattaggaaatagaaccctataaacaaagaaagaggttaaagaagcaagtgtggcgacctatatcaacttccccatctagttctttctttttcctttttattttcttgtgttgatttctgtttgtagtttgattatgggtttgaatttagaaattatgaactaatttctcaatttagggatatgatgaatgttgactgatgttattctagtttagctaatgtgatttgttagttttcttctctgaattgttgtgatttgttcttatttattttaatacatgtttcagacttgtcatcttattaagatcctaatataaaatctaagaagtgaatactaagaatgctctaatagaataaacataagttttaatgtaaaacgagagtatttacatagcatgtgtgacatctagattattacttgatgcaaatcatatgttaatttatttagagaagaaaatagataacatatggtttaggatcttaatgatttgagaagagttaagattatttctataatttgtcatcacttaaaagacataaaattgataaattacattaccagttggataactaaaataacaagattcatattcttaatatcttatccatatttaaacatcattaaaagctattttttaaaatttcttgtcaagtttaattatttttcttgtcacaattatttcgattagccaaataaaaatataaatctagtttggtagtattcaattttaattttatgtggttcgacctctcacctgtgtgagtactagtcaatacatacacttgcgtagtttacaattttgagtaacggatagttcacaagattaaaaggagaaaaggaaaaggtggccttatggccatcaaacttgatatgcacaaggctcatgatagggtggaatggtctttgcttcatcaagttcgtattacaaatggatttgatgagacgagttacatgcacattatgtcatgtgtgaccactgtttcatatttggtccttctcaatgggagtcctcttaaaaaaacttgttccaagaagggggttgaggtaaggagatcctatctctccttttttctttctcctttgtaaagaagttctttccaaactttaatctagagcagaaggtaagggtttaattcacgaaatttaaattgcaagattggcttctcctaattcccacataatgttcgcggatgatacaattttatttacaagagcaagcgaagctaaagctgttggaaatattttaccannnnntagatttactaccaagtatgtttaattaacatcctaatatgaatt

SEQ ID NO: 168291 - DNA, 818 bp, Cannabis sativa
tcgccaagtactccattagtttattcacgaaaaagagaagaattaacggttttggtttctaaagttgttgcaatagagttttctataagattttttattgaaatttagattgcagcactagttgcaataagaattttttttgtagaatttcgtaaaaatgcaaaaaaaaaaaactattttgaagtgtaaaaataaaagcctcaaaaagaataggagtacattttcttttttttggaataaaagggcgtaaatattaaaacgaaaggaaaatttgattaattatgcttaaatttagttaaaatttttccttaaaactcataatactcaatatttgaaatatatgaccacatttctattatgtccaaaataccctctttatttacttcaccctctctcacttcttctctctttctctctcacttcttctctctatcctcttgcagcccgaagctacaccagaaagggaactcaatttttgctcttctctaccctcattctttttagctcactacatgttagaatttagaggtaagatgaatggtattccatctcaaaaccaattggcgatgagaggagtaggtcattcatcttatatatcacaatttatttctacacattagtaatgtgggactaactcctaagggtcctcacgttaaagtgtaggtataacgaacgacctttaagagaccataggaccgaaacgtgacatttaagagaatcccacaaggccaaatatcaagaaatttgtgggtgtacacgttgggaaatttgtggattttgaaacaggtcaaagacccaacactggaaactggcacatt

SEQ ID NO: 168292 - DNA, 1640 bp, Cannabis sativa
taacgatcttaatcaccactagttagtagtaatgttgtcgcttttaacaatactacaatagtatataatatttttaaacatcaactgagaagaattacatgtatttgtaatatatatatatttttcctaaaaaacaaattataaataataaagctagcttattagtttttttttttatggaaacaaaaagtagtaaagtagttaataaaagtcataagtttatatgtataagtagctatgattaaaatgtaaactggtctccagctaatatggtacgttttcaatatcgaattcaaatgagatggggatagtagtggccactggatgccctaaaatctaattgcacgtgcaccaaattaaacaacttaattagctgcaataaaagatatatagagccaactatatatatactctattcgcaattgtacatattatcaaatatatatatactaatcttatattaaatgtagctatatatataacaaaaatattatttttttttttaaaaaaaaatattacaatttaaatttaaactcattacacatatttttgttgttttttatctcatattatatatgtctatataatatatattttttttaatattacaattcaaacttaaattcattgtacatatttaaattttttttttatcattttttatcaaaaaaaaaaaatatatttttattattatattattttaaaaaaataaaaaagtatatgatattaattaaaacttaaaagtattacagtaattaaactaattataattaatattaaattttgaatattttgatatattttaataatactcatattaaatattttttaataaaaataattttattcattgaataacatccaaaaaataattatttaacaaaaaatataaataactaaaataaaaaggaagaatataattaaaatattggtaatatatataagtatatatttgtttgagccaaaagataatattggtccataaatactttgagatgttaagaaaataaaagtactttgagataaatacattttaatgctttaatttccttctattatttagttacaaaaataaatacttatgctacgtgacatgacattataatatatatatacttgatccaatatatctatagtaactaaaattggaggaatatatatttgcaactgtatgtcactaaaaaaactaggtattcaacacaatatattaacttgaatatacatttatgctcacatatctcatatataaataaattatatatacagtaatagctagcctaattaattgatctctttaatcattgtattcatttcacatatggtaacccaaccctagctagaaaacaaaacaaaaactaatacagccaaacaggagccgaaaatacagtgcttatataatcattccaagcaaatttggtcacaatttttttggtcgggtttctactcaaaacatccccatcaaggcatgcacacgtacaataataataattaatcatgaaacaaaatgctagggacatcttatggtgttacacaatttaatattgcagtttaaccatttacaacgtgttacatctgtatagtatcactacaaaattttttacttttagtcacaacaatacttgtgattaaaagtaaaaaaa

SEQ ID NO: 168293 - DNA, 1180 bp, Cannabis sativa
gtacaaccacctcctctcatcaagttttggcaaaggtgtgcttgtcttcatggactagttatatcgcttgtacctttgtaattcttcccattcttagtttgttaagcaagattagtctttgtgaattttggaggatattggtgaagtgtacatagagttgcactgagatatcaatagtatatattaagttttgtcgtacgaatattccaaacctagtacgtgtagaacgcgggatatgattgtaattgggtgtatggacgcctgattataatatggtttgtgtttatgttatgtgtatatttttttgtgctgagttagtcggctcacagatattttatttacatgtgaagaagctgctgaaactccggaacatgcagtgctattttgttttattctacatcctatgtgggttcatctagggtttggccattgttatgatgatgtggccagggtttgctacataaggttttgactttcctctctgaagagttattttgggagagctttgagtttgtaatgatgttgatgtggtggttgtggtatgatagaaattcaatgttgtttttgcggtgctcaagaaaaaattaatgttgtctcagagctttccgaaaaccaatagataaaatttcacgaccaccatcagcgtggactcttgatggaatgttcatcttcagtgccgacagtttgtcggattgtgcagtggtcaccgctgcttcctggatgtttctcgtggccacagatgcatcggtgatacctgacaaggagtttttggggttaagggtgatccggggtgatgatggatttttttagttggcatgggcagtgagactcttgggagactttagtgttaatgtggcgaagcttcttgctattcagatagggctaatgtgtggcacactattttgaatttaatcttgttagtatttattatgattcaattgtggttgtgggcggggtgaataattctcattgaattgttaatttaaattctattattttggatgttgattttttaatagctgacgttagtggtgggtcttgtaatgtcattttgcagtatgcgaatgatgttgtccatgcactggttacttttgttactagtataagagagtatatatagacgaattgttagataaattaacaattaatccaagatctatttgtatataacatagaacac

SEQ ID NO: 168294 - DNA, 1190 bp, Cannabis sativa
ttggtatattttatatggctgcaaggaaatgaaatattatggcagcagaacccgaaaactctgcaagtacaggaacttaaatggcagatcaaaacaagaatttcttgtgtgttaccgaaaaaaatcaaacaagaagatagaatgtggcttgatagtttataattgtttgtatagatattttgcgtcctttcataggagtgcttagcttgtaaaaaaaaaagagatttgtgcaatgaaacttttgattcatcaaaaaaaaaaaaaaatttattaattaattttagatcaacataaattagaataattatttccatgattattttatagaaaataaattagaataattttaaaattaattttgaaaatatatattttttaaatacattagatttcaaatttaattagatatatatatttatagaaaattaaatttaacttgaaaattaatgttaattaattttagactaacttaaattaagtaattttcataatatttttaaaaaatttaatactaaggatggaaaataaatttttatatttagatctatctaagttagtttttaattttataaatattaaattaaaatttatatttagagttatttaaattaataattttaatttaataaatatattaatattaaaataagtatcaaatgaaaagacaaatagaacaaagaaatggaagtgagatgagggattgaaaaagtgggtgagagatatagttgaaggaaagagagaaaaatttggagagagagatggtttatagaaagagggatcaagagtctaggagagataggcgattgagagatttaggatagagagaggaagtgattagagtgagagaatgaagtacaattagaatcttgtgtctttttataaccaatataattggtcgactaattgcataaatttttcaatgacatatatagtgatccatagttgtgtcgatcaacttgatgggcataaaaatcttatatttgtagtaatggcaacatcatcttcccattcaatgatcttatagcttcgatgtatgtaggaagagtttgccaatttttaacattacatacttctatatcaaaatatataattagggcgcgtttggaaagctatctgagaattgaaattggatgtaattggaggtaattacacagtttgacgtgtttgtgtggccacgtaattacatagta

SEQ ID NO: 168295 - DNA, 2038 bp, Cannabis sativa
atccggacctattgtgattggtctgggcaatgtatcaatgtgagaaaatctgcctatgttttttctaagaatatggatgattcaaggaaggctgagattgttagtttgttgggcttccgcggtatgaatagagatgataaattcttgggaaaccccattctatggtcgaatagcaaggtgaaggattttaagtttattaaagagcggttatgtgccagaattgaaggttggcgctgcaaactcctatcccaagcgggtcgatctacccttattcgttcggtggcagcaagtacccctgtgtattctatgtcaactttccttctcccgaaagtgttgtgccatgagatggatcaagccatcaggaagttctggtggatagggaatgccgagaaggatcgcttccttgctctcacaaattggaatactatgtgctcccctctggaggacggtggtctaaattttaaaaaatttgaagacatgaatttggcgcttgtagccaaacttggttggaaattggctaaaggggagaattctctatggacaagggtcttttgtgctaagtattgggagggtggaattaaatctttttggaaccatgattctcctaattccctatcctttggatcccgtagtatcctagcttctcgagatcttattcgtaaagaatcttgtttccttattgccaatgggagagccattaacttatggcatgccccgtggatcccgtggttggattgggatcaatttagagctgccttcaatcctatgatcactccgctttccactcatgtctcctctcttttgaatgaagatagggagtgtgattaccttcaagcggccacttggatggtcccaagtgttgcaagttctctccatttgatctccttgctccccaacaaccatgaggataggctgatttggaaggatgcaattaatggggaattctctccttgggtggcatataaatcaatcatcaaggggagattaggtgagaaagatccgttctggggaagaatttggaagctcaagatatcggaaaggatgaaactcttcctttggaaacttggaagggatatcttgccgtttggcgaaagactccaacgtatttttggtaatgatgtggtgtgtgctgtttgtgaagaacatgaagactcgactgtccatctgttttgccactgtcctcttgcgaaatccctttggatggcaagtctgtggggtgttcgtagtgaggagttgaacttcagtagccccttacaatttgcaaagtggttggttgagcctttccctttgactcatcaagccaattttgaagtagaggagttcaggaaatatggaatttccctctgttatgttctttggtctgtaaggaatcaggtgtttcatgaccatattcagttatcctttctcactaccttcaaccgaattaagtgcctggttgatgacttgaattcagtgtctcccaatcttcaggaagcggactcgggccatccttctctctctggtttgcaggagcctttacatggagactttgtggtttatgttgatgctgcctgcaaggaccttatcaccaccaattcgaactctgcatttgtggaagccttctcggtcgcccttcaggcaaaattgccgctggaagctgaggcatgggcgttacttcatgcggttcatcgctgtgttctccttggtaggcacaatgttaactttgctctggattgccaatctctagtgtatggtattaagctgcgcaagactccggattggaagatggcgactgtgtttgagctgctcttggatgggttggatcgcatcctgttggcttcagtttcgtggataccccgctctaggaatgaaatggcccataggcttgctaaatggtcttttaattctagtctttttggattcttttctgctgaggagttggcacctcttgttgccttctaagactttggtgttttctggctggttttttcctttcaatgaagttatctttctaagcaaaaaaaaaaaaacaagcgtaattctattccaaaaagaataa

SEQ ID NO: 168296 - DNA, 570 bp, Cannabis sativa
ggcataaaacccaacaggattttctgtgggtgggacaatatgatcgtaaagatcatgaacccgagtaaggtttgtaaataaagcagcccatgagtgataaagagcatgctcgttatctaacgtgataggaacaagagattttacattggagctggtgagggtaggatggaagttggctgcacaatctgccattgttgagggtgagaagaagagaagggaaagaagaagaagaagaagaagaagaactgttatggtttaacagggaggatcgatattgtctctgatatcatgtaagaaaatcattccgtgtcccttttctcattatcaaatggagttatatgtacaatatacaagagtaatggtatgctataaattagctaactaattgctaaaaatatgtaacaaacattgaccaaatcaattaaagatatatacagcaatagtagaatatatatgaaatatattctaacactacataaaaataacatctaaataacaacaaaaaataacatacagataacaaaaaatcagcaacaaattaacaagtgtacaacataaaaagaccgtatt

SEQ ID NO: 168297 - DNA, 1160 bp, Cannabis sativa
ttgcttggaagatgctttctgaggttggtacaggtgttctaggaagttaattgaagtctgggcttaatttgagagagttttgaacttgtttggcttacctagtgcaaaccagttaaccgactttacaggccctatagaaccggttaaccggattaggggcaggtttctcgaaaagtttgatttgttatttcgtgttgtttttagagccttaattagttatttcatcaataattaaggtatttttatgataattacgaatagcagaacccttagtagtgagtttgggttcccggattaggttttggcgtgttatttacccgtttatgtaaatatgacttatggcatccactcagcacgagattttctattctggtcagccaactcacttgaatttggaaacaaggtaaggatagcatagaacattttatatatgtgattatgtgtatgtgtgatatatgcatgcttattgtgattcgtacactaccaacactagtatggtaacggtactgagtgcattggtattgtgtacgatgtttaaagagtacagtacggtgttaccaacactagtacgggcaggtacagagtgtatgtggtataacacttagtgatactcaaggtacggggcaaaccttaccaacactcatacagtcatggtacgtagtgcatgtggtatagtggtcgtaccttagtaaagaacgttcttacctatctaataagcattatggaaaggtgtatgggcacctagatacaagttgctaatatattatttattatatgattttcttactgagtatattggctcatatattctattttcgtgtgtacgtaaaggaaaggcaaaagctgaacatgagtgagttccgtgcttgagtgatgatgtacatgttgagacggcgtgaccaggagtgttcagtcttgggacaacatgggctatattttgtagtcattcgactagtttgtgaaattattttgatgattataatttgtttaaaatcaaaattctaatttagcacaatttcaaggaaaacccttttattagaaaaggtcgcatgttaattagaaaatcactatagcgctcctaagtatcaggtcgttacacattcgatgtcagacgactgtggcggaagcctttccacaaatgatctccgaagaagattgaa

SEQ ID NO: 168298 - DNA, 766 bp, Cannabis sativa
caatgctctacctatataaatatttgagacgtgattgaatcttctatttgtgggtctacaatatttgtataaatcataaatgttttcgttttcaatagtaatgatcttgtcttggaccactctatataatgatataatccaaaaacgtttcccataacttccatgaatgcggggggacttttgctaatgcattaatagcaaaagatatcattatttgctatttgggatcttaatatgctcaccatcacacactcaaatagtgacttgataagtcataaaaagtaaataatttttcatattatttattaaattaaattgtctaaacccaatcataattgaataataagtaattttatctatattttacactattaagttatgatatttaaattacacgacataatagtattactcaaaatataacttttatattaacatgatccttctattatactctatttaattttacgaaaaaaaattaaataatgtaatggaaggagcacgttaatataaaaattatatttcgaagagtattattaacaaatattatatcttaaagagcacaacttagtagtgtaaaaagttcaggggtaaaaatattaattattcataacaatatatcacatatgggaaactttgtgtcagtctcgaccctaggcataggcgggtgttgcccctgattttgcccaaaatacgtgaaccaaccggatgatgacacgtggatggaaaggggttagcatttaaataaaacagctaagtctcctta

SEQ ID NO: 168299 - DNA, 730 bp, Cannabis sativa
accctctgctattatatctgccaacgatttaaacaatgaataattaataaaagaaaaacactattatacaacttacacgatcattgttgcctcaaattctaatttagcacacatgttattgcctcattcaatatctattaactactatatatttatttatactgtactccctaaatcccttcttaattattattattattattaatattattttgttgttgttgttgttgtttataattattattattactagggaaagaatttgcacttcacggatactttaattttgattttttaagttgttaattttgaattatttgtataatataagattaggaacattagaccatcgttgctgggataaataattttaaaatatatactattgtttaaataaatagtatcatgctttaaaaaaaaaaaatagtatcataaaacattttagttggaaatcatttcaattaaataataaaaacaatactaattttggaattaataaaaggaacaaaagaatttttatttttatttatagtgtatacatatatatagaaaaaatctcacacacttcataaatcatgtgaaattttttcaaaaataaaaaatcataattaattttaggtgattttacaatgcatgcccttaatggcacctttactaaactgtaattgaaattcgaatcatcaatggaaaaaatgaatcgggttaaaatataaaataatcagaaataata

SEQ ID NO: 168300 - DNA, 1704 bp, Cannabis sativa
tgtgccacctgcccacagacatcacttaaactgacacatgcaaatgaaatagttttttggtgttaactaattatacaaaatcttcacaaaattaattaaattatccaaaattattatattttattttatataaaaatataactctaactatttatagactgaaaatatgtaggatcgattatgttatatataatatatatatatatatatatagctatcatgtatatcatgatttgcaatgatcctattagaacgtaggtagatggaatagtactcatcatacttattaattaattgttttaattattaatgaagctaaaatgagtactacttcgtgttattatcgattacacgagtgtaattaattattaattacatatattactaatataatatgttaatatatttcggatatattatcctaaaacatgtctcatatctctattatataattaattaataaataattaagtatcaaaaagtgctacatattatttaatggttacaataaaaatataattgtaatagtttatattttttttcatgatatgctataataagttaccaacaagtaaaaaatttatttttagatttaaattaattatatactttaaataaattaattttttaattgaaatatttaataaaacattttttacaactaatatttataaatattttttattttttatttataagaaaaaataaaattagattataggtaatttagtaattatttttatttaatttctaaattaatcataattatttaacaataatccaacacgactaaaagtaataaataataatataaccgtggtgtttacatatttgattgaagttatttcatatttaataatgatatttggtacttgtacacatatttatatatatatatatgtatatatatagttaattatatatgtgtttgtcaaaatgtgatcagccaccatataatattatgtacagtatatatcgaatttgaattattgtaatatagacatacacttattttattattgtattattttcattagcaagcaagcaagcaccagatcatttcgaccataacgtgtcatgatatatattgtccaaaacgcatatagttaaaaccctgcatgtggaaaatcatgtcttattagtttgaactactcatatatataatacttattattagtgctatatcgatcatttttcaaaagaatatataaaaatatatatcataaacggcgtatatatatatatgtatgtatatatatatgtaatgtatacatctctaaataatacaaatacgtatacatgtggaagaaaataatgttatcatatcttgcatgagtatataccactaaaaaaagaagaaaaaaataataaaagtgacagaagattggagatgatgcatgaatgattaaaaccactatacatatgcatgtcactttcctaactccggccaaagtcttacgcacacttatagttacactatatctgtttgaaaaaacgaatatactccctctaaaagtaggtgtaatgatatttttttcataactttattattgggtactaaagatatctaagcattatttagatgtgtcatcatcttataattagttagtgataaacatagtgctaactgctaagtactacaatgtttcttttagtatttttctttttttatatgtagtgttaattttaatttttttatatgac

SEQ ID NO: 168301 - DNA, 1084 bp, Cannabis sativa
attcaaaagtcttcgtcaactgatacattatgaaaaaatgaaaagagaaaattatcacttataccaacactacatttaaaatgataatttgtattcgtgagttatattcttgtcatgtcgagtgttaggtcttaccaataatatgtcaaatttagatctcactcatttattaattatttcaaaaactaaaatctaaactcaacccgtttctaaatgggttgacttaacccgacccgtttaacttatttatataaaaaatcatttttaatttttgttaacatatcaattcattaacatatttataataacaataagttaaacatgtttataatcttattgtatgacacatttatgaataaatatgtaacatgtttgtgtcctattttactaaacaaatataatttacgtttaataaatactataaatttaagagtgtatattcttacatgtcattatcgtgtcatttttaggttaaacgtgtcaacccaaaaataattcatttaataaacgagttaattgtgtcaatcataaaatgacccaactcatttattctatgcagacatcgagtcgtgttatcgtgtgtatgacccaaaattgtgttgttttataattaattagcactttctcatattatttattaaattaaaatgcgtgggactcaatattgaaatgcatcaataataataagtcaccttttgtggtacttagcaccttaaggtgcctcttagcattttttaaaaaataaaaaataaataaaggacaaaattaaaatgcgtgaaagttagtgtattgcaaaaaaaaaaatttaataataataatctatttctgcaataataatgtttaccgagattttcaaaagcaaagtatttaagaacataagaaatagtaaaatgcaataataaaggagatggagatttttatgtgattgaggcgttaacaagtcagtctattagcctcaaatgatatatttgatgtttttacagtgtctatgcaagaaaccctaactttgtactactctttgtttctcttgaagaagaggaaagcttagagtaatgttaatagagcttcgactatcttgattttg

SEQ ID NO: 168302 - DNA, 695 bp, Cannabis sativa
atcaataatccattgaaaagaattgtgagagaaagtgttaccagccatgttggaggcaaccatgtttgcagcaggatcaactcggggagcagattggttcaattgttggctcagtagtgaaattaactgctggcattgagaagaaagatctgcagccgagggtgcttgagggagatcattggggctgctgctaaaatcatgatgtgcttgaaccttgcctttgtcactcttttttttgtcaccataacctggtggaaaaccatggataaagacgcatttatccaataaatgatttggtttgccacagtgagaacaagagggcctaggtttcttgtttcttggtggattggtgggtgttggacgaacagaggaagcaaggggtggattttcagatgaaccgagagtgccttcacgttcttcttgaacaaccattgcaaacacacgggagagatgtggtatgggttaattgagtaatatttcggcacgcacagaagcataggattcattaagccctgtgagaaactgaagtacctgattttgattataaaaatcaagaaaggcttccatggcaccacaagtacatgttgtattaggctgaaatatgaggtgacggactgatcaccttgttgcaaccgagtgagttgcgtttgaagttgaaagattcgaggggcatttccttcattgaatctttcagc

SEQ ID NO: 168303 - DNA, 806 bp, Cannabis sativa
  modified_base (638)..(649): a, c, t, g, unknown or other
tctggcctgctggtcatcatgccatgttaggcgggcaaaaattaggacaacagtaagttccattatatttatttttatagttgataacttttatggttttcttttaagcatcttctaactcacttgtctcgatttttgacgagcattgatgactatgagctatgcccattccacaccctacaacatgaacatgcaaggcaagaaagtaccaggaggatcaaggagcaccttacaacatgaccacgcaagggaagaaagtactaggaggatatcaagaaattggaggctggtgataacgaggtcatagttgagtgaacacgccttgaagaagtgtttgagaaggaatagtccacttctaagaagactcatgacgcacaggccaaaaaaacagtgatcaagccaatgagataaaatatttgaagtccaagataaaagatttgaagtctactctaaagactaaagatgaggagtaccaaacattggccaaagaggtcacatttttcttttttcaaaaacaaaatttaaaaaaataacaatactatttttatgaaaaaaaaaaataaaaaataaaggtggcgtctggtaacacttttgttttttaattttaaaaacagaaaaatcaaaataatttttttttnnnnnnnnnnnnttttttaaaaaaaaaacaaaaatgtgttctataaatacttttgttttaaattttaaaaatagacaacaaaaatgtgttcgataaccacttttgttttataattttaaaaacacaaaaaaaagatggtgttctctaaccatttttattttttaatttt

SEQ ID NO: 168304 - DNA, 559 bp, Cannabis sativa
tccgtttacttattaaaagaaaaagattggtagagctatgtggctctacaagggagtaaaagatattggaggaaggtagttatggtgaaagacataatcaaaagtaaattagagaaatcagaatttttttaaatgaaatttggggtctccttgttgtactcgaagttgtggcttagattgaaaaataaagtctggaatgtagttgtttggggccaactccaaacaagagatagacttttctattattgattgacaaaggaaagagagttatttgatttgtgaatttgagagaaaaactcttcacacctatttttttaagtgttattaaagtaaaaaaaaaaattgctctagaagtgctaagctggctagatattggtacaaagcaataccaattgggtagccttaagagcaaatattcaagagtgcgctgataggtgtatgtaggaggtgtgaatgctatttttaccagctatagtatgctcaaaatgaagctttgtggaactatagtgtatatatgcaggggcagacccacatagaggcgatgtggggtagtcgcatt

SEQ ID NO: 168305 - DNA, 1932 bp, Cannabis sativa
ttctttgggtcggtcaccaagaacgctaagagaaaactcaaagttctcatctcaatttatatcaaatcaaggacctttacaaagtttctttagtgtacattcaaggtaatcatctatttcaagtttcctttgaagctcttaattcgaaagttagggttttagctttattttggggttttggttgctgttcgatttggggatggattacttcttttgctaaagttttttttattgatgtttaagtagtttcgaactagttttgttggacatggtagtgttgaagcatgttttgagcttttaagttcaaagttactcatttaatggtagattttgagttattaccttgatgatggaatttcacttggattattcttattatggttaatttaggtgctttggacaatttggaaaagtttagttttgatttggttgagttaagggattttaggctttttctactgtagaaaccacaggccatttttgggaaaacagtgtaccatttattcaagaagaaaacccaaaaaaaaaaaacaacatgccatttttacagtgggggtctagaaaatttttgggtacttttttcccaaaatccaattctttagtgcttttttttatgtttaggttttcgtcagctatttatcaacaggataacttttagtttgaagtctaagtccccaaaaagtgatttaacgtatcacttatcattttcgcgtatgttgtgacttaggggcctacaatcatcgagcaacagtttcactcaagttgatcgagacacatgagttaaaaattgaggtaagattagtataatagtataatatgtgattgcatgtttaacgtacatgtttatgaatgcctgttagttagcatatcattaattgcagtattagtatacatagagttacactgaataccgactgacatatttttggcttaagtactgattgatactatcatattggtaagactagagtaccaagtaaaggctgatattaaggtaaatagtattgtcatatgaacattctagactcagtacgagtgggacccgggattgggttataattaggtgtatgggtgcctagttatacttttcttactgagtttgttgactaacagttatttaaggtttcttaaacattacatatgtaggtaaaggcaaagctataattgagcagcaaatagtgcgagcagataaaattgaacaaattgggcggtaagacgaaatgtttgatcttcgggatagcaagctttattttggaagttgctggtcaacttttgtagttatatattttgtaaaacagttgtaactttttaagataggatcccaaattatgtaaagtttatttatgtaatttttttggttaataatgaaaagttttaattaaacatgattttcagtaagctcgttggttagttatagattgccagtttatatttaaaccacgataacacacctaatctgataagtgttggaaattattttagcaggatctagatttactaacatgtatatttgattattaattacaatatttgattattaattacaatctaacaccataaatatgaatttcctaatatgataaaataaacacataagagattaagaaatctttacattgatggcagcggaataataattactcctttcgttcagatctctagcccttgattcctttttgtaggagagcattatcaagatatgaacatagatcttctctttttcagtttggttaactacagtgttccacactatgattgaatatttgacttgatatgagtgggcatggtactctatcaataaaagctcgaaattgatgaagaacaagaagaggaattcaaaattacaaaagaatgaggctctaaattttctagttgtttcacaaagaataaagaaaatatttttagttggatgagaatgagagccatcttatt

SEQ ID NO: 168306 - DNA, 1175 bp, Cannabis sativa
aattactaaagcggtcattacacgccaactctcgctacatttagaagacatggtcgaagtgaagcaaagaccaggagagcctctccaagcctacataagtagatttatgacagaggctacaaaagtagtacggttaactgaagaggggagactggccgcaatattgggggccatcaaagtgctcggagaactgtggaaagatattaagaaaagtggtcctgtagactctatggcagattttctcgaccgagcagacagtttcatcgaacttgaagaggccattcaacgggaagatgtcgagcctagaccaggccaaccacaggctccttcggcagggacatctgcacaaaacccccaataccctagtagttcgaattcgggtagcaaaagatttaacaacaatggcagacaaggcaatggaaaaaaggaaaagttcacagccaaagctgaatagacccttaaagagaaaccttccaagttcactgctttctctgtcttaactgaggatctggagaccatttacatggctactcagtcggtagtcccgtataagaaacctgctcccatgaaaaaggacataagtaagcgtgacatgtctaaattttgttgtttttatggaaactatggccacgacactaacgagtacaaaaatttgaagcgggagattaaattcttgttaagaaaaaacaacccgcacgtgccaaagtatgtcaaggccgaccaacatcaaagggtcgcccaagcagacaacaaccaagacttgttactgcctccaccatggacatttacaagttatcattagggcccacatattgctagagattcgggcaaagctcgggaaggtatgcctgaactttacaacacgaataaaaggaagtggttctggccatagaggaaaggaatctaaaaatgccacggataagggaacccactataaccttcactgaagaagatgatgtcaatgtttgcttcctgcataatgatccattggtcgtggaagtacatatagctaacaaaacagtggcccaggctatgatagataatggagcctcaacaaatatcctattcaaaacaccgtacgagaagatggggctccactcaaagatctaatcccctgtctccagccagtatatggtttctccgaccagagtgttgcacctctagggcaaatttgc

SEQ ID NO: 168307 - DNA, 2184 bp, Cannabis sativa
agctgtccattatgatcccttgctacacaacaaaacccgaacttgttctccgcttgaaaaatagcaccatcaacattaaccttaaccgttcaacattggtttcttccagtgctctgtaacattattaatatcatctattaataatgccccatttttttgtgattgagcacttaaccattggtcaaggacgactctagccaatcgcaccacatcatacgctaaacaggttttgtcattccacacaagatcattacgaactgcccaaattttccagcttaccatagctgcttctcgcacaacttcagcaggtttagaggccattaaatcaaacaaccaagtgctgaactcactataatttgcaccagcagcacttactacagataaataccagcaagaatgactaaagctacagccaaggagaatgtgatatattgtttcagcagataaattgcagaacggacagatcatttcaatattcacatgctttgtgttcagctgtaccttagttggaagacaccttgatgttgcacgccataagaagtgttgaaccttttgaggaatatcaagttgccataactttttatagccttctatgttctgtaccaagtcgaccgtggcagcattctgctgcagataagagtaagcactcttaactgtgtaaaaactcgaagaagacttgttccaaaaccagagatcttcttccaccgaattgctaagttgtattgacatgattaactctttatccctctcctcaaataattcattcaacaccttcatatcccatctcttctacccaaccgagaataaattagagaccatctttcctaccagtgcagggtggctggaaagaatgtagggattttggttgtgggagagccatggatctctcagtatgctaacagatgtcccacctccaattgatcttcttgcaccagcacaaaccagttctttagcttccaagatgcttctccatataaaactcagattcgggccaatttcagccgtgaggtaattaccattaggatagtatcttgctttatagatcatgcttaccaaagaattctcattggtcaataatgtccatccttgtttactaaggaaagaaatattataattacgaagatctcaaaagccaataccaccctcattcttgtgacggcaaagtttcttccaactcatccaactcactcccttactagaagaattggactgagatttccaccagaatttagacatcattccttcaagattagagcaaatctcctgagtgagtaagaagacactcatagcataacaaggcaaagcttgggcaactgatttcaataggacttcttttcccgctttagacaaaaacctactctcccaagagaatattttcttctgcattttgtccttgagaaaaccaagtattgcattcttcttttgacccatggtacaaggtaagcccaagtacatactgttctccatggcttcattcatacccagaatattacacaatctagcccgagttccttcattggtatttttactgaaaaatatagaggacttggcttgattaacttgttgacccgaggctctttgatacacattgaaaagttacagcactctttcggcctcatcatctttggccttgcaatacacatagctatcatcagcaaatagcatgtgagaaacacgaggcgccccccttgcaacttgacagccagtcaaccaccgattttgctcataatgtttcaagagtgaagacaagccctcagcacacaccagaaaaagataaggtgaaagtggatccccctgtcgtatgcctctgcttggatgtatagggctcataactctccccccatatgtaatactgtaagacactgttgttacacaagacatgataagagaaacaaaatgagaaccaaatcccatacgggttaacatggcttctaagaaattccacccaactcgatcataggccttactcatgtctagtttaagagccataaaaccttcttttcccattctcttcctcttcaaataatgcatgatctcaaaggaaaccataatattatccgatatcaaacgaccaggcacaaaagcactttgagtattagagataacatcaggtaaagcttctttcaatctattggctagaactttagagataatcttatataggacattatacaatgaaattgg

SEQ ID NO: 168308 - DNA, 928 bp, Cannabis sativa
atatatatatatttcattttctctctcaatggagttggatagtgtattgaaatttcttgagaacaagaccattttggtgactggtgctactggctttctggcaaagagtaaatttatacatatattttatatacaatttttttgttatattataaataattatatatttattaataattaattatgtttttattatttttgtgtttggtgaaaattaatcagtttttgtggagaaaatacttagggttcaacctaatgtgaaaaaactctaccttcttttaagagcgtctgatgtcaaatcggccacacaacgtttgaataccgaggtacgaatttataaatatattatcaaaaataaaaacataaaatagaatttttcaatcgtaaaaataataatcatttatgacacatttgaactatcgagaatgttatttcgtgacagttttataaatatattgagttgagaatgatattattggtatttttcgattgttgagattaatttttttttcttaaatatattttgtaaataataacaataatgtatgcagattctcaacaaagatttattcaaagtattaaaggaaaaaatgggtggaaatttcaacaattttgttggagaaaaaatatgtgtgatgggaggagacattacttgtgaggatttgggagtagaagactctaatttgagacaacaaatgttgactcaattagatgcaattgttaatttggctgcaaccacaaattttgatgaaaggtaattatttattgatgtaattgaatatcgaatttcacatatttaaattattaaaagttgtttaattacatcactacaaaaaatcttatttttagtcacaacaaaatttgtaatttatagaagtaaaaaagttgtaactaattataaatcatcatttttatgttgtgactaaaa

SEQ ID NO: 168309 - DNA, 606 bp, Cannabis sativa
  modified_base (560)..(570): a, c, t, g, unknown or other
ttctagtacatattttaaatttttataatagggtgattcaagatggacccatgtagaaggagagttaaattagattacatatgtgttgaaggtcaaggttttaaatctcaaaagtattttctttttgttttttttttactcttgtctaacaaaaaaattatgtcctctctcattttaaattttgagtctgccaatttgactatgatggaaatagacatttactctatgattagtaaagaaaaaacaaaattcactactacaaatatcaaaatttgcgacagtcttaaaaataatatttttcagagaccatcgctaaaaaaattaaataaccatttaaaattatcggaaaaaatttaatattcccgacagtttaaaatcgtagtaagcaaaataggcaacggtttaaaatggacccttataggcgacagttttaaacctataagggtccattaaaaaatagtcatctacttcttgccacattttccacgtgcctacctactttttttctattttccacttgctagagatgttcattggatcacatccaatggatttgaacnnnnnnnnnnnaatccaattatttattggatattgaattttatcatc

SEQ ID NO: 168310 - DNA, 1025 bp, Cannabis sativa
catcccctaagtaaccgttcttgagcaattcttcatcttcgccttggtttccacggatggaggagaaaaccaccgagctcctagtacgccttatcttctcagaggaacgacctcggtatattcctcagtgacatagccttcactagcctccaaacctcctcgacctcacacacaggtcagcgctcttcattaaaaccaccaaagggaaaccttcgagttgcaccttcctcctcagcttcagaaagagtatcaggacggacctctccctaatcctccacctcttggacttcaatgtccccaacattgtcttcttcctcagccacaggtcgggcctgttctgcactcgacattgtggcgagacgggctatgtgttcgtcagatagagaagacttctgcacggtttgcttggttcatgccatcatcctagtctcggacggaacctggttggtatgtcccgagaaggttaccatgaatgtagcaatgggggtacctgtagcaacaggatttgggcggcctacgggcaaagagtcaacaaaatctaaacagacaatatatgtccagttggacggtagatagcgccaccacccctttcttaagctcccaaatgaagcgtccgtagccttgaccttcaatctggctagggtaaaaatggtgttgcactttcgattctggagagggtgtgtgttcactacttatctcccaatcttcaaagcttgaattggagaggttgtcactagataaagacaaactagcgtggaagcaaggatgatcctcgtatggaagttgaagcagatcctggttgatacgatgttcgcttccccaaaactctccagggttcatctacaaaacgtaggacacaagatgagggtttggtcgggataatgaacggaaataggttggttgtaccgaccaggtctgatcaaggaatcaaaaaacataaattttacataataatgatgtttgcaatctagaattttagaaatttggattaagatttaattttcactaagccccgaatgggtaag

SEQ ID NO: 168311 - DNA, 673 bp, Cannabis sativa
ccagatttcgaccttgaatggccctggtccccttgtgcaagccccgcctttgacccaaactcggacacatacccaggccggaccccaacctcgaatggctcggaccgtggccctagcccccccggtctagaccttgcccctacaacatttttcttaaacatatagttataacacatttttttatttttaaaattaaaaaattaaagtagttatgaaacatccttttgctatttatttttaacattttaacataaaaatagttaaataatttacacattttcatttttttaaaatatttttgttgttaaaaaatcaatataaaagtgttaccaaacctcaactatattaatttatatggtattgttaattatacaatatgtaaactctcatatgtaaacaatttgctaatatagctaaagcatcgagttagtgtaattgaatgaaacttatagttaaaaaaattatgaattatataaaataatatataaaaaagttattaatatgtgggactattgttagattttttatttgggcttacattaaattttattggttaatttattaaaatttagattgattagatagttctttgctgtgttagcccatattgttggtgatcactagttaatggacttaatatctgtgtgtaaagtctaggtgaagcagaagtgtg

SEQ ID NO: 168312 - DNA, 1473 bp, Cannabis sativa
taggctgttctcccctggccggtcagactagccatactcctttggtcagccaggtcggtctgtgggttaatgggaggttgattgtactaatttcttgggtttggtgggtccatctgcctaaaattattgcttagtggtggaacaaagtcacttcagatctcgctcctcaagttattgttgtcatgtgcattttctgtttgtcctaggacctggtctatcaaaaataggccttagaatgacttgttcttgaatattctagggagagcaacactgtgttgactgccaaggtctggatgataggtaatgtctcctatccgaagttgtttgtccgccctccaaggcttccagatgtcaggaattggctattcctgccatacggtctatctggaaagatttaaccgtctttaagcaggggaaggtttgtcctcgtgcttgagggacctagttggacagtatatccattgtcaacctgcctgtaggccctgactgaacgtcgatgagccttccttgcaaagggtctcttattagaccctggcctcttattgcggttctctcattcaaccgccttatcaagtcactggcctccctattgtggcgctttagctctgcttgatgggcctagaggatgacctcttggtcatccatccaccttaggaattcacatctctgttaggcaaaagaattgcaaccagcaacacatggttcttttatctaggtgacctggcctacactctcccaggtccacattaggtttgctaatagctggtttgctaattcctgttcctatttctcctgcataatactaatgaaaagtcccagttgtgctctgtggagggttttttgtgctgataggaccttctgtacgaggtgctattggtggatctattctgggtggcaaaggctgatcattaagatttactaggatagcaggattaataggattaatggtattggctgaatttgtagggtttatagggttggcaagattgacggtgttagtcagaataatgggaccttccatggtgggcagaacacgaacattgggatcagccttcataggatcctgaggaagtagaggtagtggttctcctaattacaaccatgtgattgatcaaaacaataaacaatgctctcaatgaaagcaccaaaatattgaccttgaattttggctaactgacaataaagccttatttattactgataatcaccatgtgtaaattttaatagcaaataacaaattgacacatcaatttacagaggttcgagcccttttatttggcgggtaatgacctaatccccttttagttttattgattctagagataataccatgcatattacaggcttaaaccttgtaatttctagctatgactctctttgaatgttaaaatggtgagaactgatgtattacagattctgaacgagtgagatgagaaaatagactaagtttccaatgtataggaagtggcgtga

SEQ ID NO: 168313 - DNA, 659 bp, Cannabis sativa
aaaaaagaaaaaaagaaaaaaaacccacacaccataacactacttcacctgagttgttagtatatcaaatctcaaatctcaaatctttacactatactactatgtaggtctactttcaaagtcaatcttttgaagaaattctctttctttcttttctaaaaaagtgaggttgaaaatggctaaattatgcaaatatatatatatatatatatgtgtgtatatataaatgaaaaattaatttataaaatatatggtaaatgctattttgtgtctcctaaaaagagaaattaatgtatgattaatttggtggaaagagatagaattataatctataattggaattgggatagagtgatcttagaattgtattttttttttataattattcaagttatctacagtttttttttcagtgatttcataattagtaagctaaatagtttttttcgcaatttttttattttatttgaatttatttccctcttatacgattagtcggtattcataaagttaacatattatttcaaaaaaaataattagtatttagtgaaaatcattgttactaataagtttttttttgagtcaaagtgaaaattttatttaaacactttcagccattacaatagacttgaaaccagcagagacattatgctgattaa

SEQ ID NO: 168314 - DNA, 715 bp, Cannabis sativa
acaaaacttgttggaacatccacagaaacaccaagagactgattgaaaatatcaccattgttagcactatcattctccacaaaatgaagaccctagaaagtgttctttattgattcatgaatccctcacagtcacagtagggatcactttttcatgaaaggccctattcctaaccttcaaaagcttataacaaagttttcatctagaaactaatcctgatgacgtggacatcaatgtttgacttgtggcaagaaggaaaatattcatggagttaaatgtctcaagtcatagcagtaggaaggatccctagtcatgtgcccatgttgactttgggagctccataatgggtatttgaatcccaccaagctattttcgagtcaccatcgttcaatattttgagccaacaagactagaagccttcaagttgcgagcctgggaactggaagatgtcaattggaagccaacctaggcgcctagggtttcacccaatgccgaagttgacatctggacataaggtttcaatttttagcttcatcttagtgcagattgctcaaaatttgtacttagacatgaataagagttgtcacaagcacactagaggcaccaaaatcacttttgaaacatttctcatttgaagcaccagtgcacccaatgcgcaggttgactgatggtgcacctaacgcctaggttaacatattgtcaacttggggtactt

SEQ ID NO: 168315 - DNA, 782 bp, Cannabis sativa
cttgttgcacaaacacaatattagtaatgatccatggtgtttggattgtagctcgatgtgttagtatagaaagttagttattactttcagttaggacttttctgttgttagttggttattactgttttagacagttattttcgttgtactgttgctttacttttgggatataaataaaggcacttaatgaagagggtgtagcttttgctgcattattactcttcttcaagaaactctgtttccttagttcttggtgctctgcacctttttcttgctgagacttaacatggtatcaatcgcctactgacattcaatgtgtcatcttcctcaactgatcctggaactactactactactgcttgatcgtaacaactttctctcctggaaatcccaagtcataccaacagtgatcagacatgatctggatgaaatcctcttcaccggcacacccccacctcagaatcttgtcaatggagctgtaaatactgagtatactcaatggaaaaagaagaaccaattgctgctctcatggcttcggtcaaccatgtctgaagtcattcttgcatctgttgcaaatcatacttcgtctcactctctttggcgcgcattagagcaaaaattttctagccaaactaaagctcgattacttaactaaagggccaattctctcatgttcacaaagacaatctatccatctccgaatatgtggagaaagttcagaccattgctgatgctctcattgtggctggggctcccgttcaagatcaagatcttgttcttca

SEQ ID NO: 168316 - DNA, 530 bp, Cannabis sativa
actaattataaatcaacattcttactttgtgattaaaaagtcagtgtctaaaagtattagtcacaaaaattataaatgtatttttggtcaccatatttattgtaacaaaattaaattagagacaacttgtatttaaatactatgtcatatttattatttcatatatctttctaagaaatttcttaataatttaacatcagtaaagttttttttgtatttatatgaattattctaatttcattaataagatcacagtgactactcacactattacaaaaaaagactttttttgtgagttttaactccaaataatataatctaactctttttttttttttgagtggcacaggaaattgtaatatccacgccatatgccatatattttaggtagtaaaaactaattattataaaaatttatgatacaaattatattaagcttctaaaatgcagaaaaataaagatgatgataatacttattaaactaaatataatatttcttacaaaactaataagaaataaaataaaaaaga

SEQ ID NO: 168317 - DNA, 506 bp, Cannabis sativa
gtgataattatgaaagttactaatatgtaaaatctaaaaagtatatgtgtgaagatgaggagagactttggaatgggattgcaaagatggagcaaaatgttctcaaacaaaattattatgttataataataactcttaacacattccacagtctacactaatatttcttttgaaaaaatagggtcttagatttctagacataaagctagtctccctattcttaaaatcgatccttttaatggataatgaaaattgaaaaaaagaaaataaagtttaacttatatatcttacaatataattagaatgtatattgataaatcatttttatttaaagaaagctaaggatattaggattggcccatttgccaatatctttgtacatacctcatttcttccatgtttatttgaccgatcgacacttccacaaagcatggctgattgtttctatttgaccatgctctttgcacatatgatatataatcaaatttaatataatacaatacaat

SEQ ID NO: 168318 - DNA, 512 bp, Cannabis sativa
ctattccaccttcgattcacccaacaccctcccatgacctagaccacactggcaaagaagaccccttcaccgttccacaaaccaccttaatttgattcatctccccaaggtctgacctagtactgtgattgggcagcttattattagccacctttcctatatttatacccattcttacgccttcctggttatcgtgcctaataacttttgaagaatgtttatcatgattcctgccttcagcctcagcaactcttccatcctttccccttcccaaactccggcaaccttctgtctcccttcttcccatctctgtctttgtctgagtctccatctccacctctagtctctacttttaaattttgacatcacccttacttttagtatcaaaatagtgttagatcacattatttcagaataaatattctactagtttgctagtcatgaaatggtccacccttaatctattcagaaaaaaatattttaacatttctgatggatttgagtagaatatt

SEQ ID NO: 168319 - DNA, 764 bp, Cannabis sativa
acaacacccccgcttagccaacccttggttagccccttagtgatacacctctggctagccaacaaggtgaacttccttcccgaaacttttgggagcaagtcacccaaaggccaatctttaaccaactaggtctaagaacgggtggaaacacccaagacaaaaacaacttaagaagtgagtacaatcacttcaaatacttagatccacctaactttatcaattggtatgatctaccctttgttaacacacaggctgcaccagccaatcaaggaagagcaggtggccaagccatgcccagggtagggctaaccagccaaagccagctgttaggtttagggttggttagccttgaaaatactctctcccagggtatggtcgactaggctctggccaatccagagctacaacccaaccaataagggccaatcaaccaggctccaacagcgtcagatccttctgagcaagcacaattggatcaaataagagacataatctagggcttagcttgcccaaaaccttcagaccttgaactggatatgttaaggggctcaccattcttggcatacatcaatgtcttgcccttgcccaagttcaagatatcgacgtggaagatgtatattcgacgagaagaccctctagcacacatcaagtacttcgagatgcaacttgatctctaaaaaattactggtgatttgcggtgtcagatcttctcggcaaccctatcgaaaacagctcagcaatggtacttcaagctggctctagaa

SEQ ID NO: 168320 - DNA, 701 bp, Cannabis sativa
  modified_base (665)..(671): a, c, t, g, unknown or other
aaaaaaaaaaaaaaaactaagtctaaaattaatattggataaaccgaaattaaactaatagatgttcgtgaaatatatttattgaatagaactgattcaatctaatatttaatggatgttagatcgattaaatgactgaaattaattggatcgaatcaaatgataacatctaacatccaatatataattatattaaatttagataaacttaaaaatatatttttttttaggaaaaatctggtattataaattcaaagaatcatttaaaatacttaatatggtccaataaacgtctttgcagaatataatttagtatataaaggtataatatatatattattttatactcatcattattcatgttcccaactatagtacataggagagtttcataacatgataacattctatatatattttccttatcattagttatcaaaatcaataagtacatataaatgtacgtatataattcaacaaatgtatattatatatttctattttatataaatatggttatgtaacagaatttttagtttaacagtattttttcttatttcttacattaattaacagaatatcttattagtttatagaatattctttattaattttataatattattatatatggaagaggtttcaatggttacatttttattgtnnnnnnnatggttacatttttttaagccatttgatta

SEQ ID NO: 168321 - DNA, 1986 bp, Cannabis sativa
tatgatggaaaaagatatttgggctatctcgggtaagcaagataacttttggctttgacccgtacttcttggagttagatcactataaatatcccatgattaatttttatgatagggtagatgaaatagttgaaagcccgacccattttctttcgcctacctaatgtattgaagtagactcgtttgtttagatgaaatatccgagattctttcaatacagtatcttcttaggcagggaagacatttcattattttctttgggggatcaaaaatatagtagtgttaatggttggacccaaacattgctaatgtgtttattacttccatatggcttactttttttatgttcttctctgcaaaaaaaaccccagaccatccagatgggtcttataaacaacttcttgggaaatattgttgccagaactaaggagggaagggaggacgcaaagccagccaaggggaaaggtaagtctgggacatcttcctggaccagagttaaagaatcaacacctccacctaaggtgcaagaggttgttcctcgggctttgacattggaagctgttctaagatcccacaccctagaggctacggcggaagcacctatccaggaagctgctcctggatctcaaggtcaagaagttgtggctggagttccctcctaggaaactattggggcttcggctcttcaagtggaacgtttgcagcaggttccacttgccactcaacatgtcatcaccgttgaggaagatgatgaggaagatggtgaaggaatggtcttcaacaagaagaggacagggtccaacatcgataaagagggcaagaggttaaaagcagaaatcaatttaaaataataaagctaaagaaaatgaatcaaaaatgaagaatgagactagatattttacgtggttcaagaattagcaacctctagtccacgagtcaatattattacatggttagaaaagcctatttgcacaagtattttgccaagtatctgaaccctagaatttgcatgagcactcaaagaatgagcttctaactatttgcatgaatgaattttcatatatttatagagctagggttctaatacgtgaaccttgcccactgatgagataaatacagataacatattgacattgagtccatttgatggagcccgacccatgaggcattgatattttgttgacatggatgcggcatcatgttgatagttgtcaaaaatgtgtcttatctttgtggataataaagacacataaatacatgattgacaacgaatttgatactaaactagctatctggacgcttcttagttacccttctggaggcactgcttaatgacactcagatggctgttgtggtggatgcttatatctgaatggcttaactttgttaatagatccaatccattatattgattaggccttcaattaggcctattgtagctaaactgaatcatcttggaattacacatgtcctttaactgcaaacacagataacattgaggttcgtctcgctaagtactgcgatttattcactaaaaagtgtctccacttttccagctcgtcaagtatcataatttattgaatatggagttgttcatctcttttttttctccaagtaaattgtttctacatgatgtttctaccatttttctattatgttcgtttatagtaagcttaggtttagatgaacataacgaacattatcccagataattttatcttctctaagtgaacagattaggtcatgttcaagcagatttgattataacttttaaccacaagtcttgctttgaaccttcagctgatttgatcaacaccttcttgttgattataactcttagccacaagtcttgctttgaacctttctacataaccatcaacattatatttgattttgtaaacccatctgcaacctatagcatgttgtttagcgggcaatgtcacgactatccaagtatggttcttctcaagggcatcaatttcattg

SEQ ID NO: 168322 - DNA, 695 bp, Cannabis sativa
ctactttcggaacttgttggtgctctctatggtttgtaaactaattacttaattgaaacaataccgttattagtgtttttgccatttttattggatcgagcttatgtttaaattattttatttaatcgaataatgcatgtgacgaccatacattgtcttattttaaattatgaggctgtattgcatgtgttgtgtttcttgtttaatggttttgttataggagactgagtcttaattaacgtgatttcacgtgcaattattgtgatgaaattgtgtttctaaaattttgtttattgtgattgagtagattttgatttgtgtgaatagctgtctttctcaaagaaataaggaaatgttgagaggtaaagataaaataatattatatagtaatttgcattgcaaatacttatatttaattctcaattgttgataaatatataagttttatttatttttaacagtaataatatttaaattatattttttgaacatcaataagtacctagttattaaatttctagtcattatccatgtatcatttttctatggaaaaaaaaaacagaaaaatacaaaaaattaagggaaaaaattcaaatttactatgggctggcccattaaacatttatacagtccacatacaaatatttacaaaaataccacatgctctaaaccttcagtcgcacggaacgaacgat

SEQ ID NO: 168323 - DNA, 1153 bp, Cannabis sativa
taaaataaaaatttaacatatataatttatatcactttttttttaaaaaaaaaaaaagatgttcattaaacaaaaaaaattaaaccttataatcattatagacaatattttcaggaatagttgagacattaaccatatctataagattcttagaaaaaatccacctaatacatagtctcaagataaaattaaaattacaacccaaaaaactaggcaataatctattacaattaaaaataaaattattaataggctaattaaataaattcccaatcaaaactttgataacaattttagaattgctctcaataataataaaattgtgcctccatagcacacaggcttctgttttcccaattaagggattagagtaggcaaaagacttgaaagcaatccacaacacaattctggcacggtctcgagccaggttgcctcttttgggttcattaaatattgtcaatatttgatgagtatcatatgcatttatttatcaagaaaaagcacatggattaattatttataagtcatggttactccgtgtttttcaaagtaaggaatgtatgttacaaatcattgtgctactatgtacgtaaaatgttgtccaaagtaactgtttgtagatttataagtcatggttaacttgatacctttatttgtaaatttagatttacaataatatatatatttttttttgtaaggtagatttttacctaataacaagaaacttacatgaaaatataagcataaatacctttcttaatttttgggatagaactcttatcagtctcgttagtgttcgatttcttcatcatagggcgacgatcgggtttcattacaggtgtaacaaaaatagagacatcatcttccacaatgggttgttttcttttttctttgttggtcaagaattttatacctatttctgcaactttagatcttttggatagagatgttcaaccttaaataatacaatgaaaatttaaagtttacaaattattctaaactgcttaatttattcgagtaaactgaattaaatcgatttacatttttttttaataaaagtgtatataatatattacataaattatatttattagtttttttttttgaaccaaaataattcattaaacagcaatatccgctaacacaatagact

SEQ ID NO: 168324 - DNA, 1755 bp, Cannabis sativa
tccatgctcctaaaacttgtaaagtccatgagaaatcaaacagctccccctcatgataaatgtcaatggggtcatattttttccattcagtgatttttccttcactgttgtggttcgtaccataccaaattctcaaaactccccagtgtgctttgacgaaacctacatggccacctaaatccaccagacgaaactccataggcgagcatattttgcactttgcatcaattggagtttttatgattgagaatttttcaagcttaacatcaaagacgatgatgtgttcaagtggtgcataccaataaaggaatcctttctcaaaaacaggttcgataaagaattctaagtcatctacgtctataacagaggggtagcggaggactctccaagtatcagatcctaaggtcaaaatactagcgaggttcgcatgtttagtacgttgaagaagaataattttgaaagtctcattacctgattccccgcaaacacccagtccgaaggatgacctaacaattcttagtgaaggactcgaaggtgaaggtggctgtttgaggaaaagaacttcccccttcagtggattgactatgaaagcttgggtagaagatgtccgagagtagcaaagtagtccattacaaaaagaatataaggtgatctcgtctccttccaattcaccaagcgatttgagattaaaaccacataacttcccttcttcatccctccaatatatctgttctctttctccaataaattttgaagaaatataaaaataactatttgtttgaggttgagcgatcggaggaatcggcggagcaatcggaggaactggatcttgagcaggaggtcgaggaatgggaggattctcaatttcttgtggtggagccgagtaaaaagaagacagcggcggaagcgtggaaatagtcgccggagccgagaaagacggcagcgaagaacacgcaacagaggagaaggtgaaagactcggtggaagcagaagtcggtggaatgggaacgaacggagtggttccggagccgatcgtcaaagatccgatggcggcgactgaagaagaagcagtcgtagtaacagtcgccggagcagcgacgacggtggaagaaagaaaaggagatactacggtgtcaatggaagaaacttctggagttgttctggtaggactaggaggtgccatgagagagatgaagattaggaatgaatgaaaattgtgatcgatagactcagagagccaagatttatacaacagagtcatacacaattcacgcataagaaacgatacaacttcttaagagattctggaagttagttagaaaacggtacaaaccggctgtaacggaattctaactaacttcgtagtacatgaccctgcactgccacgtgttgtagatggtgtcagacgccgtcaccgccgtgtggaacagcctcttacacccagatttcccttttgatttctccactgggtccatcgaaatcgaacaagttttcgatggacctgggaaatcctgatttaatggaccatctgctataatcaaacctacagaaaaggttatcaaagttgtcaacaacaacaaatttccacaacccattttatctcctcttttctctctttctatctctgaatctgcttctctctcgatgtctttctacttataaataataataataataataatataggggtccaaagttactaatacctataattttttttctgaatccaaagttattaaaattggttatgtatga

SEQ ID NO: 168325 - DNA, 959 bp, Cannabis sativa
tgttcgggacttttaacccgacttaatttatttttttctgaaactattagtgcacactctcggttggaaattattgggattcatttgggcttttgtagtaaacttgttgttgacaaagttagtaaaagtggtggattgtatcttatgtggataaataaggtggatgtccaacatataaattctctgcatctcatattgatgttcatggacgagaagccacagtatcctaggtgcggtggggcagctgcctcaccataaatcaaattctaaaaaatgtagtgtgtatatttatatatgtgtagaagtgattaatatgttaataaatgtatgctagagattttatatactaatagaaggtaaattaagagaaattacaatttaattgtaaaaataatataaagattaaaataagaaattgattacataaatgttacaatatatataggacatgtttatggtaatgattattgttttgttgctatggtatagaagttttttatgacaataaatgataaattaaatggtaataaataaacaagtgtataataataattaataatttttttttaaacaaaaaattaatttttattaaatcaaatcagctatcaaaatagcttccaaaccagtagggacataacccccgcgagaaatacagccaggaatagaaccagaagaacgagctaaaaaattagccgcctgattcccaaaccgtttaaaaatattaattaaaataggaaataaaagagaggactgcataagagcaacacaatccatgattaaaagctccaccggagacaacaaccgcttattctagttgcacgacttgcagcagcagcagcgagtccgactccataaccacaccagcaagcacaccccccgctacccacctacccttcacccaactgagcacctccttcaacgccatagcttcaactaaaaacgggtcgggttgaccataa

SEQ ID NO: 168326 - DNA, 693 bp, Cannabis sativa
acttctatttaaatttaaaatactgaaaatagtaaaattaaatatatttttattaatatacaatttactttatataattataatatttattattataaagttaaaccaagtattataataccatttttattacgtgcgcattatcaaacgcattatcaaaacaaatatcaccttatattaatttttaagaaaaaaaaacatatagagagggtacactaattattaataagtttgatacttaattagaataaaaaaaaatataattattgagatgtatgatcatctcttatcataaaatatgtacttaagcaaaagtagaattaatcattttttctttgaaattcatcaatccacgaagtgtgcttaaccgtgtaggattattaccccagatcaagcatgcttaattgtggagttctttcgtgatagcctaccaaaaaataagatgcaccttgttgatataggtagtactaatcaatccatttaagccctatttaattctgtactcctatacctacacagtctcggaaccatgccacttgaccttccctgtgcagtgtgagattgcacaacttacttggtatttccccttacagatcacgggactactcactgtcaaagttctgataccatttgtatcgtcctcgcttcaagccttcattgggcccttacacccacagaataatggctcttata

SEQ ID NO: 168327 - DNA, 2355 bp, Cannabis sativa
ataaagaggcctcaagagtgaccaactgtattagtctttgattagtttagaatcaacatgtgaagtttttgagtgataattattagttacatataatcatttgtatcaccttggttacattttggatttgttaaataccaatttcttggggtatttttccgttaaaaataaaatggtctaagtttttaacccggattttcagggttgagtagatcatttcattttgttaatactttttttatttgaaagcaatggtggttgggccatatttatgatagtcagatgagacatcacacccaaacatagaaaagaaaagggacgtgtatgagtgattttccatcaccaatgtcatatcatgtggcctaatttttattccttcccctcatttatatatccctttcttccttatcataattattaattattattattatcattcattctcttaatgcctgaactacatctcatctttcgcttcttttttttatctcacctcctcctaacaggtaactatatctattcttttctttctaataattttcttatatttgaacaaataaaacttgataatatatatatgctatatattgatgtccgtagggggaaaatgtaattcttgaatactcaggaaaaaatacgagctgcaacaattttttgatcactgctgatcgcatgtcctgtccctttattccttctgataagaaatcatcagcctcatcaaataactcaccgagcaccggttctcttgtgcaagaaaagaaacattacgacaaacaggccgctagacatcgtatcggacatgcatttcgtaacagctgggggagaagagacgaatttaaggccactaagaaatataactcgtcatcggtaatgacttatttagtacttcatagatttggttattttagctctttgcatcgatgcatttttagtcctttggtttggattagctaagaaaaacaacttttctaccaatcttttctttatgaatagttaggtgtattttggcatcgaaacataatagagatacgcctactatggatgcaaaatgctttcaaattataaggaaaaaaaataagagagagtcttcaatcaatcatattcttggtcttagagtgcataataccttttactgtttttcatagtaagaagaattaaacatctcacgaatttcgttcatttcttattgaactgcaggctgatgaaaaccaaaatgtattcaagtcttggtatctcccactagacaaaacactttcatgtctttcaaagttatatcgttgtttagaaccagcagtttgctcagaatccatctttgcattttgtgataaattctgtatgttacttgcatttttaagtttgttgtttaaccattctttacttgtgtagaaagcaagcaagctcataaccattctatttgactggtctagatcttcatccctggcgaggaccttactacccagagttttggagagtcaaatagataataagagggtttgtgattcacttgcaactaaattatattctctttttttccttaaatttctcttgaactctgttttttgctattctcttcttttagttattagtttagcaagctccgtaatattttctgctatgtcgcaggtacctcaaacgtcacagatatcacaaatgatgtcgatgtcacaaatgtaaaaactatcacagatcctaagagtacaacctatattttgcaatagactcgtgggaatgagaatggtagtgatgataatgagtccacatcttagatgtttagtttattacttctgttagtatgaacatttataaactcttttaaatatataaacaatgtttagtattaaataggggtgttcatcaaaccgcccaaaccgctgaaaccgcccgcaccacactgcaaaaaaaatacagtttaaaattctttgcggtgcggtcgcggtttgaatttttcctaaaccgtgtggcaatgtttaaaaaggcgtttttgaggtgcgccttgaggcgcgcctcaagctgaggcatttaaagattgcaccaaggcgtgcgccttgttgaggagaagagaggtgtatgccttaatgggtgaggcgttgaattgaggtgtgaggtgttgaggcgtaagaggcgtgcgcctcaaattttgaaagttaaatgggctatttgagccttaaaaaaaaggcccagattgtaattttatatttgtttttctcctgcccaacttaaaaaacctaaaaaaacttttaaaaagccccatatacattaagtgaaaattacatgaaatatgggatttcataacaaagttaaaaaaatatggcatttttaggtttgccacttttctatggcattttttcacattta

SEQ ID NO: 168328 - DNA, 758 bp, Cannabis sativa
ctaaggttatgcttgaaagttgaattttagtgagtaaagaaaaaatatatgaaaattgtaaggaaaaaaaaattaaacaatataatttctcatatttggtatgaaaagaaaaattgtataaaaaaaaacactcaattcaacaaaattttccatatcaaacttgaaaaattgatgtaattttttttttttgttctcactttcttttttccttatattttccttactctttttttcctcaccaaaattcaaatttcaaacttaccctaagagttttgtttaatacctttcacctcttgattaggaggcattggataaaaaaaattactaatcaaagtgtgcccagcttattcttttataaattcaactacattgttcttctattcataacaaaattatttaataaacactatgatctcttaatcatcaagaaagtttaacatacatacctaatcaaatatcccaaaagtttcacttattatttctctatataaattaactgttatattatggaaagattaaggtaagcagaaaataggttgtcccttgtatattactttaaacattgttcatatacaacctatacccaaatcgttacagtgatgcatatattttattttagaaaatgctattaaagaacatacaatgaatcccacaaatcagtaactgaatcccacagatatcgtaagccattttactatatatatatagtacttttttatagtagtaatttaaatatcatcacttatttattttgacat

SEQ ID NO: 168329 - DNA, 683 bp, Cannabis sativa
taggttaaactaatttaattagccaaatgggcccccaacctgggtgtccattagggcttttaggggctcggatgccatttctcatagtcttatcttcaaagtttgaaacttgactgaggcatgtctctcatgtatccttggacaatggctaagcgaattgctcctaggaagttgctgggaactaaaattgatgcaagacggtgcacaagatgtaaacctaggtggagtgtagcacactgcacgaggttaaatcactgtatacacatttaatgcggcatgggaaagagcattcaataccttacgctgaacagatgtactcaaaaataaacccacaattccctaattttacgatgctccatacatcagttgatggctacataatgagctatcaaatcataagtaagagataagtcatatctcaccaaatacctatagtcagcccaaatacatcataaaaagtaagcaatcataccctatgataaaatttaggaaattgtgcaaagcatggctcatacaattacgacaatgatggccttttaccaccattatgagcctataaatatctcaatgatgtatagaagaatagtgtaaagaccgcatatggttaatgctttgaattattaaataattaaggtttatgtatgaaattaattaataattatgaaaggtatattttggaaata

SEQ ID NO: 168330 - DNA, 3229 bp, Cannabis sativa
tgcgagatgcatgaattaggtataatgcaagtttttcaagatgggatatctcgactctgcccccagtaacctttttctgacatagtaaataggttgttggcgtttaccctcttctcgcactgaggctgcactaatggcatgctcaaagacagatagataaaggtataaagtttctccacttattagtttggccaaaattgggggtgttgacaaatgcttctttttgcctttgaaggcttcctcgcattcttctgtccattcaaatttcttattacctcggaaaacattaaaaaatggaaggcacttattggttgactttgagataaatctgtttagtgctacgattctccccgttaaagcttggacttcttttggctttgttggtgagggcatctcgattaaggcctttatcttttctgggttggttacaattcccctcgcatttactagaagcccaaaaattttcttaaggaaactccaaaggaacatttcttcggattaagcttcatattatattttctaagtatactaaagcattctacaagatcctttgtatgatctttactttttattgactttaccagcatatcatcaacgtaaacttccatactttatctgctctggttttcaaacatgccattcaccaataattgatacgtcgctccatcactttttaatacaaatggcatgactttataacagtaaagtcccatatttgttacaaagcttgtatactcttgatcaaggacatgcatttttatctagttatatctagaatatgcatcaataaaagtcatcagctcgtgtcctgctgttgcatccactaactggtcgatcctcggtagtgggaaataaactttaggacatgctttaataaagtctaaaaaatctatacagctcctccaagtaccatttggctttaggaaaagaactgggtttgaaatccacaagggatagaaggccttgtatatgaagtcattaattaataagttgtaaatctcttctttaagtgccccttgtctctctgagtctaatggatgtcgcttttgcctttttgctagatagatgtggtcgatgtttaaatgatgaaaaattatattagggtttatccctattatatatgagtcgctctaagaaaattgatcgtggtttgactttaaaaaatcgattaatcactattttagtttttcttcaaaaattttcccaatgtatacacatattatgggattattaagatctaaaataacctcttccagctcttccataggttttacctagtaatttttatctcggattctgggatctagatcttcttcttccttctcaccttcttttgttatgattaccatcaattgatgattggctttcttctgaagttctaatcgataacactcctgggccaataattggtcgcctcggacaactcatactcctgcttgtgttagaaaatttagggacaagtgattgatcgagcttactgccactagtcgaattaatatggggcgacccatcaataaattgtatactgagtgaagatcaataactaaaaattcctacatcagcgtcgtttataagggtggttctccaacagtcaatggaagtttgatgatgcctaggctggcaatgctatcacctgtaaatccacataggctcaccatgcaaggcttcaacatcgcatcctctaaccccattttttcaatgtttccttgtaaaggatattgactaaactcccatcgtccaccaataccgttttcaccctcttattggcgagctggactattacgacgaggggatcaacatgtgttttgagtcttcctctgagaagataatcggagattcatttgacttttccttttttagtggttctagagcaaacgacgattatcccatttttatttcattgatatacctattttgggcattattgctatttccagcgaggtgtggccctcccaaaatgacaaggatatcctcaccctcaatcagaggaggttgcactctttggttatttgggttattagggttgtttggctggttcagctcattttcttgatgtcttacatactgtctgaaatatcctcgcgagattagattttctatctcgtcttgcagttgtcgacattcttcagtagtatgccatatatctttgtgaaatcaataatatttcatggaatcacacttatatctcgcatgcctcatgggcttaggcttgtgaaatgcaaccctattttgatttgtgagaaatatgttctcacgagtttcattcaactcggtgtacactaaataaattgaaacttatttgtcgtgctttatatgtttcttttaattcttagatgattccttcgaatcatcctttcttttcatgtttgagcaactaggattgtctactttagtcgagaccgtgcttgctattgccgtattcgtgttgggtttacttctcgagccagttttcaacagcttcatcttgtttcttgcttcttctttgagcataaatacttgcgctctttcattaaattcattaatgctccttactgggtgaccctgtgatcatcccacaattttcctctagccatggacatgttagttgtgattcccgcgtgaagtgcagtgagttgaatactgtcattcaggtttctgacctttgtagtggctgtgctaaaatggcttaaataagccttaagcgactcgactggttactgtattatgttggttatggatgatgcttaaggtcgtctgtctctagcagcttgaaattgctttttaaagtccctagatagctattcccaagacataatagaatgatgagtaaatttgtcgaatcaattgctcacaagtcctcatagagaagtctagaataaaatgcaatgcaaattattcgtggcatgactggctcgcataatagtgttaaagttattaatgtgagcgactaggtctgtggtcccatcatactgcgaaacatgtgggtttttaaatccctggggaaatctagaatttaggatatctggatggaatggcttggtttcctcatccgagttgtagcctggaaatttaccatgctctccatattgatactccctaaacttatcttctagttcaattatttgtagttggatagggtccacttgctgttgatttacattttgattaagctgatggcgtaaattaggtgaattttgattcagatgctcgcgaattgttgggttttgtgccctaaataaaaccctttaca

SEQ ID NO: 168331 - DNA, 1445 bp, Cannabis sativa
ttttaggattgatatcggtggccacgcatgacaagtgcgtgaggctccctatggtgattagtagaaacaaacaacaggcgtttgaggggatctgtgaaagtgttaggaagcgtgtgcggggattgaagtataatttctttttagccagggggagggaggtacttatcaaatctattcttcaagctattccaatttatatgatgagtgtcattaagctttcgacgaaaacttgtggaaaattaaagtctattgtaagacaattcttctgggattcacctagagatcaaatgaagattccttgaatgaaatgggaaatagtatgtcagcttaaggcaatgggtgggcttagtttttgggatttttaactttttaatcaagctcttttggccaagcaagtttggaggttagtcctatatccagattcattgactgctcgaattttgaaacataaatattttccaaattgctttattcttgaggctacaaaaaaagttggtttgtctcccctttagtcgagtttgatttggggaatggaatttcttaagtgcgggctttggagatctattagagatggaactcaagttagggctttcaaggacccatggctcccgcgttcgaggacttttcagccactcacgaggaggattaatgatgattgtcatgtgagtgaatttattcttccatcttatacttgggatgtggggaagcttcaacatattttcttgccaatggatgtggacataattatgactattccattagcgaggcgagaggcaacagatagttggtgctgacactacgatagaggaggggtttatactgtcaaagtggctactcattggcctggtcgctccaggttgatgagggagttgtagattcatccaagttaactcattggtggaatggactattgaatctcaagctgccaccaaaggtcaaaatttttggttggcttatgttccatttggctttaccagtggcaatacaacttatctcctgagaagttcaggtacctctttattgttcttggtgtggagaagaagctgaaactcctgagaacactctatttttctaatctagtttgattctagtgtggcatcggttcggggtgtggtaggtgctttgtcgatgtgcatatgggccaatgcatgaaattctcctattactctttgtcaggctatcttgtgaggcttttgaagtgttgatgacaaccctttggtggctgtggtatgataggaactcagtattatttggcaacaagaagtcaagattggatattattccagacctagccaataactatctaccagagtttaagaagtatgattcacgaggcttggacttgggcttgggtcttgtgaatccaggggtaaaccgagatacacgatggataccacagttggaattattttacaggatctatttactatcatgtatgttggatt

SEQ ID NO: 168332 - DNA, 1166 bp, Cannabis sativa
  modified_base (1095)..(1095): a, c, t, g, unknown or other
tgacaaataattaaagcccatcagtgggctaacaatgacaaggattgggctaagcccaatactagttaaacttttgggaaggtaatcatgtttctcatccaggcgagtctccgccaagcataacctacattcagaggacttctagctccgtgtagtcgaaagggtttgtcagcttgttcctagaagtaaattatagttttcctttttccaatccatgcaaaattaggaatttactttccatagatctcagcgagagaacaatatcaagcttaaaagggaaaccacataattgaagatcaaataattaatacataattaattacccacaatcaaaggacatagtatgaacaactatcaccgtgatcaaactgccaagttcgcatacagttgtcaccccatggactgggctttctattataagtccagtgtattgtattatttgcaaaacccataagaggaaaaacttctattactctataaatacacaacaaatccttcatgcaaagggttggaaattcttaactcacaaacttgagaagagaatagagaaaatatactcattgtaatctttttggcttttctagcccaacaaataataaaattgactcgtggactaaagctctttaatgcccaaactacgtaaaaaatgtaagtgttctcttctggtttgtttcttttgattgtttttccttagttcttatattaaataattcgttttctgaaaatcttgataagcaaatgttaaataagatttaaacaaattataaaacaataattaatcactatattagtaaccaaatggtttcttttttagaaacagaaaaaaaaaaatatatgcttcccaaattatcttgaaatgttcacattgaagagtagatcctaatgatatttcttttaggctcaattgagtaacgatgtgaccataaattatttttaaaacttagagagaagagaaagaaaaaagaaagaaagaaaatgagttaggttaaagagagggaaaaaaaaaaaaaagattagatcacgttaaaaacggtattgaaacttacccaaaaaatattattaatactaaagtaaaatgcataaaaaaattgatanaaaaatcattaaattttttttcttgtttcattggaatgatcattcctttctttttaaaatggaatagtcat

SEQ ID NO: 168333 - DNA, 675 bp, Cannabis sativa
tgttgtgctttagtaattcctctaagtctaaacactaactgttttcagccaattactctttttccggccataccttttcattcatggccacgcaaatgttgtgtaacagacatgctaaggccagtgacaaaatttattttctaaaatttcctatttttactttttcaatccatcttagtagcctttgcagagagtttgtacaagctttccattacagccacttctttacctggtccaagctttctaaaatctccttctgatggctctcctttggaagatcatataccttgtatctcaccgttgttggcagtttaatttatctcactattactcgtctatttgttgcttgttctactactgttcactaggctgttaatctttgcattttacgacatctttggggtaccatctttcagagtctactactgccttccacctcctttctggagttgtgagcttactgtgatgtagatcatggtcgtgatcttgtagaccaaatttgccactggttttcgtatctttttgggagattctttatttcttagaagagcatgaatcagtctattgtttctccatcttctacaaaagttgagtatcctgccatggcgtctactactaaagaaattgtttggttgagatgtttaattacatatatgggtgtcactcactcttgtc

SEQ ID NO: 168334 - DNA, 1191 bp, Cannabis sativa
catattttagatcacaggatctagagaatatagtgaatactatagtcctccttctttgtcttcttatgattatggtaaatcccttaagtgggtaatcatttcccattttccctttaatttgcttttgaacaagtgttaacacatttctttgtctcacatatatggatctacaggaccttctccacacttcaagcggaaaaaggacaaaaaggttaactgccttagagacctccttagacgtcaacatggagccccccaaaaggccccggaagatgacgaccaataagaaatgagcctcgcagaccatagacctcaaggctcctaagaaccaagttcaaactcaccctcatggcctcgcacatatcgaagaaactgttcctaaaacaagtcaggttgcagcctcttcgagccaagtaccagagactttacccatcgaggctgggagcactagcttggaacactctgcacagtacgctgtagcttgttgacatcacctccgatccttttttcctaacgactgggatttaatcaacaatggtagtctgaacgagatggttgaaaggagtgttgcctttggcctcttggttagtttccttctccttctcgtttcacttattctttcaagaaccctcactagtacttatgccttttcattcatttattttgagcaaacctttatctcctttgtcgcccaacgtcagggtctcgacaggatgaaacaactagaggtcgagcttcagaggtcaattgggcaacgcaaggccattgctagagaatggaacgaggctcagtaggagatctctcacctaaaaaagttgtcaaggagctgaagagggctaacaaagctgaacttgaggcatctcagaaggaagccaaggaaaaatgtgatctgtgccaaaaactcaaggatgaactcaatgcagcaaccgtaaagctcgagagggccgaggccaataccaaggagcattgcaacaccattgccaagtgctttatctaccaagcttggatggcaaatccagaaatggatttgattttcctggtaaagggcatggaggaagtccttgcctactgcgagcaagccaaaaatgaaaaggaggacgctaaggaagctggagaaaaagaagaagaaccatccaagtctcctactatgtaggcttggtttttaattatttacttttattttttattttt

SEQ ID NO: 168335 - DNA, 1614 bp, Cannabis sativa
agcattaaatgtatctttaatgctcttcatcctctaaatctttacttctttgttttttctttcccttctgaccacattaattactcttttaatcaattagatcctcttcagcctccattttatccctctttgctctcatctttcttcttaatctttggctatcaaatcatcccatttctcaaagagccattttactccatatttatggcggcaaggaagcatgatggtcattgtgcagctcaaagatctctacccatgatgagatctactcctagagaagtggcggctatgatctgcgattggagaggtgtcgatctgtggactttctggttttttctatttaaggtgcatcctaggctacaactccaggtatcttcttccttatttgctcttcttacctatttttttctgcactttcttctagctatggctctgattcccacttcaactcctattcccttgtccctaactcctgatgaaagtgatgtgttcactctgcctgatattcctgatgattctcatccctccattaaccttctcctgcgtttgtttaccattcgtcctttcaatcgtccctctctcatgaaaacactctcgcaaatgtggacctctcaatgccgatttcctattgttgtctctgaacattctgagggattgtttcttgtcacgtttgggtgcgaaggtgataagaagagaatccttgatgggcagccttggcattttgctcaaagcttgaccgtttttgcatctcctgatcattcctttcctattacagctgatcttttgcattatatccctttctgggtgcaagtgtatggcatcccctttcgttgtaagtcctatgatcttgccaagcttatagcttcaggcttgggagaccttattcaagttggtgaggataccattaaggaaggcactgggccttacttaaggggtagatttcttctggatgttaataaaccacttaggaggggtattaacattcgttttcttaagatgggtagggaattcaccaaatggttggacttcaaatatgaaagacttcctgatttctgcttttactgtggtaagcttgatcatactcgaaggttctgtcaaacttatttgcaaaaatgtgatgaaaatccagttccaccacctagtccttataccattcttcttcgggggaaagaaaaatctatggacaagtctggtcctttttattatccccaccctcctgctttacccatctctgaattatcacagcagtctcttcctcctaatcagggaatgccaaacccgttcttggcccaatcttatactttcacgggtttgttgaattctaccatcgggcctagttcgtttttggggtcacctgttaactctagtgttcttatgattcctacccctgttaatccgaatcttagcactcacggtacctctaattttactgagtatgttactcccctgcattatggttctgttcccagtcatatgactattgcacccacggactctactattgtttctgatcactctgaattccagcatcctgaggttctgatggctgctagatctcttgctgatgctattccttctcttgacttgggaaccaatatggagaagcaaactgct

SEQ ID NO: 168336 - DNA, 3561 bp, Cannabis sativa
gaacttgagtctcttttccatcctttatattgaacctcttaatgaccttctcaatgtaagattgttgtgtaagcagcagcctcttttccttcttgtctcttctgatttcaatgcctaggattttcttagcaactcccatgtctttcatcttgaactcactatttagtacatactatagtttgcttatttggttttcatctttacccatgataagcaggtcatcaacatagattaacaggaaagttgcaacttgtgaatttagatttgtaaaatacaagcaggtgtcatacttagatctgatacaaccaactttagtgactacagagtcaattttcttgtaccattgccttggagattgctttaggccatataaagacctcttcagtagacgaaccagttccccttcttttgattccaccttgaaacctttaggttgctccatgtatatagtttcttcaagttttcatttaaaaatgctatttttacatctatttgttgtatgtcccagtcaagttgaacagcaattgcaatcatcattcttattgtcttcatcttgacaactggtgagaagatgtctaggtaatctacaccttcaatttgtgtgaatccttttgcaactaatctagccttgtatatctttggttcatctttagtcagaccatctttttctctgaaaatccatttatatccaattactttctgtccatctggttttattacaacaatccatgttttgttcttctttagtgagatgatctcttcattcattgctgcattccatatctttgagtgcttactgttgattgcttcttggtagcttctatgtacatcttcgtttgattcttttgctatagcaagagcatatgcaattatgtcagcttattcaaatctggcaaggggctttatttctctccatgtctatctcttgcaagttgataattctccaggtcttcagattggttgtcttcctcaatgtcttgatcatttccatctagaattttaagatctccacttgtatgctgcaatggctccacctcgatttgcatcttgggttgagagttattacctgaaacattaggcagaatacccttctcatttcctttaaagggaaaatcgttttcattgaaaacaacatctctactaatcaaaattttattattctcaattgataacagtttatagcctttgacaccaacttggtatccaaggaaaacacatttgatagacctctttcttagtttatcttctactgtgtgtgcatatgcaacacaaccaaatgatgttaagtgcattagggagggagtcttaccattccataactcttgaggagtttttagatcaatggctctactagaacttatatttattaggtaacaagaggtatatagagcttctccccagtacttcttaggcaaaccagaatcgagtaggacacatcttaacttgttcagaagtgtcctattcattctttcagcaaccccattctgttgaggatttttaacaacaattctatgtcttctaatacctgtttctacacgtaactcatcaaacttatcattaataaactcaaggccattatcagttctcaaggatttaatccttttatcagtttgattctcaacaaatattttctaatttttgaacttgttaagacaatcatttttctgtttaagtaaggaaacccatacctttctgctgtaatcatctatgacatagaggaagtattgatttcctcccggtgttttcaccctacttgcaccccaaagatcagcatgtaggtactccagaacttgctttgctctgtacttgcttcttgaaaatttaattttgtgttgtttgccctgtacacaaatttcacaaaacggtaagtttgcatgagtataatttgacaatataccttgtttagatagctccactaatccttgctcactgatatgacccaatctggcatgccaaagcttggaatcgatttttcctttggtgactgcagcagcttgttcaggggtcatagtttgttcatctagaaagtacaaaccatgtttcttgatgcctttcatgacaagtaaagacactttagtaattctcatagtccctttaccagtcttgtactcgaacccttcatcttcaagagtaccaagagaaatcaaatttctcttcagatcaggaatgtgcctaacatttttgagtgttttgatagtgccatcatagcatctgatggcaatggtgccaataccaacaacttgacatttgtggtcattccccatcatgacttttccaccatcaatttgagagtagtcaatgaaccaatccttatttggactcaatggtatgtacaaccactgccaagaatccattcatcattgtccctctgatctgaacttgtgtatgcatctcctacctttggatctttactttgttccttgataataacaaaaacatcaccatctaaactgtagtgatcatcaacaacaacatttgagtcatttcctttatcctcttcatctttattttgccttttcttgtcccttagttcccagcaatttctgattaaatggccaactttgccacagtgatggcattttcttgtttccttttgtcttaatttcgatcttgtgcttcccttgtgccttgagtaatttctaaacttggattgatccctaaacctggaatttcctcttcttggttgtcttcctcgaatcatcaaggcttcatcatttttggtttcttgtttttcagcctttttctagtttagttcagcatatcttgacctgagagtgctcattacatcttcaagtgtgagagtatctctactgtacattataacagttctcatctctttgaactgatctggtaaagcatttaaaattatcacagcttgatcctcctccctgattgtttctcccatattagttagagagagaacaattaagttttgctccaatgtaacagtggcattcatcttgaatccatagaattttcctttcaagaaaatcttggtggctgtagactttgccatgtacagtagctccagctttttccaaatccccagtgcagtcttctcccctataacttgcctcaggacattgtcagcaagattcataataattgctgatcttgcttgctttattgtggtttcaacttcacctttcttagatgcatctccttcattttcagacttttcaatcctttccaccaatgcagagtctagtttctggtagattagaatggccatcatcttttctttccatagactaaaatctcctgaaccatcgaacctttccaagtcgaatctggttgatgaagatgccattgatcaatctttcttgattcttggcaaccttagtgttgagtcttggatcctccaagaaccttgctctgataccactattgtagattcctacaacacaaactcagcacacacacatgcacaacagtgctcataaaccagatactaaaacaaaaaaagaatcaaacataaacaagacaaaaaatcaatgcagaaaatagagaaaaataaagagtgagacaaggaattttatactggttcggatctcaatgtga

SEQ ID NO: 168337 - DNA, 953 bp, Cannabis sativa
atgtgttgggttttgtggtggttgttggtttaatttgcaaggtagtagttttgttgttaatggagttgtttaatctggtattacttatctcaatggaatgatgctcaaaataatgacactaatgctaggcagtctacttctttttctattgttagtacagagcattggattttacctattaataatatgattaagatcaatgtagatatttctgttgttggtgggaatgatagctttgggattggttgggtagcgtgtgaccatggagaaaatatcattgaagctgattcaaagttgttgtctagttgtgtacaacagaatatggcagaagttatgggagtcaaagaggttctaacttggatcaaacatcaaaatttttctcaaattattattaaaatttattgtcaagtagttgttcatgcaatgtcatactctccaaatgacttctccatgtgggttgattatttttgattgtaaacatatatatatttttttttttacttaaagcaatgtctttattatttttgttaaatgatttgtgaataaggcagctaattttttagctcgtgctgcttattctttttcaggtcgtcgatttagagggagatttatcccgactaatcttcatgctattttattaacaaatttacattttaattaataatacaatgaactttcaatgaaaaaagttttaataatatgtatatattttatgagttatctcatttagctgaaaaattaaactctttacaaatttagttggcgctgagacaaattaaataaaaaataataattactaattttgtctcctaaacttttgatactatctgatcccgttccctaaaatatacgggttgttaaaaaattttcttgaacttacatttacagaaatttagtcatttgttaggtttcgtcttattattttgttcaaatattgacgtatctttgtaaat

SEQ ID NO: 168338 - DNA, 753 bp, Cannabis sativa
gctatcttaactccaaacttcaaatggctgctaccctatttttcgtttgagggaggatattagcacctaaactatcactttctttgttaagtatattttattagttggtagttagttactgaagttacttaagtttgtttcttttccttgcttttctataatgtaatcttgttttggacttcttataaataaagatgctctcactaattgtgagctagcttttggttcaatatttttctttgcctttctctcaaattgtgctatgtactactattgttctttacactgagaacccgaagccaatttcatcccacacccacaagttcgcacaccacctgacaaggcaaaaatttgtgggaatcggaacccaaaacctcacctgcatgaatcccacaaccattcgctccaagccctgccgacaaaagcaaacccctcccaccaacaaagaagatgttatagagtttcggagacgaaaagaaaacaacttgcgagccctgttctgtccaaaacagaccatgccaagacaaggctaggtgataacaatgaccaccctagccgagatagaaggggatattgcctcaggaacctagcaacgacactagggtttacgagagaaagagaatacctagggttgaaatgatagacttgaatcttgactttttttttcttccaattagttaaaagggattttttcagttttaaccaaaaaaaaagtaacaatattaccaaaatactttcaactggccaaataaa

SEQ ID NO: 168339 - DNA, 560 bp, Cannabis sativa
tgctcctggccgtgggaatttctcaaacaacaatcgtggtggtgcatctcgaggcaggggtcatggtagattcagcaacaacaatcgtggtggtgcaaaacccacttgccaagtgtgtgggaagtatggccatactactgctatttgctacaacaggtatgatgatacctacatgggatctgaccctaatcacaatcagtctcaaagaaaaccaggtcctactgctcttgttgccacccctgaaattgtggatagtgaagtctggtatgctgacagtggagccagcaaccatgtcacacaagatggcaacaacatgacccaaaagaatgactatggtggtaaggataaacttattgttggagatggtcaccctttgcccataacacacatcggttctggtattcttgctacagattttcattccaaaaatcttattcttaaagatgtgttacttgttcctgaaatggccaaaaatctcataagtatttctaaattgacatctcacaattgttgggttttatgccctaattaaaactctttaaaatctgattagttatcaa

SEQ ID NO: 168340 - DNA, 804 bp, Cannabis sativa
ccttatgagaggcattaagaaattgttaaaaactttgctttgaaatgtaatgttataaaaatatgagatatagaataacaataagatgaatagagagcccaagaatacaactttatgcaaaaagattacaactactaatctataaaggtattacaaaaatacaaataaagaggaggaaaagatgagaacaaaattacagctcaaaacacataaatgtaaaatcaatatgaaattatatatataaatataatagaatatatatatatatatgatataacgtgtatagaataatatagtgaatagaatagagaaaagagatgaaaagaaaaaccaagtgatgaaggatcaccaaagtttgaataatgtttcaacacctttgtgaaaaagtttatttttctcctctgcaaaacatttaggattttgtggaaatgtttttgaaaattattaagccttaaactctctaatcttagtttttaaaaaacagaagagaaaaaagtgtcttatgagtaaactataggatcttatttatagtgtttaggttagaccaaaatttgaaattcaaattccacttcgctgtggctgttattagacgaatatataggattaaatgggatgaaaactagtttcaggcgacatgtttcctggagtgtttcccacaaaccacgcatcaagaaatcatcgctaaaccctaaaaaacccacgacatccctactagtaaaatttcagcaactcaaattttgagttttgaaactcttcttcgagccaacttgtcaccaaacatttcaatctttattttaatgatat

SEQ ID NO: 168341 - DNA, 734 bp, Cannabis sativa
ccaaaaagttaaatttaataagtcgtaaaagactaaaactgtacataacatccatcattcatcatctcttattattatatagttttttaaatggtacaaaatatctcattcaaatttaattatggagaccgtcattaaagaacgattaatatacgactaagatgagactatgttaatcaaattgttctccataaataacatactctctcctctactagcactaaattgagtttttaagggaaagataactcatgaagcttaagcctactagaaaaataactaatataataagatactagttgaaaaataatttttctttttaatttagaaataaaagacaatctatgtaaagagagagcatttataatatcctaagtgaggagaaacttttttctttagttgttagatttctttccataacatggttgagagaggtagggacctttcactttggctattatgaaatcaccaacaaaaaaagatgtgaatcaatacgttcttatacaagaaaatcattaagttatttaatataaataattatattgttattataattatacaggaaaattatattattctatttaatttttataattattagtaatgtttatatatatatatatttagtaatgattaatctttattaaatcaaatcatccacaattaaggaagtaattattagaatattttatttatggaaattattttctaattaaggaaatgattttctattt

SEQ ID NO: 168342 - DNA, 521 bp, Cannabis sativa
atactccgttgtctgtgtgccagtttctagtgttggttctttgacctgtttcaacaatctacaaattttctgacgtgtaaacccacaaatttcccaatatttggtcttgtgggattctttcaaatgtcatgttcggtcctgtggtctcttaaaggtcgtttgttatacacacactttctaggcctaaacgtgaggatggtgtattaagagttagttccacattgctaatgatggaaataaattgtgatatataagatgaataggttacttttcctattgccaattggttttgagatagaaccccattcatcttatatctcaaagtctaacaattcctgaagacacaaaaagactactatgagggacaccacaggggattaagggtgatctgtcattagtagttatttgagttgtgctatggtgtgtggtgacttttgagtacattcggtcacttagactaagagttagaaatttctgtgaggtaaccacttgaggttagctcaagtggctataggaggggg

SEQ ID NO: 168343 - DNA, 542 bp, Cannabis sativa
cttgcctccacctctaaaggttagccgccacttctaaaggctagcctccaccttcaagggctggcctccatttacagaggctgaccatcaccaaggctggctaacacatacaaagacctggccaactcttgacaaagctagtaggaacatgacctgccaaatcctagcaggatcatggccgaccaaacctcatcctacaaaccttgtatggctggctagcctgcatcttacagttgtatagctggccaacttttgccttgtaggacattgatgtgtagcctttattcatggatagcaagccaagttacaaattaggcctggacaacccactaagatgccacaaaaatatctactttcaaggggaaatttggtcatttgtatttattaatttaatatgtaaatatctcttattttatatgctaattagggtttaagctctcctatataaagagccttaactcaaccttaagaccctaagtctcattttaagccataaaactctaagtctaaatccttaatcctcttctctctctctctctctc

SEQ ID NO: 168344 - DNA, 959 bp, Cannabis sativa
  modified_base (903)..(917): a, c, t, g, unknown or other
ctacattgatccaagaatctggcctattcaacaaaagagacggttactagacaagaagggcgcccaagcgctcaaagataaagtcgaaaggctgagagccaatgacttcataatagaagcattctaccctcagtgggtctccaacccaatgccggtacccaataagaagtggagagtctgtatcgacttcaccaacctgaacaaagcatatccaaaagactgattttcgctgcccaggatcgactagctagtagatgccgcatctgactatgaaatcctaagtttcatgaacgcatattcaagctacaatcagataaaaatgcatccgccggatcaggagcacaccagcttcatgacggatctaggcatgtactgctacaaagtcatgcccttcgagcttaaaaatgtaggggccacttatcaaagactggtgaacatgatatttgcaaatctcatcgaccgcaacacggaggtgtaggtggatgacatgcttgtcaagtccaaaaagattggggcacatggaggacctatgcgagtgcttcaaaatcctttgtagctataacatgaagctcaaccccctcaaatgctcttttggtataagctcgggaaaattccttggcttcatagtcaatgtcagagaaatagaagcaaacctagacaagatccaaccccttttgaacatgaagtcacccataactgtcaaggaagtacaaagctaatgggatgcattgctagagtaagtagatttgtgtccaagtctacagacaaatgtgcaccatttttcaacattctcaaaggcaacaaaaattcaagtggatagaggaatgtgaaaacacattccaagagctgaaaaaacaactagcccaactactggtgttgtctaaacccctagacaatgaagannnnnnnnnnnnnnnagcagtcacagaacatgttgtgagtgttgtcctcacaagaga

SEQ ID NO: 168345 - DNA, 1525 bp, Cannabis sativa
tttttttttttttttttgatgtttataagaaatgtttgattgattgattttaattagtctaactttgaactagaaaaaaaaaatatcacttggaaaaaaatacttaatttcaatgtaggtaatacttagggataaaatatatgctatatgtatacctaacaataatgtgtgatgtttgccaaaatatgaaaatacaataatatctcaattaattagtacctacaaagtcaatgcatttggttttgtaaatataaataaaatagcgtgtttacacattcggtaccctgtattttatttaaatacaaatttagtaccttgtatttttaataatacttatttagtactttgtattttaaaatcgtacctatttatttagtaccataaattcaattttttctgataaaattttattaatacaattaacagtctaaaatttaattttgaattcaaatttaattatttgattatatataagtgagaattgtttggttaaattgataaaattgtattaattaaattttattttagggtaacaaatatgtaaaatttaaaaatatgaggtatcaattaagtattattaaaaatacaaggtaccaaatatatttttcataaaaacataaggtactaaatgagtatattcccatataaatatatttatgtatgtatatcaaaattagattacaaaatggagtaaaataaattctatttttattagagaaacacttaaaattaatagacattgaagggtatatgaaaataggtttcattccatttattcaattgttcttcttcttttcatcaaaatatattcaatgttattttattttatttatttatttttgttattagtaatttattgaagggagcatcactaaatattagattaaaaaaattcttctaaggaaagagtccgtaaaaatataaaaagaaaagggaatttttacatcacatactgaaacttttaatttttttactttttcaatgtgggacggaatttttttcaaaaatactgtgttttctttttcaaaaatactgtgtaatgtgttaaattttcacggttgttccaatattgttttaattattctgtttcgttgttttattgttgttttataaaaagacagtatttttgtaaaaaaattcgtgtgacagtaaaattgtaaatttttatccaaaattcagtatttttgtgagaaccccaaagaaaaactcataattccataaaaacgtaaattttttgttgtttttaggtatttctgaaataattccaagaaagttactcttaatcactactaagcctataggctatatagtggcccatgaatttgtgtactatggtccaagcccaattagtaatagtgagatggcacaaaatatacaatgtgggcttcttttactccacatgacaaggcccattcctatacgatagtagtaaaaccagcccaaggttgttaatactttagtttctttttgggttaatttcacaaatccacaaaaacaacaaaaaacaacaaaaatacgatttcac

SEQ ID NO: 168346 - DNA, 527 bp, Cannabis sativa
agagagagagagagatgcatacatggtaagtggaaattgtagttgagagagtgttttgagtaggagaagaccaaaaaggctttgtgggctttgtgtagttttatcaaaacactgaaagtggttataagaaaggaaagacagagagagagagagagagtacaattatagggggaaggagatggtgggaaagaagtcaagcagataacacactcatcaaaaaagaaagagagagagagagagagtttggttgaattttgggctaatgtttatgttatgttgtgagttgtgactgtgagtctccaacagtaaccaatcaaagagagagaaaacacaacagaaatagacaggacaaacaaaagagtacttacacacacacacacatagtgtattaatagtacttctgtctcctaatactcacttaatgctctttccttttaaatattatcaatttcagtaatttttggctttaattctatacataaattcttaaatttaattttagttttgggtaaatattattgaaaaat

SEQ ID NO: 168347 - DNA, 762 bp, Cannabis sativa
  modified_base (707)..(731): a, c, t, g, unknown or other
tatatatgaattacaaaaaattatgaggtgaagtaaaagtgtgccacatgttaaaatttaaatcatattcatttaaagaaaaaatttgtcacctaacctaacgagttatgaaaagagaagaggactagtatacaatattttaataagtaaatacctctaaagactttgctttttgaagagagacaataaataatgaaatggattaaattatgtttaacacaacatttggaaaatagttgacctaccaaattcaaaacctacagtgtgcttcgaaagtattaacacttattataagaaataataataattacaaaattagggatttttttttttttgaaatgattaattaatatcaaatattaaataatatttagtgtttgggtatagagataggttattcttagttgggtttggtgtctatcttagggttggatatcctccccctatataaagcatattttgttgtatcatttaataacaattcagaataataaaatcatttactttctccatttatctctctaatatggtatcagactaagagagagaaaaccctaaatccacttttcacgctgctccttgaccaagattcgcttttcacgctgacatggctcgcacgcgcagtggactccctccggcgtcagctccgtcctcagctccgccctctggttctcttgccgacgttattggaaattattttaccaggnnnnnnnnnnnnnnnnnnnnnnnnnttattaacatcctaaataagaactttctaaa

SEQ ID NO: 168348 - DNA, 980 bp, Cannabis sativa
tcttccacttcttcttcgttttggtaacaggtttagcaacagggctgaaggtctcattgaagtcaaatctagcttgttggtgaaagcccttagccacaagacgagctttgaacttgctaatggatgcatctgggttttctttgatcctgtatacccacttacatcctataggaattctgtttgggggtaatttaacaagaatccaagtgttgttccttttgagtgcagtgaactccatatccatggcatgaagccatttggggtcttttagggcagtagtaatggatgaaggagtgatggaagccattagaacctttggttttcttatgccagacttggaacgagttttcataggatgagcattattgcatgatgttgcaggagcatcagagtgtgtagcagcagagggagcagcaacaacatgttgctgaggagaactattgctgatagaggcaggaacagctggagtagtttgaccagtgtctgaagatgagatatctgcagaaatattagttggtaacataggggcagtagacttgtcaagaggagttacaccagtgaaaatattagatatatcaggttgaggaacttgagcttcagtaatatgggtaggtgatatgtttggtgagggattaaagagagttgtgatgttgggagttgtaatggagtatgtggcagtgggatgagtggaggttttgacaggtagggtagcagttgtcaagggagaagagtgagtgggattaaatgaagtaagaggagtagaagttgagtatggaaatacatgttcatcaaaaacaaaaccacatgatatgcataaacgaccctcttttgacagacatttatagcctttatgtgcaaggctatatcctatgaaggtgcaaggctgggatctaaattgaatcttagttttattgtatggtctcaagttagggaagcacaaactgttggatatatattaccaggatctagatttactacga

SEQ ID NO: 168349 - DNA, 1840 bp, Cannabis sativa
  modified_base (1369)..(1369): a, c, t, g, unknown or other
  modified_base (1504)..(1507): a, c, t, g, unknown or other
  modified_base (1544)..(1547): a, c, t, g, unknown or other
  modified_base (1649)..(1655): a, c, t, g, unknown or other
  modified_base (1783)..(1789): a, c, t, g, unknown or other
aattccaacaagtctctcgttgacaatattaactcatcaaaatctaatactcttgtattcttttcccatcattaccaccaaggtttcactccctggctcatacgctaccattgtttccttgcaattaatgctatctacacactcgatgaatcgttctaaatctcatattataattaattatatacctcatcatttaataaaacaacctactctgttatctaataagataaccaataatcaatgttacttaataaagtaaccaatttcttctgttacctagttaagaaaaccatgttaaccccacaacaagtttatagagtaataactctgttactctcattgttacttaacaaagtaatttaacacttccgatcgtctaataaaaccacccttatataaacaggatgttaaataacatacatggtagtaaatatagatcatggtaaaataatccccaacacctataagctgggaaggtacaatgagaacatggagctcgttctcctaccaagatattggaatagagagcacctttgcaaatactacaaataaccagcttatagatttctactccaaagtagcaattctatctactcaacattagagtacaaaaagtgctagcacccacgacccttcttggacttggtctcccactgttcttcaatagtagcccctacttcagtaggcgagcagggttagccacttgacatctacaagctaaatttgtgtaatataggcttgtagattcaatctatttaagttgaacaacaacaaagaccaattaatgaataattgcaatatttatattctgtttattgtgtttatgagccacttgctcacagattaacttctcaaagttattctcttagttccacatgcatactatggtaccctcacaagacaatacccaagcaaagtctatgaaacttgatcaatagcaagtgaccaagagacttgtgtgcatggtcacttggggggcacccatactatagaacacatcgaactagcacaaagaacttatgtagagaaattttaacgcttagtataagctactaaacctgcctctaagtcctgcaggcatacttcaccttggcaaagtgaagaaaacccttacttttcaaggccctaaaaagatagccaaaattaaagaccgcctagtcagtcacacaatcaatgataaaaaagcaacaggatcaaatactagtagtgttcaaaaatagagggcttatggccaaagatgcaaacatgaagaacctagggctgaaaataaagtaattttctaaaaagacctcaggccacataggacatgaaaataattttctaaaaaagctccagaccacataggacattgttatcccaatttttgcantctgacgtggcatcacatgatggtcacacgtggaatcgactttgagtatctactccgagaatacagtccgaacaggatgcctcatatgcatgcctaaagaaaagccatcagcaatccgcgcagagcgaccaacannnngcgaattcagctttcgcattgtgagtcatcaaagaannnnctataacttggggatcagattgtagagatatggcaagctgtccaaatcccttgatcagtgtattcggtatttatcacacaatctttctgcttatatccattnnnnnnngaagggaaatacttcctctccaagttcacagccctataaatagtgatgcatgctaactgggcaaagggtccagagattttacttaagagatattatctaagaattcatattcagagatactgttgtannnnnnntaagaaaaggaatctttctccttattattgagttaatacaaataacgagga

SEQ ID NO: 168350 - DNA, 908 bp, Cannabis sativa
agaacttcactcatctaaaagacaagaacttaacagttagcccccttatcaaaccctaagtaaaaaaagagaatgagggccccctaactgctggaagaggccccctccgaatgaaggctaagaagaatcatacgattccaattgtcaaacatcaggtgcaaaacattcaagccataacgaaagaaccataaaaagaaaagaaatagaaggggataagggaacaatatgattcttcacaaaccctaaacctaaaaatttctaccagggagatgaaagcgaaggttttccttttcttcaaaaagaaatataaaacttaacaacaagtgcaaccttaagtgaaggttctaaggaaaagtcaccattactattacattatatatatatatatatgtatatttttcaaagcatgaactataatctactacatcatacacaatgttccagaagatggaagtggaggaagaaggaattacatgatgaagaaatcgtaggaagtgtcgtaaccaccgcacgacgtcaatagctcgcaagtaaaagaaaatctagggagtctaaaattttgctggaaggttttaaaagtctgaaaataaaaaatgatgagtgggtaaaaattctagtggctagaggtacgagcttttataggctcttcaagatgaatatcgatcaattgtcatctgattgtcagggttcaaactatctgaattctagtgatccaatggtcaggataggggtgagcaaaaaatctaaaaaaccgaccaaatcgaatacaccgaccatctgaacaccgaaaaaacagacaccaaaaaaatcgaaaatcgaaaaaactgcttaacatggtcggttttagtgtcaatggcaaaccgaccgattaaaccgagaactggccaaacatatatattatatataat

SEQ ID NO: 168351 - DNA, 1111 bp, Cannabis sativa
agtgggattcgccccaaatttataggagatatgaacttgggcactaagaaaaatgggcggcttgggcttagcattgggatagttggtgttggtgatgggatacagtcaagagtcaagagtcaaagtttgggcattacataatattacttgggctccaaaaccattgatgtcatccaaatataatataatatccagagtgaaatgattaaagccacgtattcacatgaagagcttctaagttgatcaagaaacctacagccagtcaaccatatattgtgttaacaacagggtttttaatttgggagggcaaatgaatcaattgttatttatgtttggaattttttttttttttttttacaagtgatgtgctaatcagattctattttagtctcttttacactttttttatattctgagggtatttttttaggtaatgtttattatactttaataattaagcttaacattataacttaattatatttgtaccgttctaattaaattgttctattattctaccaatttagcaattttttcattataggagaataaatatatttttaattgtttagtttttttattagttacacaaaaactacaattaattatatattattttaattaattggtgatctcgttctttcttagttttgaacttaataatttattgtttttgaattactaataaattagaactattggcgtgctgctgatgttgtttggctagctcgtaccactcttcgacaatagatgtgtgctcaggctaagcggctggactcggattctctgccttctaatcgtattgacacgagagaacacttgtccaaaccggctgctgaacaaataaaaattattaatgttgtggatggatggatggggcgggcggtttttttttgaagacaaatgagatcggtactggttttgtagcacgcggctgtgatggtcgaataattaaggcgttttcaattatttcttctgttagtttccgactcgaaattgtagaaattctaagcgtcaatgaggcacttagttggataaagaggaataacaagtcaaatgtcattttagagacggattgcattttagttgttcaagctattcttagttcggt

SEQ ID NO: 168352 - DNA, 1523 bp, Cannabis sativa
tagttacgttcgtgatggatgtattggatgcgaaatgtgggtctaaagcatcctttgtctggcgtagcttggtgtgggggaagaagatcatacagaagggctattgctggagaattggccagggagagaaagttagggtgcttgaggacccttttttacctaggtcagtcacctttcaggtttatgataaactagttatgcctgatcaaatgcgggtggtggatctaaagaattcagatggtacttggaatataaactttatccgtggtatgtttaattcagttgatgcagatctgattctgagtattcctagtggagattgggagatggaagatactattttgtggcactatagtcataatggtgaatattcagtcaaaagcggataccgagttgctgctgcattaagggaaaagcttcaccattctaatgtagtggattcagaaagatggtggactgagatgtggcgtttgaaagttcccccaaaggtcaagcattttgtttggaaggtatgtcattcttggcttccgacttatgctgttctttctcagcataaggtggctttcagtcctctgtgtcgatgctgttcttcaggtaagaatgaagatgtgggtcatatgttgtggggttgttctccgggtgttagagtctggaagagatgcgagttatggtcagatattaagaagtatgatgtgaatgataacattgtctttcttcaaaatttgttcaatgtgtggtcataggaaacttttaatttattcttagtgatctgttggtacatgtggttcattcgaaacaatgtcaatcatggtggttgtcaacctacagatgatattggaatggagtaacaatttcttaagagattaccaagaaggtaatagcaaggggagtacaaacaagcaggataaaagcaggcggtggtggcaaaagcccgctgatggttggcttaccattaatgtggatgttgtggtttcacaaaagaggggaaaatattgaagagggctagtgactaggaatgagaatggtcagagtatttttgctactgtaacaccacggtctggtgccgtcactccacttacggttgaacttgaagccattttagatggtatttcagctggtatccagagaggactgatgcgatttacggtggagtccgactgtcttcaagccattaatttaattgagaaggtgcatgggggttgtcgggatgtcaatggcttgatcttcgagatacgaaagctgctccagtcccacaacgctgttggtttgaagtttatatatatatatatagagagagagagagagaggcaaatcaagttacccacattttagccaattatgcattgtgtaacgatgttagtgttatgtggattgagattacacccccttgtgctcgacatgcagcgaggcatgacttgcaatttccttgtaatgatgtttgatgaatgaaggctttctgttctaaaaaaagtattaatttagtgttgttaaaatttctttgtggcatataattttattactac

SEQ ID NO: 168353 - DNA, 2148 bp, Cannabis sativa
  modified_base (2099)..(2114): a, c, t, g, unknown or other
aatattgtttattttcccaagtcaagaacatatatgatctatatgcattaactccgtaccaaaaaaaaaactcggtatctagacaacatttattttaattgtatgcaacacaaattttgtcactaataaatgacactttaacttggtcactaactaaaagttcaagacttgtcaattatataattcatgtcggagtatttattttcttcaaaaaaaaaaaaaaggtcggagtatttattagtattgaaggtggttttttttcttaaaaaaaatagtatattactacaagagagagctttattatttttgctaaaaaaataaaaaagatcgatcattgtttatcaaatttaggttggaaattaacatttagtgtcaattatttcataataactaacgccataaaaagtgacttagggactcttatagcattggctattaagaaataagtaacgtcatatgtgcactcgatgatgatgcatgtcacttatggcgtgattatttcctaataactaacaccatattatatagggatttatgtaaccctaagccaacttcgtcttcctcatttcctgaccttcaaccaccaaactcttgccaaccgagagaaacccttgccaactaccaccaaaccctcaccattttattatttctccattattttcactcatttttttaaatcttttatttttcatacccaaaaacataatctcagtgtttgatcgtcttttttatattttttagtgtaaactgagcttagatgatgtggttgtggtagttgtagctccgactgtcggttggtggagaaatcgttgaatctcaacatctattaaggtataaatctaatttccaataatttttgtaatgtacattgctttattttttattttgtaattttattaggatttttctacattgttaagattgtgttcttgtagttgtgcgtggtggccaaattttggtcggtattaatggccaaatttcggtaatatagtaaaaatctaaactttaataatatatgtgtatgtattttgtgttgtattgaatatgtattgtatgtatatgtattgtattgtatgtgtaagtgttatacccatatttcgagcaacaatatgaagctgacacgtgtaacaaaattggaatacaaactagctcaaattatgaattaatagatgcatttagatgactcgtctcaggaaatacagttgatagaaatacttgaactcaccatcacataaacaatgacaggacgtgagtaataactaccaactggtgagaccagcgaggtgaacaagtctatctcgggataaacagaatacattatgtaattatttggaatgggtagataataagctttgcagctcattgacccacacatctgtgagtatattaccagaataaggacaacttcaacattattcatctcgctcttggcgagttaaagtaagcgtctcgcatatacttcactcaatattcaaggaagagtgcaaaatgtgctctaactttacacttagacattattccacggagatgttgaagaaaagtgttgattgaatgacaagagcaacaaagcatagtcagtatatgttgtttatagataaagataaagaataattgtgcagttatttataattatatcatgtgcataaatatgaaaaattgggagtgtccatgtttcatgaatggttgcacatgattagaccctaagagaataactgtcatactagactcctataactaagaatagaattcggggaataagggacaactaacctttggaaaaatagagaatattatattatattaattgttcattcttgaaaaataattaattatattttgtatacaatcttccaaccctgaataagatgaactcttagactataaagatttaacttcaaaattacgtaaaaaccttcttgttaattattgctattattattattatataattaattctgaagatcatttattatagaaaagacttattatttagttaacaaaaatctacgtcaacagtgtggtgctcttattatttagttttcatgtgttgtgatttaatgtgtacaaaatttgctaagttcagaacatatagttattcnnnnnnnnnnnnnnnncaacacagtggaatgtaattgtgattatatgctt

SEQ ID NO: 168354 - DNA, 503 bp, Cannabis sativa
tttttataattatagtaataattaataaatattgtatatttttctttctcaaatgcagacttaatgaggtacatccaattccatcctattgttataatataaatagtctttaaaaatggactttgccttattgaaaataggaaaagtatcttttcacatggtattacattgcatatatagatattattatagtttttgaatttaatttaagttctcatgaaaatttaaattataaatttcatcaaaaaaaaaaaagaaaatttaaattataataatatgtgacaatatattaacacaaaaaataatattgcatacattacaaattcagagtaaaactattagattagagttatgtaatggtcggtttaacaattaaaatcatccacgaaaaaggaattttgtcgaaacagttaatgaaatgcactggcaaaagatggccaatttattccttttggtaattatgtcggcaatttattttgttggcataagttacttttaccaga

SEQ ID NO: 168355 - DNA, 521 bp, Cannabis sativa
ccccccccccaagatccctaaaatccaagggatgaagaaacagcctcacgagtaaacttagatatagaagagcaatatgagacatatgactaggaatatgaagaaaataaagaagggtatgatgcttatgacgatggcagttataccgaactattggccctaaggcaaaaggcggctaatcatgaggccgagctagctgcacaaaaggaacaaaataggaggatgcaagagatgatggtcgttgtgcaaaagctatggaaacggccaaaatcaacgtacatccaaaggtcatccctccggggctagaagaaacacaagaatagtcctcgccaagtacccatgtaaagactcggttttgaccgagtcaaatatgtatatatataaaataataattaaataataatatatatgtatgtatataaaaaatgggatcagatttaaaaaaataaaccttaccatcgtctctctctccctctctttttctctttctctctcttcaagcttcaaagaaaacccacaaa

SEQ ID NO: 168356 - DNA, 1203 bp, Cannabis sativa
cccttttcttacaaaggtaataaagataatttgcctttttatctttgtatttgtatgaaaataggtataattagaagttaagttattcaattttgggttaacttcttagccaagtctcaccaatattcaaatgacttcattgaaagaattgtagctttagcaatgataatgattttagaggtttaaatgggttaaaatcataattaattttactgcatcaagattaagttgatataattggtgaaatttaaagtgaatcaaaccttagattacatttcaccttaatcaaatacataaaacaaagtacaaaatagaatattttctttttattatatgtataaaaaagacaaattgatgtcaaagttaatattatgtttataattatcacctttaattataaatatacgttataactaactacggtctacggaccctgaaattttactttatggggcttatttatttattattaaaaaatattaatacctatattataatcacttaactagatttatttaattttgtaagagttattctactattttggtctataattattaaattaaaaaaattacatttaattttttaaaacaatatttttgttagtagagactataccccacatcaacactactaggtccgtcactgactaaccacaatttttttcccgatttttttcagggggcggttgcccctcctcgcctctatatttgatgtcttatacataatgtatgaatttattgttgggtacctttttatggcagttgtttgagcacattaaatcagtgaatcatgaagagaaggatttgggaattattaatccaggaatcattaaatttggaagtagaaagtactatagatacattggttcacttacagttcctccatgcacagaaggtgtcatttggactatagtcaaaaaggtcttttctcaacattttaaaccatttttcttgaagtagattttgtcccatttggatatgcatcctctaagtacattacacaattttatctttataaaaaattaaactttgagcaaaacttattttgaaaaacagaacaaaatccattactcattaattttaaagactaacatagtgttattgtacaggttagaacagtttcaagggagcaagttcatgcactaaggaaaattgtccatgatgtaagccttttttgaaattgagaatacatatatagatg

SEQ ID NO: 168357 - DNA, 605 bp, Cannabis sativa
taggttccagagaaagatttcactgcaaatttggaagactatacctttctaaatcaattctataaactcttgtagctttcgttaatttttaattttattgttagatttctcatgaattatatagtttagatcagtttacagtattccttcgggtatatcatcactgatgccaattgtatttgttctttgatgagggattgaagacacatcaacatgtctttttttaagctgtcgatatagcaagaaaatacaaaccattgtgtgcaactaggcaggtatgaatactcactataatattgattcagaacactgtctgaaatgggtgagaaattacaaaagaaactgttgcagaagaggggtctatacgactgttctaaatactctcatttacaacatttgggtggctcaaaataactctttatgaaatagccaaatgtatattgtaaattttattgtaaatagtataaagagagatatttatttgatgttttttcattttaaaagaaagaaagctagtatagttgatttagattggttggagagattgagtacatcacattagttgtactcgaattgtttcaagtgtaaacattgttctatttgta

SEQ ID NO: 168358 - DNA, 996 bp, Cannabis sativa
  modified_base (802)..(805): a, c, t, g, unknown or other
gactcttctgaactatactcaataaatactattatgatatgatattttattgttcgttagcggttcacatattatttattaaaggcacatttagaaagctaagagggaattagaattggataattgaagttaattatacaattttgtatgtagttacttccaaacacgtaaataaattaggagaatttttaaaaatacccttattttatggcctaaaattttaattacaaaaatatgtttctaaagttttaaattacaaaaatacactttgttcagtaaaatataaaaaaaacaactaaaaaacaataaaaaataaatctcatgacaactataaatcaattataaataaactataaaacaactaaaaacaataagaaaaataacctcatgactactataatacaactataaataaattgtaatacaacaaaaaaatagtttattatttttactgaagatgtatttttataaataaaaaaattcaaagagtaaaaataaaaaaaattccgagttgatagtgaaatgcaccaataatgttatattacctcttgtagtacttgacagcttaaagaacccttagcattttcctatgagaaattctaaagagcacccagagtgccttgcctagtattcttataagagcatctctaatgataatattttttaagagtgttaaaaacttccacattatttaaaaatatattattttattttatctctctttcacattatttttttgcactttttgttctaaaatgatccaatggtaagcatctcttaaaattattaaaataatattatnnnnttatttaatatatattaaataaacaaatttttttactttataataaaataataataaaaaataagaaagaaaagatataaaagatgcaatggtatgtgttatagtgagatttctctcacctagaaactcgagactagattcctccttaaaaggacacgtgtattcagattcccaatgaaagctgaaatgtc

SEQ ID NO: 168359 - DNA, 718 bp, Cannabis sativa
atctttctctcactatatatattattaaaaaattctctcaatataatttatttctaaaaatatacataaaacaaatttattatgtgattgcttttccacaataataatatatgataaataactatttacttaaataaggagatataatattatattctaattctctttaatttatagttaaaactaaaaataaacttaccaaatataaataagtatatacaacacaaaaaattaattatgagatattaaatataaataatcaaagataataataaagcaacactataattaatttaggaaaattttatagtccactccctaaaattgagtatattgatgcacttctttcatatgttcgttattttcaatgtttagatagttttaatctttctttttagaggataatgtacattgtaattttttttgaacatcctaaattttttcgataaatttagaattatttaatacattgaaaacaaagtttacataatttgttacgcctgtcttttttattttatatgcatgtgacattgaacatttgaaattttaaaccatactttctgtgttataaattattctaaattttttaaaaacataaaagtatatcttaaataactatatatacatctagggccggcccaagcattgggcagcttgggccactgcacaaggccccaaaattaaaaaggcccacttttttatatccctttatatatac

SEQ ID NO: 168360 - DNA, 1657 bp, Cannabis sativa
tctatcttatattacattttaaccatatataatattaagtcaagatggcatcaattttaagattgtataattgaaattaattatgtatattttaaatttgtcgcaatcattattctagaatttaaatattttgattgagttaaatttcatatcttcctaccttaaatgtggctatctaacgaaaattaatggtttaatgtttttttttttcgttaaaattaacggttaaaactaacactgttaaataaatcaattaattattttttttttaaaaaaaattaattttaaatgtttatatttaatttaaaaacatcaataaaattaaataattattttctttttcataaatcttaataattttgattctgaaaagtgttttaaaagaaattactgtcatctgtcgagcatttctatgaaaggggaagatagaatataaagggccaggatatatagcttggaacgagctatgtagatctcgcaaggaaggtgggatcttggtttctgaaatttaataacttagaacaaagcagttcttggtagttgccactaaacaagacaatctctaagttaaattggtacacaatgtatacataaacgggaagtcttggtgggattacaaagcaacaatgcaatacagctggtattagaggcaagtaactcgaattaaagatgaaatcaaagaaaatatttctttacaacattttctactaaacaggtactctattcaacatgggtatcaagcgttagggccacattgtgaagccaatacatggtatggaaaggtttgaggtagatttattattcctaaacattcgctttgtcctttgattagccgttttgactacaaacaagggacatattacttaatattggcatagttacaggtgatacttgtttgatttgcgagcaagatgttaaagccatacaacatatattctttaattgcccatttagtaggagatgtttggaggagattaaactttagttaggatggagaaccttgagtacttcatttctccaaatcttgcagtccattaagagatcaaaacagtcagaatttaagaggcaggtagttgccacgcttgtggctgctacagtttacaatatttggacgagtcaaaatactattttttgggacaaatatgtaacctcgttgcctatgttaatgctccaaattcggaatgaggtgaaagttagaattttatcaattttgcctaaaaaaataaaaccaaaacacttggattgatttgagcaattgtaagttttatagcacaaatagtgttaaactgtttttacaggttgtataaattacaaaggccgtcatggtactgttaagttgtaaaattggatttatgcaatataatatttctgatttcttaaaaaaaatcttaataatttaaatttaaattagacattaattcaatttattaattatactttaaaatatctaaaagtatttatttattttattatttaataaaattagttagatatattttcttataagtaaatttaaaatttgattcaattttatatatttaaaaaatataattttttttaagcaattgaattgcatttgatttaatttttttatttttacttaaattaataattaattaattgcaattttaatatacatgcatgcaactaataccta

SEQ ID NO: 168361 - DNA, 787 bp, Cannabis sativa
catgacttcactcacatttcactacttacaattttaaaatagctaaaaggatatactaatttttgtaaatagtttatattgttacgtttacttattttatatatatttttacgatattttataaaaacacaaaaaaataacaaaaaattacataaaaataataaaaaaaacaacaaaaaattatataaaaataacaagaaaacaacatcaaaataataacaaaacaacataaaaacaacttaaaaaacaacatacaaataacaaaaaatttattggttatggttacaagttttgtcatccaagattagaagctgtgaatctgaagagcatatactggaagcttagtgtggatctagaaagtcctgtgcgaaaggtcttgtaaaatctaaaagttacttccaaataagcttgtaccgtgtatggaatgtctctccaagatagcttgtttctaatccggagatacactcccgaacaacttactgtcagacttgaaagtccatccgggaaggaagccatgtacgtatatatccggaaagcttgtgagtatataaagcttctagattgtctgtactaaaagtgtatttttcaagatgacatggattattgttactggtgatgagttagatcatttaacgtggtgtaaatatgccacgatgattcagaagatatttttatagcaacaatgcaaatctatatagctgtaaatctaacttgtgtgagaaatatcaaaccagatttactagagttaaatcgtgatagtgtaaggttgagagagagagagagagag

SEQ ID NO: 168362 - DNA, 806 bp, Cannabis sativa
  modified_base (433)..(434): a, c, t, g, unknown or other
  modified_base (487)..(498): a, c, t, g, unknown or other
taataaaattttaataattgaatacattttatttggtgtgattatatctatgaaaaaaaaataattacatatgaataatatttaattatttttttttgtcaatttatataattaataaatttatttcattatattcttagtcatatttctattctcattcttattttcattaaaattaactaaaaaattgttgaatttttagaagtacaagcggagtggtttagtacctgtaaactatttttaaattttaaaaaattgaatcccaaatcgataaaaaaaaatatgaaaatataatatcatcagaatattggtttgctaaatttaaaaattattttaattttaaacaaatagtgcataatattaaattttaatttatttatagaatctattctatataaagtgtgcttatataactgaaattcttggtttatgnnaaattcatgggtaactttttatttttatataataaaataataaaatattattnnnnnnnnnnnnaataataataaaacaaattctattaatatttaaattgatattacatatttaaaatttgcactgcccacttagccttctctgccttttgatcgatatcaaacctcaaatctatgtttgatggtggagtgacattgatgcttttggctttgttttcgatttaatgaatagaataaaatagaattagaattcatttataatctataaatacacatgcttccttcttcagatttataaaatttgctgctcattatttcgagtgaaaaacaacaatcaactgtctcactcccccgaccttcgttttccagacc

SEQ ID NO: 168363 - DNA, 503 bp, Cannabis sativa
  modified_base (475)..(477): a, c, t, g, unknown or other
attaatctccccttcgagaccggctgatggagatacgtcctgtgcaccttgtatatcagtagataagggcacttgtaagtctgcaatagtctgtggaagaccttggtcagcaaaaccagatggatctagagttgcatgtgatggagagaggacaggagatgccttattcattgcagacccatcatcagaggagctagatacaatcccttgggaatgaacagctggagaagcttcagattccttgaggattgtggccatggcagtgagaacatcaataaataatttttcaaaacgacgttgcatgagttgatcacgagcataggatgtggccagatcagtgactgaggtgagcaactgagttttccaggaattcgagttgaccccatctcgggaagttgaaggagcagtcagagcagtaggtaaatttgccattagagatgccccagcagcagatatatgttgggttttatgcccnnnataaaactctttacaatctgattagt

SEQ ID NO: 168364 - DNA, 588 bp, Cannabis sativa
taatattaataatacttaattactttttaagtaatgaccaatagcaagtaatctgattaaaagactattcatttcaactctgactattggtcaggttaatacttttcttgtcattaattaatattattcatttttttttaatcagattcaaaaaaaaaaactcttcagttcatattcctattcgtgactcactcacactagacgaagagagtttggttcttctcacttcttagtccctcctttaaccaatttataaaacttcttcttctccaatggtggcgactcggtatcttctccggcggggtcgcatccaaaatggtcagctttgttcggcgtcacccacctgtgtggccgggcggttgactgttcgccggtccacccgtgatcgccgatatccgagatggtgacgcgtctgttctggcgagtggcgactgtgtggcgaggcaaggtggtaactttagtttactacgtactgaaagtgaatagtttatacgtatatatatattattatatacttcagtttaatattgatatatgatattattttatatattatatacttaaataattattatatatatattatat

SEQ ID NO: 168365 - DNA, 1123 bp, Cannabis sativa
ttagattgaatcatcttatgcacatctttacatatttggcacacaaaatgccataatatattgaactttataattttcttgtaataagttttttttttttgaggaaaaggtctcaaccgccaaacaccaagagcaacaagcactctaccatggcgagggcgatgatttattcaattatagcatctgctattattaattctaaatacaagtaggattttctagccgccaaattacactttttactgttgtcaaagcaagtttggccaaagtacgggcaacaccattacaagatctattacaatgcacaaaactaacatcttgaagcctattacaaagaccaataatatcatctaaaactagacccaaagaagtaataatagaagcattattttttagtttaatcacaatattcaagcagtcagactcaataataatattttcatacccaaaagagatgcattgaattaatgtgttgcggatagccaaagcttgagccacttcacgaacaaaacaaccatccaaatgccaacttactatagcgatttccaactaatcacaaataaccatacccaagccactacaattgctcaaagaactaatactgacatctatattgattgagaaaaccaagcgggggaggtttccatttcgaaactacctaaagagagggtgtccgagacctgacccaccatcagagacatccaccgccgactgataggtggatggagaagtcgtcgaagcctatttcttatgaaatgtcccaaggtaatcacggcccaatgctaagtgagcacaagagacaattcaacattattatggactattttattactttgatattttcttgtaataagttaatttattagtatgtatgtggaatataattgtttttctcgatcaatatggaaatttaaagattaaaaaaataaaaaaatgatgtaagtgataaataggtttttttttttgtctaaaaaattatagtaatccacacgttttatatttatactttaatcatctgatccaatgggagatgtaaaaattgtgttatatttggcacaaaaaataattttgtggtaaatttacactaaaatttagttttgtgctccaatgcacaattgtaaaa

SEQ ID NO: 168366 - DNA, 761 bp, Cannabis sativa
  modified_base (702)..(720): a, c, t, g, unknown or other
tccattaacaaccattaatgaatcggtctcaattaaatcaacagtaagtctgagagacaccagcaatttgagactccaagccaaagctaatgcttccatttcttctggtttaacacacctttaggtttagccattgcaacaataacatcaccattggagtttcgaaggagggcaccaagtccaaacacaccagaagaaacgttgacagcagcatttgtattcaatttgagtctacctgatggtggagctagccatttaggcttatttggaggcaccaaacgatgctgcaaagtagctgaaacttgagaaattgcattatttgctccagcaaaagtctgagaatgcgaactgctagcagcagcagtatcctgagagtttgaacatccagagacatgttggtgggttttagaatcgctggtaagagcttgtttgtaatctgataagtagttgctagcaaattgcaggatacacgaagcagactttggagttttagcatgtgtttctgcattcctttcagtccaaatgcaccaacgaattgtaatgaagagttcaacctttttcagtctgaagttttgaggagacatagattaaaaaatcagagaaagagcaggacttatataatttccaattatcactaaatcccaatttttctagacttgtttagcacgacgagtacaccaaaaaagtgttgggttttatgcnnnnnnnnnnnnnnnnnnnaatataatcagatttacttatatagatcagaaataacattt

SEQ ID NO: 168367 - DNA, 1501 bp, Cannabis sativa
aataaattttaaggttactcaaatatatttcacataataatataccataatacaacttaaaataaatatttgactattaagatgtttacaaataagttttagaggtaactaaattgtatatcaaattatatgatataaaaataaagttttttttcttataaatgtaaaagtaactaattagttttttatcggcattataggtaaccaaaaggttacttttgaaaacacaagaattttttttttttttaaaaaaaaacacgaaatttggaattatttttgttttaggcatattagtttggaattgaggtattttttgatgatgtgtcaaggtattattgtaattgaaatttattaaggaattttcgtgattaatttgtattttaagtatataattgaaaaaatcccattttttttttgaagtgttaataatagacaatacaataccctatgatgtgttatttcacatgtcaaaaagttttaatctatgtattcacataaactcatccctaatttctctattatccatattgactattaaaaaagttataaatttcttgtgccaaaccccgttaaaatattactatagtggacacatttaatctatatgatttttattttgtattcattctcttaaaatattttaaactaccatttgatttatatattggaaacaatttttaaaattccagtttcaagctttcttcttggaggtaggaaccacatatctaaacgctttaaaaatatatgatgactattaaatctttcctcccaatgaaatatatataaactcaaattcaattgtggtaatcacaataatagcaaataaaaataaaaataaacaaagagaataaagcttacacaagattttttgacgaagataaattctaaaaaacttttttcgcaactcttcaaagatttagtgaatttaaattttcaaaactatataattaatttggtgtgcataatttgacttcttaatattcaattgattttcttgaaatttcttagcttcaacatcattcgcatctgcttttagttttttcatttctcttcgttttaataataattttaataattgctcattatgagtactttgtgtttggagactttctagtttttttgtaaatgagtttaatctctcaactatataattaaatttggtctccattaaaataaaaaatattatcaaataaacttacacacatctaagactcatatatgcatccctatatataattttttttttttaaaaaaacacaaaatacttaattttgattctattatattaaatatattaattattgctgattttatctctctaagagtaggattgacatcaattagattatttatgatctttattcttgaatataaattattttaaaattttttatattatttgtggattgttagaatttggagaataagatgaatgaggttccatcccaaaatcaattggcagtggaaggagtagccttttcattttatatatcacaattta

SEQ ID NO: 168368 - DNA, 1468 bp, Cannabis sativa
ataatgcttaattaagaagaagaagaacaatatcaatctcaatatctatccaatgatatctcataaattatatatggcactgttgtttggctgtggggctacgtcgttaggttcttatttgacttttatttttttgaaattagttcttattagacttattattcctctgaactttaaccaattatttataataatatatgggtaaatatcttaattaaactctctattttattaaatgataaaatagactttatatttttttaaattaaaaaaatagaatcctgaccttaattttcaacaattttactttttaatataactaattttaagacaaatatttctaacacgaatagatacagaaaaatgtaaccagttttgtcataatatttttagattagattattattaagttttattatgataaaaaaatcagttcatggtcctatttgtagaaaatacatggtctattttgtcatttaactaaatagaaagtccaattaataatttttacaaaacataaagtctaaaataatatttaaccataatatattgattgttgaactgattagatgcactccatttgtgttttgtaatagaccttctaagtcaagcatgcacttaactatcaaggacatatcatgtatgcaattcagtgtgcttgagtgtcttaattatttagacttttttcttttttaatagaaagaaataatttaactattatttatgaaaaaatttacattttgtttcgtagaatgacaactgtaaaaagggcggtcacaatatcttatgtttttgaaaattaaaaaaaaaatgaggaatttatataaaaatgttaatataaaattattctatatgaaatatttaataagagaattaattttaataaattatgtagatgtaaaatttatatcttaaattgtaataatgataaaaatgttatgattcatatgactaattgtttctatatggaaatgtttatttgtcttactattttgtaataattaaaataatgagtatcatataaagttagttatgtgcgccatcattataattatatcatcccttgtgcaattgtaataatcattgaaaaatcaaatttaacttatggttattttttttttttttgtattttttaattttaaaaattaatatattaagtattttttttattagatgagtatataaatatattagataaatatataaaattgatttgatgacttaaaataattaaaaaaaagattataattaattgggcaatatcaagtgatcaatcacctatgtatttttagataaattaaagtgaatgtaaaaatactttatttatagtttaaaagtatactattcatgtattttttttaatccatgtgagattttaataacgaagataaaaaaattactaaaaagtcatatttctcaacatttataaatttataagatgaaataaatttactaaaattctcataaa

SEQ ID NO: 168369 - DNA, 1056 bp, Cannabis sativa
atatatatatatatttattgaaatcagtaatttatatagggtgattctacaatgcacctccctaaaggggatgtactgattcactttctacttgtttcgtcattcagaagaattttttagtctaatttttttattcatattcatgtacatttataactatttaagatatcctgcgaaattttaaaaaattctaaataatttacaatatagaaaataatattcaaacagtctattttacatgcgtataaaataaaatcgtcacgtgtgcaacacactgtttgaacgtagtttttggcgtgttaaacttttccgaatttcttaaaattttataggatgtcttaaataactataatttacatgagcatgagaaaaaatttgactaaaaatttatttcgaatagtaaaacatattgagatgtatcgatgtatctattttaataaagtgcattataaaatttttcatttatatattaaagttattatagtcataattttttaatatgttattgttgtgcttgtagttatatatatagaatatcaaaatataataatttaaacagcttattatcactataaaaaaaatgtgataattttttactcacaataaaaaattatggaaaattctacaatacaccccttttaaatagatgcattgatgaacttttaaccgttttaacatttgaaataattttttcgttaaatttttttttcatgatcatgtacgttataactatttaagacatcccgcaaaattgtaagaaattataaaaaatttaatacgccggaaaaatagtttaaaaaatgtgttgcacgcgtgactattttattttatacgcgtgtgaaatagattgtttgaacagtactttttatattgtaaattattttgaatttgtcaaaattttgcaggatatcttaaataattataacgtaaacgatatttaaaaattagactattttttttttttgaatatgccgaaataggtaagggtgcatcagtacattcattttaaaggggtgcattatagaatcaccttatttttttttttgaatgcaaatt

SEQ ID NO: 168370 - DNA, 667 bp, Cannabis sativa
gggctaacacttttgtcatattttacactatcttttctcctctcatggtattaatatggactcggttagtattgcacttaggggcattcaaaatcatatgaacgatcaacaatttcattaccttacaaaggctttcgatttctctaaagtcaagtctgctctttttcaactgttaggggataaagcccctgaacctgatggtcttaatcctcttttctatcagaaaaactgggctatttttggttcaaaattttgccatgctattatggatgttttaaataatgaggataatattgctcccattaatgaaacttaccttgttcttattccaaagaaaaataatgctactaaagttcgagacttcagacccattagtttatgttctactatttataaggttgttgctaaaactttaggtaatagacttaaagttgtgtttaataaccttgtctctcataatcaaggagctttccttaatattagagtgatttttgacaacattattattgctaacgagattattaatgctatcaataatagaaagaaaggcatgctaggttgggtggcttttaagcttgatatggagaaagcattttataaagtggaatgcggttttattaagtattattgactttgcttttagccaacgacaatgagtctttttgat

SEQ ID NO: 168371 - DNA, 1232 bp, Cannabis sativa
gttcgatttttagcccaagtgtaaggatcaccatcaaccaatgtttcacgaagacagcccttgtcaagagcatttcgaaaggcatccatttgagattcactacgaagagcccctccggatttattattgttggaaagaatttcattgaagtcgccaataacaaaccaagggagttgaggagcaacatccgcaagtcgttccaacaaagtccatgacgcttgtctattagaaacttcgggtgcaccgtagaagcaagtaaggtgtatagttggcccattgtgaatcgccatgtagcaatcaaaataagttggacccatatttaggagagagatgttcacctcatctttccaaagaagtaagaaacttataatttagtgaatacactcattagattattataaatagaaactcatacaaaatggaatcaataaattcaaatggttacagaaaaaaacattataattattttttattttatatactaattaatactaactaattaaaagaaataaaagattaatgcctatagtattttaaaaaacgatttatatgataattaattataaaaacataacattcacattaatactcaattaattataaaaaatataacatacacataatttaacatttgtattaattctcttcaatataaatatgtgggaaaatatttttgtcgacgtgttatgtggaagtgtactattagtaaaattttgtaagaaaaatttctttacaatttaaaaaaaaaaaatcaaaaaactttaaaattatttttgaagtgtggaaaagaagttgatcaatcatatccatggggaagttgaatacttcttattcaaagtaagtttattctattttgacaactaaaaggtaaattacttttaatatactattttatatgtttaataaatttttggttttgtaggaacaaagttcttttgtagcttcttttttggttcaaggatggaaaataacaaacacaaatatgataccagaaaatgagcattcctcgcattgaaaaggaggttagcggtggggtagaaatattaataaatactatataatataagagtataaatacatattcatttttttcgtgtatatatataaagttaatgtatattttaatcgctatcatatatatcatcttaaatttgtgataaaaaaatatatgttataaatgttggaaaaattaataatatacccaagatctatttgtatataacatagaacac

SEQ ID NO: 168372 - DNA, 523 bp, Cannabis sativa
ggttgcagaagggagcttcgggctgcggggttaatggaggaggcgggtcgactggagaagattggaaaaatggagtggttctctgagtgtcggcgaggggttcgaggatgggctgaaagaggtgagtggggtggaggtcgaagggggttctggtgggaatggtgatggctggggcaggttcgggtctgctgggggtcgacggacggagctgggtctggttttctggggaggatgtcgaaggtgcaatggagggcggaggcaaacgagttatggtgttgggttcggctgtggggttcgaaagagcaatggagggcggaggtcgaagagagggggtccaaggtgagggttggggaaggtctgaccgaatggggtttttcttcaggcggtggtgatggaggttgaaggagatgatggggctggggggattcgtgtagggtaggaaaaattgtttgaaatttaattttttttttatgtaataataggatatattaaaataaaaataatattaatatatataaaaaaa

SEQ ID NO: 168373 - DNA, 988 bp, Cannabis sativa
atatatttattatataacaatataattaatgtgacaatgtatacgtacttaagctaataaattttaaaccttatgtttattctagtcctctgtagataattttctcgtataaaattaaaatgcacgtgaatatgagaaatatcaaaattagagtttcattgaataattcagttgtacaatgaaaaaattatatataaaaaaaacataatcccatgtttattttatgacccttgaatttatattgtggcatacctttagttaaggatattgtgattatccaattcagtttcacgtgcttaatgaccacttatcaagcctctttattgctaaataattaatgtcaatatgctagcttcaaccagcactcttgtagttcttagccataaatattgtagttgaatttgacccaaaattttcttaatatcttgaaaatataattataactccatacgtagtatgaaactatataatgcaccatacaagatgtatcctcaaattaaaaataattaatgaatctaatttctataataaaaataacaattaagtttctccacgatacaacttactcataatcttaaggatgtaataaaaacttgatatacatgaatcaatataaccagtgaaatttgaatataagtggttaactatagttctagaatatcaattcatctaaatataacatatgtataaatgtaatctctaatgtttctcaagaaagatacttcatcactatgtatagaattataaagtggtcttaatataaattattctgatactacttaacattcctgaaacaaatgcaatgctaagtcttatgtgtactcttgagtctacgttaggttctgaagatagaagtaaatggaatgtatgttcttaatttcttcctattcttgatcattttaaagatgcttgtttgagttgaatttattaccattaaagataaaagtaacacaagatgaataatacataattttatttaatcagagat

SEQ ID NO: 168374 - DNA, 1329 bp, Cannabis sativa
gtgggttgttgaagcccaattcgtgacatgaagtgttgtctaagatgtaagatgtagaggcataaaaagtgcctgccaggatggaggctggccggcccttcctttgttggaggctgctagcctatgctagcaatagggccggccgagggtctggccagaccccttaagctggccagtttattgtctctttgttccacttaagtatttggcctcctcgtcaattgatatgttgtgtatgatgacttggtcttcttgcttacaagttgtactccacgtggcatcaatattacctacgtggacatgctacgtcatgtgggtaaaaaattgagataacatcgagaacttcactgacttattgtgtttcataaaatcaataaaacacaagtagaaatgtatagatctattcaaaaatgactacatacatgtatataaccaccccaacaacaatttatagtaaaatcacttaagggtgttcataaaatacataatatatgcatgatccaatccacaaagtacggatatctgcacttgtgcagattgaatattgattgatatgtaaaaataatcgatccattccaatccacacatatttatttatattttaaaaaaattatatataattaatattttaatgtaaaagatttaaaaatctaacacatgttttacaaatatattttaaaatttaatagatcaaatatatacttctcttaatataagaaaattataatctaatataaaataagcatttctttatacatatattttttttcttgttcctttagatttgttagtttttgttttatttattttaatttattattggagacagaaaacaacaataatttattttattttgttattagttatgttaaaaaaatattttcttaataaataattaaatattcaaaagtaactagctttgatccaaaatataaaatttacacttaatgtagatcagatgcactatgagaaaatagtacggcttggattggattggatgaacactcgtaaaatcacttacccataaatataggataaacacctgttagtttattttctgttggtgttgctatgttttcagttactttgactttggttaagagagttagttacagctagtttctattgtaacaaatttgtccttgtattcctttgtctataaataaagatcatgaggtcatggtctagctcaagcttttgcaagttatttgtgttcttgatagtattgtatatttataagcttcatagagctatatctctaacgggttttcaatccacacctattcagatggttagccagccacatgagatccagaaggtgcaaagagg

SEQ ID NO: 168375 - DNA, 1163 bp, Cannabis sativa
ttttaaacaaaataaaatcataatttttatattttctaagctttaaaattattattctactttcttattatgagattgtaaatcaatcacaaactcaatcttttaaacctcaaaaacaaaatttctcaatcacaattgagtgattccctaatacgttttcaaaactatacgaaaattattgagcctaactcaccctaacaaatctgacttgttgggaagtattaccctcgcgttataaagtgaattgagtatatatctccagttaatacggaaccctaatatgctccctgacgcgtatcatggaccatgtcaaacgatatgaaaaaattgatatttaaaggcacacaacattataaaattgagtccactctaaaaccatattaagaaagttattgatataaattcaccattctcacggatttgttattggacaccttcgtaaaaggctttataccaatagagatattgtctattcttatataaccatgatttgtctcatttctaggcaatgtgagactttaattacaaacccaacaatcatcccctcaaacacaggatcacatagcctcccctcaaacgatcttctattttgcaccgttgctatcactaaacgaaacacgacgtgtgaccttcattgtcaagaagattttcgatacaaggcaccaaacaagattcatatcttgcactgccacaattaccaattggacacaccacctcacttatcaaatatactttcaatacaatacaccatacaaattttcaatcgcgaggttacacaaaagctcatcaccttaagaggatttattcgtatgactgttgttggaatctgactctgatgccacttgtcaacgatcgtcgaacatcatctatctttatattggtatgatattgtctgctttgggcctagccctaacaaattcattattgggcactttttcaaaagacctcataccaatagagatattatctatctttatatacctataatcatttccattcatagctaatatagactttagttccacatccaatagcttgttacgagaagattactctcaccttattaagtagttagtcaatataagactctaataaaaaccttggttattatacacttaacattctcaaagaaaaagaaattctatactagttccttttttctt

SEQ ID NO: 168376 - DNA, 540 bp, Cannabis sativa
agttgatttaggtaaagagagaaaaacacagagagaaaagagagaaagaaagtgaaacaaagtgaagatctttattgaatgaatacccttttacaataccagtatatataactgatagaacagaaagaatctcaacagaataacagacataacaactctaactaactacctaattcttgacagttgttagttaatcacagttgtcattcttttcctcaacaatgactgacattatatgattatgtttaacaaaaaagtcataccttaagaattggatagataaagtggttaggaggaggtgaaaagtgcaccctagaagctgaatctcacgctttatcagaagtaactttcaatctctgtcatgtgggaagtatttaagcttgcaaatcaggtctatcttcacgggaaagctccacacatctgagtcccaattcaaccatttgttttgtttctttgcttggccaatttcctgcatttgaatcacaaatgtcctctagatgaccttccctaacagccgtttccaccacatgggctagtgcc

SEQ ID NO: 168377 - DNA, 515 bp, Cannabis sativa
cctaatttttcttttgaaattctaagagagcttagggttagaacttaccttagaagtccttgaaaactacttgaacaccttagaagaattctctcttaaagaccaaaagctagtggaaaaaccctaggtcttccttgggcttgtcttggctgaacacaaaagggaaagggagaaagaggtttgtcttggttctttaatatttggataagagataactatgaaattaacttatcttttattcaacttaaacttaattaatctaactaaggaattatacaaattcccactaataaattaagctaaaaggtaactccccactactgaccaaataattaaataaaaaaatgtccaaatcataaccccaaaataactttacattccaaacatctaactaaaatgcccaactattactaagatactaaaccatatctaagtgattctatagcccaaaatccatggtgacatccacccatttccacttaggaagagttaaaggctgcaacaaccctacaggt

SEQ ID NO: 168378 - DNA, 1353 bp, Cannabis sativa
taataataataataaaaattactagccacttttttgacaaataaaaataaaattaaataataattaaaaactaatttaactgttaccaatttataccgaggcctcaataaacggccatccgacagccgatctcgcaccagttgatcggcagtggattacaatcccctcctttgacgttgatcggcagtggctgtatcccccgtacatgatcgcgatatttaccacaaatattacaggaacaatatgaaatttctaactgtaatgcagtcgcctagacccatgccttcaaaaatctgatgaaaagcaactgcaacgatcaaaggtctaatggtgcactaattttgagacattcccatggtcaccccaataatcacagaatgaaatataatcccaatctccaaaacttgagacactaatccctgcttcatcctcaccagagagagatgggaaatgtctaccatagcttccaagagtcaacgtcttctcttgaccattgtactgatttggatctctatcatctccaccttcgtaaggccttgcaaaaccctattcgtttcctcttacacattctccctctgccaaccccaattccactcctcatcgggatttgtcaccattttcgctgaggttacccaatttcgtcgtgtcaatggtgaggcttggatcatagaagaagagcaccaagaaaaagaacaagaacagtgacgacaataccaagaagaagcctcacgccaagtccaacccttacggcagatgcccctttttcctttgtaatgttaaaaacagaattttaattattattattattattattattattaggcaacgatactctcccgcttgtactagctggggaagaagtcacgcaccatatattaataatataatgtgatatataatgtagctcaattaaagtagtctgtcatacaataataaaaaacgtaatatttttaaattccagttttatatattatgacctattaatataatttataccaacttgaactggattatttacttttttttttgagaatgaacctgattccattataacaatcaaacaagtacaagatacagttatgagtggaaagatgaattcctccataaagcttcctgctctagtcctaaagctgttctagctaaacagtgggctgcattatttgcccctctttgggatgtagctaagagaaatcttagggaagtaagagagcaagcttttaatttcagtagcaaaaggattaagatgcaaattatgagtgctatttttacaaatataatcaaccaaaaccttgcaatctgaaacaacactattagggtaaaaggaatgatcatgatgttagacatttatatgta

SEQ ID NO: 168379 - DNA, 854 bp, Cannabis sativa
aataataataataataatataccgccatataaaattaaaaaattaccttccaacggataactatacttgtagtcttataatataagatgacatatacatttgaaatattaaattttttacactaaaatttaataaattcaattcatactttgtaataaatattaatatatatttaaatgctacaaaataataatattataatacaccccaaactaaatatatccaatattgtaaatattattttaaaaaatgtattgacaaaagtgattagttgaactatctattttcttaaataaaaaattagactttatattttttaaattaataatattttgagcttaacttttttcaattttttttaatatcaccaacttaaagtcaatttatagcacaaacaaacataaaaatctcatatagatttgtgtcataattctctttaaacattctttgaaattgtgatcatgaagagttactaaagagttactagattttaattcttccaaaaatcagttactacttttattatttttacatgtaactaactcataatattttattatttgccacaataaattatataatatataaataaactatatattatattaggtaaatattattttagaccatgtattttataaaagttaccaattcgaccttttattttgtaaaatgataaattggaccatgtatttttcaaaatagttcaaaatagtactctggactgaatttttgtcaaaataaaagttaataataatccgacctagagtttttatgataaaactgtcagataagttaatataaaccccatgatcaatttgtatataacatagaacacaataataagatataat

SEQ ID NO: 168380 - DNA, 581 bp, Cannabis sativa
agaaaagtataattaatggaagagttaagaggagttataaagatgtacctctcaaaaatagatgtatcggtgtacttcttaaaaataggtatatatagttggtgtaccttttatgtttttagtttgtgaatagttataaatttaattttcatatgatggtgtgcaatgtgcattaatgtacttattagaatattatgtagttttttaaaagggaaatttaactttttattttctatatatttatcaaattaaaattacttttctaaacttaaattaactgatattggtagaataggctaatatttcataaaatttaatcttactctcccatttcaaacttagtcctctctcttcctcctctctcttgctctttgaactcaccccaagaattactcacaacccaccatctacaatttcgatcccttctctctacgactatatattgcgaacacagacccaacaacccacagacttaatgagttctccatcaatcacggcttcatcatcgataatgttatcaaaagaataaattgtatgattaatattttttgtgagtaaatgttagatttagggtcaaaaat

SEQ ID NO: 168381 - DNA, 887 bp, Cannabis sativa
  modified_base (855)..(862): a, c, t, g, unknown or other
taggtccacagttatttctatagtctatactctatagtatataccctttcattataaaagttagtaatttcattggtaactagattgtgttactttcttacaatttactttttttcttgtcatgaaacaacaattcctttttattgtatttaattatgaaaatgaaaatagaggatgaccaatccgaatcagcatatttttttattttacgtcccgtaattcttcctcagtcggtgataaaagagagaatatagtcttgacgagccttacttttttttttccggaagtatatatatttttatattataatacctatttacacatagaaagtaaataaaaagtgagttgcaaagcctaccatgcacaagtactcacacatcatattacaaatacatacatcaaccatgcaataaatctcatcacattttaaaagaagaaggcagccacacaaatataacaatatcacacatacactccaacatccatacaagtccagagtaacttacattcttaactcgaacgcagtatcaatggctagtgcacccttatatactctgttccacttaccacattaccatgcatgtgtggttactaacaacgtccaagtacctagaacatagttaaacaactatatacaatctatcaataaatactatttcactaaaactatcacattctctaatttcagtacattcaacaagtactcaaactatacaaaagaaagtacaagaattagtaataattactttttcttatctcaactccactttaataaaattatccaacaccttttaagccctgtcattaattagcaaacacttagaccaatataataaacttaggtggcgtttggtnnnnnnnnatgaaatggaatggaatggaaagga

SEQ ID NO: 168382 - DNA, 1548 bp, Cannabis sativa
  modified_base (1522)..(1523): a, c, t, g, unknown or other
cgttgcaactgcacccgcgatgacccagaacaccgccgtccttccagggggcatcgatcagggtattcttttgtaggctctaaagataatcgagcaccagagaaaacccatttacaagctgcatgtcacttctccctttaccacggaggtgcgacaggctcggttgcccaagggattccgattatccgaatcattaaaatataaaggtaccactaatcccatagattatttagagaaatttaacacaattatggaagtagaccaggtacctcagcttgcaaaatgtcgcattcttgcagcaaccctggaagataatgctcatgattagtttaaccaatttcccgaagcatctatatcgacatgggaaacctttgtcgacctctttctcacacatttccaagccacgatgacgtatatgctccttatactactctagctaatattaagcaagtgagtcgttacaagattatttaaacgttttaatgctgaagtaactaaagtggaaaaggcccccaagtcttcgttagtttgcatgttgatcacaggtgtcttgccaagaccgatttctggaaggagttacaagctcgaaggcctgagtcgttagtcgagttcttcgctatggctgagccacataagaggattgagaattctctggccgagctagagaaaggaaaggataaacgtgagtcacctgtaccggatcacgatcctgcagtcccagagagaaaaattcgagaggaagaagccctaaaagatgcagtccccaaagacagcggagtacgaagcaggccaaatcccctccgaagaaagagtcatctccaaaaaggaaaagaggtccacgttttgtgaactatacataattagcagttccacgagaccatatttacacaattgaagaaaataatggagtttttagaaagcctcccccaatcaggggaaattgcgacaaaagagactcgaagaaattctgcaagtatcacaaagatattggtcatacctcattggaatgttggttcttgtaggacgagatcgaggaactaatcaggcgaggaaattttggcaaatacaagaagaatgaggaaggtcgtccccaagtggatgacaaggaagaaaataataatgcgagtagttcaagaactcctcgcaatatagtaacaatcattggaggacctcacatcgcaggagactccagaaaatcacaagaacgatatgtcaaggaggcaagagaggggccactcactaatgtgaaaaatttgagtgagcggccagagaaactatttaagaaggagtgtgatgacataactttcatagaaagcgacgccagatgggttcaccacccacacaccgatgcactagtcatcgtcgccaatattggaggagataatgtccaccgcatattagttgacaatggaagttcagtaaatctcctcaattttcaagctttcaagcaaatggggttgcaagagaaggatttattgggttttgtgaccaaataaaatcctttacaatctgattagttatnnatataagaaatttgaagtgatttat

SEQ ID NO: 168383 - DNA, 929 bp, Cannabis sativa
aatattatgttaaattttaatttaaacgaaaatattatatatttaggtgtccataaaaatcattataacctatagttttacataaaaatattgaatgaaatacaatttaatataatactatacaatacaatacgatgtaatacggcgtaacaaacgagcccgagtgactaacacatgggaatagacacaaaaatgaacaattgcctgttggatttcttaaaggattatacataattgtccaatcagcccaaataaattctatgagtactcacatccagtgaaccattattctactctattttacattactaaacttttatttgtttttatcataccattacaccttctattagattttctattttttttttctataatatttaaacattataatttaaaaaaaaaaatagaaaaaaaaaagagtacataagaaagaacgagtagataaaaattaattaaatatatctcttctctaatgtagttaagctacattagattgaggtaaaaaaaaaaaatagagaagtaaatatgttataaaattattttttatacaaaatataacacaaattttataatattcttctcataaatgggaaacccacaaaactggtgtgcaagcaagcaaaaagaacaactttcaaacatgcctcataaaactacatcctgactagcaagaggaaattatggggacattagatttagagcgtacactagagtggaaaaaagtagattttcaataggaaactaagggctagtttgggaaaaataattatagttgtgttgtgaggaaaaataattgtaattgagttgtggaaaacactttgtagtatttagtaaattattatttttaaaagagaaatttgatattatatgcttaaaattaatttatccactaaaaatatgctagtatattttgcatcatgcaaaat

SEQ ID NO: 168384 - DNA, 1703 bp, Cannabis sativa
gaggtactcgataggaactacccctggtttttccatttctcaatctgatgttagcttggctaggcagtccccatgagcattcttttctctgggaatttgttcaattttttaactcttgaattcttggagtaagtcctgcatggcagagacataggcaaccatcttttctcgacaggtttgatattctccgaacacttggttaataactaattgggaatcattgaacacttctatcttgagggttcccacaagtttggccaatctcaaccttgctagaaaggctccatactcgacttcatttgtagaagctgggaatttgaatctcaaggtagcttgaagcctgaacccttctggagatatcattgttatctctactcctgatccattatcatttgacacaccatccacatataccttccatgtgggaaacagggtatggtaagtcagtcgttgcctctgtttcattgcattcaaccatgaagtctgctagggcttgccctttaattgaaatgtgggggacatactatatatcaaactgactaagctccatcacccacttaaggagtcttccagagacttccagtttgtgaaggacttattggagtggaaggttggtgaacactttaattgcatgcgcctgaaaatacgaccacaactttcttaatacaataaggagacagaaggctaacttctcgattagagggtaccagacttcaacgctaatcattcatttaataatataatatatagggtgctgaacttaaatttcctcccaaaccaaagcaacactaaccacattcttggagtaatccaaatacaagtataggtcttccccatgtactggtttggataggataggtggcttggccatatgttctttcagttttctgaatgcttcttcacattctccactccattcaaacttcttacttttcttcaagatgttaaagaatgggacacacttgtcggtagatctgaagatgaatcgactcaaagcaactatttttcccgttaagctctacacatccttgtgcttttggggggaaggcatgtccaacaaggcctatattttatctatatttgcttcaatccctcattggattactatgaatgatagaaatttcccagatttgacgttgaaagttactttctaggtttgagcttcatcctatatctcatcactacttcaaaacattctttgagatcatctgaatgatcttccctagtattagacttaactagcatgtcatgcacatttaccaacatatttcttcccaataaatttttgaacatccaatttaccatgcactaagatgtggctcctgcattatttagcccataaggcatgactaggtagcaatatactccttttttggtccagaatttggtgcactcctagtatgccacatgcattttgactggctatacctgaagtactcatccatgaaggataatagttcgaacccaaaggtggcatccaccatttgatcaattttaggtaatgggaacagtcttttggcaagccttgtttaaatatgtatcaattcatattttccatgtcccatattgtttgggcatgagaacttggttagccagccactctgggtagtaacgtgtcacgacccaagccctaggccgtggcaaatatgtaatatccataacttgggtagtcaaaggtcacactttgacccttgtaggaagat

SEQ ID NO: 168385 - DNA, 1932 bp, Cannabis sativa
aactcaaagagatcctaacgtgacgctggtaggccaagaggctgaacaagttcatccatccgtgcaagcacagttggatgaactaaaaaatatgttccaagcctcgccggtcaaaagcttaatgatcatgagttggaccgagcacgtggatccctgtttactccagagatcaatgttctagagttaccacacaagtttaagatgccgaccttgaagatgtatacagggaaagaatatcccttagcacatctcaagtattttgaaatgcaaatggacttgtaaggagtacgaggaaatgtgcgttgtatagttcttcctgccacactctcagaagctggtcaacaatggtacttcaagttgacaccaggaaagttcaactcttcgaaggctttctcctcataatttcatgcacaaaattctcttcttcacacaaactcctattgcatttagaagacctggtcgaagtgaagcaaagaccaggagagcctttccgagcttatataagtagattcatgacagaggcaacaaaaatggcgcaattaattgaagaaggaaagctagctgccatactccggggcatcgagattcttggagagctgtggaaggacatcaagaaatgttgtcgagtagattctatgagtgatttcctcgaccgtgcagatggtttcatcaagcttgaagaagctattcaacgagcagatgttaagcctaaaccaggccaatcacaagctccctcaactggaacatccgttcaaaacccctagtacccaaggagttcaaactcgggtggtaagagatctaacaacaacaacagacaatgcaatggaaaaaagggaaagttcgctggcaaagccgaacagaccactagagaaaatccttccaaattcacttctttctctttcttgactgacgatttggagaccatctacatggctactcagtcagtagttatgtacaagaaacctgctcccatgaaaaaggacataagtaagagggacatgtccatgttttgtcgttttcatggagactatggccatgacaacaatgagtgcaacaatttgaagggggaaattgaattcctgataagaaagaataaaaaatatgtcaaggccgatcaaaactatagggccgcccaggcagacaataaccaagatgcattactgcctccatcagtagatggacatttgcaagtcatcattggggtctcgcatatagctggagattcaggaaaagctcacaaaaggtatgcttgaaccttacaacatgagcaaaaagaagtggtcatggtcgtagaagaaaggaaaccaaaaatgccatgggtatgggaaccaacgataacatacaatgaagatgatgatgtcaaagtttgcttccctcacaatgatccattagttgtgaaagtatagatagctaataaaatagtggcccgaactatgatagacaatggagccttagaaaatatcttattcagggcaccgtatgaaaaaatggggctccaacttaaagatctgatcccctgcctccagcccgtgtacggtttctctagccaaagtgttgcagctttagggaaaattttcctacccctcacttttgggcaagctccgaagagcataactaagatggcacaattttcggtattggatgtcctatcagcctttaatgtcatgttgggccgaccaaccttatacgacttaaaagttgttacatcaatatttcattcgtgcgtcaagttcccaacaaagaatggggtagggtgtctgagagggaatcaacaagttgcacaggaatgttacaaccttgccctaaccaaggctaaagaggatgaatcttctagtcagagctcgaaaaaagggaaagaatatttctaaatatggaaccacccaaggtggggacaaagatgtggatccctgacttggggaaccaaatacaaat

SEQ ID NO: 168386 - DNA, 859 bp, Cannabis sativa
tatagtgatatgatattgagagagaggaatggctagctgggattgggtgcaaagtcgttgtttttcggtggtggtgggaagtagaaatagtaatatgtggggtatatatatatatagatatatatatagagagagagagattgagtttaacacgcacaacagaataggcagaagggtgttgtcatgtgtgtatgtataatatatatatactactaactacgtacatcatcacagtcacaccatgtatattatgtatgtatatatctgcattattattataataatattgttatattgtacgtatagacgtactgctatatatataatatatattatctatatattgacaaatttgataatttctatgatccaattttcaattttgactaaattgtgttggaatattttcctgaattattattaaaaactttaataaaactgtgctatgacatcatttttattttctggtgtaacttttctaacaatctcccaaatatgttatttaccaaaatattatatttaaatgattttttttttttttaattttaagagtctttgtaaatgtacaaaaaaaaaattaaaaagttaaaaatttaaaattcgaatgcccctttcattttaaggactctaaacataggtctaacagtggacaggtatctaagaccgagccttcaccttttgatacattgttgtagagcactaccttcctatattgatagtgtcaaagtaccatttcaacatatatttaattcaaaacttaaatctacaaaatttactcaagacttagggtgcgtttggaaaaccacaatgtaattggatttgtgtgtaattagaagtaattacacaatttgacatgttt

SEQ ID NO: 168387 - DNA, 1107 bp, Cannabis sativa
tcagagaactgaatatagaattcttgggagagctcttcttgaattacaattgttgggctacttcagctagagtttccaaaaagattctgcatcgcagatctccaaatactttttagagatctgtttggatctcaaagtacttcaggtgtactaggggatcttcttttcccgtgtacatcttctaagttggcatcttgaatttgggcaagggtaaggcattgatatatgccgagaatggtgatccccttgacttctctagctcaagatctgaaggttttggaccagctaggtgcttgagcatgtctcgtatttgatccaacagtgcttgcacggaacaataatagaaaatcctaaattcccgttagttttacaccgtagggtaaagaatttccaacattccataaaatcgttgcttatacgagtgtcacgattactagatagaataaacggcggttaaaaacagtcagggaaatagtatgggccacgatttaaaatcatcacctatagtaaacactataggtgacggtttagcctatagtatatgccacggtttaaaacgatggcctatactatagcgtacggtttaaaaccgtggcctatactatatgccacgattttaaactatcacctatagtggtataagcacggttttaaaactgtggcctataatatagactacaatttaaaattgttgcctatactataggccactgtttcaaatcgtcacctatagtggtataggtacggttctatcctgtcatctatctatggtaaagttttcagtttaattataagtttcttatttttcaaggacgatttttgccagtcattttgttgcaagaaaagggaaaagaataaaaaaaattatggtagttttcctttgcactaattaattcttactaatttatataatgtcactaattagttaagataaagtataaacataaaatgaaaatgaacagaaactaaaagatatacaaactacgtagtctaacttacttaatcgttaggtatatgaaagtaacttgttatagtgtaaagtataaataaaaacagaaattgatcatcgtaatagcccttgtcgcactgcctgtgctcgaacgtatt

SEQ ID NO: 168388 - DNA, 598 bp, Cannabis sativa
  modified_base (569)..(572): a, c, t, g, unknown or other
atgagtcatcggacgacgtcaagggcgtcgcattaacagcgaccataatcgtcgttttaaagaaaccaaacaagtcagacgaaaacaccttgtcatctatattggtcctaacaagtgaaggaaatgcatgaacaaaaacttacacaaaggcagcaaggtagaagccgatgacacctggtggtagtattttgcttgacaacagcgaaggaaacacaaaagaaaatcagaggtgtctggaattttgttgaatgtgtttaatggactagatactgcagagtggtgaaaattacccagttggggaaaatgttggcttttatagaccatttgagatgcgaggcaacattgatcaggcaccatcgtacggtgaagatttgcaacgattcgaattccacaatctaacgaataggatgagcgagtgtgatgagaagaaagggcagttggaacgtttgagtacctttctgacaccggcattgatggaagggtctatcaataggcgggaagtgaaacatttcctgcaaaagaaacaaaagctaatgatggcgatcataaatgtgttgggttttatgccnnnnataaaactctttacaatctgattagt

SEQ ID NO: 168389 - DNA, 662 bp, Cannabis sativa
ttgctctccggttgggggtcattctggtgagctacggacctatcagcgacttaaaggagatgtttattgggtgggaatgaaggccaaagtattggcgtttgtgcgcgcttgtgacacttgtcagcggaataagtatttggcaatgtctcccggtggtttgctacagcccctgtcaataccggcccaagtgtgggaagatcttaccatggatttcatcgaaggcttgcccgaatccgaaggcgtggatactattttggtcgtggtggatcgcttgagcaagtacagccattttattggcctcaagcatcccttcacggccaaaactgtggcagaaacattcatcaatcacgtggtcaagctacatggggtgccatcgtccatcgtctcagatcgagatcgaatcttccttagccacttctggtccgaattgttcaaactccaagggactgtgcttcgtcacagcacctcataccacccgcaaactgatggtcagtccgaagtggttaatcgttgccttgaaacttatctccgttgcttcgcttccaatcggccgaacggttgggccaagtggttggcttggccaagtcgtggttctcgtcgatagtggtgccacccacaactttatcactaccgaattggctcggaagttggagcttcccctt

SEQ ID NO: 168390 - DNA, 597 bp, Cannabis sativa
tgctggagagtgatcaaacaaaccctcattgagaaaaacaacctcagcttgctcatatttagcgatccaagattgattcgccatgatcctatcaaccttggaataaattttatcagttctcgattgcttgttaaaccaagtgaaaaaattcccgctagctttaacatcttcaagtttatagaaattcacacaagtaagaaagtcagagccaggataggacctcaccctatgccccaccctctcttacttggctaagatgtcattaaagtctcctatcaaacaccaattttcatcagagcatagttcacataagtccttccacagaatcttcctttcaccccgactgttagaagcataaaccactgtgagaaagctattgaatccctcaactgttgaaatcttcaaatgcattagttgactagtatatttgaggatgtcaacagtaaatctatagggattccaagcaatagttatctttcctcctggatgccaagaaatattagaagagaagcaccatccatcaaaaacattagagtacaaggctcgaagttttggagcctttaccctagtctgaaggagaccaacaaaatcaacctt

SEQ ID NO: 168391 - DNA, 2223 bp, Cannabis sativa
  modified_base (1039)..(1042): a, c, t, g, unknown or other
  modified_base (1580)..(1582): a, c, t, g, unknown or other
ttgtgagtagatctaagatcctggtaaaataatttccaacactaccataatatcgcccccataaatatatataaagggtattctataatgcattacccaaaaagaggtatacatatgcactctttatttgtttcccaatttaagaaaaaaatttagtctaaattttttttaaattgtgtacgttatagttatttatgattgcaaaatttcgagaaatttgaaataatttacaatgtagaaaatattgttcaaacagtctatttcacacccgtataaaataaaagagccacacgtgtaatagattgttcgaatactgattttagtgtgttaaatttttataaatttttcaaaattttgtaagatgttttaaataactataacatacacacttataaaaaaaattgcactaaataattttttaaaatgaagaaatagatagggtgtactgctgcaccctttttacgaaggtgcattgtaaaatatttcaaaaatagaattattagcagttttttccctgaacttttgctaatattgattttggcccttaaaatatacgggttgttaagaattcctcatgaactattatatttacaaaaatttagtccttctgttaggttctgtcccattattctatttaaaagatgacatgtgtttgtcaattagcaactttgccccctaaactttgacaactatcaaattgaacctccatgaagtaaaaatgagaaagattcaatattttcttttagtaaatcttaagaaattaatataaatcttaataaaaattactttgaatgattaagaaaattaaaaaataaattaaaattttaaaactaattatgcgatattaaaaattatttattttttattaaaaaattcatttatatattaaaaatttattttgtaaaaatatattaaaaactaaattttttaggcacaaagttgaatatattttatttttatcaaacaatgtagatttgtttaagtaaacataacattttttttagtttaatttataaattttttcaaaataattttatannnntattgaatttttaattatttttatttatttgttaaaatttaagtttataaatataaataagtttgattttttcttcaaaaaatcttagttcatttaaattatttattagattctcaataattttagtttaattttttaagatatgtgttgataaataaaataaagtttgaaaatattttttttaagtaaaattaatatttttgaattattttaatatctttatctaatttttattatttttttgaattaataaaatattataaatgctttaaaaaagatagaatattataattttgaaaattattttttttaataaaagggacaaaattttgtattagttaaagtttaggaataaaaatactaatttttaatagtaaaagaaatagaacctaacaaaaggggcagaattatgtaactgttatattttgagaattttttttaacaaactgaatattttaaaaggaaaaattaagtagtacagaaagttcaagagcagaaatagaaattattctcaaaagaatataaatatatatatatnnntatatatatatatatataaggattatctatggagggacttcttatttttaccctattgtataaggaaatttttttaaccaattagaaatagtgattttgagtttcactgtaatataataaactctatagtaggaaattattttatttattttattattttaatgaatatttattttgtttttcttttgaagttcaattttaaaaaataaattgttagagcagagaagatgaaaaaaaaaatcttaaatgtgcactcttgtataatttttttattttttatattttgcttataaatttaaacatttaaatcttaaaaaacatgttgttaatattttcaaaataataaaaaaaaaaagaattattttataaacatccgaaactaacaaaaagttatatttttacagttctatagttatttttatatttttatagattttaattttctttttttaaatacaaagtgttgttgtgttcatccaatcctatatgccctattttgctcatagtgcatctgattcgcagtaagtgtgaatttcatattttggatccaatccaatttgcacaatagcacaaattcaatgtaattcaatcagtaacattacagattgaatcagttattttggattggttactttttaata

SEQ ID NO: 168392 - DNA, 854 bp, Cannabis sativa
ggcacaaaacccaacaaatacgtccaccaatcagttacgatgcatcagaccaccgtcaaacctatatcaaaccactatcagaccttctccatcaacctcaaaaacttaaattttggaacatcttaccgaacctatattgggcttatatcgaacactatcagaccgactcaaaaaatgaaaaagaaactaaaaaattattgagaacgtcttcgcccgtgctctctccattcatggtctgcgtttgtggtctccgtttgtggcagtggtctctctgttcgcgattgaggatggagattagcgtgggcttaaattgattgaaatggagtcgagagggtaggtctaattggttttttagtcggtcgagtagtcttggatggtggaggcggtgttgaatggtcgaggtggtgttggatggcgacgatggtcttggatggtggcgacaatggtcttggatagtggtggtggtcttggtggttcggctctattgaagagagttagcaagaatagagggagagagagagagagacgggagtaagtagaaaataagaggagcaactttggatttaatgaaaaattgacataatctaacaatattggtatactaatgattaggggataaattttagcttaataaatgtatataaagtcaaatttcttatttttttttttaagaatttagtaatcaaatatataaataaggtaataataaaacacctatttaataaaattgacataaacatgatgtggttgttcaagattggataaaaaagggaaacttacaaaaatactggaatttgagttaacttttacaaaaatactgtcacacggaaatctttacaaaaatactgtatttt

SEQ ID NO: 168393 - DNA, 637 bp, Cannabis sativa
taatttgttggactggatattgatcattacgacaattccaatattctttcatcttatcgttggctcttttcaatttttccttaaaaatattactttcaagattctgtgcctttgaataaaacacttcattaaagttgttgttctctataggggtgaattcaggactagaaaaactcacctagaaatgaagaacttcagtgatcatataatgaactaagtcgtcttcaatgttatcattcaaataaaatattatcttctacctctcattcttattattcatactgtaccaaaatgatccacccaactccatggcatttttgaaaaattgttgtaaagtatcaaaatcgtgtattaacaaaaagttatgacaattctcttccatatttaagcattggattatagttataaccttatcatgaattaatgtcaccatttcatgattcttcgcattagaagcaaagatgatcaagtgcaagtaatctataaacaagttggagatttgagtaccaatctttccaaaacaaacctagagaaatttgaaaaaagtgaatcttgttcaaagtatatattatatataagaaaggtagaagaagataagaacacatgtaatatataatatatatatatatagcaagag

SEQ ID NO: 168394 - DNA, 1012 bp, Cannabis sativa
aaaaattattttgtgatttttgtgcaacatgacattacttaatatctctttaagccatagttagttatcacttttggaacgccataaataagtttttaccatcaacagacaaaggaggatccattttctagaaacaatagactaaaaagaaattgtctatgaaaaaaagtgatacaaatcaaagatataagaaactaatgttaccaagattgaaaaaaaagtggaaggcagcccagctattattaagaacgacccaactcgaaatagttagccccaatgtagtggcaaaaaattatctcaatatggaaaggttagcccagtcaaactacttctgtaatctgtagtttggtttgtgaagcacatcttttctcaagcttaaatggaattttgtggcaataattttgttgggtcaaaatatggaattatggtgtcaaacttaagattcaaaatgtatatttcatgtgtaattaattgttttaattaagtagaaattataaaaattatggaaaaatttatattttatggcttattttttttaacacatttaggttatgaatttttagaaatgtttacatttttatggtttaaaaaatactatattttgtaatatatttatgtaattcccgtactttatcttttagctccagttacatttctaccttctctatccgtatgagttgaaatctttgaaggtctctttcgagtctcctgcttgaagctccaagccgcgatcggcagtccatcaccggtgttcttggtgtggttgggtccgtcgttagagatggagttggtcgcagcgacagtagtggtgtcggtggtggtgatgaccgatataaccgatttgggtcgagagattgtaacacgaatttcaagtcattgccactgagacagtacgactacgattatggggattctacgggtgaggggttttgtctgggaactacataatgaggcgaggtcatttggggatctgagcgagtcgacaggacaaaaatggagagagagagagaga

SEQ ID NO: 168395 - DNA, 1697 bp, Cannabis sativa
ctcatcaataatagagcattactacttagctaggtggcaagtcaatgatttatcagtattgttattgagcactaataataattacggtttaatattacttaaaaataatattttataattagttaataatattttttaaaagttattttattaatttatatatgattttatatttaattacactaacaacgatataatatctaagagaatgttaagcaccactgaaatcttttaacattaaatataatttatataccatatatatgaatattattactagatacaagtggtgtttagcatcactacaaaataacactttgcaaattgttaatgatatttgttattgagataaattttccctttcttgcaaaaaggactttactatagaactcgtggtatcgaaaatagcttgcaatattatgtaaaataagactcgcagtatcaaaaagacctcgcaatattagctaaaatagatcttgttgtatcaagaaaagcatacctcacatatttaatgaaactgcaatatcaacaaaaaaaagcacaaacacattgatcaacgaaaactaacggaggagcattcaaacgttaaaaatgttacatttattttataactgctataatcaatacaattaatgtgtcaattattgtcaacggtctcattatgatcgaactattgtaactgctacctactacctataagtaggagatttttcctccatttaaaggggctgagctgatctgaataaagaaaccaaacaagagatctctttcaacagtggactaagcaggtcaagccctattgaactactatattttttttagtatttcttctatattatttacatactcgcctatattatatacattatattctttgagtactcactattctaaatgagtactcgcttatttattattaggtattcaaatgatatttgaatactcgcatatcttagtgttgtctaaatttctcagttaataattttataaaagttatattatattaaattaagtgggactcaatatttaattgtaccaataataatataatgccttgaatgatactaaattagtacctttcagcatttctccatatatatcatgcaattaaattctcttgggaagtaacataagagttcaaaagttagattttgagtaatatgaaaaatagagcattgttattaggcatcagtggtgcccagtaccacgtataggtgacactctacgatcggttaatgatattctctacaaattattatcttaaattatatgagactcaatagtacttaattatatcaataacaatatgataagtcacatcactaatatcttttaatatttttttatataaatatgaccaattggtaggccgtgtcctaaaaatgttattactctagtgtttttttctttttcagtttatggcacataatgggtattttgctaatttaaatatatataaatataaatttcacttgtggagctagagcttgaataatgttggatagttttatagtagtacacaccctctaaactgactgttttggtacatttttatatctgttttgatatttaagaaatgtttcaagtccaatttgtatttttataatcgtgtacgttgtaattatttaaaattatttgtaaatttttaaaaaattataaataatttataaaaataaaaataagattaaaatattttg

SEQ ID NO: 168396 - DNA, 956 bp, Cannabis sativa
  modified_base (224)..(224): a, c, t, g, unknown or other
  modified_base (316)..(319): a, c, t, g, unknown or other
  modified_base (345)..(358): a, c, t, g, unknown or other
  modified_base (434)..(434): a, c, t, g, unknown or other
  modified_base (914)..(930): a, c, t, g, unknown or other
atttggagaagagtgtttgtgcaagttaaattaagtcattaagaacattctcaatatgtccattgccttgttaagatggctagacaacaataagttttttatggtacgtttgtttatggttaaatacagtaaaagaaagggtgggtttatggcttgcccaatttttcccaaaaactttcactacaaaaaactactacttctagtgataattttttagtcacaanataatttttttgtgactaaatgcgatttttaatcacaataaaatgttacttgtgagtaaatagtattttgttacaagttgtcactaatttannnntagtcacaacaagtattatgactaannnnnnnnnnnnnnacaacaaattataatttttgtaactaatatacctttagccacagaccttttagtcacaatataagaataataattnataattaatcacaatttttttatttttaatcacaaattttattgtaactaaaagtaaatttttttttacagtaagctttattgattataggaaatttcaatgcagtattcaacacatgccatcagcaaaacattcataataagatttttacaccatatactgtgttgaaatttcaattttttttctttttttactgtggagcggaatttttttcaaaaatactgtgtaaattttatactgtgtattatattaagttttcactgttattttacagttacttttagttgtcctactgttatttttaattaatctatcttttcttttacggttgttttataaaaagacagaatcttttgtaaaagattccgtgtgacagtaaaattgtaaactttgacacaaaatccagtatttttgtaaaaatcccaaaagaaatttattagggagtaagttgaaaaataccccttttattaatcaattaannnnnnnnnnnnnnnnntttatatttatttgaaacatacctct

SEQ ID NO: 168397 - DNA, 526 bp, Cannabis sativa
taataatttttagcaattttctttagaaaacgacattacatactctagaatcttcctcaatttgattagtttctataaaaatgagatggaaaaagttttggttatgtgatctttaccttttataaataagtaggaaaattagctctataaaatcaagaacaagctagggtccaatatcttattctatttttagaaattgttgataagatttataaaatccagaacaagctacggtctaatatcttattcgatttttagaaattgttgatgaaaatcttatctcactattattataccaaatatgtagtactagctcccaaataatggtgagaaaataatgattaatgtctttataatattaaaaaaattaataaaaatctattattttaaaaataaaatcataaattattttgatgtatgattattttttattaaaaaaaataatctttattagacagaaacatctgctaaaataatagactgaagagtaagggaaacatcactttcagtaaaacgacgacctgac

SEQ ID NO: 168398 - DNA, 667 bp, Cannabis sativa
aaaaatatatatccagaattaattaatatgaactacagacaatcgaagatgtatatatatatagccgcaagcacctcaaattaatattattaatactcagtttcaaataagtgattaaattagtgtcataatatatatcgtaatccatgttcacaataattaaccatacaccgtaaacaaaagtgtagtaattaatattgtttgaaagcgagataagtagcattaatttgttggtgtgaaataaaatattttgactcttattttatcttaataagaagacaaatcttatgaagaaaaaaaactcatattgctttttcttcgaaatttctccatatcaatttgaagaggaaaataaaaaagaaaaacttttattaggaagatttaggaaattaatatataatgacttagttgatgacccatttacaaattaataacctgctccaatgtatccaattaatgtaacacctaccctaacgaccatttcaaattagaatgataaagatatgaagatattgtcgatgttgatggacaactacaagttacaatgtcaactacaattctagattaattaaaacatcggaatgtcagatgaaattaacaaaggaattctcatacatgtgtataaataatagagtaatttgcggcaaaaatacctaagttttatccc

SEQ ID NO: 168399 - DNA, 991 bp, Cannabis sativa
  modified_base (927)..(947): a, c, t, g, unknown or other
attgtgtttgaatatcctgtgatttcatgaataatatcatatttgattctattcactatacaagtaatgactttacactcccaaatagcctcattttcagctcttcaaatgtgataaattgctgcaagagtaaccataaaatccttcataattgccctaaccatcagaataattgtccacaactcagtggcattagtcttccaatctaacaaattcttgatttggcttatataagtatggctattataatctcaagaaacaaaagacatgactcacatcctcactgtcaagtccttaaatcaaacaaatttggggacattgctatcccaatcttatgtagcctatcacaagttttcaacttgtcttgtttagccaataaaagagtgtttgacaatattcatgttgttgaaaaacaattatgagcatttaaaagcataaaccaaataatatccataaccattatagccaaaatctagtatttatttagagcatcaaaaggcaataaaacacatacctcccataccatccatgagagctgtaggatttttcttgtgatttcaaagaatgcccttacaccaactcaataatgataaaaaacgtcagggacaaaactgtcccagaaaaattaatacacgaaattaactaaacgaccaagaactcaagtcgtttcctcctgcacgacaaatcgttttagccaaaacgatttgtcgttctgctttgaacaaaaacaaggcaagctgagcaaaccctagcttagaaatgtcaaagaaccttcgagagttctaccaaactctctctccttctctggttctcaaaccctagaaccagatctcttctcgatcaaaaccagatcgatctacccaaaaattagcacaaacacatacacacacaactcaaaattatgtagaatccaatcaacaagaaggnnnnnnnnnnnnnnnnnnnnnagagaaagagatccaggttcaggaagcaagggctagagatctga

SEQ ID NO: 168400 - DNA, 908 bp, Cannabis sativa
gatcattaacaagttggatttaattatattaaaaaaaaatacatttatcataatttataataaatgtattttctcgttcctaaatctatatagcatgtattttcttttaggctagttatgccgacttccttaagcttaggtgcagtttaattagggttgtgtttgctactataattcgatttttgctgctacaattagtattgtccatgtgacatagttttgagtattttagtcttatctctgtgacatagttttaagtgttttagtcttgtctgtatgacatggttttattttattttgtttcgttgttggttcttctttgttcttcgatgactcgccatcaaatcattattagtggttggtaataacaggtgttcagcgactaaaggggttatttatagtgcagttacatattttacacaatagtagagtgctcaagctgcgaaattgaatgaacctgctacaaaagtttccgttatatcttctgaacgatggatggaacaaaatataggtattcttaaaattaattgtgatgatgttacattttttttcatctgattttattttaatttttttgtccaacgattatttggcttgtttttctaatgttaattctaataatgtccctaacaggggaaatgtcgcattgaattgcatactagtattttacttgccataactaaaatttcaagatttattaaaaaaatacttcaaattattgtattaattatttttatgtataaacatcaatttataaagtcaaactctttttgtaagactttgaaatcaaattgtgatattgtagtaatattattatcaatttttcgccaataaaaaaaatatatattattatcactctatatatgtgtgagtactatacttataaataatgtgattattaacctatt

SEQ ID NO: 168401 - DNA, 951 bp, Cannabis sativa
  modified_base (532)..(533): a, c, t, g, unknown or other
gtaaccctaattaattttcttttttatcttttcgtaacccttaattttattaatatatatctctacaatatcacacagaaagtctaacataataaacaaagaaaaaataaattattcatatcagatgataaatattaaatgatactgtgcacgtgcagcaatatgataattatattatgaaggttaattagtctactcatcataaaataatactaataaatttagtgaagataagtctatttagtgcaggtacttgggtcatgtaagttatgtcctcccattttctaacatgaatttatttaagttatattcgggattggttccattgtatcacacataaaatttaaaattattcctataagtacacaaattttacttagagttaatagcggtccccaaaatttttactttgtgaaagtttatttattattaaaaaatatttatacttatattataatcactcttattagatttatttaattttatggagacttttctactattttagcctataattatcaaattaaaaaanntacatttaattttttaaaagataatatttttgttagtggggattatagtcccacattaataatataagtgagtctgtcactgatagcggttaaaccacttaatttttatttcttataataaacttctcaaacatttttttttggactaaacgtgttaatttttgttcccaaatttatttttcattccaacttccactattaattgttaaattagattgtcaattattaagattagtatatacgcatttttagttaacatatatataataaaaatgatattaataaacataagaaaagttttaatataataattagggatattttcaaaaatatgggaaaaatgagtcatcttatgataaatatggcaacaaaactaaatgccacaaaatatggcattaactaaggaagcaaactacaa

SEQ ID NO: 168402 - DNA, 677 bp, Cannabis sativa
tctctggacactttgtgctttctaccatttgttttcatgttaggatagaacttcttggttgagtgttggatttctgggaaatgactcagactgaatctgttgcgtaatgcgtataatcttctttattcgcgtctttgctattttcttccatttctctttagaatcgaccccctttgttgaaagactgtttagggcatggggcgattttttgctcccaccttctgcattttttcacttttcttctattttcgcttcctttgggatttttgcacctaatgtttgctaaggaaagtctttcaagtttctatttttggcaaacatctggagggggcctcttttcagcggtcaggggacccccattcctttttttgatattagggtggtttggggcctaactgctggactctttcttttttcagaaacaaacatgtctaccgctgcgtcaggaaccaaatcttctaagaagggggcagtcgctctagccaccctggaggaggtcatgaatgacccagtggcccaggagaactacacatgccgttcttaacagctgggaagcagatgaactccactccaccctgatctatgctcaccaactggagaagattgtgacggttgctgggattaaaccgtccgcatctggggttttccatcgtttacctcgggacgaagagacgccc

SEQ ID NO: 168403 - DNA, 676 bp, Cannabis sativa
gaaaatacaccatagcagcagggtataagctgctctcacctgctgcaactgggctgaactggtgtaaagaagtttgggccagattgaataccccaaagcatagtgtgacactacggctggcaatgctaaatcggctaaaaacgaaggatagattggtgaaatttgggatgcaagtgaatgagagatgttgtctatgtgatgctcaagctttaaccagtcaacatttattctttgaatgtaatgttgctcttcgcgggttgttggagatcaaggcttggctgaactggaatgcagcaacaatcagcctcccacaactgctgagatggattgccaaggctaaaatctctaagtttcaaaaattggtttatgatgctgcaatagcagccctagtttacaacatttggaggctgagaaatgctattatttggcaggatttttccttaaattccagcagccttattgaggaaactaagtggagtgtaaagatgcgaattgctatgtttttgcctaaaaagattaaagatgtagataaagattggttcaatgttttatagatgtgaaaatgtatagatagaattgattgtgtataggttgattaggcgccggatggggtgctagtaggttgtaaatattgatttgtgttatacaatttcctgattcattaaaaaaaaaaaaa

SEQ ID NO: 168404 - DNA, 651 bp, Cannabis sativa
gtgcatttaaattcagagagttggatcttaaaaaagatgaatgcacccttaattgacatccctaataacttattatgagttggatcctctagtcgcctaattaagtctatgtatgtttaatttgagcaaattcaaaataagtttgagggcttcaatgaaaacaattaaaataagcttaaaccaaccctttcttgaaaaattgccaccttccaaatcttggcaaccctataagtttgggtaggctagtgactcagaaagtcatagaaaagttagtatctgaatctccatgcctttagtttgagggaattcaaggtaggtttaaaatgtcactaatgagaaaatttaggggtagagcaactctttcttcaaccatggagagagtgctcaatattctattactgcaaaatattagttgacaatttctattcaatatcttgtcaatattataatctttgttaaaatatctacttatctaggacaaaattactcaacatgaagtttagagggatgcatgtaaatcaatcactagaaaacaaaaccatggactataaagtgggctttatggaggatattgggtttaaaaaagggacatttacatggtatactaacttttgtcattttttttataaaaatactgccagacggtatttt

SEQ ID NO: 168405 - DNA, 763 bp, Cannabis sativa
gtgtgagctgacactcaactcaataatagttgtttagagagagagttcaaaatttctcaaggatttctctgaatcactcaaagttggggtttttagtgtctattttaaggatgtaaattaaaattttatcatattccttatatagggtctcatttaaggttggatttaggttatgtgggcttaattagaaaaagataatggcccaaaaattaaagccatggccgaattttcacgtgaggcccatctcatttaatgaaacaatcattcatttttctaatctaactgtttaaatagcaatttttatctacttaataattattagaaccacaaagtgtttaaaaattgtaaacttttgaatagttggaaaagaagtatgctattataataactaagtaacaattatgaatacttttaattttttttaaaaaaaatttattagtgtttgaattgaaaaaaaaaattaaactaattattaactacaataataaataattagaaatagaaaatgtaagttaaaaagttcataatttgatctaaaacatcataagctttaaactaattattatttgttaggagcatgtcgaactgtataaacgggatgattatcaacaaacggtcagtgaaatttaggaaaggtttggatgagtttgttggagttcctaattgataggagtgttcatcaaaccgctcaaaccgcccgcaccgcaccacaccgcaaaaaaatgcggtttgaaattctttgcggtgcggtttgcggttttga

SEQ ID NO: 168406 - DNA, 837 bp, Cannabis sativa
aaaaaaaaaagtcattttcaaaatctttttaaaagttttttttcttaatcatattttggactctgatcagaccaaacatggattcggacttcggccccagatccggacctggactccaaccccatacccaaaccctaacactggactaagactccaaccccgaacccaatcgcgtccaaggatcccagattcctaacccagaccccagccttgggacccgaacctgaactcggatacgacttaaataaattcaaaaaaataaaaataaaatttacaaaatacacttttcttttttgtttttaaattgaaaaaaaaaatgattatagatatcactaattaatttttagtttaataattttttaaacagatataactttttatttttttaatgttaaattatacatatggcgctatgtggcaattggttaagtagtcgtatcatcatcattttgtttgtcacgtttgatgaaacttgacagaatgaccaaattaataatactctaaataatttaggaattatttaaaaggggttaaaaaaaattagggacacaataatacatatatcatagtttgagagaaaaaattttaagagtttatttggctttataacttaaaactgttttctattttttaaaactgaaaaacagtttttaaaaactaataggggccgtttggcaaaattttttaaaaacagttttttaaaattgagttttaaaaaactggaaaacagaaaacttcaaaatgttattttcaatttttcaaaaacaattttttttttgtctaacatattatattttatattttcgctcacttactcggatcctagacccggaacca

SEQ ID NO: 168407 - DNA, 1109 bp, Cannabis sativa
catgtctcgatgcctccaattccattgattataccatttcagcctcccagcgatggctcttcttcacatactacctctcccgattgtggacttatagttttattttttaatttgcagagtaaatataattaatttttataaactaacaatattttggattatatttatttattattatcttaaaaattttgattttaattttatttttttataaatataatttttttttaaataaatagttttgccagcaaactacatctagttgaaaaaactaaaataatgttttttattggtgaagttttgttggcgaaataatgcaccaacaaaacttttgtgggtaaataaaaattagatgcgaatttagtgccaaagttttttcggtgcaatattttgctgacaaaacatcatcagggactcctcagctgacttgctggtgagaaacttatataagctattggtgagttatagtgattcatcggtaaaacacgttatgtcgacgaaaaactgccagcatcctttgttggcacaaaagctcatggagaaaactatactggcaacatatgtatacttttgccagtgagaaaactcgccggcaaaaagcatttttcttgtagtaaatgaacaaattatatcctattttcataataataataaactatagattaaataaaatttaaaaatatactactaattagttgggtaaaaatgatttagtcgaacaatctaaggagaaaaatataaattaaaaattaaatcacatcatttatttatagtgtatctatgaagattgtgaacaatgtgagatttttataaaaataagctcagtaaataatttttctttttttatgatataaatatgagattctcacaaaatttgacaaataaaaagaaaaaatatagaaaatcacatacttttatactttcctttttataaatatataaattaagacaaacaaatttgatataaatatataaataataaaatagatataattataaactataaatgtgataagtatataaatatagggcaagactatggtaggacttaacaaaagttccctaccgttagggaactttttttgaccattgattttagatcatgtggt

SEQ ID NO: 168408 - DNA, 657 bp, Cannabis sativa
ccccaattgaaaatcgaaaataataataaatagtagttcttcttcaattactcttgtttaggaaaaaatattgattcatttgattttgatatcataatacattagaaaacactatatatcatctttagctggccactcctttcctaagaggaattttatacaaaatatgatatttttattaaatattatacataatattttcttcaatttcattgtccaaaactacctgtcacaatattatttttatttatgtagtatttgttattgtcacaatattataactataaatttttaaaaatatttgaatagtctaaaatttacaaacatattattgtaactataaaaaaaaaataccattataaaaaaattaaaacaaaaaaaatctggcatgtaatttttggactcaaaatttgaaaaagaaattgcattagaatactttaactagcacttctctttacgaaattaagaaccctagacacaaacgcgactcatatatggttagagcaactccaacgtagcaccaaaacttaggtttggtgtataaaatccatccaacgtagcaccaaagtttgcagtatatatatcgtgtggctacagtacacgtggcactgtagctacgacatttttttttttttaattattattattatttaattt

SEQ ID NO: 168409 - DNA, 725 bp, Cannabis sativa
tgtaagaaaattttagaagaaagttaaaaaatacagagaaaggagaaaacagtataatgtaattggttacttatttgataactttaagggtagctagttacttttatttgttatttttttaaaaaaaaaatttctcataaaataattttttttttttgaaaaaatacaccatatttttacattaaaagtatgaaaactcatcaaatttataattttcttcaattgtatttgtataggttgcatatattcttatttctaattttattgagaaaattttctcaacctaaaacaattcatggccatatatagcatggaagaaaatatcataaaatagaagttaattttactgtgaacacttctaagaggttttgttaccaaaaaaataagatctacaaatagtatcgaaaacagagtttttgatatttcagtttatattgcgcgtgtttaaaaaatttcaaacttattttcgacactataaattattcaaaatttttcaaaaatttataaggatgatgttgtaattataacgaacaccgtcatgagaaaaaaatattctaatatgtattttcaggcacaaagatgactaagagattataatacaaggttgacgataacacttaagggtgttcatcaaatacccaatccacaaagtgcagattagattggattaaaaaatccaaaaatccgtgcttgtgccaattggaggttgattgtcatgtaaaaat

SEQ ID NO: 168410 - DNA, 666 bp, Cannabis sativa
tttaagcgtttatatattacattcatgttttacttaggacacgaactcagaatttccaacacacacatccacctatagccacttgaactagactcaagtagttaatttaactgatggttaaaatttataaaatgggtccaaagaaaatatgtagtgaaatgacatatgaatgaatgtaataaactttcggaaacatttatactactacaccaccttaaacgagtatttttgtacaccacatttatttatttttcttatattcattgttattttaattttaaaaaatataaatagtgtacagtactaaaagtaaaatttaaatatttgattaaatatttatttatacgcatagtaaataattatttaaatttccttcttcaaagtataaattatttaaaaagtaaaaaatcacaaataatcttaaataattataattatgaaaaaaaattaaatatctctcatcaatatcgaaataaataagagtataccgaactaatagtataaaattaccttaaactttatttaaaaaataaaaagtgctctagctaatttttactttttctaatttaaaaatatttagttacatgcatagtgatacagggtgggttggagattaggataactataagtctataaccacgggttatattatgagaaatgttaaag

SEQ ID NO: 168411 - DNA, 504 bp, Cannabis sativa
tatatatatatatatatatatatatatatatacccctttcatggccacacacactctcatagtccaacaagcttttttcttttatctttcttgagaaaagtccacaagcttatgcaataagaggagatgtgtggcatgctgtgtatcaaaaaataaataaataaacaaataaatacatatttaatatagaaaaatgcaccaattaatggttaacatttatcattacatatagagacaggtcagttcaagggtagagcaacaggaacctcacctaggcctaaaaaattctttaagaaaaaggttagaacattcgtttttttaaaaatactatttttttttatatgtttactattatttgttacaaaatataattattattttacaaaaaaaacttaatttaattttttttgattgaaaataatctttattagatagaaatatctgctaacacaatggactgaagagcaatgagaacatcaccctcagtaaaacgacgacctgacc

SEQ ID NO: 168412 - DNA, 608 bp, Cannabis sativa
ttcaatttcaaagtctatgaccgatgaaaaattatcttgtatgtctatatccacaaggactttagcaaattttacttaagtcctttccattgttatgctatccacacttattggagttccaattgtgcttgctaaagcactaagacaattgttctctcaatattaaagacatagaccatagaactttacccacactggcacaaactttactagcttaactgaatccaaattaggcatccaaggtttcatgataacaagcttattgtcaaaataaatcaccccaacctctagtacataatcacaagttgcctcatcattgaatttaactagagtaaccccattgttcattttaacaattcattccacacctagatcaccccaaacccttcttacaaagccctcaaaaaccttaattgggggattagcacccaaaacaaaacacagtaatgacgtactccaatattcagactcaatctcaattttatcaagatcaagtttagcaattacctttccccctttcgtcaatggctatgtatagtgaagtctggctcctactattggattatattttaccaggatctagatttactaccatgtatgttattcaa

SEQ ID NO: 168413 - DNA, 675 bp, Cannabis sativa
ttacactaattaatttctattttctttcactaatctaacgagtgagtgttcaccaattttttgcatcaacaaaaataatcattaatttttttaaaataatatatataaatgaaaaaaaattaaaatacataaaattaatagtaaaaataacataaaaattttaaaaaaaaagtatcaaaaataaattagtttaatatttcataattaatgggtgcaaatatagtcactttttttttcaaacttataagaaaagaaaaataatatgagattataccaataaaaatgtgtggattattttttgacaaaaaaaaaaaaatacattataaaaaaaagtgcacaatatatatataagtgcaatatttaataatataaaaataatgtatttaataaatcaaataatattttttctcaaagaaataaataaatcatataaaaatattttaatgttatttaaattggttaagcttaacaagtttagtcattaaaatagtattattatataattataataataatactattttatatgttttcacgtttgtcaattattattattattatgtcattataaaaaaatagctacttttagcaataatttttttaatcacattataaaatttttgtgactaaatgcgacttaccacaataaaaaattacttatgactaaaacatagt

SEQ ID NO: 168414 - DNA, 569 bp, Cannabis sativa
gcaagaatacaaaaagaatgcattagatatcttggaccggtaagccaatattttgcccatatatattaacaacaacattgatattaacaaagtttataacttaaatagttgaggcggtgaggaaaatagatttttgtaatgagaacttatggaaatctttatgctggtgaggtatggttttaaataaaatattataatattgcttggttggtcttttcttttttctttttttatcattttgataagagttgtaatctctattctattttccaaaaaataaagggatcacttcatcattctaactttctgatcagaaagttattgtgcttttgttttggattatagttgaggagcgtctcccatcagataatgtgatagaagacttaattcgcaaaattataattaggacaagaattaaaaggacgagaatattagtacaaatttgagactttagtattttactatgatatattattgggatttttacactaggtaccaaatttaattacttttttacatttttaatgcttatcaatttattaaacatttttacaaaactacttttactt

SEQ ID NO: 168415 - DNA, 913 bp, Cannabis sativa
  modified_base (848)..(870): a, c, t, g, unknown or other
gactattgtagttgttgtgcgataattatgtgacatttgtgcgatattttttttatgtctatgcaatatatgcttaagtttttgcaaatattttctttctttttttttcgcgatttacatattattttgagcgacatttgtgtgatatgtgtgcaatttacaacataatttttgtgtgtgtattttagcgatttacattatattttgagcaacattgtgcgatatatgtgcgatttaacctaacattgtacatgagttttttttttttttgcgatttatgttatattttgtgtgaaaatatgcgacattgtgcgatttacaacataacatttgcatgcatatttttagcaatttacattatattttgtgggacattgtacgatatatttacattttaatctaacattgtgcatgagttatttttatgatttattttatattttgtgtgacatgtgtgcgatttatcctaacatttgtatgcaatttttgtgcaatattgggcgacattaattcaatttatattttcttgctgatggttattcttcaaattttgtaccctcaaaatcgggaggtcgaatattggaagtccaattatgagggtgatgtccccacgatagatatgggcttgaatgaggtagaaaaaacacaagttggtacacaagattccactgtatttcaaacccaagcaaaacgggtagccgaatatgttcaaagtgccaaaatcattccaccatcaccaccaaaagaagcaacatagccctccacatctgacactgtgcccccaacctcaactcctgtagccaatgacacccactacctattggaatttattttaccaggaacttagnnnnnnnnnnnnnnnnnnnnnnnaacatcctaaatatgaactttttaaaacgataataaacacata

SEQ ID NO: 168416 - DNA, 1496 bp, Cannabis sativa
tttaaataaaataactaacttttacaaagttgataaatatctggttagtttttcaaaaaaaatatctagattattctttttaaattatatcatattttaattttaaataagatcattttataaaattatttaataaatgaaatagaaaatatatgaccttataattaaaataaaataattgataatacattttttttgaaaaaaatccaaccaataaaacaaatttttagaatatgtcctttttaatgtttaaaatctactcatacttaaaattaattaaaataaataataattaattttttagttttaaaattttgaaataaaattctacacaaaaaatgtaccgaaaaatcaaaattaaaatccatgaaaaagatgaaaaattagaaaaaaaatgaaaaattttgcatgtggcacagaccatatgcattgcatactgtctgcgcgcgaatggggcctactagaccgagggagaaggctacatgtagcatgttacaggcacatatggggattcaaacaaggacctatctgagaaacattggacacactttttttgaaagtgtgtccagaccaaggttgatcccatagtcgacgcatacaggttaggtagccctaatcctgatattatttttcataaaacattttgtaattctcaatcaaacatcaattaaacacataaaccaacatgaacacatccaaatcatacaactatcgttgtaatccatatttcataaaataaatcattaccaaggctatgaggctagtaattggaacttattttaccaggatctagatttactaatatgcatgttgattatatgactataatctaacatcctaaatatgaatttcctaaaataaaaaaataaacacatataaggttgtagaaaattttacattggttgcagctgaatataatggctctttccattcagatctctaactctcgttcctttctattgcacagtattgctaagatctaaacctcaatctccattaggtgatgggattcttcacaatctttgacttgatatgtgtggacatgtactatcttcactatagggttttgaattaaagatgaaagaagagaagagaattcaaaaattataggagcctctcttatttatctgacaaagtgatattaggttatcagcctctcacaattaatagcctataattatctatttacactataccaattagggttaggttaaaatttaaatatgtattaaaaaaagatgaaatagctttaaattaaacccttgctgaaccctctagtaggccctactggtttcaatttcgccactttattaaataacatatctttctttcactaatacaatattttaactataactttataaatgctaattttatctatttaagaattataattaattattaaataaatttaccaattaatttatttattaattagacatgtcaaagtctcttaattaataaacaaacaaaaaaatctcttttcttctcaatta

SEQ ID NO: 168417 - DNA, 1176 bp, Cannabis sativa
atatatacacatacaaatacctatataataataataacttaactattgaacattaagtactaaaaattatcacgttcttgattcccaaaagtcaaaatccaaattctctttttatgacatttttataataaattcaaatcctacacatactaattaattgggtttgaccaaaattttagtagatgtagttccaaatggtgattcaattgccatcaaagcaaacctaaccttgtattaaaatagatctaaagccgcctctaagaatcaataatttacaatcacaattaaacaaacacaaaatactattagttaaccaaaaaaaaactcaaaacacttgcattgttcctaaaaaccttacttgattaaaaacctctgaaatgcagaacctgttataggctccgattcgatggagttcccgggtaaaacaaattaccatgatttatgtggatttgtagagggagacgccattgcaatcaaaagctctcttttgtttttgttttttttcttttttcagtttctgtgttttactcgaaacagttttgaaatattattatgtaaacgacagagagaataatgtaaaacgacaatgttatttgtgaacgacataaaaacataaaggaagagatattgtaggaaggaccctctaattttcagtttttgataatatagtactccgaacttagttggcgtttggttggaggtaatgaaataagatggaatggaaagaaaataattttcatttcattcttttgtttggtttcattttaaagtattggaatgacattccaataaaatactctttctactattttaatggaatgactattcattttcaaaaagaaaggaaagaccattctaatgtagcaagagaaaaaatttaagtggcgtttggttggaaggaatgaaaacatagggttgagaataagaataaaataaaatttaaaatgcataaaaaaattattgatttttttctcatcatgcattggaatggtctttcctttcatttcaaaatagaattgtcattccaccaaaatgggagaaagaccattccattggaatggcattccaacactttaatatgcaacaagacaaatgaataaaatagagattgtttccttttctttccattccatttcaaaatggaatagtcattctaatggcctaagttacatagtg

SEQ ID NO: 168418 - DNA, 1579 bp, Cannabis sativa
actttttgtgagaaggtttgtgataattctcaaaggattttatgctggaaatgtacatgcaaactgagttattccacattaaataagaaaatttttaccagaagaaaggtaaatttcttaatttatttattgtatatttaattgtggttattgaaatgtagattaacttttgttatagttagttttataaatctataatactcatgttaatgaatatatctggtttaaagtaaccagattacttattatttttttcaaaagtaatcagcttactttatcatttttgttaagtaaccaagttactttagaccatgctaatattgttattatttttttgtgtagctggaagttgttcaattgctgcctaaaaaatctgagaaggaaagttaaatattaaaggatttttcattccaacccaagtttatgtttagagaagccccacaaacagatgttcaaccattgacggagattccaatttaaaggcatagtacttcagtacctaaagcaaaacaaaaatcacctgtaagtatttattttttttttctttttcttatgttttattttcacttcattttgttttattaacatgtctcactttgttttaggttttggaaaccaaaaattacaatgcaaagttcaaaacacttgataaacagatgaaatatatcttttcaaatcaaaaaaatattcatggtgaacttgtgatattcaacaaaaattttaaagattttttttagatactaagtgaatacacaaggagtactccatcctaaagatcttatgttgatatgtctgctcttgaaaatgatgttcctcttactaagttaacctatttctttaaattctacattccataatgctcatagggatattgaatttaaattgctaacttgtttctttattttaatttgaaaaggacaaaactgaacattctttatcaagccatggagttgtacctcgtaatgttcatggggatgatggatatgcttaccctcaaaatgagatacaagaataaatatttatcctatttattttgaagtatcaggttactttttgtagatacttattatcatattttctttattattcttggcaggaacttgaaggtaaaaaattgaagggtgctttaattagagacgatcatgattgtactgatgaggttgttgatgccgcttattctggttttattgcagcaatgaaatttattcaaaaatccaaaagagaaggaactcaagtatgttttaataatttataattttttcatactcttttatttgaagtttttgttgtcttatgttttcatgttattttccagattactaaaaatgaagaaccacatacaccttttgttgttgtttcccatgatttgaagagcacaactgaaaaggccaaaatgtctactaagaatatggctgatttagagaaaagggagcccaaaccttgtaacgtccccacttcaagcgtcaattgggcccttacacccacagaatgatggctcttatacacgagtatgtcactcttgttgcttcatggattgacgactggccctacaaagcaacacgagtgtttccagcgttct

SEQ ID NO: 168419 - DNA, 1296 bp, Cannabis sativa
aaatatcgtctgaaggtgaaccttttacatggattaaaaatagaataggtgtacaaacggtcaaggaaaggttagattggtgttttgtcaatcaccattgacataacacttttaacacccgacaaatgcaccatttggattatcatcactcatatcatcgtgctttatcagctagttttacaccagtacaagttcctacccaacatgacagatgttgaactcagtttttctttgaaaagctttggctttctgaccccgagagcaaggacattatttcacaaagttgggcttatttttcttttgatgatcaaatttctgctatcgttaataacttggacacttgtgcaaagaatttataaaaatggcatatagggaaatatggaaacatgaagaaagttatttctgaggcacaatcaagagtagcagaccttaataatacagttcagcgtacttgtgaccatgttgctacaataaaacactctgaagcaatattgggtgatcttttagagcaagaagaaatctaatggcagcagagatctagagtggattggctccaatcgggtgatcgtaacacaaagaattttcatgccaaagcaacagcaaggcggtcaaacaacaaaattaaatttctatgtgctgaaacaggggacaaaatgacatctaaagctgatatggctgcaattattcaagattatttttctataatcttcaaagcatccaccattgatgaagcaactcttaattacgcaatcaatgccaatctaacaacgattaccttagatatgaatgagatgcttatgttgccttttacactagtagaggtgggacaagccttacactctatgggacccgataaaagccctcgaatagatgggatgtctgtcacaccctaactattttaggcatgttaacgtgatttttaacttaactgtgcagctcattgctaatcaacgagattattgaaaatcgtaattaattaaaattatacttaattaacaatagacattaaaatattatacttatagtaaatcgggatcccgttttacaaaatatttacaaaaagtttcactgtgcatacataaaagtttgttgcctagcgactatacaaagtaagccctgatgtcccaaagaccgtatgctctaggcctaactgccctaacatgtacaatctccatctgctcgctctgacgactgctcagccttggccttgcccttacctacacatggaaatagcaactgtgagtcaaaagactcagtaagaaaagcatacataataacatagcaataacctgaatt

SEQ ID NO: 168420 - DNA, 831 bp, Cannabis sativa
gagattttgatccaactaacatacgtggttgagggttggttatagttcttaggcgaggaatggttggggtaagagtggtataggcaagacgagttaataatggccagacatttctatatttgtcatagcccgtagaaggaagcttggcacctttcatccaaggttcgtacaggagatcatcaacattaccattatccattcgctccataaacttgatacatttctcaaaggggttttcgagtaaaccacactcaaaacaaaactccggaagacgctcatatctaaaatcgatccaaaacttgtctctaacttttggaaggctaatcattggggcatgaggaaggggtttgttgatcgataatttgacatgaatccgaagaaaaggaccccatccttcatcaagtgaatcctcataaacatccaaaaactcaccaataaggttacccaatgctcttgcgagagcctttgatttgcttacaaaaggcaatcgataaatttgaacccagaatggtgtggataacaaatcgttcgttgagacattttgcaaagcacttggagtgtacatcacaataagatgattttgaaagtatcaggattctttgttcatcactctaaacttatcagcagcacaaccaaatgagactttgaataagtcttccccatatgcaaaaatcacaacaggaaaatgacccttccaatgtcctgacatttggtcgatgaaaatcagcttatggacataattttcagtgaggacacaggctataaacacatggttggaatgtggacataattttcaaatatcaagtttattcaaaatttaaatttatttaa

SEQ ID NO: 168421 - DNA, 594 bp, Cannabis sativa
aataagccctaatttctactaagatgcacaaaatcacataataattaaacatcttaattatctgctaattcccatgatttaattatgtggtcattacaattattcccccattaaaaggatttcgtcctcaaaatctaattcgaataacttcagacaacaagatctcaagttagattctaattctaggtggttccttccaccttaatgtttcttcaagtatcttgactaatactatcgttctacttcaaacaactttacatttcttatctgagatttcaacatattttctctcatatgataggtttgactgcagttctagggtttcataactttagaatatgagtcgaatttctcaacatacaacatggaagtagacggggtggaagttgatcgagtttagtggttccgtcggggtgggtttagagagagagatagagagagagagagcgagagagaggaggttagaagagagagagagttagaggaagagtatgattcaaatgggcaaggtattttgggtttttaagtttttgagtattaaaactaagggtgtacatcggtcggtttggtcgagttatagtgtatttttaccaa

SEQ ID NO: 168422 - DNA, 1813 bp, Cannabis sativa
gggggaaataaataaatactttacggctgccacacgcagaaacttacaatttatatgattggacccaacaacacgactcataaaaataaaaatattgactttggaatggacataataataatagtcaattaattaattggtccaacaataatagtaggcgcaagtgggttagagtgaagattacaatacaagatgaagataatgcaaagagctaattactaattagtagtgtggagctctatcattagatgttatattacgattttttttaaaagataaaatggaatttctattattaatgagtaaactgaacatagcacattacatatagatattgttcattgagtaaaatcagctaaagtaaacaaaccaaactatttacaaggacaaaaattcttacagcatctttaactaaatgacttataagtggtcaagtgagaactgagaagcatcaaacaatataaagaataccagattttcatcttaaataaatatgtaacaaattacacctattaataataatcatttaaggatcttccaataaaaattagtagaaatacccctatttattaaaattatataagagaaaaatatgacaaactatactccaaattcctatattgaatatatcgtcaaattataaaatatagtgttagaaagctacaagaccaatcccgaatccacctgtgcatatccaaagccaaagcaattggagattaaacagggccagactatatattgttaaaacaaaaaaccagcccaaaattatttaactgcatgtaaatctgtaaacctgcatgtacaccctatgatcacggtgtaaatttatttaagaacactagtgacgatacaaaataatccaaatatgcaagcattattagcaatctccgatatgctactgattgtactagactcgaaattgcctatgtcgtggaattattatgtaggtttaccagtagacctagtgtaacattgacatgctatttagagggtcatgagataacttaaaagaaccatgaaccttgaattatattatcagaagtttctatctgtccttgaagggtacaatatgatgctggaatactttatcaaatgactctaaggcaaccggtggctataactttaacatagttggtggagttatttcatgaaagtctaagaaacagactattttagctaaaccaacaatgcagtctgaaatgattggactagctactgctagtgaagaagcaagttggttgagaagcctgctaattgatattcttttatgggtaagacctatatcagctgtgttggtccatcgcaatagtactgtgactattgcaaaagtttaaaatcgtaattacaatggtaagagagataaatacgtcgtaagcacaacattgtttaagagtttttctcaacaggaactgttagaatgaatcatgtacgtacgcactgatgataacttagttgatcctttgaagaaaggtttagctaaagagaaaggccttaaactatcgaaaggaataggactattgtctttagattgatgaatcactcataatggtaacccaatctatagactagagattctaaaaataggtttaatgaataataacaagttatgaagtgatcaaaatgagaccatgctataattatatcaaaattgaagcataaattcctgaagcgaaataaggccgagttaatagatgttcttaatgagttctttagtccaagttgagtggactaccaagctacctatgtaggtatgggactacacagttgaagaaggcttaaatggattgattggtactacctatatcaacaaggt

SEQ ID NO: 168423 - DNA, 965 bp, Cannabis sativa
tctaaatacttttcgacaagggggaaaatattgaattgaatacctagggatagtgaagtaccattctaaggattggccttggtcgcatggaactcctcttaaagtgtaaggcctttgactctataaagagtcatggtcgcatgccatctacaatttacacaaattatgcgaccagttccgctaggaagattcatggttgcatgtgagctttgatttctctttaatatgcgaccactgaccacatgttggttcttggtggcttatttgacttatttctcttcaattgctacacaagaattggccaaacatattgccctatttgcacaacaattcattttcctatggctttgcgaccactgacacttgggagtgtcttggttgcatatcacatttctcttctagccttgatgatgccattcgtcctcgagctagggtttttgaagtgaattgtcccttcaaaagagttgaatgagaaaatcaagagtagaactgtagaagtatgcgaccactgacactttctcatggtagtggtcacatttgattttgtgctatttggtactccagttgagtttagtgttcattttgtcattcgctttttgatccaaatcttaaagttgattttttttttctttcaaaaatcgagtataacataacttaaattctataatgtttaacttcaatatcgagatataaataaaatcaataactataaaaattaaatttcaaattaaacactataaattctaaattttaaataaaataaattacttaagaaacataatttaagtactatattatctatttcaaaaaattataaatcaatttatccatagtatacaatggagattagaataattggttacaatagagtatggaaatgatttaccaaattatatttttttttgacgtggtgaacagagtcacacatgattaacaaagcagcaaaccacaatcggcctcctcga

SEQ ID NO: 168424 - DNA, 982 bp, Cannabis sativa
ataaaataatatttaaattttattattacttgttctcactactaaaaaaacttcttttaagtccatcaaaattagactagataaaaatttttagtctattttttgttggacataatagcctgggacataaaaagggtatttttctagtccaacatcgttggactagaagaatatttctagtccaacattaatggacacaatatatattattttaaattttaaataatcaataaatataaatttctaaaaattcaaaatttacatatatatataatattaattaaatttagtaataatttaattattaaattaataaattaataaataatttaatttaagttttaaatttattaattagtaattcaaattaaactcaagtccatttatgctagactagaaaactcccaagaatattttctagtccaatagaattggacatgaaaataaatccaattttagaaaaataaaaaatatatatcatgtccattactagttttctagtccgatattgttggacatgataaaaaaaatttctagtccaacaatgttagactagaaaactccctaaaactttttcatgtccaacaataattttgttggacatgaaaaaaggacattaaaagagttttttgtagttgtgtctttattatccaattgatcctgttacaccttattaattaaagaaatttttaaaagatctctaagatgtaatgtatggtttagtttttatatgtttttttttaataatttttagttacaattagtaattagattgtgaaggtatatgattttgatttttgaagtctagttagattggatcgaatgataattttttaaatccgactactaattaaattggatcgggttaggaaaaaaaattgtattgaataaatacctactcctagcaatcaagacatgtaccaaatcatgcccccagaacttttatggccgttaaaaattccccctgaactattgagattgt

SEQ ID NO: 168425 - DNA, 602 bp, Cannabis sativa
acatgtatattagtatttccttttagctaacaacacaactcacttaatcaataataatacaatcaatattattgtgacatttatgacttgattgtattgggtgcatttaaagatgtagggttatgatatttgtttgggtaaaatctatatctgcattgcctttgagtgtttttgcctcattttacttaaagtttttcagtcttttcccaaggagtttagataatatgcttgagcttaattaggagtaagtttgcaattaaatagttggtagacattttaatataactcgagaattcttgctcttatcttaaaggtatcacttctttttcctacttaaatttgattcttatatgtgatgttgtggtgttaattgtaagtatatatgtacgacttgggtgggatgtgatatgatgaggtttcttgtacatgcatatgaaatactatttttattgagatttttccacctgatgccacttttcaacattttttacttttttggcattacacggttttttaaacttttttaccttttaaatttttcaattttagttttcaaaaagtttcataattacaatatgacctttagcatgcatatgtcacct

SEQ ID NO: 168426 - DNA, 548 bp, Cannabis sativa
tttttttttacttcggtagaggcaacaatataatgcttgtatttttcagttttcattctatttgggttcgtatataattggattatttattttttttgtagataatttgtatatggtagttttgaggaaattgcggtatttctgtgtaaatttattgttttttatttaaaataataatttgtagtgtaaataattaatttaataaagaaaagtcaacctatgatgggtaaatacttttaatttagaagtatgaattgtacttggtacttgaattattttgctctcagaaattctatacatattagtcgtgaccataaattatctcaagcttccatcacaagacgacaaacatgcatgtaataaggctccaaaaatctaacaaaacttataaccagaaaataataatatatttagtttcatacataaaaaaatatagtaaggtgctgtttggtaaaacttttattttttaattttttaatcacaaaatgaaaataaaatttttgtttttaaaaattttgcttttgaaaaataaaaatgcactctgtaac

SEQ ID NO: 168427 - DNA, 1136 bp, Cannabis sativa
ctctctctctctctctctaattgtttcacacgcatacaccattacaggtgtgtgtgagattaaaaaattctaactcaattacagtgtctcatgagttgagtacacactataatgcataaattaattcatccaaataagatcaaatagctcactctattcttgagtgttgaggttggcttagaagatcaaggtgtgaattcttcaacaaatgttcttggattggatgatcgtgaatgatactaaaagatagcaatgataccctgataggcttcaagaggtattgtgtttctttcattagtctagatttaatgtatatacattatgttgagatccttaggcttatggtttatattagataaaaactacttttatcaaatccgtttccacttttataactctgatatggaccataaaaaccaacaggacaaagagggtagtttccttatggtggtgcacgcactcttatagtctgacataggggacaagcccctgatactatgggatcaggtgtccgaaggcaaccacatcatcctatactaggtttttgaggtacctcttggagtactctttctagacgcgtcccatcgttcattcggaaggcttcgactgttccatactaggaaggcaataggccttcttggacctttataaacctcatcttgaaggcgagtcttctgggcttcagatgggcttgggcccatcctaccatctgggtcgtacctatcctcacggagaggctattagttagaccatactgggctaatttgtaaagtcgggaacctcacgtgtcacccttctcgaaacacgaataacaataatttaataaaataatataataataaagaatatgatttagtatcataattttattatttttgtgttgatttaacactaagtttaatatttaattacagttgctcttagttaatgtttattccattcccacatggatttatttattttttaagaaaaaaatggtgtatttgtcctacattctttatgtgtaagtagtttttatttttattagtcttttttagaaaaaaaaaaatgtcaataaaggacctaatttagtagaaaaagagtaatgtgtagcataaatacttaagtttaattcatgtgttatttttttattggta

SEQ ID NO: 168428 - DNA, 662 bp, Cannabis sativa
ttgcccgccgcaaatactattagcggcagaatagtctgctgctaataagtgggcagaaaaatttccgcactttcagttcgaatattattagtggcggaacccgctgctaataataataaataataaaaaaataaaaatattaaatgactattagcgacgggacattggcggtgaatcctaccactaatagttctataaatacccccgaccctcttcccctatttttcccatttttggttctctcatcagttctcttccccattttcccccgaccctctcagccatttttcccccttttcccccacccaccaccaccacgcaccaccgaagtaccaccacacaccaccgaatatcaaccaccaaaacccatttcatgtaaatatttttttttatattttatatctctatagtttatgttattttttttaaaaaaaaaattgggatgtatatatattgtttttaaattttaaatctatgtatataatgtgtattgatatatagatatataccttatttttatgtatatatattttttgtgtatatatatattttatttttctttttattttaatttcacatcgtttgttagagttattaaaattttagagatatatatattacttttaggatttacagatttatattttatatataatatatat

SEQ ID NO: 168429 - DNA, 2082 bp, Cannabis sativa
  modified_base (1919)..(1923): a, c, t, g, unknown or other
  modified_base (2018)..(2039): a, c, t, g, unknown or other
ctttatttaaaggtagtgagtatttaaatgtgatccatgggaatttaagactcaaagtaacattactttaaaagtagagagtatttagagtggtttaatcaaaataagacttccaaaaggtccttcttgatgccaattcacaaatgcaactaccaaagaatatatatcatacattatggaaacttagaacaaaggtgaatgattgagttaatttcaatcctcggttcatatcaaattatgcagataatgaatacatgaaaactatgagattatttgactgtgttttcagtttcagtttttcaatcctcggttcaaatcaaaacactttaccaagctatagcaaattatgtatataatgaatacatgaaaactaagagattgtttgactgtgttttcagtttttagaattatgtttacaaaagtgaaaacaaaaaatatttttttgtcattttaaaaatttaatagtgtttggcacaaattttttaaaactatttttagattttttcttactaaaaaaaaaaacttaatattctacaccattccatgacatgaacccatcctaccccggactcgactcgaactgaacttagaccccagcctgaacccagacccggccccagacttggaccccgaccccagacccggactcagacaccaaacttggacaccgaccccaaacccaaactcagacccggaccctaaccttggacccggaccccaaccttggacccggaccccgaaccctaacctcggacccaaacctggacctgaacctaaacgtggatccaaaacccgaggctaggtccaaggtccttggccgagtctgggtccgggatccaagtatgggtttaggtccgggtctagggtctgagatctaggtcccgatctaggtcagggtctaggatctaggtcccggtttgggttcgggtccgaggttcgagtttgggtcgtggtctgggatcttgggtctaggtccaggtccgggtccgggtattgggttcgagtctggggtttgaggttcagggttcggggtatgggtctgggttcgttgtctgagtgtaggttcgagttcgggtcttgtttcaggatccaattcgaggtctggggtctaggtccaagttaggggtttgggtccaagtcaggggtcttgggtccgggtcaaggtctggatccgggtccgagtcgggggtcttgggtccgagtctgggtgagatccaattcggggttcgaggtctggggtccaatttcggatcagggttcgggtcgaggttcggtgtcctggtccgagttgggatctgggagccgggttggggttcgagtacaggtcggggtccggttacaggccggggtctggggcctggggtccgagttagggtttggggttcggggtccaagtcgaagtctgaatctggtttcggtactagggtccgtgtttgtgagtcaaaatataaaatataatatgtcagacaaaaaaaaaattatttttgaaaataaaaaataacattttaattctttttattttctagttttttaaaactcactttttaaaaaatttgaccaagcaacgcttattaatttttaaaaaaattggccaaacaatctttattactttttaaaatttgttttctatttttaaaacttaaaatatttttttaagttacgaagccaacaatccctaaaattgtacgaattgtatgctggtttcatttcattattggtttgtttataagaatcaatgctttgcatatttattattaaaaaaaaaaaaactagtagcaactagtttactaactgattttatttctctgttgaaaaacaaattgttatttttcattgggaaatttgcggcaaaagtctctaaaaatgtcactttgatgcagattagtccacaaccttcaaaaatagcggcaatagtcctnnnnntcacactttttatttgtctgttagtcctaatttcaactgagtcgtttacttttttttaattgccacgtgtcaaaatattattggtccaaattatnnnnnnnnnnnnnnnnnnnnnnaataaataaataaattatttaaaaatgatttttttttcttttt

SEQ ID NO: 168430 - DNA, 650 bp, Cannabis sativa
aaacttgctttgattaaaggtaattatatgttaaggcgcttggcatattaattattatcatttctttctttttgagtgtttttttttcgaattttgaaagttttttgaagaaagtttttcataaaaagaataaaataaaatttaaattcagcttacttaagagaaaaaaatgaagtcccacaaggattttggaatacttttttcagtgtttatatttatttattaagtgggaagttatatgcattttaattgtttaagaaattaataatatttcaaggagactttgatttgcatcccataaaattataaagttgtggtatttataaagtggtggctaactttaactgcctaaatagttaatcacaaactaatgagaaaaaaaaaattgtattaaaaaatgtgatagataattaagaagtattttgtctcttaaactaattatttgttacagcattttcaagctaaaaaaaagatagtatattgttacattttagcacttgtgagaaaaaattacatgtgccagcataaggtataatatcgtattaaatttaactcacaataaattttatatttttatttactgtatagtgccactaattattatagtttattgacttttacataactttaagggcattttacataaatgt

SEQ ID NO: 168431 - DNA, 1259 bp, Cannabis sativa
tagcatcaatttagaacgttgactgacataaaaagacaattttacattagtaattttaccataaaatataacaagtacaagcactttggtaaacccttctatacattcttacaatatagatggttttaaccccattaaagtacaatattatttttcaagtataattatataattttactaaagtattctagaaatgtctattggaaattgtacattaaagaataataatataattcatatatattaaattatataataatataattccatattaatacacacttaactagttaggttttggtaatccgactccttaatcttagagtattacaacagcagagttacttcctccgtcacgaccaaaggtaaaggtgtgatatgaagaaaggagatcccgtcgtcacctaggcacccaccaccaccaacaccacgagatcccagtacctcgcaatattgccctagaaatgagaagcgagctaactttatgggcccaaaatcccaaactcgccactatgaagacgaaataaaaggtctctgctagaacaaatggaggttagaaacaacgatggctggcatgcaaaaagtactgagaaccattctcaaaagcagaactcaaactctgccctttctgtacaaagtccatcgacaaaagtgcgggatctcaactgtacacgaagacgggaaaagctccttgtcgccaatggatgacaccctaaaaggtcaaagtagaaatggcctgtcgtgaaataagaacccaagaggttacttagagcaacatgaatctatctgcttgggtaagactgcaataggggaacatcatgtagtcttatgaagagacttcagccaaaaaatcttgtgcaagggaacaccgcacttgcacctccctcttaagagcaatgaaagcgtaaggtgtctcccctcagccatgatggagaaccgcaaaatgatggagaggagtactactcacaagctttatacaaactgctgggaagatctaagtcccgttcaccaactctcaagaaatgatgaactaaagaatgaaagagctagaagtagagatgtaggatctacgtcgaaggatggctacaacaccaaaggaagatttcgaggatgatgaattcgacacggaattctttttctcaagggaaattaaaatggaaccacttccacccagttttgaaggagccctacatgatgccattgtaggtattatatttatccaggatcttagatctatttgcaagtatgttgatttaaca

SEQ ID NO: 168432 - DNA, 1693 bp, Cannabis sativa
ctacttgcattccaagaatctcttgtaatctaacacgtattgtctccaaagtattagtgctaaaaaagatggaagatttagcaacattcacctgttgaccagaagcttgttcaaatgctgcaaaaagctccataatcttgactgtctctccttcattcgcatggcaatacagaacactgtcatcagcgaacaacatgtgggataccactggggccctcctggccaccttacacccatgaaatcacttattcatttcgtatttcttaattaagccagagaacccttcagtacacaaaatataaataaggtgagatgatcaccttgtctaatgccccgagtaggagtaatcggccttagcctttgtccttcatggacaatccaatatctgatagacgtggcactccccataatcaacttcaccaaatacggatggaaatccatttgaaagaatatcttaaaataactctcattcaatacgattatatgctctactcatttcaagcttcaaatccatataatcgtcatgcccttgcttcttcctttttaaatattagagaacctcaaaagagatcaaaatattatctaaaatcagtcaaccaggaataaaagcactatgaggatttgaaatgacctctgaaagaaaaccctttagccgattagccaacactttagtaatgactttacacagaacattacataaggctattggccgaaggtcgcccatgtcagtaggatttttattcttcaaaataagaaccaaattagtatcatttaacccaataggaaaaataaaagaggcagaaaaaatcctaaactaatgaaatcacatcactcccaacatttgaccagaaccgttggtaaaatatcagagtcataccatcaggcccaggaaatttatcaggatgcatttagaacaaaacatctttaacttcttcacctaaaataggcatcaatatagctaaattatgagcaacagtaatcgtcatgagaatacaatcaataacctcttgtcaatgaaccaaagaagctgaaaaaatatagaaaaataatccacgatcacctccactaaaccatgctcccaatccacccaattaccactagaatcctttagctgatgaatggtgttgttcttccacctagtcgtagctctataatggaagaattttgtgtttttgtacccatccttgagccataattgtttcgatctctagtgccaaaaagtttctcatttattgagaatgaaaaataactttctcttggcatctttaaacaactgacatgaaaccccatcacaacgatcttcgagcttcttgatgacagttcgagttgaagcgattctagccttaagatttccagttttactaccacctcatggtaagagcctctggtcacaagtcgaaaccttcacatgaattggatgtccccataaattgttccacgtatcctgaacaatttttccacactcttcctctttaagccaagaattttcaaatctaaatgacttattgcgtctgacactagcaagaatcacgagatcaagaaaaataggacagtggttagaagtcccaaaatctagattaaataacttggtcgaatgaaatctagacaaccaagaggaatcaacaaaggatcgatccagacaaacctccacccatcagctcgttcctctacccctttcccaagtgaatggata

SEQ ID NO: 168433 - DNA, 689 bp, Cannabis sativa
gcttattgtgatgttgatgatggttgtgatcccacagaccaaaaatttgtcactggtttttatattttcttttggaatactctctcatttcttgaaagagcaagaaccagtctactgtttctcaatcttcgatgaaaattgagtactatgctatgtcatctgctactgaaaagattgtttggctgagattacttgtagatatggatgtcattcactcttgccccactcctatgtattatgacaatcaaagtgccatttagattgctcatactcagtttattataaacgcaccaagcatattcaaattgattataattttactcatcaccatctgaagttgggcattattactttttgttctttctgtgttgcagcttcttgactttattactacatcacatattatttctagttttagtttttttgtaggcaaactctcaatggttcttgactttattactacatcacatattatttctagttttagtttttttgtaggcaaactctcaatggttcttgttgaatcatcatgagtttatggaaggatgctaactaattataagatttttttaatctgttcctatttattttagtattttatgttaatttcttgtaggtttttctattaggagaaatttcaaaatattctttgtatatatatatatatatatattttatttacaatttta

SEQ ID NO: 168434 - DNA, 685 bp, Cannabis sativa
tagatatattattgcaaatagggtaaactatgattgcatcattttattgaaaagtgaaattaactcgatggatgcaatgaagcggggggctgttatatatacagaagaagatagaaaggaaaaactatgacctaacccgagtcaagtcctaaccaataactatgagtaaaacagaaaaaaaaaaaaaaatatacaatgtacaagtgaattgaaacatataaatgggtaatattcctaatactcctcaagtggactgtatatatcatgaataatctgtttgacttaatattatatgaaaataaaatgtatatgaactatatgtaaagtggaataactataaacatattaaaattatataggcgataaaagtactgaaatacttcccgccattgatgtttgagcttcaattctagtgatagctttgatatgggaaatcgtgctttctcgctctcttaactctgtttagatggaatttttttttctcacagaatgagtgaagagctcagggaccgagaccctatatctgtaggtgagatactccatcatggtatctgtgtcacattaattgtcaaaatatttcaacaattaattcaaaaaatcaaattgagtaatgaatatttgaatctgaccatatataggatacactactacaaaacaagcatttagaggcgcttttttcagcata

SEQ ID NO: 168435 - DNA, 1117 bp, Cannabis sativa
acaattgccgtatatcacagaatatattccgtaaaaatacaaaatcgtgtccccacatatatatatacactcttattatatatcacctgctttgctttgaacatcaatttcgaggaaccccatatcatcatccaacggttcccattcattataatatataaatatattaatatatataaagatatattaaagtactgctagtctagtagtagtagtctacgtactactacaacatacatatataacacaagagaaatgctaaacattaaagattgtgtttagcatcctccaatgtgttagtatcgctattggtctaattaaatattaggttttacataatttaacataataatttttaagaattatcgctagcaaatcgcaacatgacatatcgagaaagtaggaagcaccactaataattaatagcaatagcaatgctcataacacaactaacacaacacaagacaagacatttttatttattattatatcccacgggtaaaagtaaaccatccttcactactttacatctgcatgcacttttttttttttattttcaatttttttactattataaattaattaattcagtaaagttttttttattaaaaaaatatatattaattatgttaaagactgttttgagttttgacagtgcatgagatccttcctttcacgcaaaacgctgatgttataacagttctttttctttttcatcacttatattcctttctcgtgatcatgcatgttcatgattcttttcctaataatttagattaatttatggataaacttatcataattattatttatttccaattaattaacagttagttttttcttttacaaatacatatagtaatatcttcatttgagggagaaagtcatactagccccccacatccgttttttcttttttttctttcaaactaacaattctaaaaggaaaactattagaaaaaattattttaaagaaaaatgtattgtgcttagacttaattaatttattcactatgattattattgtaaatgtaaaatacactactaaaaaagttggattttaaaaacaggtaaattgcggcataaatatctgatgtttcagattttatacacttaa

SEQ ID NO: 168436 - DNA, 1107 bp, Cannabis sativa
atgaaagtcaaaaagtgaatatgacctctatgagagaaaagtcttgactgtaaactagaaccattgttaggtttcgtacttgtctgttatctccatagataacgacagtgacatgaataataggggaggtatttgggttgatccatatgggacaacccggaaaagtaatgactataaattggaatcgttgttaggttccctatttgccggttatctccatagaaagcggtgttatttgggttgatccacatgggataaccgggaaaagtcatgactctaaactgaaagcattgttgagtttcttacttgtcagtgatcctgattaggtagcggcaatgacatacatagatgccaggttaaagtaccaacttgccttattagataatgtgatatgtggatgctaggtagggcatcagacttgccttattaggcaatgggatacatgaaggctagggaatgatattcaggttgtttgatttgacaacgacagtaacatttgaatatcaatttttgattatcagggttgttttattaaacaaagacaaagacattagtatgacaggtaggggtgttcatcaaaccgtctacacagcacaaactgcctgtaccgcacatgccgcataaaaaatttggtttgaaatcctttgcagtgcaattatggtttgtatttttgtcaaactgcacggtgcgacgcgggttgtggttttaaatttaataattacggtttaaaccgcaccacactaaatattataaagttaccaatttgtacaatacgatttttattttattttttcatatgatggcaaatatatgtgtacattacattattattttaaaaacaatttaatataataacttaatgattagtatatatgttatgatattaaaattttaataagattatttatatattgttaaaattttttattagattgattttaaaattttaattattatgtttgataataatgatagtgtaaatctctcaaaacgcactatatcacattgaattttcgtagtgtggtttttataaatttaagatctcgcactgcagttgcgatttgagaaattgcgaaaactgcatatgcaattttgtttgaaaaaaat

SEQ ID NO: 168437 - DNA, 729 bp, Cannabis sativa
tggaaggatggttatcacaggtacagttaggactaggagaggctgcttcattttgtttatttattactttgtctaaaatttacagaaaacactagctagtacactagtacaccagcacagctaactacttgacacttatcaaatagagaaatgctaaaagttactcctagattttttttatgggtcattattattattatcggtccaattaaataaaatctcatataattttatataatttaatgtaataaattttaaagaatatatatcactagctaatcacaaaactttgtttagaaatctaggtactactgtgctcaaatagtgagatgttagtattatcatctcatataatttaaaaaaaatgataaaaaaaaaacaaatagtgcctatcactctcatcactattgatgtgattaaatatatattaaataagatcccttatatataatttaatttattaacttttaaataatctcgctaactaatctcaatattccatagccctaataacaatgctcttttaacttaaggtaatagttattaaaaaatatcgaccgtcatagattacttttaggttaggttgtggtaccactatcaatgcttcgtaaattatatatacattgtaatatttagtagtctagtaatcatcatgacttaatatttttgtatttttggtgtttcattaattaaaaatttaacttgtatgtgcaaaaaaaaaaaaaaaaa

SEQ ID NO: 168438 - DNA, 524 bp, Cannabis sativa
gctaaccattcacaacacgtcacattattatagtgttgagcaccttaaaggacctacatcaataacatatttttatctcttaggcatctattttttttcaatatatagatttcaatcacacaaatattaaaattaaggtttggtagctataaatataatataaatcctacaaatcactcacaaaaataatgtgagacacaacacaaatgcttatttgttatgatttcattagctatataataattatttaattataccaaaactctattatataaatttaaggtatagttatattagagaaagaatataactaaatataattatttatctatacgatgagatgaatcaaaaccatacgtaaaagaaaaatacctaattaataaccaaatcatgtgggaattaataaagatcaccaacactaattaatttgtacgtaaactgtactgtaccaaactatacttaacaattaataatttgtggactacacgttgctagttcatggttattaaaaaaaaaaaaaaaaa

SEQ ID NO: 168439 - DNA, 540 bp, Cannabis sativa
tgcaagatcagtgtggcttcattctaggttttcttttgatttgcgatctgctactagtttgaaaccagaggaatgtttcacctctttcaagttcataccaaatctgagttggaaataattttttgcattatttagtttatttggtatgatcaaaacaatattcttcatggtaaatcacctcaaacattaattgaaatccattccaagggattagcttatcttcacaacttccaaaatgttgctgctaaaatcaactcggctgcaagttctcaaactgctgatgcaggtcatagtgctactagtgtatcatctctttctactgatgtagtagatatttctacttctgctggtgttgtagacatacaaattgctattggtgcacacctttcctctactagtgtgaaagtttctcattcggttggtgttgcaaccctaattaagtggcaacctcctcctgtgcattgcctcaaaatgaacattgatgtagcttttgattcttcccaaaaaagaattggtttaggcataattattcgagattct

SEQ ID NO: 168440 - DNA, 1362 bp, Cannabis sativa
  modified_base (1229)..(1232): a, c, t, g, unknown or other
  modified_base (1323)..(1326): a, c, t, g, unknown or other
agtgttaatgagttcctcttgcttcgtaaatatttacgtggacttggagaatctgttcaaaagtcctcccccagccgacaagagatccaagaagagggtagtccaagctgatgaggcctcggattccatcaaggaacccaaaaggaccaatgccaaggccaacaagagaaaatcctcgagccagcttactatcgaggctgctaagtgtcccgaggtagggaatgaggtctctactgcagggattgaggtctctgctgcagggattgaggtctccgctacagggaatgtcgagaaacaaaccactgggtcggtgcaccaagtgaagttctcagattctcgtccagaggtggttctcctcgagccttcttgccctctacccccggaagttggaattgaggggtcacaattgagctcacagcatactaacaacccttggcgcaacgtattgacgcttggatccagcgactaggatcttgctatttgaggcagtacggaagacttggccgaaagaagttgtgagcttctgcatcaggttaatcttctgacttcctcgtttctactcttccttattttgccctctttactaactttagtttgccctttcctcacatgcttcttttcttgtccacgccacacatcactggttgtctcagtgggtttaaaggctcgagactgagcttcgcaaagttagggaacataaggatgttgtggcgaagaagtggagcgattccgaagttgaggtctctcacacaaaagaagaagcaagaaagcaacatcaagccgaccaacaaaagatcaaggacctcgaggattctcttaagtctctccaagctgatctcattaaaaaacaagttgataacgaccaaaagctcacagagttggaggctgaaaccaaagagagggtcaacaatattggtaggaggactgtttatcaaatttggtcattcaaccccaagttggaattcggctttttgggtgacaagattgaggatatgcttgccttttgccagaagactgagaaggaagaatcgggcgaggaagaggaggttgaagtagagcaagaaggtccagccaagtcccctataataatgtagactcaatcttaagtgttatagtgagattttatcacctagaaactcgagactggactcctataaaaaagacacgtgtattcactctcctcgaggagagttgaggtgtcaatgagagacccctcgaatatgaacctnnnntgaaccagattcagcgagatgatgcgaccataaccgagtctagtcgcatttgtatggtaagtgtatctataaaaatatctatgttaatttnnnntttattaattatttaatttgtcatataagataattt

SEQ ID NO: 168441 - DNA, 1667 bp, Cannabis sativa
tggcctaaatagtaagatcggatatgtttgccacagatattttctcaaatgaattatccaagaaggaaaagcaaaaaatacgacgggaaacctgagaagagagcaccaccttctgtattgatggggatgatattttatctcaattggaccgaacaaatataatagaataaaactatgctcaaaaatttaatttcgtttgcctggaaaacacaaacagttcaggggtgtgaaacagaaacgttctgttgaagagctaaattggtaagaaaaaaaaaagtatattttttgagctaatgtactggaagaatttgtccttatgacataatctcgatgtaatgcacattgagaaaaatatgtgtgatagcttactaggtactcttctaagtatcgatgggaagtcaaatgataccgagaaggcgataatggatttgtaagacttctaaatcgacgtgagttgttgttgtatgaagaccaaaatgggaagtggaaaaagcattcagctagttacacacttaattttcaagaacgaattaaatttatgaattttataaagtctatacgatttctagacaattttgttgcaaacttacacaaaaatataaacttggataccggtaagattttcgggctcaaatctcatgattgtcatgtattgttacaatatttaatgccggcaggtatccgtaagtacttgaaaaaagaaatctgggacacaatccttgagttgtatgtgtaattcaaacaattatgttcaaaaatagttaatgtttttaatttagaaaatatgcaaataaatattctaactattttgtgcaagttaaaaactattttcccacgagctttctttgacataatggttcatgtagttatgcatctccctaaagaagtcatactaggtggaccagtgcagtacaggtggatgtatctcatcaagcggtcaatgtctgtgtacaagcaatatgtcaggaatcgttctcgtctggaaggctctattgctgaatcttttgtggttaatgaggcattaacgttttgttctatgtaattttaagaagtagagcctcaattcaaccgtcctgaacggaacaatgaaatcatcccaaacatgccaaatcgacaattttttgtattcaagcatgttggccgaccactgggtatgaggatagttgacacattaccatgataaactagcataaggtagagtggtacatattgaacaactgcacagatattgagtcatatatcaattagtaagtatgcattctattaaaagtcagtaataatatttgacttcacctcaaaaatccttaacttaccacgtgcgttatgatgtattgagcacacaaggagcttcttcaaacgaagggtgtaagtaatattgaaaatgtgcaagagaatgagtttcttggatggtttaaaactcaagtaaacattgttgcctctaaatattcatgatcttgttcaccttaactcttgaattttccttaatatctgttatcttttctgaattgtagattaataaaatacggttgaacaactatgttgtagtgtcagatgagttgtatactattgtgaacccagcaaatccaacaatttaattttattctgggtgcatagtgaacgatattaaatttttagttaaggacagggatgataaccgcaaaatacaa

SEQ ID NO: 168442 - DNA, 522 bp, Cannabis sativa
atatatatatattaggtaaatattatgtgcaaggcaccttttaagttattttgtaaatgatgtgttttgatttttaaaggttattagaatcaaaatattatatataatttaattaaataataacattattataataaaaaataattattttaaaactctataaaaggaaacataatagtatatttttggaaaaaaaatattaacatgcttacagcttttagaacaatttatctcccaaaagaaacttttagaataataaattgaattcaaaatgtattaaaaaatagtaataatattttagaaatttaaaggaaggaaatttgtagattttttgaaaattcaaagaaaacacacactacaaaaaaaatttactttttatgataactttttagtcacaaaataaattttttgtaattaaatggaatttttagtcacaacaaaaagttacttgtagctaaaagatagtatttagatacaagttgtcactaatttaatttaagttacaacaagtattgtgactaa

SEQ ID NO: 168443 - DNA, 1095 bp, Cannabis sativa
tcaatatataaattcggggattttcctcttaaatttttatacgtaataaattatgcctttgaatttttatgcgtcaaaaattttacttgaactattaagattactagatttaaagatttttgtctattttcattcaattttactaattcagtgattttccatgtactaaatcatgctccttagaccttaatatctaataaatcatgcctcttgaactttgacatatactaaatcacgtctcctgaattttcatctatataagactttccttactaaaattagaaaacagtctttaaattcaacaatctcaatagttcaaggaagatttttacagccttaaaagtttaggcgcatgataataactttggaaagaaatcctgcatcttgctaagagcatctctaatagtgcaccattttaccaaattggtgtggagtttacaccattttactctaataacacactaaattctacactattaatggttttggattttgaatctacaccaatttagtgtaaactttttttcttctattttaacacttattttattttaaaaaataatcttatatttgagtctttaaattataatttagcaaaaaaataataattgatttcaaacactagtacataattaaaaatacaaaataacaataatattaaataaaataaaaataacataatactaaattataaactaaaaagaacaacataacatattgtaatctttttagtgatatttctttcttatattgtcttaggactggtaatagcgtgactcacattttagttaagttagcactttctttgaatgatcattatgtttgtttggtgggaaaagtgggaaaaatatgagagaaaatgatgattatgaccacttttgcatgagtaagtgggggcgaattgtcccgtactgaagtggttgcgcaaatcaggtattgtggagagtaagaggaccgcgtggctcttttttgtgttggtggtctcggcgggtagagtaaataaagggaaacttacaaaaatactgaaatttagattaacttttataaaaatactgtcacatggaaatttttacaaaaatactgtatttttataaa

SEQ ID NO: 168444 - DNA, 985 bp, Cannabis sativa
aaaatatatgagagactctcttggataatatattcaagtcaataatgcattattaataatttaaataactgtctcgagcttctccgaagatgaatggaaaattgtggggaaattgtttcgtatttattgataaatgattgacttgggagttggaggggtcaggtgatggattatgaaatgtttaaaattaaaataagaataaatgggttgtaaatgtgtgggttgactagtaagactaagagtagagtagagtagtgtagagtaaggcagtggcttgtggcgcgcgcgcgcgccatgtttgtactttgtagatttgctcctaaacaattggagcctctaattttgggtaggtgcattgactaccacgtcaactctagtcttaggtctacggttaatttcttcctacaaaagctctaaaattttcatctaaatttaaaactattttaaatgtagctaaaataattaaaaaaattaaaataattaaaataatttttttttattttttttttattattgtagctctaattatattttttttattatagttcctctccaggatcgactctaaactataatgtgtcatgaaaaaaaaaaaaaattttgagcctttatttaaaaaaatacaatatatattattttaaaattagtaaaaaaatatatatatataaatttaaaagaaattttttttaggctcctaagctaggtgggtcataggctttaggggtgcacattaaacccaaaacacaaaacccacgaggcctaaaatgccaaaaatccaaaaaaattggattccaatattagtacaatggattcgggtgtaactcaattatgtactagaccaggttcggatttaatattttgaaaacacaaaacccgaaactcggttagtattttttttatatatatattatatctaaatatatgtttttttttttaattatgaatctgtgagtgtgtgtttaattgttaatgtgttaatttatgt

SEQ ID NO: 168445 - DNA, 1093 bp, Cannabis sativa
gtgcaaatatgcaaggcctctggctgttcctatggcaatatcacactacctcattttccaatccaaaacattcgaagccaagttttttaactaaggacccatgttccatgtactcatacacaagaagcctatgctttccctcggcgcaatatccccacatttctgtcaagttcatgtggtttaatgttcctatggtgcttacctctgcgtaaaattcgacttctccttggttggtatccgtgattttcttgacagcaggaccacgattatcggacaagatggccttgtacactattcctcccgcacctctaccaatctcaagattgaaaccatttgttccttttttaactctaagtaactgaattttttgaatccagttgcagcaagaagataaccagcctgaatttgaattttcatttttcccaatgacaaataaccaaacaattaagatgactatgatttcaactcctcttactccacaggaaaaccagagcacgaactcaactacaccactaacttgttttttaacatatcttctgtcccaatgttgagtcaaatttcctgaaaggtaacaataacgataatgacaaataagaaggcgttaggcactattggtaacttttaacatttctcatataatactagccttgcttacttggcccattttctgtatttaatataattttaaatcaagataaaaaataaaaaataagagaccatcgctgctgagcagagactctagtgctaatgtttttattgaatagtcaaatattttatgtggaaatatctacaataacaattgcattcgagatgccctaaagactagcaagacgtaaatcataatatattttttcagtcaagtttctcatatatacacatgtttacccaaattttaacgacgatgacgtgtcaagagtagcaacatgtggcacaaaaataccgagactaaattaatgaagaatatgtaaactcatgaccgttaatcatggagggtggtctgaccgttagaatgaaagtcagatggtcactcttacccctagcttgagtaaggtggacgtctccaagaaggaaaaacgacggactaacaccttcg

SEQ ID NO: 168446 - DNA, 1116 bp, Cannabis sativa
  modified_base (1081)..(1091): a, c, t, g, unknown or other
gtaaaataatttccaacattgctagacacataagtggaagtgggagacttattattattgtcatctgaagtacaagagttcattacatcagtattggattttgtggaattaaaaatagaaaaaagttcacatagtaaggccttttttggttttgaagaagattcatctccaagcatgtaaagtccatctctaaccttccctcgaagtagaacctggccagtatccatgtcctttacaaagcaccaatgtttgtgaaatacaagaaaaacattgttgtatgcagttagtttagagacactcacaagatttttagtaatagaggggacttgaatgacagattgtaaatgtaaggggcaattattagaggatggtaaagaagctgaaccaatatgagaaattaggagtttcttatcatcttcaatagctaaagtatcttggccagaataaggaattgcagaatccatgttgctgagagaagaagtgacatgatttgtagccctcgtattagcaaaccagatggaatcatctccaaaattaggcagtatagtggtggatgttggaagagagtctgattcaaattcatgttcagcaagaaaggcacgaggggcagatgctggaatcttgggagtgacccaattattatcaaatctgtaatggcacacaacttccgtatgcccagattttaagcaaacttgacaaatgaggcgagagggaggaaaagatttaccattgcctcggccttgagcacgattgtaagggtcagaactagaactacggcaagggggctgataagggcgtgaggaacctgatcttaagttgttgtatgcaagattggcttgcattttgagtgtgagatcagacatggaattgtgatgttcaagtttgctttcatgggccagaagcagagcttgaacttcctcaagacacagttggtcacttcttgaagtaatcctagagataaccgagtcataatcagggcccaggccattaaggagttgtaagatgatatcttgttcatcaatagatgaaccagcaactccaagtgaatcggttatggtctacactgttgggttttatgccnnnnnnnnnnntccatttcaatgtaatccattttat

SEQ ID NO: 168447 - DNA, 743 bp, Cannabis sativa
  modified_base (565)..(577): a, c, t, g, unknown or other
ttttttttttttttgtgtttaaatggttgctgtctggtttgtactggtttttctgcacttttttcgtgtagtccgatggggtctaataggggcccgatactagcccgatgtgattattagatgtaaggctggggatgatgacccgattaggctcgatgggcgcccgatggtagtccgatagttctctaacttctaagggctaagatcgaataggatggcccgattgggcccgataggggctcgatggtcaacttggacttaagggcacggccgattggcccgatgtaagcctaatttacacctgatgcttgtctgatgctaaatttgggcatcatgagtccgatagtgtagcgtccccgcttcaagcttccatgggcccttacacccacggaatgatgactcttatacacgagtacgtcactttggttgcttcatggaatgacgactgaccgtacaaaccaacacgagtgtttccagtgtgctttgtcctcattcgtacacttcctgggaaaacttcctatgagatcacccatcttgaaattaccccaggccaagcacgcttaannnnnnnnnnnnntcgtgatgggctaccgaaaaataagacgcaccttgttgatataggtagtaccaatcatgagtctgatagtgtaacgtccccgcttcaagcctcttgggcccttacacccacggaatgatggctcttatacacgagtacttctctttggttgcttcatggaatgacg

SEQ ID NO: 168448 - DNA, 1257 bp, Cannabis sativa
aagaagagctaggcgtgcacatagcaatcacagaacacgctgtgagtgctgccctcacaagagaagaagacgtgtatagcaccctgtatactacaccagcaagagactgatcaacgctaaaagtcagttcccattcatagagaagctacccacagcttgctcttggcttctagaaagctaaggccatactgctagatacaccctataaaggtgtacaccgatcaacatttacggtagcttttatagaaactttgagcatcaggccaacataatagcacctcaccactaagcatggccaccaaaggccaaactctcaccagcttcatggctaatcatagaagcatatctccccaaacctctcaaagtttgggagaatagaaggaggcagagaagaagcgagaataagaacccaagaagtgcattgaacacctgcttgatgcaggcatggcccctaaggcacttggggggcaatgaaagcacgaggtaacaaggtcagttttaaagcttctaataatgaggctgaacatgaagctccgaatgctggccacatgctaacacacaaagcacgggccataggcttgcacatgaagcacgggctaaccacctagacatgcaccacgactctcaaacagtcataggttatgtcctaggtgaatatacagctcaatacaaggagaggatggcctaccagacctgttaagacaactcaaaagctatacccaaaggcaagcccccaaagatagcacaacagctgatgcactcgctcaactaaccaattgtgtcttagcaaccaaagaaaacttggtacctggtcagttcttcaaagaactaagtccttttgttttaaaaggaacagatatgctagaaaaccaacttggatacacctacaacaccatacctctgaacaaagaccttgccagagagaagggactaggaggatgggtacaaggtgtcatatttggcacaacataacacacaaaggtggtatcccaacacgaccaaggagcattactaagaaagaagttgagcagctattgacaggagtgtaaaaaggctctacagtaattacgccgggggcaaagctaaccaagtgcagaagagatcaaacagtagcattgacctggccttaagaagactgcctaattatgactttaacaggcaagccaaccatagaatcactaatctggtcggccactacctccacaagttggccggccatagaatcaatgacttggccggccatagcctcctccaaat

SEQ ID NO: 168449 - DNA, 1773 bp, Cannabis sativa
tttttagttctacaaacccactcaatacactcactagctagtattttattaattattgtgcacttcttcgctaatcaaaatgtttactgaaaaacgttataaattaaaattttcttaaataaatttaaacttgatagatatatactaatacataattcgggataccattttaaaaattatataggtttacaaaaatacttgtactgcaaaagtcattgtctagcgactattaaaagtgagcctaaactgttctgaagacccgaacactccagactattctgatttagtttaactcttgatatgtacaatcttcatccaactctagactcattctgtttagtttcagttcctacctacacatgcaaataatatttgtgagtcgacagactcagtaagaaaaatataaacataacataacataaaaccagattgtaataaggtgcctatacacctaattacaatcatattctgaatctaacacgtactaagtctagaatattcatacgacaaagcctagcatatattagcatatatctgttgacatctcagtgtaactctatgtatacacttcactaatatcatgttatgctaatctaatgactactaatttttccaactagttaaagactgattcacctggaagcctccttgtctggctattattagcaatcagttggttcagtatatatgtctgaggacgaatgttataatgaccattccccctaaggtaatgggctggaaaagtttgctcgtctaccatgtggtccacagtttgactctgtgactttagattggatggctcatttccttgggtttgttgagtgtttccaaccaaacgttcttctggcccgtattgtggttcagtagggatatagacgtctatccttttgttccgatcccatataactagagtatccatcacttattgttgtccggttaattgaaggctcgcccaatcaacacagtaaaaattcactgaaaaatgatggaagtttgggaggaaattaaaaataaccctaactcaatccttgcaaaatcaaattctttctaagaacacaatcaaaaacatattaatacaagtgactcgtgaactcattaatattctaatcacataaaaaatcttcttctaaaattattcattagctgataactaattaaagttaagtcattttcaaaaatatcggtcaacaatatataatattatataaaaatataatatatatataatctaatatattataatacaatacgtaagcgtaccaaaagagttttaaaaggttttagtgaaggttactacattcattcacattagtaactcatagtgaatatagtcactaaaaatttagagagtctcttaaaatgaatcactaaagctatttttgtagtagtacttgcatctcattttaatgttgattgcagcttagtgaattggcttctcctattgctttaattgaaaaggatatatattcgttattaattgctattacttttaattattttaataaaaggagtcaaaatctaatactactcctcaatttattgtaaatttgtctcaattcatttaacttggaaaagtttgtagatattatattatatgggacacgattttgtcttgtgatatacttttacggaatgtattttgtggtacattagataagttccgggatatattaaatgagtgtcaaggtacgtttctactttttaaccctaattacccctagatcaatgtcagccgtcagatcaaataaatccctaattatttgacggcgtccg

SEQ ID NO: 168450 - DNA, 671 bp, Cannabis sativa
ttaatttatttgtcttctagtaacatgacacatcatctctactgtaatactaaaaaaatctcatagtaaaatccaaaaggaaacctgacatctcgctccatgaatgtggatcctttgaacagtatgtgaaacacaataccagaaacaaaacctttaaatttacttccctgcgagtatagaatatcaaaatcacaactaagaatcattctaaaaaaaaactctattaatgaacaaaaaagcttcgttcacaaacaacacaacatcaatcaatcattcataagtgaaatcgttgcttaaactatcgacaagatttgcaaaatcgtttcactaagaatatatataagatcaaagtcataattcaagaccattctcaccaataaaaactcccttaacgaacaaaaaagcttcgattacaatcgccacaagatcgatcacgagttcagtaccgaaattgttccttaaattaccaaaaatacctaaaaattagagatggaatcgttgctggataaaggaacaactcaatcgacagtttagaaaaattgattcaaaacttactctgttttttttccttcaatttcagaagtaactttttggttacttatgatgctgataagaaactaattagttactttttcataaaaaaaaaatattttggttacctctaaaattta

SEQ ID NO: 168451 - DNA, 690 bp, Cannabis sativa
  modified_base (300)..(300): a, c, t, g, unknown or other
caagctaatagaaacgtacccactaacctctgacagcattgttagacgcactaccgggtcggcccgatagtgtccatgagtattgcaactcatggagacatatgagtcccctcgtggtcctcatatgtctgcccttctagtcatgctaactaatagtagctcacttaacacaaaagtgtcaggaggtgtggagagctgacaccaggtactctccccttaaagagcattctaagtttttaaccttccattaagaacatatataatttttgctttgtagacatatggtcatcaccatatacnaaatcacagagtttctcaaatccgattgcgccattgtattcatagacccaactatatggcgaataccaagtcctgtcttaatccgaacaacattaaagatatttacaaaaatattattattgtacaaactaagcattagcatgcacactaacatctgccaccactttgccaacatttgagcatcaccccatataggggtctacaccattatataaaaaaataaggggaaatttgattttctatacttaaaaaatctttaaaaaattttcctaaatgcatactttataatattggtcatatatgaccacatttctaatatcccacaaatacccctcccatttgaaaaaatcaaaaactcaaatcatacatccatggctgcctcatcccgac

SEQ ID NO: 168452 - DNA, 1543 bp, Cannabis sativa
gggcataaaacccaacaatgtgctgttttgattatagtgtatttgattcgtatgaagattggatttcatattttagatttaattttatttgtacaaatatatatgaagtatggatcgattatttgaattaatcgtttttttaatattgatttattattattatttttaaataattaataacaaaataaaataaatcacgttttatctctctaacaaaaaattaaataaataaaataacaaattctaaagagaaaaagaaattttatgaaaaataaatatttagttttttttaaagttatatatataaatttttttatatatataagtttagtgtacacattgatatattaaattttaagctatatttgtaccatatgtattagattttttgaattattattattttttgatttagaaatctggactagacttctaagccatacttgcttgatagattgacgagaataaataagtagttaagtttttataagagaaacacaacaaatttatagtagttcacccctatatcgagatagtaatggggctacgtctactttggatttttatttcttacgagagggtaattacaacaatagactaagtgtcggaagctccaaattctagagggagaaagtttagagagagaagctctgaccttgtgggtaattttctaaatgtgaaaaatgagctaagtgagctctccttttataggcaaaggaggcccaccaaaaaaaaaaaaaaaatacaaataagatgtttttgatcgttgatgatgatctaacagtaaaaattagctcttggtggtgatgaccatttttcaaagcccgacaggtgctgctgtaggtaacctagagcttatttttgtaactcccttgggtgaatcttgacattgatagcttcagaatcacgtctgtagtgtgagacatgacttgatagagcattgaattagcttcaaaatacaagttgaatcacatcaatcaaatcaaaattgagtgagttatgactgtttcactaaaggcagttcatggcccaagttaacatcccggcgcccatgttgacgtcaacctaaacgctgggtaagtgtaaaagtgtctaaggaatgtactttaaaatgtctaagtaatattttgacataacttagtcgatttatgtgttctggcgaagctggtcactggttctcagagatattactgttttgcggaatgagaaactcgaaactcttcattttcgggtgacctgaaaaatgagaaatggaaagttgtgaatttaatttctttgacttcatagatcattgtcattgtgaaaagctagatagacggtcaaaacgacatcagatttggataagcagaacacatcgcaccaggtcttttgtcaacctaggcgctaggtacttactcccaagctctcaagatttcgcttttgatacttccaaggcttctaaacttgaggacgaggtctcctaccccatttgaccattatagattcaatggtcccatcagatttggcatttgagcaattgaaggcagcgttccaagttgattgt

SEQ ID NO: 168453 - DNA, 737 bp, Cannabis sativa
tacctctatttatatataagctaagccaagtttaataaggtcaaaatcattgatagtttctatgatttttttttctctatttagctgtatttttaaggtattttgcttgagatgtattatcaatttgttcatggatatatatgttggaatcatttgacggcaaagattttggtgaagatcaagaaaagcatctatggccgatcttaatataaatttggtcaataatcttacttaagacataacgaacaagcatgcatattgttcttggtacaacaaaaaaaaaatgttatcctcaatatttatatatatatatatatattaaaaaatttaacaagaagaaacaaaaccacttaaataagagttgacaaaattttcaaaaaatgaaaaataaaagagttgacaagcatgaaactatatattatggaaacatgatgatgaaatataaccattataattcatatgttatatattttaattagaacagtctcacaatctgtatagtgttacaaaactgaactttcatgtcacgtaatcacatgtatcaacaaacacgataaagatggagtttttacattgaatatggaaaagaatttcctatagtagtgaatattttttataattacttggcttaagcaaattaaattttgcaggataagctagatggttgaataagtaagtcaagattttagatttgatccataaagacaataccaaattggatttggagtcactataag

SEQ ID NO: 168454 - DNA, 678 bp, Cannabis sativa
tgggaaatgtgtcatttaagatgttttgggaaatgtgttatttaagttgttttgggaaatgtatcaatatcatcttcctcttacctttttaatctctattccatactatgctatacatatttctctttcatatcaaccaattttctcttcattattactagtctacctatcatggctttggtatgtctttgattattttttatatatcttacttatttgctcaagtcaagacacacttttaagttgattaagctcttagatacttgtttgttgtttgttgtttttggttggctgaattgaacatgaatgaacaatccaccactccaggtcatgcactcactgacctttaagaagaatgcttacaaagcactcattgttgctgagtataatggtctcaatattgagtttgctcccaactttgagatgggtgtctctgacaaaactccacaatttatcaacatgaaccctattggcaaggtatagtaacatatataatccaattctcatatgtttttgattttcactcagattaagatttgcccttgttttttcagtctcctgttctcgaaaccccggatggccctgtcttcgagagcaacgccattgcgcgttatggcatgtttctatccatccatccaatcttttttccattcattttggtgttgggatagttgttat

SEQ ID NO: 168455 - DNA, 1450 bp, Cannabis sativa
tattttttattaaaaaattcaaatagaaaaagagaaaatagttttcattgattgaattaattggtacaaagagaggagtatatatattataaagctacttgagctttacctaactaatctataacagaataatttaacaaacttaatagccccctcaaaataaagtgtagaaattcttaacacccatcttggaaataatattgttgaatggagcaagaaagagatgctacattaggatgtcagcaaggttggctttggatgatacgtgactcaacttcaggaaaccatttgttatttttttctctgacaatgtggcaatcgatctcgacgtgttttgttcattcatgggagactaggttctcaaatatatggattgtagcattgttgtcgcagaatagaatcgaaggaagattgatgttgatgctgagttcctggaggatggacgtgagccatgtgagttcacatgtagcattggcaatggcggcgatactcttcttcggctgatgatcgagagacagttggctgcttctttcatttctatgaaatgatttatttgcctaagaaaatacaatatcctgagattgattttcttgtgtcgacgcagcctccccaatctgcattagccaaagcttggagctaaagttttggtgggggaagcataaaaacagaggccttagccaggtgaattttttaagtagtgaagtactcttgttgcagcaagcatgtgaggttgtctagtgttatccgcgattctagaaggggacacatggatttcatgtcagcatttcagatccatcagtgggaccctcatcaatggtaaggtggaccaagcccatcttaatatgtctttctaggagttatcttggttctgtactcgggataccttgtgccttacagatcgagctgacaagacaactctagagtcgtgaggctgaaaggggaaggcgcaccgctcccaaaagactcttccagtttccctatttattctctcctataaataagggaaaaatagttgtaaggctggaaaataatatcatatcgcgatgaaagaggaaacttcccataataagtgcagagcagttatttacgaatattctaccattataatcggatacggttttgacctgatcaactcaagctcgatttgcccagttagcaaattgtatccttcaatggctggacttcatgagtaagcccatggacattgctcaattgtaaactcccctgtagagggaaaaggaaaaacctcaatgtaattctctaactactataaatacccaactaatctcatggattaggagttgaattctcttacgtgttgggttttatgccctaaataaaactccatttcagtgtaatctttattctttaaatattaataaagaaatagaagtatttttttcactcatttgtgtgtcatttggttcatgttatcatttacttatttatt

SEQ ID NO: 168456 - DNA, 664 bp, Cannabis sativa
tatggctagtgtcgatgatagaaaggaacgaaggcggagtgagtgtgagatgtcgatctagtttggttggggtcatggaatagtgagttggccttagagagggaaggaggcatatggagagtatgttagggttgttggttagggttaggggtttgagtttgtaagatttccatatacataaaaaaatatttttttattaatagagacacacgggttgggttgggttcgttgggccacaaaaagcccagcccaattccgacccatagtaagcgggttgataagttttccacccaatgaaatttcggcccataataaaataggctgatcggcccactttcgggttgggttggccgggttggtcggcctagcacaacccatgcacagccctaagcttacctagtctaactaggtagatgcaaagaattaaagtgagcaaattttagagggaagtcatagcagcagcccttgccagccttgtctacaacatctgaaaaagcataaatgaggagatatggcacatgaaaactccaaatgccgtccaggtgaccaaacaaataaaagaaaggctaattatgattttcccccgaaactttgataagtactaaattatgtcccctaaactttttttgccgttaaaaatccctcctgaactattgagattgtt

SEQ ID NO: 168457 - DNA, 1074 bp, Cannabis sativa
ggaactctcatggacaatcgagaggtaagtttaattctagttctcaatataagaaaaaatgttatgtctatcataaaactaaccatctcaaaaatgattgtcctgaactaaagaaacaagatttcaagagacatgggaatgctgacatagctccacaaggcaatgactttgatggatatgaaagtgcagatgtaattgttgcttccaaagattactctggtgttgattgagttatagactcaagatgctcctttcacatttgtctagacaaggatcaattctcggagtacaagagagttgatggaggattcgtaagacttggggacaatagagcatgtgaaatcattagaattgggtgtgtaaggctgcaattgacaggaggcaatgcacatgaactgcaaaatgtgagacatgttcccaacataaagagaaatttaatctctgtagctatgctagacaaggagggatgcttagtcaaggtggaattaggggttctaaaggtgttaaaaggctcagtggtacttatgaagggtgccatgatcaatggagtctatgttcttcaagaaaattctaccagcaactttgcatctgtggcctccaagtttatgatcaactctaccatgttatggcatagaagacttggtcatgtgagcctcaaggggctttggattcttgacaaacaaggattgcttagaaagaatgggtgccagatttatattctgtgaacaatgtgccctgggaaaattaacaagaattaaatttggctctggaatgcacactaccaaagcaacactgaactatgtccactcagatgtctgggggccatctagaattatctcaaggggaggatctagatatttcgtgtcaatcatagatgactactctagatatgtttgggttcacatattatagaccaagaatcaagcattcagcaagttcagagaatggaagactctagtggagactcaaactgggagaaagattaagaagttgaggactggcaatggcttggagttctgtgatgatcagttcaagaatttttgtaagcaagttgggattatgagacacaacatt

SEQ ID NO: 168458 - DNA, 1209 bp, Cannabis sativa
  modified_base (1135)..(1145): a, c, t, g, unknown or other
  modified_base (1178)..(1182): a, c, t, g, unknown or other
aaaaaaaaaaaggaagaagaaaatagaagaaaatttgaattgaagagatgtatagatggcatagttgattattttaggccctaatttgggtgctattagtttgtagaaatggttagagcaatacaacttcttaatttatcaaaaaaaaaaaatctaaataatcgattgagggaatctctttaccacttgagagaatatatcaaccacctggaaagaatctctcaactactttggaagaatatctcaaccaccatagatatttgtaaccactttttctattaaaatttaaataaatatttatcgtttgaattatttaattaatctaaaaataaattcagtgggactcatcttatctcatagatacctataactgtatcattacacaataactggcaccaccattatcttaaccagacaatggtggtgtctttgcctatacaacacttttttttctccaatttatttaaataataaatttaaaacaaataatttactaaaaaataaatacttactattttccaattgaaaataaattttttcgaacatcattatataactttattcatccccttgacagtgttgcaaggtgccaatagaagaccgtgaacctatagtactaaactctaataaattagattatttattgaatctcatcaaccaaataattttatttattaatttcatgattactccactataaatatgaaattaaaatcttagtaattatagaattatatttactacgtttattgcagtgtctatcaatagaatctattttagtggttagccctccttatcttggtttgtaattagttttggtcaaattatccttttgtccttataattacttctttattcactaatactgttaattcactagtgaaagtataatttagagtcaatctaaatttgtgcacaacttttcaattctagaattaactcttaaagagaacgaacattcgatctattagtaaagtcaagattccataattgtaaatcaagttcccagtcatccacattatgatttccaaaatagaaatattgtaggaaccatcttctttaagaaactttaacgagtgaatcaaaaaaactaataacacgaacaggagttcatgatgttggaaattattttacnnnnnnnnnnnatctactcacaagtatgttaattaacatcctannnnngaacttctaaaatgattataagtaaac

SEQ ID NO: 168459 - DNA, 1106 bp, Cannabis sativa
  modified_base (1020)..(1023): a, c, t, g, unknown or other
cgctttgattttttggaaggttaaacatctgctcacataatccactacgtccgttttcattctgtactacaaataataagccttcagatgttgatacatattggtggttcccagatgcaatgaaaaaggtgtagtgtgcgcttcattcataatttccttcttaagctcaagattactcgcggcacacactcgagtcttaaacaacaacattccattactgagaagtccttagctttgcctgcgaaaatatattctcaagccttaactagtttagggtcttctagttttgccattctgatcctttctaacaagtctaactgaagtgtcagatcatgcaattcttcaattacaaattcaatgtttgcccttgacatatctgaggctaattgaggagaaatcattaccgcaccataaatttggtcaggccctttccgactcaaggcatatgctacaacattagccttctcgggatgatacaagatttcacaatcatagtctttaactaattctaaccaacacctttgtctcttcaaatctttctgagtaaaaaaaaaagtacttgagacttttatggttagtgtaaatttcacaccgttcaccatataagtagtgttgccaaatcttcaaagcgaacacaactgctgcaagttccaagtcatgggttggataacactgctcataatcctttagttgtcgtgaggcataagctatgactttgtttgcttacatcaacacacaatccaaaccctgtttggatgcatcgcaatatacaacaaacttctcttgaccattcgacagggctaaaactggagctgtaactaactattgtttcaactcttggaagcttttctcacactgatttgaccacacgaatcactgattcattttagtcaacacagacaagggtgttgcaaacttggagaatccttccacaaaatgtcgataatatcccgctaagccaataaaactctgtacctctctaactgttttctgttggaatttattttacgaggatcttannnntactcacaagtatgttgatttaataacctaaatatgaacttctaaaacgataaataaatcacataaaaagttaagaaacctta

SEQ ID NO: 168460 - DNA, 639 bp, Cannabis sativa
atgaacaaggccggtgaaagggggtccccttgtcttagaccacacttagaaaagataactccatgtctcgttccatttaacaccaaattcatattcttaatttcaatgcaactcatgatccatcctagaagccgttccaggacaccatgaaattggagggcttctctcacgaactctcaattcattttgtcatatgctttttccatatcgagctttatcatcatgaagcctttagatccttttttcctcgacatggagtgaacaatttccctagccaccgatgtgttctctgtgatagaccttcctttgatgaaagtagtctgagtcggggaaatgatcaaaggcaagacatttcgaagcctcagtgatagaagttttgagatacacttgtacacgacattacacaatgcaatgggacgatagtcattcacagtaggcgggttctcttttttcggaatcagaactagattcgtttcatttatgaagtgcggaatcttggacgttataaagaaatgtgcgatcatcttcaggaaatccagtacagcgaaatatgaacttctaaaacgattataaaataaacacatataaagtatgagaaaccttacattgggtacagcgaaataaaatgtctccttccgt

SEQ ID NO: 168461 - DNA, 524 bp, Cannabis sativa
tacttagatatttacaacgactcttaattggtggtaaaccatgttctgggtgactacatagtaagaggagaaaagatcgtggcctgccttagaaagatacaagacctactcgctcaactggatgggtacactatccaacaaataccaagagaggagaatgctagcgtcgatgccttggcaagactggaaatgagtgcaaaggtagacagggctaacctcgtaccgatagaatacttgtctgaaccaagcattaacaccaaaaaagaagtactcttacttgatacaacacagtcatggataacccccatagctgcttacttagaacaaggtgtcttgcctaccaatagaaactaagcaaagaaaatgagaaggaaggccccaggtgcttaatcaacgattatgacatgtatcgaagagggttttctatgcccctactatgatgtgtgtgttggaaattattttaccaggatctagatttactaaaaagtatgtttcattaacatcctaatatgaattttaaaaca

SEQ ID NO: 168462 - DNA, 1195 bp, Cannabis sativa
tagcttatttgttgtctggtttgggtatttaaagactgtaattgcttggcacaacgtgtattattctatcttactttgcacaaactcattctctgtattgtttacttagattgtgtcaaacaatatgttttattcataatattatgtctgtgtttcttttccaactctacaatacaaaatgaattatattcagatattactaataacaattaacaaaaacagaatgtccaaaagattcaaactgataaaaaaaaaaaaaataagaacttaaggagggcatctcaagttctcaaccaagaaagtaaaataattaaagagttcacaaaatcatctttcttgtgggaagaaggcccaaatttggttttttaattttatggaagtccaaatttggttgatgattattccttatccttgacaatgatgctgttgttgtagctaaattagtcatcaaatttgtttgggtgggtagtgagaaagaaatgcagtacttgttcttggaattttgtttgcatcctgaattttgattggaaaaatggaagaggataaaaaaaggagtttattcattaggcaacagtacacaatgcaatgaaataaaaaataataagaatcattttcagaagaaaaaagcagtaagaattttttaaagtctcacaacaaaaaatattttgatacataaacctgatgtttagaaacactaggacaaccaggataagaaaaaccaacgttggaggacaaaatattatcagctagcggcaaaatcctcaaaaaaaaaagttcagtttgatacagataagtccccaatctcgaaaaatagcggtaatagtcctcaacatcatattttttatttgtccgttagtcctaatttttaactgagcagtttattttttcaaaattgtcacgtgacgaaatattattggtctaaattattattttaatttaaaaaaataaaaaataaaaataaataaataatttaaaataatttctttttttttcctttattttttctttctttttttttcttttcttttcttcttcgtcgtcttcttcttcttcttctcactgtcagaccctaacctctcaccaaagtaaccaccctgcaatctctgggaatttcagatatggtggatcaatgattcaccaccctgcaagttcaaccatatataatcaaacaagattcaaccatggaaattccccc

SEQ ID NO: 168463 - DNA, 602 bp, Cannabis sativa
gaggaggaagtgacagaccttgtggtcagtgaggatgtgagaggtgatgagagctttcttagatctgcaaatcccacagtagtcacagaaatacctccttatgtccctaaaaatgggtttatcttctttggcttcgtccatctcagactgatgaaaacgactgcagagtatagagtaacacaatcgaatatattaaataccacaattcgataactcagttgttcataaaagaattcatggagacagttagggcttttgagaaacctaaaattagaaacacgtttatgtaaattatgaaattaactaacacataaacactatataaatgcccataattttggaaaatactatatcaaacaattcaattgaggtattcaagcaatcccagatttatattatgattcacatataaaaaagattgatcctttatcacccaaacatagaataccaatttctttgctagaatagcaaaagcatcaaaaagtattttttccccagaaatttcacaactctgtaatagtatttaacataacaatacatcacaagaaaatttccatttaatttcaaggaaagactatccacgtatagaaactgaacaaaat

SEQ ID NO: 168464 - DNA, 757 bp, Cannabis sativa
aaagcttgtttaaaataggcttcatgtaagcaacatacttgtcatgaagctattatttatgctactacatctattcctactaaagcctgaagctttaattcatttcatatatgttatttatttttttgataagtttcatgtgttatgtttgctacttgataatgttcaaatattgtttttgaaagagttcttttttctgaaatgaataaatcaatgttcttctgttaattatttaaggctataaaatttaatatttttgacaagtgaagcagtgccttccggcttcaacaagatatgtcatcaacaatcttaacaggatatggtttctgattagatgtaataagtttcatagccttctaatgtagcttgtgtgccttcataacgtgtaaatacttcgtttgaattataacaattaatgcaagtttggtttctttttctttataataacaagcaatcttcatttccttcttcttctttggcagtttatttcatgatcttatcttatgaaacaagtttatccatactctactctattaaataatgattagtattagtaatcttacaagtttttttgattgtgtttagcgaactctggatggttatcttaatccaaacggggtcgcagaatgtagcatttctggattccaaaaacaaaaccattcgtcaaaatattaaaagatgtgttcaaacatattgctctaatttacattaatgtatgtattaactttatattatttatgtgtagtgctcttgagag

SEQ ID NO: 168465 - DNA, 681 bp, Cannabis sativa
  modified_base (464)..(468): a, c, t, g, unknown or other
  modified_base (634)..(656): a, c, t, g, unknown or other
ttttttaaactgcgaccgtaccaaaatcgtaaaaaccataccaagctatataatacagtataagcgggttatattatcactaaataaacaaactacataataaaatttcacgaacacaataaaaaaaataacatctttttaaagtcaacacagctaataaacaaacaacattataaaaataaaataaacaatgtaataaaatttcatcaacacaataaaaatataacatcttattaagatctcaacaagacatttaataaaaatactaaaaaaaacattatatgtacacaaaacataaaaaaataatgttcaatgttttaaatcgtacaaaatatatcaaacatgatgtctatatatggttatatttctaatgtaacccatatggttacatttttctttgacatgtaatagcacgttactaataagttaatatttcttttttaaaattaattaattataattannnnntttcttaaaataattaattaaaaatttaacaaacttcttttagcaattatacttataaataactttttttatttatatttaaattcctaatataattattttaacatttaagctatttaattataatattaacaataaaattttatttttttacaaaaattaaacnnnnnnnnnnnnnnnnnnnnnnnctcttcttataataaatttttaaat

SEQ ID NO: 168466 - DNA, 739 bp, Cannabis sativa
ttgctgttttgtttttgattggtcctacatgtcatccctttttttttttttaattaagattggtcttacatgtcatctgcttatttgtattttaatttaggtgtgtctctgatcggatgatttctatcgcttttgacattctaattcgtctttttttttttaaaaaaaaaaaaaatactttggataacgaagaagtggtggtaggcgaggtctttgccaacaaactgcagaaggtctttgatcttgacgctaaatttattgtgttacacaagtctgtgaaagttttgtatatatttttttattatagactatgatcttgtggaagttacattcacaaataaagacacttttgcaagcgaaggaaacgatgctaggtgtgtgaaagtacttattagtgaaagagaaatttgtatatatttgtatgaactcatatagaagtgtatagtgctccattaacaaccgcaaataaaattggactaattcacgatatatctatttctcattagatgagagaaagaaaattaatgtaatatataatacattcatatttcatagtctctaaattaatcttcccattagggtaaaaaaaacaaggagagatgcacttaattaactttgattagctagtacttttcatgattaaaatattaataaatcaataaaagtgtattgatatataaaaaaattctagaactaactagttagacaatatcttaagaggaaagtaatatttaaaaaa

SEQ ID NO: 168467 - DNA, 953 bp, Cannabis sativa
agtcaaagtaatccattggtgtaaggcaccccagttgtcggcaaccaagaatctcccataataaaacttgacaaagtaaagttaacaacttctaatgaagtacttatgacacggtaaccaggccatttaaccctgctactggtattagatccgggccctgaattattaaactctgcataatacagagtcgccagagagaaatttcccgaccattctctccaaccaaccgggtcaattacgctatccatgtaagattgcataaacactgttcttgaaaactccccccacggccttcctaagaacgttctagtactattagccgtgaccaagtcttgagcagcccttatattgcaattctgaatcgaagttccggtgttctgattggggtcgctccggccttgggctgtaatggcgttgaattgtctgggcagtggcttcctcggatagatgttgcagttctgcaacacaacggcggcgttaccgaatatgaagtcaatagtgccgtaaatgtcgcagtctcggtagaattgcctgagggaatgggcgtataaggtgtcttgatacccttcgaagctgcagctgtaaaaggccgacaagtcagcgccgtttctcacggccaccgcctggtgcttgatggctcccgccgtgtttctgaacgttatgtttatggccacaaacccttggctaactacggctgcaaaacatgaaatatatatatattatcattcataattgttgtatacatagggcggtggagctacgtaaaggcgagggaaaattgtcaatattatatattttaattttaattagttatttcaaatatttataaataaatttgatatttattaacaaaatgatacttttgattagtgcttataagctatcttacatttattctacgaacaaaggttcaaaatgttaaagatcaacacctactctacaagtatctagaa

SEQ ID NO: 168468 - DNA, 771 bp, Cannabis sativa
ccaaaagtgaagaacttggtgtggagggctagtactagatgtcttccaaccacggtttgtttactctctaaaaaggtcgaagtttcagctatgtgtccagtttatggtttgggtgaggaaacgactttacatagtttggtgacatgcaatctggtgcaactgtcctggaacatggtaggaattgacactttcataggggctagttgaaatttttttgactgggttgtgggggtgtttaagcagttggataatgaggcaaaatatttggtggtaaccctgtgttaagctatttgggggactcataatgagctggtttggaagcaaaaaatagcagggccttttgatatcattgcttcagcgacaagatatcctaactaattgagaatcgcccaggagtccaatttggaagcatcacggtctgaccttcagatggatgatggagtagagcgttggagtttgccacggttaaatagtgttaaggtgaatgttgatgcaatgttatttatggaggatcattgttttggttatgggattgtggcccgagatgataggggtgacttggttggtggttgcactaaacgaattcatggacaaaatgaacatcaattggctaaagcaatggaggtttgagaagctaaattggactaaaggtaaaccatggcttgttgtttacttgttgactatatgtttggttgctgttcaagctctttgaagtaatgtcagtagggtctcttggttttgtttggtcacttaggctatgtttggtaggaa

SEQ ID NO: 168469 - DNA, 1076 bp, Cannabis sativa
tgtcgattaatttattcggtttggttagggtggtttattcaagttagacagtttgtaaattttcatgaacacttgtcaacttactattacagtctcttagtcaacttctggaatattttttaaaaaaaaattatggtgatgttcattatagctacattataattcctgtcaaatttttaaaaattttaaatattttacattgctgaaaataagtttgaagttttttgaacacgtgcggtgaattgtaatatcaaaaactctgctttcggtactgtaaactatttagaacatttcaaaaatgtataggagtgatattgtaactataatgaatactattataaaaaaaaaattagaaaaatatttcagcatataattttagccgcaaaaattaactaagatgttataattaacactcaaataaaattttaataatatattttttagaatataatagagaaattcatggaagtcatatactaaatgtcagctaacaaatcaattgtttttagagaaaattttagttaccttacatttaatatggacagttatattttcgtccaataacagtaattattattataatatggacatttatattagtttgtaagaataatatatttgatataatgcctttccaaataaaatatatttaatattttaaaatatatatatgagtgactacccaataattacatttttattatgatacgatagttatattttttttttgaccagcaataacatgttactaataggtaatttttttttttaaaattaaattaatcacaattaaaattttttctaaaataattaattttatttaaatatttactaagaccctttttagcaatcaatatttataaataattttatttttatattaagtccctataataatatttttaacatttaaactatttaactataatatttacaataaaattctattttattttacaaaatttagactttcacccttctaaaataaattttgaaatatttaattaatttttaaaattacatctaattattattttgtaacaaccgcttgacccattgtaaagcccgcttagtta

SEQ ID NO: 168470 - DNA, 961 bp, Cannabis sativa
aaacttcaactccactctaacatcacagtttataaatttgatccagtcttgcggagggggttgcctaacatatgtctgagtcggagtgagagtgcgaatgagaatagctttgtggtctgtgtaacaagaaaggataaaatcaataaagtatttgatgttacccaaattatcattgtgaactttataatttctagcccgccaaataaacacctcattaacatcaatacacccctatccttaaggctccaaataaacttaactcagtaccacatacgaataccaaaatcaacaataggaaagatgccccaaggggaagatcgccataagtgataagccaagttatactggaggaacaggtgctttatagtttcattctcaattccgcaaatagtgcaaagaggagtttcgatatgacatctttcatttagaattgacctgataggcagcgcgttagaaagaatactctgccacaaaagctctagaataaactttggaacaatttatatataaagatatgagaaaatatagtagaatttacttttatacaacataaataaataatgcaaaagaatatgcaattaaaaaaataattaaagtttaaaatataggaaataaatacatttgataaaatttgtaataataacttttgccagaaaagttaccggcaccggaaaagtcaccagaaaagtcataaaaaaaattactgtcgccgaaaaagtcatcgtctccaaaaaagtcaccgtcgctggaaaagttaccagaagtaaatgtctcgaatataaataaaaatagaacgagtttttataacataatgaataaaaacaaataacacaaaataactgaatctgattataattgcaatataaaatgttctgtaacataataaataaaaacaaataacaaaaaataactccaccagttataattaagataaaatcgattctagaacagtgtcataatg

SEQ ID NO: 168471 - DNA, 630 bp, Cannabis sativa
aaacaaaaaaagttatatttaggggacacactttctttccttggtttacagtaagtgagtcattttaacaaacacataaaatgcattctacacagacaacatcttacagtttgtttcaattcaacagattgttgtgcaaacggaattcctcctctccgatcagtaagtgaacgaggttgataatctttctatgggtagagccgattgtgttagtgacagaagaaagcgctgatagagagagatttagtaacggagagagagagaagaagaagttttggtctgacaacatgggatgaaaccagatgtagctttgggtatgctatcataattgggcttctcatattgggcttctcatattgggctgagtcaaacagtacaacattcccaccttttatttagtgaaaattgtaccctataccctttttttttaacccatttcacttttacctttcttttcgacatatttaatttataccctcttttatttgttatatcccgattatacccttatgtaatgaaaaaaactttctcacatccctaaacagtaccttatgtaaaggtataatcggtaatggacttataaaagagagtacatttaaattgaatttaaaataagattatttttggtta

SEQ ID NO: 168472 - DNA, 549 bp, Cannabis sativa
tccgtccctgattacaacagacttgtaactgaaagtaacagactttggacaaaggttccctaataatacatacatacatacatgattatcgagcttctatgagtgatatgctcatctcatttgtggaaagcaactcatgattattagaagatgaattatctccttttgcataatctggctccatgaaatagcctggtgctttaggttgaggcaactcattttgactaccaaacatcaaaaccacagatgacatggtgggtctatcagcaggattatgttgtacacaaaggagactaatatgtatgcatcgtaacacttgatcaagattttcatctaataaccactcatccaccaaatcatatgccctttcttccttcatcaatgtccatgccttaaaaataaccaaaaattcaatgtcatcacttttctcacaatttagagatactgtattattaagggtaaattgcagcataaatacttaatgtttttgattttatacacttaaatacctaatgtttatttttggtggcaaaaatacataatgttaca

SEQ ID NO: 168473 - DNA, 610 bp, Cannabis sativa
cttacatacaaatctttcaaatatctttgtttatttatgtcataaatattttaaatgttgctcatagatattcaaaagtgttgcattttgaatcaaaaaagaaaaaacttggcccaatattttatgatatagtttttttttttttttttttgataacttattttatgatatacttgtatataaacatataatatatagtaattataaatagtaattttaataactttattttattattaatgttgtaatttatactacaaattttggtgtgtatatctctttataatgtagttttgttgagtcatatagcaacttttgttttaattaataaactaggtaacggtaccgcgcaaggcgcggttgtttaaaaactttttatttatgttgtaaaaataaaatttatatttaatatattaaaaaaaaaatattagttaattaatatgttaatgtactataaaaaatattaaaaattataatcttaatttgttaaaatattaagtcacattatttaattgaattattattattattatcgtaagtttgttatataaatttcacgtatatataattatttgttaaaatatgtgaaagattaatattttttaaaata

SEQ ID NO: 168474 - DNA, 1010 bp, Cannabis sativa
  modified_base (907)..(911): a, c, t, g, unknown or other
tcccaccaaaactatcaaagtgggaagagatttacatccaacgatgaaagaaagagttgtgtcaacagttaagaagaatcaagttatcttggcatgcagtaattagacatgatagggatcaatccaaatgttagttgccataacctgaatattgatgagagtgccacaccagtccaccagaaaagaagagccttattcctggtaagaggagaagcagtaaaaatgaaagttgagaagctaacttccattgagttttttagagaagcattatgcccatgtgtttggaaaatccggtcctagggtcgaagcccaaagacacctagaggatgtgtattgacttcacagatctcaacaaggcatgcccaaaagaccacttccctcttccggaaattgatcaaatggtggaagcaacatcatggtacaaattgctaagctttatggatgcgtactctgactacaatcagattcagatgcatattgcggaccaagaatacacatacttcaagacaaataagtgtgtgtattgttacaaagtcatgccattcaagttgaagagtgccagagcaacctatcatcggttggtaaacaaaatgttcaaagcctagcttgggagaaatgtggagttatatgtagacaacatgctcgtgaagtccaaaacttttagagaacatagtgatgatttggaagaggctttttctgttatccaaaagtatggcatgaaactttattggaagaaatgcacattcagagtctcctctggaaagttcttgggtttcatagtcaggtcttacggaattgaagctagcccgaaaaagatcaaagccttcatcgacataccttgtcccaagaagcacaggacgtgtagagtgtaaccggaaggatcgtatgttggaatatgttttaccannnnntagatttactaccatgtatatttttaacatcctaatatgaatttctataaataatgtaatttaaacacataaaagttatgagaaaccttacagtgggtg

SEQ ID NO: 168475 - DNA, 1180 bp, Cannabis sativa
ttgctctggttacaaagatgatcaaaaataatcaaaatcaaaatagtgtcttgcacctacaaaaaactcacttaagggagttgtgatcacacacatagacaaatatttgggctccaaaaagaatgagaaattgagctacctaactaactaactaactattaaaacaattaagttagtcacctattaagtgtctaaaatctctaacagaatatgtccaacatgctaagtgtacgtttcattttgataaaaaaataaaatcctataagtcacatggaagccaaagtagcactccgttttaagaacgaagttaacaatataaaggattctgaaggaatcccacaaggatctacaatcactttcttggtgactgatagtacctcttacttttcaattctcaaacaattgaaagttcctttctctgacattgaagaaaaagttgtgcacatcaataaagagaaggtaataatgatatctttacctagctatacaattttagtaactgtagtataattttacaattttctcactattcttctatgttgtaggctttgccacttttattgtgtttatttttctctgaaaatgctcttaccaacaccttcatgaaaaagtttaagcggttgtctctgacctttcccatttcttgaggtggctgtgattttctgattcatgtttccttttgaatttgttataattgttgatataaacctccacttacactgatacttaaactaaatacaaaggatagaaaagtaattacaagtaaaacccctaagttggccttcggcctctataatccctaacagaaattagttagaatggatttggataaatccacacctaactaatttctataactaccctaactattaaatacagaagaaaaccagaagccctagtgctatatatacctgcttcaaagcccagatctacacggttgagggctttcttcaagatccagagttagtgaacttgaagaagggagaatcagagctcgtgcatgcacaagaacaaagagaaagttagtatagttagaaagagagggataaaacacagtatatgtaataactaaagagattaccagtcgaaaaaccatacctgtgacttggaatctccatctttgtatttctgatcaacgaaatagtggaatcgagctctcaactttgaggagcagctcaaa

SEQ ID NO: 168476 - DNA, 1078 bp, Cannabis sativa
ccgaattcctacagcctcggccaactttggtgtagcttgtacattgaataactttgtatggctattgatgagaagcccccgagtatccctggcgacccaaccaacaccaaactgtctagatgcttcaaagatcgctgcgtcaatgttaaccttcacattattttccattggaggcacccaatgctcggctccgtcaccttggttcaaactagcaaacaagagctctaaaccagaagaatgagcatttttccattgtgaaaggtaaccttttgctgacgaaacaatgttttccactgtcttgatcttgttttgccatacacagtcatttcttgcattccatactgcccaagcaacagccaccagcagttcacgattctccttatccaatctctgaaaattgctaatacaccagtccataaagctgtgatgttgctgcagaaccgagggaatgccaacactatcccaacattctttagctatcgggcagcagactaaagcatgtgagatggactcttcttcaacagaacacacagggcataatgaatggggtactgcgtgtttgattctgagttgcaccattgtggggaggcagtttgtacatgccctccacactagatttttcatctttggaggcattttgaggttccagaattttttccagaaaagattcacttgtgattcctcaaaattcaccaaacctttcagctcctggagacgtttataagcactcttaactgtgtataaacccgacaattccccaaaccagattatatggtcttgactggttgtgatattaattgtaatttggacgattaactctctgtctcgtggttcaaacaaatcgttcaacacctccatatcccaactgagcccctcaatagtcaaaagattagccactttagcattatgaagccccggatgtgaggaaataacccaagggtttgatttatccagcaaccaaggatctcctaacacatcaatgttctcaccgtcaccaaccgcccatcttactccactagcaaccagatgttgtgcctcaagtatgcttctccacacaaaactaggattagaaccaatt

SEQ ID NO: 168477 - DNA, 1103 bp, Cannabis sativa
gcttcgagcaactaaactagcacgccaatctaaaaaacctaagtaagatggagaatcaccataaattttggtgacttcacatgagaaaaagaccataaaaaatccaaacacatacaatttcagatttatgcaaaatcgtgcagaaaaattggttcaaaattaaaatttaaccttgaattacgatttaaatctcataaaactaatcctcctaatattaattttcagattcaaaaaatgtggatctcttataaatagatctggaattctcgatcaatctaaaactaggtatgatccgaaaaaaaatgtaaaaatactaaaacaaatacttatctcgttgcattgacgttgttttctagatttttaatttgaatttgaacatatcaaatcatgaatagtattaaaattcaaatagatctatagacacatacatcaaaaaattattctagtttgttaagtttatgaaggattgtattacagttgtataatgattttgctaaccctttgaaacttgacatatcgttgattacaaattgataacgatacaatggtgtttatcataattgcaggtgttatccacttatccttattcccaaatgagttctacacggaagtatcaaaaggttgtcgtatgggaatatcccaggttccccttccttttaagataggattaaggaagacatcgaagtatccgggagagcgcatccattgtgaaggaggaatcgatccttgaagttgtaacctaatgcttccagtatttgaaggcatacatgaagcacaggccttctgggggctcttaggaattggctattctaggagatcccgatttgcacttcctggaagccccctgtgacctaactcagagatacactcgacggttacatctcgtctgacaccaagtcaaatcttgtctcctacgtcataccatggttgtgtgccaatgtgcctctgttgcgcttattgtccaacgacttagttgggatattacttttaaaggagaaacctttgaacgacatgtgtccatgtcctcacgtgatagcctacatcaattaagcaccacatgatagaagagttacctactaaatcaacggttagatggtcttgta

SEQ ID NO: 168478 - DNA, 769 bp, Cannabis sativa
tgtggaaggcccaataccaagagtaatagttggcaaatactgtgcattatattacattatgattcaacaaaaatttctatatcaagtgtgttaaatttttattttgaagattgtcattctaatataattgtgttttttgatttaattttgcgaaattttttttgtttatttttgttagttttggcgacaaactttttataatagaaaggtattttttgaatgtgatggggtactatttgaaggcgttataactttattgtctaaatttctgaaagcacatttgtcccatgtggctcgcgattagaattttgcaactcatagtttgtcaaaatatgtcttttaattagacaatgagctatccaattcgagaaagttctacaaccaattaaaacttgctgcattatttagtaagtatgaaacgtaacaaaaattctatatcaaacataaaaaaaaaagttccttttaaaaaaaaaaacataaaaaaagtttttttgttttcctaaaaaaaaataattaaataaatgattaaataattctctccttttaaaaattattggtcataagacataactacaaaattaactaattcagagttttataacaacaacaataataataaaaaaagaaattgtaataatgagatcgaccgatatttctctccattcattcagatatttctcttctatttcttttttatttataaaaataataataaaataggcaaaaaagaaaagaaaaaaagatgattctgttccattgtgtgtgtgtg

SEQ ID NO: 168479 - DNA, 1256 bp, Cannabis sativa
tttttttttttttaatttacaattcttaaatatatggtattacattatgatgttggacactattaaattacatagtagaattgctttaaaccatcaaagtctttatttaagaaaatgtcaaagtagctttaaagaaacatctatgtaacttcctttctcttatcagagtagctttagagaagtatctatgtaaatacatgtctttattcttcatttttatttttatttttgtttttgttattattattatagtttgatattatgatagtttctgaaagtggtctcttctctttcttaacatcaaaccattagtcaaaaatggtttttgtagctttttatgtttctcttttcattttcattttcgtgcagtatatcatagatgtgaagttgatgaaactacacatcaaattatgattttttttttataatatcttatcttagctacttttctttccttttaaatttctgattctcactcattggcagtgctgtgatcataataacagaagtcaagtccttaactaaggcagggtgatcttctatagcatcaagaatttagagtgataattaaagtagcatatatagttggaaagcagtctctagtggacattatattattatgtttttttataataaaagaaagactacaacatttttttatgcaataaatataagcatgttcccactaaattctatttatataataaaatgaacagatttcaaagtttcatctctcatttctataggcctttggctctgtttcacacatgaaagcacatgtaattaggtactaaatttttgtaaaccatgcagagcaaagttaattaattagcattagcttaggaataatattttacactattatctataaaacaaaactcatatcatgttctacactcactgagctcagctctgtttactacactctcactcatattatttctctcttttgaatttattttgtgttgatcaatcaatcctttctgagtttttgaagatctgatggctgctgaagtggttggaggagcgcttctctccgctttgcttaatcctttggtgaaaaagttaactactgaggtcaaggacttcttcaaaggaaaagatgccattctgaagctgttgaatgagttaaaaactttgctgtcttctgctgatctgctgctcattgatgctgaggagaagctcatcaaagacccaagagtaaggaagtggcttgatgatctcaaggatgtcatttatgatgcagacgacttggt

SEQ ID NO: 168480 - DNA, 963 bp, Cannabis sativa
atgaagcagcccttatcaagcatgcttggtcaattgctacaaaaaaaaaaaaagataatctatggattaaatgggtacacagtgtttacatcaagcaaggagattggtgggagtacaaagctcccccgactagcagcttgtattggagaaaaatcgtagaagcaaaggatagagtgaaaagcatcaagagccaaagagatttcacagctgagaaatactcaattgcagggggttacaacatgctgcaaccggtttcagagaagaagaagtggagtaagcttgtgtggtgcagaacaaatgttcctaaacacagtttcattctgtggttagcaattcaggacagattaaagaccaaggatcggctgtacaggcacaacgtcattgaaaatgcaacttgtatactctatctgcaagctgatgaaacagctgaacacctgttcttttcgtgttccttttcacaggtattgatagatcagatgaaggcatggctctcctggaacatcaatgcaacatctcttttggagatttcaaagaaaatagagaaggggaggcactcaaaaaccagaaagcaggtgttgagtgcaacagttgcagcgctggtgtattccttatggattacccgaaatgaaattatgtggaatggaaaccatcaatcgcactctactctgatgcaacagatcaaaaaaatggtaaagaatagagtgtgtagatattgtccaaaaaaatctacagcaaaggataagaattggatagaaaacttgtaaaaagaagttttgtgtaattttaggaacacacggctgcatattgtacagtagtatacatggaggccttttaggtgctcttaggatgtatttgattgtttttggagtaatgaaatttctgatttatcaaaaaaaaaaaaatgacaatccattagggatttgtcccaataaaaacaataaggcaagttagaccaacaatgaa

SEQ ID NO: 168481 - DNA, 1953 bp, Cannabis sativa
tgcatatgtgatggcttgttttagactattattgactctccactttttcctattttctaatgaaaggccaatcttcaaggtcaaaagtggtgaagaaaaggtttcttatatcttaaggggtgttaggagaaaataaaatggatgatttggtaaagttaatggcctgactaaaggcttaggaatagagctgaaagatatcccttagagagctacaagagtccctattagtagagcaaaaaataagactgtcatctgcaaaaaaagagatgagaaatagaaggagcccttctagatatggctacacccttggaaagaccctcagtttgacgagcatgaaggagagaggataatccctcagcacagagaaggaagagataggttgataaaggatccccctgtcgaaggccccgggaaggtttaatcgaccctttgacaactccattgatcaaaaaggaaaggctagaagtggtcacgcacttcataataagggaaaaaaaattgacagggatattaaaatgaagcataacactcttcaagtactgccaattgaccctatcaaaagccttgatatcgagctttaaggcagcccaaccacatttaccatgctttcgagagttgatagcatgaacaacctcctaagcaatcaaaatattatcaaatattactctcccaaccacaaaagcactttgaaaaggagaaataattttatcaagcaccattttaagccttattgcttacactttagaaaaggaccttataaaaggtggtacaaaggcttatgggcctataatctttaagggtgctggccctttatttttcaaggataaggacaattaaaatggaattgacctcagataaatcagtctcattgttcaaacagtctaagacagcatgaacaagatcggtaccaacagtatcccagttcttttggtagaaataagcattaagaccatcaagacctggagctttatcaccagagagcaagaaaatagcctgtcggacttcatcaaaagtaaaaggctgacctaataaatcaacctcagaatcctcaagagggggacccaaacaatcaagaatgtgattgactgcctcagtatcacagccattgcaatggaaaagatccccaaaataagagatgattaaatcactcatatcctcaagtttactaaagacagtacctgttatacccaaaatttggctggaggacacgtgtcgagataaagggaatgtgaatcggtgcaatagctttttatgtaaataactcattaattacataagtatcagagtatatttgtaacctgctgactgtgaggtcttaggcgagaaatcaatgtacaaactagcacttagtgtattagcgagaaaccatacattgctaaatgcaaatagcaaggcactagagaaagtgacacataccaactttaaaagtccttagcttgcaataagcaaactaagtgtaaaagttaaatcgactcaaagaaaaagtatgcgagatgaccatctcgctatgggaagactttctatagcttcattcaactaacaggagcgaggttcacgaccctagcgagtcaaaagatttctttataaataaatgtgatcaacacaaaacatacatcgtcgacctcggaaggaagaatggccccagctcgctattgggatcactacaatcaagtttctatcgagacatctctagattcaacaattacagatgtgtttaatacacgacaattttgacccagtaaaagtgggaaaattacaactatacgattttcaaaatcataaaccgcatttacatttcctaatatgtaaaattttaggataattgctgtaaacatattctcgtcaactttataattactgcctactatgtaattataaatagtggcgaacaagctcaaaaaaagggacaaaaaaaactcatatgaaagaggccctaaaaaaatactcagaaat

SEQ ID NO: 168482 - DNA, 2284 bp, Cannabis sativa
  modified_base (1184)..(1187): a, c, t, g, unknown or other
  modified_base (2205)..(2208): a, c, t, g, unknown or other
tctctctctctctctctagaagcagcaagaagttgagactttttcagcttcatctttgagtaacctagcaagattagagtgtatccaattcaaggtaattgttctagcctctctctttgtgttttcccaagctcaaagatagttttgtgcatgatttttgagggtttaggtactgtggtgttagaaagtgtttggttctgtattcagaagttatattatagttgtttttgttgaattgagcttaatttaaagtttgttaaggtgattgagcaaggtttgagtttatgtactcaagttttgctctttaatggtggtttttgattcttgatatgttgggttgttttgttgcatgaattatgtctattatgatgtaattaggtattttggaggtatttgtgaaatttagaattgaattgaggtatttaggagattttgggtgtttcctgcactaaaccggtcgactagtttagtgggacctgtaggaactggaatttcagtttgtccctaggaaccccaccgaaccggtctgctagttggggcattttaggaaaccctagttctcctacttttatgatatttagggtattgccatgttatccattgatagggaaacttttagtttcaattttaagtctccaaaaagcgatttagcatatcactcaccagttttacgaataatgtgatttaggggcctgtaaatcatcaagcagcagttctactcaggttgaccggcacacctaatttcagaagtgaggtaagattagtataatgatatgcatatgtgtatacatgtttagcgtgcatgttagttaagtctattagattacattagaatagcggtatcagtatatttagtattatattggatatcgattaatgtatgctggcttaagtactatttgacagtatcagatcggtacgactagagtatgactagcgtaccgagtataggttgatattatggtcaatagtattgtactacttgacaatatcacatcagtacgactagagtatgactagcgtaccgagtgtaggctgatattatggtcaatagtactgtcatttgaacgttcttgactcagtaccatgtaggacgcggagaagggttatggttgggggtatgggcgcctaatcgtaatcttgtttatatctatgttatgattatgctttttttactgagtctnnnnactcacaaatattgtttgcatgtgtaggttagggcaaagctaaggttgaacagccgtgagagcgagcggatgaagattgtatatgtcggggcagttaggcttggagcgtacggtcttggggacaactggacatattttgtatagtcgctaggcgacaacttttgttttatgcactacgtaatatttgtaaatattttataaacgggatcccaattatatatatgtgttatttattttggaatttataaataattaaataaagttttaattatttacgatttttaataaactcgttgattagcaacgagcttcacaattaagttaaaatcacgataacacgcttaaactagtagggttttacaatttgatatcagagtcgctaagttttcttccgaagatcatcacgacatgtacaatcatcattagcaatcagttcgactcacggttgagtaagcctttattgctttagaagtttattttattagtatgttataagaaaagcatgataggaagcatgttagtaccctgatagccgaataggcgcatgttttaatttctaaaataaggggtaattagtaaattattattgaccgtgatctgaccaggctagttcttggtttcgcgggttgttctattagaatgaacgtcaggcaaaacgcgagaagccaagaggaatggtcagattcagggagttagtttcccccgaatagacgtggccgatgaagaggctcctagaggcaaggcacgcactcaaggagatgttaatctaccgccggttacccaaaattgggaaaacaggtttgtagcaatgcaagccagaatcaatgaacaagaggaagagatcagacgcttggggaagcagggtgctctagaaatgcaggtggctcctgcccctgttgtgcaagaagggctgattgttggagtgaatcggatggaaccgttgtacgaaaggttccacaagcaagaaccttcaatctttctaggaggccctgatgcgtgtcgtaagccacaacaaatnnnntatttttttaattccaatacttccaattattttagtataatcgtaagtaagggtcgattccacgaggactatgttt

SEQ ID NO: 168483 - DNA, 524 bp, Cannabis sativa
agtgggacatgcagaattgagttctcattcggcatatcatattttaacaaaatgtaatgacctatatatcctttaaaaaacactcaaattacatacaatttttatacaatggtatgtgattaatctcaaccatataattttaagtgatgtgaacttccttaatgatataaataactaatatttgtacacattattgtgtgtaataagtgtacaatttaagtgaacaatacacatcattatgtgtaataagtgtatattcattcaaatttgtatatttgattattgaatataaataagcttagggaaagagtcaaaaaaaaaaaaatgggagtgaactaatttctaattttgtataagttataattataatatttttatatgtctatgtataattgtatattgtaattattgtacttttaataaatttttaagaaactttaaataatttattgtccaataaggttttttgtttatgcgtttatgaaatgtgttgattgaaattagatttcaacacaataaggttt

SEQ ID NO: 168484 - DNA, 634 bp, Cannabis sativa
  modified_base (605)..(609): a, c, t, g, unknown or other
aaaaaatactaaaagtatatgtatcctatttctagttgggtggtatattaaaagaccacgctttacatttaagcatgctaaaccaaatttccctttactttgtctcttaatctctcacttgatttaattatttttctttcttaaaaaaagaaaggaaaaaaaattaaaacttgataaatattttcaccaagggagaagatgaaagtatgtagtattataaatacaaggggagctttttgacacgacatgaaatccgtacaaatatgaccagacatgaaaaaaataagtttgggtatgataagacacgatattataaattggcattacacgacacgacaagtccaaaaggcatgcatgtaagcacaaatagtctagcttaagcactacacgaggcatgtcacgtaagcacaaatgctctagcctgaaactatgacatgttaaaaaccttataattttataatacttgttcatctcagatttggcaaaccgaaagtagaatcgtatttcatgatgatgctttccacatgttacataataagaataataaagttaataaacacaggattttatagaggttctctaaagaccgcttagctttaatttgnnnnntagcagataattagggctttattat

SEQ ID NO: 168485 - DNA, 711 bp, Cannabis sativa
tttttttttgtaggagaaatacgaaagggttagaacccttattctccatcttcttcctcctaccttcttcaaccaaaaaaaaaaaattacaggcagttgaaacaaacccagaaaccaaccccaaatttcagaaaccaacccagaatcccttattccttgtctttagtgggcgtttatgaaccaattttttaattagattaatattgttctaaagaaacaagatactgctgttgttttcatttgaggatgttttccagccgtctgacgcatacgatctacatcagaacacaacagagttgacttaatgaaactcccaaatcaaaatagattaaattcttctttttttttccatagcaaattaaataacatttcctcttacaaaattcccctaaaagaacaaaaatatgtcgcttgggattttggagaggcctgatccaatctgaaccaatgggccttctatctcggttttcttctaacaaaatttccctttctgaaacggaccgaagagagaagatgaagcgaatggaatttgcggttggtttttgcgtttgtttcaaccgcctgtaatttttttttcttttggttgaagaaggtagggtagggatgcacatttctcgcagggactcattaggggcggggattccccgtctaaatggggaacagggcggggacgaggattactttttgtctccgaatgttaaacggggcggg

SEQ ID NO: 168486 - DNA, 1397 bp, Cannabis sativa
gaggggaattatggcccctgccctaatatgttcaaggctccaggcacctataccagttgagctgctggtactggtctcactggctccttcagaggcctcacctataaggcacgtaggagggtaacaactaaacttaccagcttgcattgacctaacttggcatactcgctcatactcgattccacaggtcctcagtatatcacctgtgtagcctgagatagttcgcacctttgattctattaactcagcctcaaaggtgaagttaggatctggggagtctttgatgtacatggcttgggagattttatttcaaagtccaagtcacctggttcaaaagcaatcgtaactttgggtacaaacaaaggcttagccaaaggaatagaggacacactgggagattctggccaagctacatctcacaagaaaatggcgttttccttcgatgattgcttgcaagaagtgcctgtggcgactagcattatcttcctgatgaactttcacttagtgttccctaaccctaccattgtttaactttcatttggatgtgggttttgaagggttgggtttataagggacgactgattctctaggaagttcaagttctaaatcttctagacgataaattttcgaaccagattgggacattgctgtaagaagaaagcaatcccaattcctggaaagaattttatcaaacctgaaggtggtgagttgaaggttttgaaaaacctacgtattgcctaaatcctaatattgacccaaataaagtttgaccctaaaagctactaaaaccaaatgagacggcaataatacaaacaaataatgcaataattaaacccagaaatgcagcataacaaacataaaggatatctagaagaaaagatacttactgttcaaagttggggtttgggacaaaatacagctcttcggtctgcgaatctttagatgtggtgagggtctcttcgagcatgtggagtcagaatttaagtcggactgaactcgcagaaaaaatgtcaaggacaaagatggcatgaaaattctcgagcaagctcgatgttggttttttagaaaaggagcttaagagtttttcaaaatttctaaaatggaggacataatgcaaaggtggttcctttttcttaatttatactcttgaaataggttttgtcgaattagagagatgtttgatcctatggacagaattcaaaatggaagtggaaaagatggtcatttaatgctgatgtaccttgaaaatgcaaaaccgcccaaatcagaggacatgcattttatcaaaaggaattatgacaaatataccctctataatcattaaaaagtactttttattaaaaagagtttttaaggggcaattgttatacccgaaattcagctaacacatcagagga

SEQ ID NO: 168487 - DNA, 823 bp, Cannabis sativa
aaactaagcggtctttacaactctagacttcacttcttccttcctgcggagcgtattggatcgccatctataagaggtgccttggaattgacaaattgcacccttaaaaccacttggtaggcatgtgtataccgcccaagtgttaaaaattcctacatgggtggcatacactacacccaagtgcttcactttgggcttcttgaattttgattgtcatcttcttacaggttgtacctcacatacctttttcatgatgacatatcaattcttaaattacgtgtcatatcatttagtcaaaatattcgataacgggaccctttttatttaggaccgaccttgcacgtgttacaaccatagaaggagatgtcatgacgatctggaatcaataaagcgcttcagtatggctcatgggatgtttaccttaaaattttccttcatagataaactcttggtgaatccaattggttagtctagggagataatcccaatgttttttttttgatgcgtcgatacaaaatcgacgataataagtaaaaaaatcaaatattttattttggtgtcaattgtaaaccaatggtaatgatctgaagcgtctgttatgaacggacacaaaatatgtctaattttgtgtcggtggtacatacactggtcttgagaaccgatggtaaaaatataagtgtctatttaaaagtgatgcctaaacgcattttttagtagtatttaacaatccattcatcaactctaccatcaccaccaagactattagcccaagatatgtttccaaaagaggtgaattggaaatttaaactaatttcggtaaatt

SEQ ID NO: 168488 - DNA, 1546 bp, Cannabis sativa
  modified_base (1509)..(1517): a, c, t, g, unknown or other
ataattatcatggttgtttgttgtgtggttttcttttaattttaagatttttttttaaaaaaaaaatgtaaattaggatttttacctttcgaactttgacatgtaccaaattatgccccctgaacttttaaggtcgttaataatgccccctgaactattgagattgttggatttaagaacttttatccaattttaataaaaaaaaaacatggatgaaagttcatgagacatgatttagtacatgttaaaattcgagaggcatgatttggtagatatgaaagtatgaggagtatgattagtacataaacaatcattgaaatagtaaattgaatgaaaatagacaaaagtctttgaatctaacaatcttaatagtttaaggataatttttaacggtcaaaaaaatttatgaatcataatttagtatatgttaaagttgaagggacaaaaatcctaattaaaaaaataataatgtcaggaataaattatcaatgcgtattttttcttttctttttaacatatgtgcaaagatgtatcaaattatttttgaaaaaatactaagctattgtaagtgtatattttgtatgcacgtacgtcgggggatggtgccttaatacccacccaaactcaaaaaagcacaccgtttctttttacaaaaattagctggtgaaaatgacaaacaaatcaaagtgattaaagctttgaaaatgatgatggtattggtaccaaacatggcttttatttatttatagagatatattaaaggatgagaaactcttggtggtgctagcttaacacgcatgcatctttccatgaatgaaagtgatatatgatgatgatatgggaaagccaaaaagtaattatttatgaattaagtaggtttgatttattcataatttgacatgtcccggcgtcgtttttctccacatatataatttaaataaatttaaacttcctctaatgatttgttgcaaccctaacttaatttgagagtcttcacatattgttggtctaattttaatttgttattttaatgggacaaatcccaaaagattatcatccgttaaacaacataataatgttagatctcgatagataaatatttgtaaatgcaacatctagttgtccatccaaagatgacaacttagactagtatttactatatgaataactttgactctcgcatactgggacatcgttggatttttattttaatcgaaattatcctttattttttctcttagctttctcattatgaaattgcgtagatagtatatcgttagataagaaggattataaatcatatgcttatgatgtcatcctgttttcttctatgaaattgaatgtcgcatatgattatattccaaacattttatctcgaaatgatataaatccccgatcttaggaacctcctacttgtattttactaagggaaacttagacttagagttatattagtagtggtggtcgaagaaagaataataactcaagaaatatttggtataaatttannnnnnnnnctttaaattttagattccaaatacaaatt

SEQ ID NO: 168489 - DNA, 789 bp, Cannabis sativa
aagggcttaaaaaccccctctaaaaggggtttttttagtagtgaggcaacaagattacctccaaaatagatacaatagcttgaggttaagcatttgtcatctggatcagatgccaaatgtgcatcacaaaaaacatcaagagaaatatctaaaacttgcctgagtagcagaccatgatcgtgagttccagcaatatatcttagcattcttttcaaaaaagcccagtgtgtgtgcaatggattttgcataaactgacacattttatttacaaagaaaggcaacttattaggtcttataattgttgcatattataagccaccaacaatggaactgtatagggtagcatctttgacaggttcacttccatagttagatagcttaagaccgctgttcataggagtgttttgtgtgttcacattctgcatatcagctttggtgaggagatcttgaagacacttggtttgcgtaagtaaaatactagctggtgttttggtaatcaacaagacaaagatcttgaagtgagaatgttgagcttaggtcatgaataagttgttcaacaagagtgtcatccatgtctatgataagaatgtcatctacatagacaagaatgtagatacatgattaagttgtgacccttatgaacagagactgatcaacttttgaaaattagaactcatgttgaaccaaagatgtagacaacttctcaaaccaggcccttggtgttgggttttgtgccctaaataaaatctatttcaatataatcagataatttactaattaataaagatc

SEQ ID NO: 168490 - DNA, 566 bp, Cannabis sativa
catacactctccaagggtatggccagccgacccctatctcttcaaaatttgtatcctccccaaggagggtcattcaatcaagtccccatagcaacaaatccttttgtccaagcacagttgaaaacctcagggacatgatccagggcatagctggcccaaagccttcaaagcttgaacttgttcggtcaaggagatcaccattctcagtataaaaaaatgcctcatccttaccaaagttcataatgccggtatggaagatgtatactgaacgagaagacccgttggctcacatcaaatacttcgagatgcaatttgacctccagaaggtcaccgatgatgtgcgttgtcgcatattcctagccacactgtcagagatagcacaacaaggagagtctgaagatttatattcagagatttatggcggaggcaaccaaagtcaaaggccatactgaagaaggccgatgtatggccataccgggggcatactcccactaagtgacttctggaaagatatctggaggatatccaccaacaacatgaaagagttcctcgatagagctgatggc

SEQ ID NO: 168491 - DNA, 867 bp, Cannabis sativa
gccatactgcatgtaatttccactaatagtaataacaatgtgatgaaataagaataatactaaaaattaattaccatgatatttggtttgttgttagttattttactttttctttagataatcatttccaatgtaatcatcatagcacaactttcttagtgaaataagtgttatgtaattttacatcaaccaactgattatacaattataaaaattgaagagtggatttgatagtgttgaaaaatgtttgagatgagatttttaagtggttaataaactttaatcaatgagtcacttgtattgatgaacaagatcaagtttactctctagaatttggcagtttatagacttaataccaatgagagaaagaaaaaagtctctttaaatgtaatcccttagtcctatttataagttcttatgaagtttatcttttattcgtctaaatgctttggaagaaaataaattgatagacataaataaagcataaaccgttagcagcggatttgtcttgtcttatctcttcaactttatttaaaagactttctaacatatcacatcaactttattaagagttgtgtcagttagtgaatatactatcatttttttttttttgtcttaacaaaaatagtgacaacaataagaattagtatattatatatataatataatcaccattacaatgtaatcctatgacatttttaaaccaaaccaaatattataatgggcattttaattctataataacacgcctattataacaaaccaaacatactcttatgcagggacggagggactttagggctaaagccctcactcaaatatatacatcaaattttttatatgtagatatatacatatattaattca

SEQ ID NO: 168492 - DNA, 1941 bp, Cannabis sativa
  modified_base (997)..(1002): a, c, t, g, unknown or other
  modified_base (1330)..(1339): a, c, t, g, unknown or other
gaaattatttacaattgatcatcacaataatgtcattttacagaaaaattagttgcaccaactcattccttcctaagtgctgtattttttcgttgataaattccttgtaaaagtactttaaaactttgtgattccttataactttaacacaaatagcggtatttttgtgttgactaaacctttctcgaaggtataaatataatagtatatttgtggtttcctcttggttggattagtttgattatgccctgcatcactacggtctcttatgttaatgttaatgaggatattattggtaatattatttcattttgagggcttataaggcaagaagatcctcttttttcttttctcttcttgatttgtgcagagggtttgtcgtctatcattaattaagtaggaaatcggtttgggtaatatctcgggtttgacttgtggtataataaccctatcacttttcatttattatttgtggatgacgatttctttttctagaagctactttggaaagttgttctcgttttaaagatattcttcactttttatgaaaatgtatcaggttagatagtaaatttgaacaaatttgttgtttgtttcttgccaaggatgtctgggaaggattttgatactttggctcgtacactcagagtcccaatggctcttttgttggaagttgttttaccagaatctaaatttactaacatgtatatttgattatattctataatctaacacccaaaatatgaatttcctaaaacaacaaattaaacacatataaagttctaaaaaaccttacatttgtggtagcagaatattatggctcattatgttcagatctctaacccttgttcctttctatcgcagagtaataacaagatctgaacctgaatcttcttcaggtgttggaattcttcataatcttcctgacttgatatgagtgggtaaagtactctatcactatagggacttcaaaattatagagagagagagagagagnnnnnnagagagagagaaagagagagaattcgaatagagaggaggctcttttatctgacaaattagactaaggagctcatattatcaggggtgtcaggttaagagcccattactatctaattataggattccttctaggattagggtttaaattatatagaataaaaaaaaagataaaataattgctaaaaatagacttaagtggttggccatacaatgggtcccactagtttcaattttgccattttatttcaacaacttatcttttctttcacaaataccatattttaactttaaaccttttaaatatcaaatctatttatttaataattannnnnnnnnntcaaataaaattgtcatttaacttttttattaattagaccttacaaagtctcttaataataaataaacctcaagatctcttttcttctcaattaagctcttgcttagtgaaaatttataaataagacatagtctaattagaattctaattggttaattaaaaccaattaattgagtttacaaatcaatattatctcaactagtgtggggacaatgggcctaaataatcaacttgacttgcctgttgaccagcctatgtcacttgtagaccttttagaacgttgttgggaaaatagttacttgtattgactggttggacattggggtgggatattctgtccgtcttatccccttcttcgatttagatcatctcttaggtcgtgtacggtgcctaatcagttaaagactggttcacctagaagccttcttgtctggatgttatcagcagttggctggttcgatatatctatgtgacagtcaaagtctcgtggtccgaaagggaaagattgggagttgtacatcacacatcacctggagaaggtcatgtgtgatgattctgagactgtgtaggtatgggaatacatagttaaagagggcttaaat

SEQ ID NO: 168493 - DNA, 510 bp, Cannabis sativa
ttctggaccttgatttccctcatggggttcgataacttcttctccgaggcctgcattttacaaccccaacataaacaaattagagatccaggaaaacacaaacaacatcggaatctaatagaaagagatagaaggatgaagatcgagtgagaaaccacaccatttcggtgtctctgaagttgcagcggcgaggagggtgaactggaaagagagggagaagaagttagagatgggagaaaccctaatatgtgtattatgtatactatgatatggagctagggttttgatgggccacttcaagtagggtgggcaaaatcgtcatttaagggaggaatatgtcatcttattgttttgggctgtaatactctttgggctataattgagccttattgggctgatctaaagcactctcctctgccttagcaaaaaaaagaaattttcacatttgtcacctattttttataattttaattaaaagtaatcttataatgttttctttttttttttttt

SEQ ID NO: 168494 - DNA, 633 bp, Cannabis sativa
aaaaaaaaaaaacactttaaaaataataatatgtgttgacagcacaatcgccgacttctatagggttttctaaaccaatttttcttctgttcctacgattcattctcttggcctctgatcgtgtagctttcactctctcactcttcgtatctgtctcggcctctgattgtaattttcgttctgcggtagctacttatggtttcatctctgtttctggaaaattgaggtacgctgatgggttcttctctagataattgtgtatatgaattatatgattttaacaatagcataagctggttattagatttgtttgtatctcgattaggtaggtttaaaatatatttgtgttaatgtaatgctagaaatgcagggcatttgcgttttgggattttgtttgtgaaggaggaaaaggatatagaaatatttttgtttggttctgttttttgctccttttttctgaaagcattttgaatcttgtatttcttaccatatgtattaccctaactaacatttatgtggtataatcatatttaacgcatctttgaaatttgaccagaccccggacaccattaggttgcgtttggaaagctaagaaagaattgaatttgggtgtaattggaggtaattacacaa

SEQ ID NO: 168495 - DNA, 556 bp, Cannabis sativa
taatatcacatttgtgttctttctacctatcattgcatgtgaagaaaattttccaatatacaatgaaggtcaggttgagtttgatagtggtcttccggcttccacaagggaaggtttttgtcgcactgaaattcaagcaaaggcttcacgcttacaactgtaggtgaagactaagttgggtggcaaacttcaagcggttcttccttctgaaagggagggttgaagtcacgtcggacctccaagcaatatctccatcgaaaagtttggaaaataatccctaggcataacagaaactgcacggtgaaggtacacgtgcttgtggaacccttgttgaattgtgtggcagactttggcttccttgaaggaaagttgaagccgcactaaaactcaagcagcgacttcaaattcgagaccaagggtctcaaaacatcactgggcgtgtggtagacttcaagcagtctatctcttcccagaaagagggttgaagtcatatcgaacccccagtgatcattcacgcacgcaaaaacttacatgcctgcgagaatcatgttgaatt

SEQ ID NO: 168496 - DNA, 1052 bp, Cannabis sativa
  modified_base (1007)..(1022): a, c, t, g, unknown or other
atgtgctgggaactaattgtggtaattgtcttcagttgagatccttaattcagttactctgtaagaaatgtgttatgtggtgttgattgggtaagctaaactaattgctgaagacttaagtgtcgatgttgaagaaaagtacatactcgaaaactattgcatgcatgctcttaatcagaatatttttgcctgtaaaatgagatgaatcttctttggttcatacttaacagttgacaatggtactcgacaaggacttgataagtttctggaggctgcaagtagtgaacccgaaacagttttgcattatgaatttatgcaagattataaggtttgtattacaccatcctttctgtacttatgaccatttaatatttcttaaatactgaaaaactgttcttgtactttaaaaggttcatttgaagcatctcgacggtcacattgaagaggtaacaaacacaatcctagtaagtttaatttggtctttagtctcccattatactgcttcatccaatttcaaaatgttaatcgagcaggtcccttatttctgtctacccgcaaatgacttagttgacgttattgcaccatcttgctataggtaatttcttgttatgtattttgcaatgcccttggtgccattttgatactactaagcagaaatcaaagtgttaactctcatatcagtttgtgtcaattatattagccaaaagtgtctacacaacagctcttagttgttattcaatttaccataagataaagaatcaacagaaaaagaagctttttttattggatagttccttagtgcctacttcacaaacagtggcattttattgttagaataaataggatttatcttccgaactattcattctacttagttatgccctttctgttagttttaatcctacatggctaacgaaatgcttatctgacattttgttagtgccaatatggcatgtcacgtcaacgccacatgtataaattcaataaaaggataaataccattttgnnnnnnnnnnnnnnnnaaagttaccaattggaccctgtgttttgtt

SEQ ID NO: 168497 - DNA, 535 bp, Cannabis sativa
aaaaaaaaaaaaaaaacccagaaacaaaacaacttcctccttgaatttaaaaggtagatatattaacattatgaattttaaatattaaaaacactttaatcgctaaaaaaagtaagacaaaaattaattcgtggataaatgcatacaaagtaaacgtgacagtatagaaggcttacgtagaaaatattttcccacaaaagaagtgtatcataagaagaacatgtcattacctaagtcctaggtcgtgacagatatgtaatatcataactagggtggtcaaatttcacagtttgacccttgtaagaagataacgctaataaataattcttcaatttttatatcagaaaataattatttaataataatagattaactcctatatcaattataaaatattagtaataaaatcaggaccactcatcaatataaaataataataatatcatcatagttatgtaatcactgaatagatagatttaataagtcaataaaatatcaaaataatatctagcatccattatttctcatttctaac

SEQ ID NO: 168498 - DNA, 532 bp, Cannabis sativa
agaattagtagtctgactacgttgtgaaaaaaagagaagcacttttaatatctgtacaattgtaccatactcaataaacattttatcattacttgagatagcttgcaccaagcggagacaatcaaagaacattgtaaaccttaaataaccaagcctgagacaaagaagaagatcttgcaataaagtcactgcatctgccagcctgattaatcaacaccgccccaagcccaacccaatcattcagtcttcatttatccacaaatatagattgacatcactcaacaccaaatcagtatttgagtttccatgagaaggattactcgcgcgtggaacacttagtaccacatccggagaccgaaagaatttgagaggctgtttgactttataatttaaaaattgttttctgttttttaaaactgaaaacagtttttaaaaactattaggagtcgtttgccaaaaatttttaaaaactattttttaaaaattgagttttaaaaaattagaaaataaaaaacatcaaaatattgttttt

SEQ ID NO: 168499 - DNA, 637 bp, Cannabis sativa
aaaagttcaggcttctttgcagctgaaacaacttggttatacataaaggctaaattggcattaactcgttcttgtccttttacaattcccaactcttcatcatagttcaagtcaacaatctcatcaaaatgagtaggttctcgttgcgaatcatcgaaagggccatcacgaaacattttgggaaaaaccatggagtcagggctatcccaattccaaaagggcaaggcgaagttatcatcacctattagatttcctagaattcgttcatggaaatagagatacatacggtggaaagcaaaaaagagccattgacgatggatgttgaggttagttgaggagtgtttttggtgatatgcaccagtgcaaaaagtgcaatgaattgaagcttggcgagtgaagcttcgaggatcggtatggggtagggatttcataatggtgagagctttggtgtatttggtaatataatcattgttcacgtggtgggctgagcggcgaactcggatgttattcaagttagggaattgaaaatcgatgggtgtagtggttggttcattgtgtcgacatcctatcgatacacctacgacatcctatcgatatacattaacaacacagacaattttattggtcaaactacttt

SEQ ID NO: 168500 - DNA, 1254 bp, Cannabis sativa
aaaaaacataaaagagatggtgctttttaattttaatgatgttcatttaggtgatggtaacactttatttttttaatttgtaaaagtaaaatttttggttttaaagtgttttataattatttttgttttttaattttaaaaacataaaacaaaatcatttttattttttaaatttcaaaaataaaaaacataattttaatttttttttattttttaattaaaaaattaacttcaacctccacaattcataataatacaaaatatgaggcatgaaaagacatgtttcaataaaaaactcaaagacaatttgtttttactattttttaattaaaaaattaatttcaacctccaaacacatatatattgattggattagttgtgtatttatctaatattttaaatttagtattttttaatcagattagatttatctaatattttagatagtatttattggatcgagtacataaaaaaaaagtaaaatttttaacctaatctttatatatacgtgtatatatatattttgaatgaatatgcgtatatattttaaaatatagcaatataaaatttaattactcatttaaattaaataaaaatactaattatttcaattagatattagattaccttctccaatttttgattcgatccaattagatattagtaaataacaccataattcattcataatttaatatttaatatttgacagtcggttgtaattgaatttgatcgatttatgtaacccctacataggcttaggcactgtttggctaagcttctacttttgcttatagctagaagtataagataagtataagttttgacttatttttatcgtttggataattattatatgaagatgttttttttttttaatgaaaagtgattttcaaagtgtttggatatcattaaaaaaagaccttttgtgagtaaattaagaattatgtaaattattttaatgttcaaaatagtttctcaaaagtttgtttaggaaaagctacaaattttagcttcttctaaaaggacttttaaattaaaagggacttttaattttttatccaaacattcctaaaaggatttttttaaggtaaatagcggtataagtacctaaaatttttaatttgtacacggcataaactcaatatttaatttaagcggcatgagtacctaatatttgtaaaactataattttctttcaattttgtcactacagactctgttttgaatttattaaagggattatttcacaaa

SEQ ID NO: 168501 - DNA, 733 bp, Cannabis sativa
aaaaaaaaaaaaacttttaataaaatgcaaacactttaagcaaattgttaattttttattattacttaattggaatgcttcaacaattttttttcgtaaatattattactatattgtagtaatctaatactatctttctctttaaattattgtaggccgttacaaattttttgtactatattttaatttgttatgaatgaaagatgctattattgttttgctcgctttttctatatttatttaattattttgtcaaatgtttatttattcattattatttttaaaagaaagaattcttattaaacggtaattgtcgaaaagaagagcaatagctcaaataataagaaatttcaagccactaaaccatagtagcatctatggtatgtttactaataagtaatggaaatcattagtaaaataatcattcttttacatttgttcacttgtattattaaaattaagaaaagaaaaaattgattaaataagagagaaaataaagggagaacttttccactaattttataagaaatgccattaaaggtaatagatttttattatttttattttattttttaatattaaatatataatgacaattttgtcctttaaaatatgtcttacaaaataattaccatataatatagtttaactcaaaaaagaaatttagttaatttaagcattccgattacgtttcctaataaagtaaacaagataaatcacaactattccattt

SEQ ID NO: 168502 - DNA, 1569 bp, Cannabis sativa
  modified_base (1516)..(1519): a, c, t, g, unknown or other
tagtcaacctcgagtactctaaaacacttcagtaattctaaaagaaacttcccacaataatctcattaaatcactaactaaactcgttgtgatatttttggcctctaattgggtctccaaggtcgccaaacttaaaaatatttttattccaccaataactcacattatacccaaatattctaaataaatctccgtaattaataaattacacttatttatccacttatggtaaaattcataatttacgctgaattagattagcagaatcataatcctattcatcactctctaattaatcccaaaatatataataaattataattaagtttctgagatattacaatcaactcgataaaccaaatcttatgtaattttatttatagaaaaagacatcacaccaattttgataaaattctcaaaatttattgtaaaaaatggttcaaataacttattttataaatatataagggtaatttgcagctaaacttctcaaacttttaagtttggcacgatcaacctcctatgccgaaataattagggctgaattccccaatttacataatcgttttgctctgtactccttccatccactttagtttgttaagtggcaaagtgaactatcactgtgtacacaagcgtacacgtggaaaaatttcatcggtaatattaataattaaaaattttaaaattttggaaaaatattttttcctttctcttttttattattcttctttctttttcctcaactttttctctgtccctctctttctctcctgttacactaccactaccattatgtaacaccctaaagtttagtaaacggattagcaaccctaactaagttaattaagtattaatgagaaattatattactatatgatttaatatgtggaattatagagatttattgcattttgagaccatgtttgtgtgttgggagtatttttgtaattttgacctgagaagggtcaaaattataatttcacataatattgtgtttatggactatattattatatagtatgtttaatttgtctttctacatgtgatttttgacaagtcggcacggtatagtcacaatcgggtattttaggccaaaccaggttcagggtccaaaatatatttattggatttagttatggcttatatgtgttaaatgagaaaatatgaattatgtgatatatgtgtgtgagtgggaatgacaaaattacccttgtatgttagttgtattgtgacagttagtagttccgtgattaaataccgggtaagctgcgcaatcccacattgtttggggaaaggtcaagtgtgatgattctgaggctgtgtaggtatgtgactacacagttgatgaggacttaaatggattgattggtactacctatatcaacaaggtgcatcttgtttttcggtagtccatctcaaaataactctacagttaagcatgcttgacttggggtaatttcaggatggcttaccttctgggaagttttcccaagaagcgtgcgagtgaggacannnnacgctggaaacactcgtgttagtttgtagggccagtaatcagtccatgaa

SEQ ID NO: 168503 - DNA, 981 bp, Cannabis sativa
ttttttttttttttttgcatttgagcctaattaacggttgaatcagcttttaaataatatttgagataaatatgagatttttagttgatgagtcttttctacgttcgaactgttactttatgtcatttctcttgtaatcaattttctgggttcatttcacttgtgggtgcttgaattttttgagtttaggaatataattaaatttttggttaagatttcgtatcccaaaaagtggaaaacggagggaattttcattgttttgtatttggaattgttctaacttggctttgttgagctttttacttttaagaaattgagcttttaggttgaataataaattaaagtgttcaaattaatcaaaacaataattatcaattaatattttctttaattattttatattcatttaggaatgagaaggaaatacaaagaatagagtttgaaaaataagatgactttcatgtcatcagataaaaggtaaaaacaaaaaatattaattttaaaaaaattatgaataactataaatatcatttgatcaaatctaatggtcaataatttaatacccattcatgagtaagagtgtacccatatatatatttatgtgtaccaacgtatatgtatgtgtgtgtatatacaatatatatttttatgtttgtgtatgtatgtaataatatgtgctttttttttggtaattttatatatgtatttgtatatatttatatgagtataaatttatgtgtataatattgatatatatattttttgttatatatatatatatatgcattttagtgtatgtgtatgtatatatatgtgtatattagtgtatatgtatatgtatttttgtgtatgtgtatgtatatttacatgtatatatggatatcagtgtatacaattatagttattatttttcaattctaataagggcattttacaattttgtatacattattttaattaattacaaaatatgtgcaaaaa

SEQ ID NO: 168504 - DNA, 769 bp, Cannabis sativa
caaggctgcacaagtcgacatcaacttttacttttttgtaccttttacttgatttgttacgacccaacattatagaggaagtgaaaatgcggtactcgaaattatctcctactaatttcccatattctatttcttcctcctcctccattaatatttttatggagaagaagaagaataagaagaagagaattttatctagaatgaattgattatgttttctctcattattctaagtcttaatatttataggtgggatgaaattatgcaatgaatcgtttcaaaacggtgcttaattatcatgaattattttagtattgcacacatgttttacgtttttgcccccaatttaatagtgtatttttttctaaatatattttactctctcttaggtatttttgcacttatagaaagagttttttttagtacctaaacaaattgtatttgatttttttaggaaaattttcatactaaaaaaataaataaagattaacaaaaattataaaaatacggttggacagattttgaaagggaaattttatttttaatgcttaaaaaaataccctctaataaaatttagactcctaattaatttatacaatttaatgctattgttttcaattctacccaaaatactctccttttcattttccttctccctttgtctctttctctttctcttcctcgctctctcttcctttttctcacaccactgagacactcaaactcaagcaccgacaccaccaaccaccaccaatgaacctcttctcct

SEQ ID NO: 168505 - DNA, 864 bp, Cannabis sativa
ataaaaattagtattagaataatggggtttttttttttctttttcaatgaagactagtgtaattagctatactcacttcccgtattaaccaaaatatgatcgatcccttattagcgctttatataatatgcccctcattaacatttctcaaactaatgggtctagtcatgtatatatacacgcccatcgcccattaatatcactaattaagacttaagggacattgctaatatgtactatatagtctaactatgcttaattagtttatataatcacaacattatttatatagaataatttacggcgtatatacttattattacttaagtaaaagattaagcagtaaaaatacattttattataagattctggaacttttgtaagtacctaaccgttaagtgtcaggtcagtagtcacttggaaatattttattgatcctcatcattaatttttattttttatttaaaaattttgtaaaattatttaaaaattaaatgaataaatatatgaaaatttaaatttgaattaaacataatttattaaaagatattatattgtaaaaaaaaaaataaacataaaaaaaacataaatgtgaaacaaaataatggattatcactacaacagatttctatattaccggcggaagtatccgccggtaataaatgcccagaccaccggtaataattaataccgacagaatccgccggtaattatctgccagaaataattggtcgctttaaatggttattagcgacgaaaatgatattccgccggtaataatattaataccagcagattaatagcggtggggtccgccggtattaatatttttaaatattaaaaaaaaacattataatgattaat

SEQ ID NO: 168506 - DNA, 855 bp, Cannabis sativa
aaaaaaagtattaatattaattataaaaaaattagttttgaaacttcttggaagctgcatatatacgtagtagttttagtccaatagtctcaaagtgaataataatcatgaatattattatcttttctctattcattacctaacaaaatacaagaaaataaagatgaaaatgccacatgtttgaatagttttaactatatataatatatatgtaatgcacttgaattttttggtgtctaattaagtacattttttctaaaatattgtaaattgtccaaaaaaaaatcacctttcatatcatataatttgtacccaaaaaaaaataatataagtacacacagagaatatttacaagattaaaaatctaaagttacaatggaaaagtctatgttacaatatttacatattaaatataaaagaaacttccaaaaagacttcttggaatgtttggtaaactaaggtttttaattaatagtaatcactttgaaatttgaataataggtttttttatctaacaattcaaatatattaatttttttcttttccttttcgaaaattgatttaaatgtacacttattaatatttgcgcaaatgaacatatttgaacaaattattatttaattttaaaaatttattggtgcaacacataaaataatttttttttttttcatattctttatatacgtaaaaatataattataataatttcaatttcagaacgataccctgattagattagattagattattaatatttcaaaaatatttttattttcacagttatatctaatattattaattttatataattaattaaaattgaagatagtttcttcaacttttgacttgtgggaa

SEQ ID NO: 168507 - DNA, 715 bp, Cannabis sativa
aaaaaaaaaagataaagtcatgattttcccttttgctgaggtaaaaaggagcatgagtcttgttgtgtatatagccaaatataagcatgaatgagctaaatacaaaaccacttattttgggttgttggctgttccatgcaacactaaataacttccaaatttaaaaaataattcatttatattatttattatatctatttaatattctcaagaatattatattattgaactttcagagtcttaaaagatggacgtttcagtagtgtgagtgagtaatttttatttattattggtaagagaagagaattgaataaagttgttaagtaaacttaaacccatgaaaatggacttaattttctaactaaatagaagagagagaagagagtgctacttaacaacttcttaccataactttttaatcaatctccacttttaaaattttttatttaccatttttattataatattatttttttaattttttaaaatattttacaatattaaaaataaaattattgatatttcaatttattacgcgtgtttaaatttttttaaatttattggaagtataacacactgctattttaacatacgttttcgagaactaaaattaacaaaaaaaaagtaaatactattttagactctgtatttacaaaaattattaattagaccatttgttttgttaaatgacaaaatagaccctgtattttttaaa

SEQ ID NO: 168508 - DNA, 1200 bp, Cannabis sativa
gagagcctaccatgacatccttcctactagtcagaatatgcacacaaggaaaatcattccaacacctagttgatgtcgttgtcatcaccacattgagaccctagagcatgctgttttcaggtgcccaactatccagaaggtatggaaattaactcaattctcttctttcattttaaaatatatggaactaacttgtagggaaattttacatgctgcggcttcctcatttccggattcagatttcaattcttcctctgtttggtttggaagagttggcattgcaggaacgaatttctccaccatcagaaaagaatcaaccctgctcttatgatacaatccacttcggactacttgaatctataccagcaaaacaacatgaactcagctgcacctggggctcaccattccttattagaggctgctcctcatggagaattgcccaattacaatttaaaattgactgttgatgcagcacaggatatacattccaatatgacaggatttggtttggctcttttcaacagtgaaggtaacatgttgctgtcagtttctaagccatggacaggcactcactcggctcttcaaatggaagctcatgctctcacctatgctctgtcatggtgcaaccagcaatgcatacaaccggaccttatcgtatcagattgcaaagtacttgtagattacatctgtagtgaatcatcgcacaacctactgctaaacagattcgccaaagaaattacaaacttcctttcttgttttcctaatgctaaacttatgcacatacccagggagcaaaatgaaatggctcacactcttgctaagtttgcattaggcctagttcaggaagtttattggaaagatcattcatttatttgtaacttatgatttgtaacctgtgatttgtacctccagtttcctatttgaatgaagtccaggtttcttcaaaaaaaaaaaatagtctcatatcatgtctacaattattatatgatatgaaattggcaaaagcataatatcttctttcttaattgtgtatctctattataagatgtttatctttagatcattaataaatttttaacggtaaggactttgccataaaatattttacacactatgattaagtaccacttgatgtgtgtgggcactcactttttcactataggcttcgattttgaagagaggagagagagagaggtttcg

SEQ ID NO: 168509 - DNA, 1123 bp, Cannabis sativa
gctctctcctcatcatctttgttcccggcaccactagccaaactctcatgggaattagttttactcaccaaatccaccacctcacaccctttcccacgtggcccaccaattccatcaaatatttccttaccaattaaatccatagtgatagccggcctcactaaattaatggacccatcagtccatttggaattcattcctttcccacggcccagcccaccaaccaaagcaccctcattttcaaaacccatattactaatcacttgaagccttttattcaaagaagcatctctgcccggcccaactaccccaaggcccaactcacttttgtcattactcagcccaccatccaaagttacaaccttagtacacatcccatctttgaccaacggctctccaggagcttctcctaatttcgaggtctctaaacagggaaaagactcagaacgctttcccttaatattcaaatttacaccaaactcattaccactaacagcaacaaatgaaggacgcacgcctgcaacctccttcgtattcacgccatccacgaccttggggacccaaacggcctcagcaccatggtggcgcactgaacgaggaccacgagaagtcgttttcaactttcgcagagccgatgaagacgcaccagcaaccaccgccgatgaagacgcaccagcaaccacctccttcccgacggctgggtctgcgattaatggagaatcgcactgcctcttctgaagagcacgggccgaggaagaataagctctcactggagcagacaagatcttggatttcccagcgaaacagtctaaatactgagaatccgtatttaaccacggtccaaaaagtgggtaagatcgaccatgcgcatccgaaaccgtgtttggggctgaaagagtgcattccgaacgttggtgccccaaacaaccacagaagtaacagaatgctccgactttttcatatttaaattgagcccacacattagcctcctcgccggtgttgatgaagcaaccggagaaaagaggcttctcaatgtcaatctccaccaacactcttagccatttcgcccacgaagcggggttttcctcgtccaaatccacaaccactacgttgcccacccgag

SEQ ID NO: 168510 - DNA, 791 bp, Cannabis sativa
ctgaaaatatgatttaagtattcaagcttttgagtatgaaattgtgtggagttttgctcgagttttgagctcatcttgattgttgttaaatctgatttttggatgcatattttgttgaggattaaagcttgatttatgtgttctaatgctttgctatgataattataatctatggagtatgaatttgaggtgtatgcatgttttggttggaatcattgtgcatgttgggctgaaatcatgtggctgtttggggttttctgggtttggaacccaggcgtcgcgacccgcccctgtgaaattctgggatttcaacccaggagccgcgacccgctttggggagtgccgcagtccgccttgtggttctgggcagtttcgaatgcgttattcgaatgctcataactttgtgatctggactctattttgggtgtttcgagtatcgttggaaagctcgttctgagctttatatgtttatttagatttgaatgccaattttataattatgtgaaaatggatttaaggattaaccctatttgtgaatctcagaaattatgactaagattaccggcacttagtcaggagcacccggggatttggaatctccacgtactcgggacaataggtaagacagtagttagcatgtagagtttagtgcggtggcgctcatgttgaatagtataattgtggttaattaagaatcgggattagggttattaccctaaagtgagcggttatatgacctatgattattaccctagtgattattgatctttaaatgctatgtcatgctttat

SEQ ID NO: 168511 - DNA, 1016 bp, Cannabis sativa
atgtgaaattgttaatagtacaaaattacaaattgtgattatattttaggcaagtttatgtgtcaaaatttattgataaaaatttctaaaaaacattatcaataaattatacatagtaatgagttggcaaaatatagtaatcaatagtttataccactaatatactaaaaagtattaattcacccaatttaagttaatctatgttatatatcatccattctatgtgtgtcacaacttttaaaagaaatactttataaaagaaatacgtgtatcatccattttatgttatgttgttaagaattatatcaatcaaccattttcaattatcttgtgtatcaagaacataaaagaaatactttataaattttgttcagtttaaccctcgatttttctcttctgcatgaattgaaagaaatgaaataagcccagttcaacaatcaaggagcacaatgataaaagaaaataaagaaaagaaattaaactaagttgttcataccgaatgggaggtccgttgtacccaaaactatttcttgtggctaaatgaagaccataattctaaaaattcatggaattatacaaagaatcacccaatatgataaactctaaaaaggatataaattaatattttttaaattataatatataaatggaaaaaaaaagagatttgaaaaataagatgactgccatgtcatcaggtagtaggtcaaaacaaaaaatattaattttaaaaaaattattaataactttaaatatcatccatttgattaaatttaatggtccataattaaatacccattcatgggtaatacccattaagagcacacccatatatatatatatatccataaaatagagaaagtatcaagattatgttgtatgcctttatgttagttttgtctgctattacagttagctacttttactggtttagtcgattaggtagtctggtatataagttcctctgttctcttgtatctaattgattaatcaagaacagaattctcattcattcaaat

SEQ ID NO: 168512 - DNA, 502 bp, Cannabis sativa
aagttggcgatagtgagatgggttatcgagtaagtcaccttctttgtcatgaagtcgttgtctaggatccattggtgcttttgttggtttattgctggtataccctatgtcagcaagtaattgcagagtgtacttgcgttgtgtgaggaaaagaccagtggtggcacgagctatttcaaactccaaaaaatactttagtggtcccaatgttttgagcttgaatttggttttgagattatcttaaagaagatgtagtatgttcatattggggcctgcaaggatgatgtcgtccacatagacaaggagtgccacgaatgtgtcttgggagcctctggtgaagagtgtataatcagcttttgattgggcaaatccttcttcaagaagagcttcaatgagtttcttataccactgccgtgaagactgtttaaggtcgtagatcgacttgtggagtttgtagacaaggtttgtgccttgaatattggatggaagcttaagtccttgg

SEQ ID NO: 168513 - DNA, 1420 bp, Cannabis sativa
aatttctaaaatggaggaaataattctaaggtggttcttttttcttattttatactcttgaaatcagtttcgttggatcagagagatgtttgatcctactgacattaattgcaatggaagtggaaaagatggtcatttaatgttgatgtacctcgaacaacataataaaccttaatttaacttcagaaaataagctcaaacaccagaaccaagaacaacacctaataaaaaaaaaaaaaaaaaaccatgccaacttaacataaaacttaaagaaatcaacaagaggtgagctagaacattagcttgagcttgaataccctaacaacttgctagaaatctctgaattactcaagaaaaaattcaaaccctagctactctagggaactcaagagagagagattagaagagagagaaaaaagttatttttttgtgtttttcttttaatctttaataaaatgaaaaaaaaaaattttaaaaatagggtttatcaacttaatatcagccaaataaaattagatttataatcaaataaaatctcactaaaggaccaaaatgccaggcaaaaagaccataatgcccttgcctacaccaaaagtcataaaatcatttgggggtaatttggtcaattctaaaatctcaactattcttgacattcccaatgtctaactatattgcctcgctatactaaaaaaaatactaaaatgtgattctaatggccaaacgccgcgttctaatgttgtccggcacaaaacatgcaaaaatatgaaatttcatatatgacatataaaatgcattatgaattcaaataaatctccgtaaaatgataattcataactaatacgcaagtttcataattaaaccctatttatctgctaatttccaaattaaagttaagcggtctctaaacttagggtttaggcagaacgtaggttttcgagattcttcaatttaccaacttttggtttgattaatttcttccatgaattgggattctttcctccttgcatcaatgtcacgatttcttttgaactaggtgacttggattttgaaattatgtcttccaagccacgtaaatcaaagactccacaggaccctaacgtcaccttcgaggctgagctaatagagtcaaaggtgcgagccatcggacacttgtggtattgaatataagcgagactatcaggttagatcggtggttgctggtgagttcagttgttatccaccagtgcaacttactcacaaaacatttgagggggctagtggcgagaccaatacaagtggctcggccgggataggcgcttggagccttgaacactgttgacttttagccaacgacaacgagtctgatttagtaagcaataagtgatttatagcaatcgatatataataaagcaatatgaatacacaagaattttatagaggt

SEQ ID NO: 168514 - DNA, 987 bp, Cannabis sativa
gggacccaagtcagcccgatcatcgcccacacgagggcctatctcttcaacttcaggaacttcttttgcttccatattttccacttcattatctttgtttacgaccaacacctgggcccctgatccggtttgtcccctcatagccacattgtagcattcacgtgcagctagttgatctcctttcactattccattcccattagcagttggaaactttaaggctagatgcttgattgatgtgactgcccctagtgtgtacaatgtcggtctccctaagatggcattgtaggcagacgataggtctaccaccataaactctatcattcgggtgactatttttggggcctccccgagtgtcaatgggagagtgattcttcctgtgctggctatgctatctccagtaaatccaacgaaattggtagtgcatggttgtaggtcctgcacatttaaccccattttctccaaggttgtcttgtataataagttcacgctactaccattgtcaaccctgactctccttaccctcctattggcgatttgagatgttatcactaggggatcgttatgcggactttgtacatgatgggcatccttgctggaaaattttatggccttgtctgccatttggctttgcttgggagcacgttgttctagtatgaaagaagtcttatcccaactcttaagctcattaatataactcttttgagttccattgttggtccctgcaaagtgtggtcctcctaatataatcagcatgtcttctccttccacaagtggagagaggtttaggttatgtcccgattgtcccccttgtagttgtgccaggggattatgagcattatttcctggcgccacctatggttgaacatttgcacgtggagctacaggttgttttgcgttcgctccttgttggttgtatttcctattccttgcatagtgagcaagaggcccattacgtataagagtctctatctcatccctcaagtt

SEQ ID NO: 168515 - DNA, 847 bp, Cannabis sativa
acgtatactaataaaaatttcccataaaataagtatccaccacaaaaagatttgagaattgttattagatactagtggtgtttgtctagtaccttttacattatcgtcttgcgattagctaatgatattccctaaaaattattacattaaattatatgggactcgatacttagttagacgaatagcaatattaacacataagaaagtgttaaacactgataacttttatcatttctcaaaagacttaaccatatagttaatttcttaaaatattttagcatcaaaaatcacaacacagatatgcgttgcataacaatattagaaaaaaagaaaaaaagaaaaaaaagtaaattcccacataataaaattcaaatagaatgttagtattttaatgagaaaaaaatactagccccttatatttactaataagtaataggaatcaattataaggtagtcattctcttatatttatttatttattttattaaaattagaaaatttcattaaatatggtataaaaaaaaagagagagagagaatactttcccactaattttttaaggaatatcatcaaagtaatgacatatgtttatttttattttattttttaatattaaatatacaatgataattttattctttaaaatatctcttataaaataacttatgtacattatagtttaaataaaagggcaatttagtcaatttaagcatttcgatttcgtttctagataaagtgaacaagatattcatttattttcaaaaatactgtgtaagttttatactgtaaactgtgttaagtttttactgttgttctacggttatattagttgtttcactgttgtttt

SEQ ID NO: 168516 - DNA, 1039 bp, Cannabis sativa
taaaatgggctataactagttaatatgagggtcaacagacgtacattcaggaaaattaggcaaaacaaaatgaataacttgataaagatgtcacaatctcacaaaaattgaatacatttctgcaatttccatttatcaaattaaaactagatatgttataattaaaagggaatctccatggtaatatattgcaaaggcaatgtaaatggtcaaaatgttaaatacaataatgttgcaatacctttgtgttctcttatttctttcggttattattatcataatataattcaagatggtacaggtaaagggaaaggcaactgacaatggaaggagcatgggatggtgcatctaatttgtttttcgggtcatgatcccaagaatgtgaacacaacaacttagaagagatttttcaattcaaaaaatatataataatgtattatccatatatttcatgggcccagatgcacttaatacttctttgaaaattgaaagtcgttaataatacgaaaaccgacttatatataacgtttagattatcttattacacgggtatactgaaaaaattatgtttttagtcactaaaagtaaaaaaaaaaattacttacaaattaaggatattgacggctaaactaattgaactttaaattttttaacacttaatcacaaaagtcaattgtttgggggcaaaactacctaaacttccattctgttttactctgcacccctccatccaaaaattatagttaagtgtcacagtgtgctgtgcacgtgtacacacttgcacacttggtaaatttttagtggttcacgtaatattaattttgaaaataattataactatttaaaaaattatataaaataaaaaaaaatcaaaaaatattttttattctttttcttctttctttcttctttcttctttcttctttttttctactgaattaaagcacccaggtcagagccggagcacccaagccggagctggagccatttgccctctctttctctctcccgatcttctccttcccaaaccctctctttc

SEQ ID NO: 168517 - DNA, 925 bp, Cannabis sativa
tagggcataaaacccaacaacgacctggtgagggacaattaacttagggatgaccagttgatggagggccagctaagggacgaccagatgataggtgactagctgacggagggccagctgagggataacaggctgatggagggcaacctaatgtacttatcatttatcatatattcctatggtatttctcccactacatctcatgctcataatgtggcactagtctataagaattctttgaaggattcttgtagactaagtttggtgagctcattcttacgacttaatttttcttctcttttactttttgttacccttcacgaggagtgtaagctttatgagttatcttgacccattttgggattagtactcataacaatgagggagtgttagctcattgagctttctcaacctctcctatgagttttcatcattttgttgagggagccctttgccacctagcctttctcgacctcttaacttatgtaacctttccattgagggagtaccaactcttggagcggtctcgaccttttctcagctactcatcttgtttgagggagctttttaacactttggcctttctttttgtaacctcttttatggtgtaacctcttcgttgagtgagtattacctttgagagcattctcgtcctcttatcgattattcgttggatataggggatcttatggccccttaggttgttctcaacctttttctagatttaaattgtattgggggagcttgtgacctcttagtctacgctcaaccccttacgttgtatctgtggcacttagaacccactttgaatgttaaagaatcaatactccttttattgaggctgttgggattttatgccataaataaaacccatttcaatacaatctgatttgttatcaaaagaagattagaagtcatttatgtt

SEQ ID NO: 168518 - DNA, 552 bp, Cannabis sativa
acaagttagaaatattaacaaagtaagaatagatagagaagaagattccatttttaattatgcctatatatgtttttgcttttgaagccacaaaaaataatgaattttgcttaaatcttagtatcaatttatagggtatttgaaatagacgactaggaagataagattaaaagtatattattaaattatcccacgacgtagctataatatgatcttaacattatattaattataaattattttttctaatatttatttaattaagttgtcaactctctcatccttttgctatataaaactagtctttttataaagtaattgacaaagaatcgtttacgtttctcattaattaattttggggcgatcagaaagagacttttatcatgattatatgtattgtttattcattattttttttttcttttttaaagcaaagctttgttatatatagggtagtttaaacggagccaaatcatctgtcccaatttttctctgtctctctatcccaatccaattaaaatgctccacctcaattaaatgtatatttcctaa

SEQ ID NO: 168519 - DNA, 870 bp, Cannabis sativa
aaaaaataaaaacaaaaaatattgttgtcgacgacccaattaatgaagaggttgaggtataaaatctttgtagatgatacatgatttttaaaattcttaaaaacgaccgaaggtgtatgaaaaaatttgcatgtgattcgtttagttctacataaaattaaaaaaaaataacaaataaataaaaattaaaaaatttaactaaataaaaaaataacaaataaacaaaagataaattaaataaaaaataacaattctattaaaaaaaaataaaaataaaaaataacaatttaaaaaatacaaaagtaaaaaaaaatagtaaataaataaataatacattaaaaaaagataaattaaaaaatttaattaaataaaaaaataacaaataaataaaagataaattaaataaaaaataacaattttaaaaatacaaaagtaaaaaaaattagtaaataaataaataatacattaaaaaaagatagagagatcacaaaggacaaaaacaagtccttcttttttgtttggtagtgaacatcaattcttctactgatgttattgatatatgattgtattttgattaataaaaaggattaattacttagagagacgttaactatactttatttatagatatatgataatttatttaatttaagtatatacccaatcttatttatcttaaattactaagcgttatacatttaaatcaggattagttttatttcatattattttatttctcttaactttttttttctctttttctaatattccatattattttagggaaatttcattttttggccttaataatacaagccatatcaaaatttataccctcttttaatttgtacaaatttagtccattgatta

SEQ ID NO: 168520 - DNA, 703 bp, Cannabis sativa
  modified_base (635)..(638): a, c, t, g, unknown or other
agccttgtactttgagatccttagagaattatacaattatatatttctaaatctcatgtcaagcctccccataacctaatgactagcagtctttttgtgcacaaataacaatacatggttagcctgactccaatgtataccacatcgaagacgtttaccctttatgaaatgagcaatttagtgctttggatggacaagggatattttttctttcaaacttacaaaattttcatgcaaagacttgatattaatattaaaataacaatctgtagttgtaatcttcatgtttgttgcagcagattacttagcattccttctcaaataataaaaattgacatccatatgctgaaacattaaaaaaaattaacaaaaacttaactaacaaataaacaagaaaaccacaaaaaaatttaaaaaaaaatctagacttgccttaatgctagatagtctactgatgagatggtaattactctgggatggagcagtgattttgcagaagtgtaaaaacttatctggagtctctaactctaccagtgagagtgaatgttaaacttacagaaaagatacttattcagcctatggcaagttctataaactttttgatattgtatattaactactagtgttacttcctnnnnaacacagaagtagttgccaaaaagtaaagaatctagtatcactagaggagtagacatatagagag

SEQ ID NO: 168521 - DNA, 666 bp, Cannabis sativa
gaaagacaagggaattctggagactataaaggtctttggtttatggattccagatttggatctggtggtcataggatgggttgaagttacaagaggttgagactgaatattggtgggaatgatatctggtgttgggacagtagcaatggcaggggtagacacagatggaacaccagaagaaggctgtgtgggaacaggtgctacagattgtggaatgagaggttggggaataacatgttcgaatccaggagggggggataggctatattgggtagtgtttgtgggaatacttggagaagttggtgaagcattagtggcactttgtggtgatgaggagggtgaaacccgatgctggtgtgttggagtttggagctgagatgagtcctgcaaaaattgttcattagtagtatcattgtaatgtgcaccaagatgatgaggataagtactggaggatgcagaggggagaggatgagaagacatatcagagggagacaaatgaggtatatgggcagaaccagaagtggcagtggtgcatggagactcacagacagaagtggtggattgtgtttttgactgaaatggaaaggagtgttcatcaaagatgacatctcgagagatgtaaattcgaccagtagtatcaaggcatttatagcctttgtggttaag

SEQ ID NO: 168522 - DNA, 920 bp, Cannabis sativa
  modified_base (889)..(894): a, c, t, g, unknown or other
tcgtatcctgtagagtcggggagaactcattgaacttgtggtggactcgggcaaggatctcactatagttcaatagttttccttttgtcctgatcaaatttctcacaaaccagatttcactgaaaatgcagccggctacctttagagattagttctggtacttttggggagatctttaaccaaattttccaagaaattgagcatatcgttgccaggtatttgagatgagaggcaagggaacggacccgtaaaccaaacggcccgcactagagggcaatctttaaagatgtgcactccagattccacttcggcatctcaaagcaggcactccttctctaacaagaaatgtagattatcctttgtgggaatgcaatcactgatcacacgccattacatgatagccaactggggatgaatacttgggttccaaatccatctccaaatttctcgcctattgttgaatcgatgttcctggtccaaataatatgctgatttgacagaaaatctcccatttgcattgcacttccaaataatactatctagagaagaagatggaagtctaggaatatccaatattcatttccccaggtcattaccaaaaacattgataaccaaatcctcattccacttgtcccccaaagagatatctgcaacttgtttaaaccaggaaaatgagaagaaatagtagtcataagatctttaaactcaccaaactgcatccatgggatccatggttgattccacaggtccactgatctaccattagagattaatcagcaggatcccttcgccactatgtttcgagtatccatgatacttttccacaaaaccgagtctccatttttctattggactgtccagaatgtttggtgttaggttttatgccctnnnnnnaactccatttcaatgtaatctatttt

SEQ ID NO: 168523 - DNA, 662 bp, Cannabis sativa
  modified_base (583)..(586): a, c, t, g, unknown or other
tctggaggaaattctctatttctactaagttaaatccaaccccattgggaagaaaaaaaagcaagattggcttctaccaactcgagaagcagtatagaacattgatctatcccactagcaccatgaagtacacacatgacttctgggattactagttttttaccacgactttcccgttgaagagggttctaactttctctttagatttcagtgttgcaagtaagtaaggctatccttttttattggaatttcagtccatccttcattttactttttgattaggattctcttgtttctttatctttagatgaaattgcacgtctgacagctacttctttcttcctcgctagggaggccttatacaaaggatttcctcctaaggacttgaaagtggagaatttcatcacctcgaccaacctaaggcaagttggtctaattgctcctcaccagagcatagatgcctatcattttaaagatggtcatagtggcaattctccagatcttaaagaaatcattgcagagatagtttctaataaaatgaagagggccatcaagagagatcaaagtgttgggttttgtgccnnnnataaaatccatttcaatataatctgatttactaattaataaagatcagaaatccttttatgttgcatggttcacat

SEQ ID NO: 168524 - DNA, 552 bp, Cannabis sativa
ccagacccaggcccaaagcacaagcagcagaagagcccagaatacgacgtagcttcgtgtcttcttttgctggccaatggtttgcccaaaacaacaacgaacggtcacgatcatctttggatgtcttcttttgagtgtttcgctgtaacagaagtaaccgacgtcgttttagaaccgccattaatgttgttgagctctggtgctgttgatttgaatttgcctacttcttcttcttcatcagaatttgatgatcattattattactaatacatatcatatacattaatattattattaattaattaatacaatttataatttgagtttgatagttttagattttcaaatatttaattacgactttatttatttatttttaacttgtgattttgttagaagtatacgagtatatataggtgaagaggattagtggtgcccaccaccttctaaatgtatcactttgtgattggttaacgatattctctaaaagttattattaaaaaaaaaaagacaaatagtggcataagtacccaaagttttaggtttgtaagc

SEQ ID NO: 168525 - DNA, 994 bp, Cannabis sativa
gaaggcagttcacgacctaatgccaggtaggcagcgtcgtaagttgattgttaacctgggtgctgggccttatttgcaagggctcaagtttcaggctttctccccgagtttggttaaaacttcaatattttttacgatggaaaaatgcgtagaacgctttttggttaagttaattagaaacagctcaggttgacaatatgtcaacttgcgggctaagcccagtgccaggtgttaacatgggcgttgggtcccagttatggctattccaaaattccatttggtctcaggaaatatttgaatctcaatcttttatgaaaatagagaagattctcagaagtgttatcagaaaacattaacaaaatcaacccaggttgacaaaatgtcaacctaggcacaagaccaggcccaagtgtcaacctgggcgataggccttgcttttggcacccaaaaagtgttgtgtcaacttgggcaccgaataaaactgtaggtacctaggttggcttctgggttgtaggttcgtgtaattttatatcctaaggcttggattaggtttctccatgtcttccttgtacaaaatactgaaagatagtaggttggattcaagttattgaagtctaaacttccatcccaaagctttcgaagtcaacctaggcacagggctaggatccccttctaggtcgactgttatggctcaggtctactcaaacccatggaatcatccttcttttcacgtgtcaaacatttatgtccacatcaccagggaaagtttttgggttaaattttgctcccaagtcaactttacacttgtgtggagctaattttatgatgtggaccgagcccatttttcttgaaactaccagatgggcataaattttgataatcttaggcaattatatctgttcttcaagcattctcaattgaattaggactttgaactcgtttttgtagtccttgaaaattttgaaaatcaattaacaaagaaaaagaggaaaaa

SEQ ID NO: 168526 - DNA, 1110 bp, Cannabis sativa
tttttgatattctaatttctcaccatgacttttttatatatttttactagtatttttcaattttaatgtatacgtcattttgtgtttcaaaaatgtgttcttaaaaatgagaataaaagataattatgaagttttcaaaataagtgtgtttttttagaaaaaaaaaaaaaaatacacttaaatattttaaaaccttgatatgaacaagactgacacagatccgggtcgtagcctcagacctgacctcgaacttggaccatggacccggtattagatcttggcccgatctcagacccagatcctgaacttagcttcgcgaatccctgatcacgaccttgatgagaaagtggtgagagagaaaataatgaaaaaaaaaaaaagtggtgagagggaaaataaggaaaaataaagtgactagagagaaaaaatatgtgaaaagtgaaagaaaaaaatgaggagaaaaaataataagatgaaaaataatgagagataaaataaaaaaagaatattatcaaaaaattaattattttttaaactagaaagctacattttattgttctagaatttttgttatttttttttagaaaaagagaatcaagttattaaaattttgtagtatatttgagaagttgatattaatttacttagtttgtatttttttagttacttttttctaaatttaaaaaataacttaaacaaaatatttttgaaattttaaaattgtaaaaaaattgaaaaattaattttgtaaaagtgtgaaaaaaaaaaggacttgtacaaaagtaacatttaaaaaataagtatttatgtaaaaatctctatttaatttatttttatttttattttggtgtcatcagtttcagtatgccaattattcaagtaaagattatgtgaagactggaaaagcgagcttgaagttcttgttaattaatatgagatctgatttttcttttgctttattttcgggaggctactcagctgtgagtattattcttctctcatcatcttaataattaataattaattttttatatttttttactaattaatataatacattattgttttaatgtcttattcatatcataatatttctttatttaaatataa

SEQ ID NO: 168527 - DNA, 768 bp, Cannabis sativa
gggtgtgtcagtctgcctctaataatagttattagtgaccagttattatcagcggattattaccggcggaccttgctggtattactctagcgacggaaaaggggattattatcagtagagtggtccgcctctaatgaccataattgttatagtggatgtatcagtgcatctcccttttaaaaacgtacattatggaattttctaaactttattaggacaaaaatatgaaactctacaaattttttaaattgaatgaaagacaatatcaatatcatctaaattgagatgcatttattaaattaaagacatatgtaaagatctactatcccttttcaataatattagattattacacgtaaacttaatctcttgtgttagaacttggtttgaataacatgaagcatatataagcgtgtatgaaatacaaaataaattgcacacaatatgcaatacatagaaagaatcaaaatacatctagctagccattgattctatagctttaatctcacacgagttttttgaatctacaaaaagaaaagaaagcttaggtagtgtaggtattctggcttccaaactctctctaactctcttagatgaatttgttgtgtttcactattatatatgtgaaaggatttggatcatttcctaggcttaagtcaattagaggaaagcgcgcgcacaccgacatcttcatccactactacaaaccaagcttttagaggcacttttttttcagcaaatattaaagaaccgacgacatagggttgg

SEQ ID NO: 168528 - DNA, 813 bp, Cannabis sativa
agtacatgttaatttgtatatgggtaaaagtgcgcagagacaaaggcgtatatcctgacacagaaaaaacagagagacatatagatgttgaaataatgtacataaggagagggatgtatactataggaagagccatatgtagcacatttccctataaacagatgctttgctatacatggtagctttaaatagttgagaaagagcatttttggcaaacattttttttttgttggaggtatggtgatattttttaaagttattatattaaattatataaaatttaatttttatttataatattttttttttaattttttaaataaatttttaaaattactatactacttatgtacacatgaacaatctaatatcagacttaatatctaaaataaaagaaaactgtaaattactaaacgtttactaattttgaagttttatcgctaaaatttaagttttaagttaagttcaatcaaagtgagtattagagttatactgcaataatttctatttatatttatgagaaatgctcccatattcccgaacacccttgtaaggtgtactatcactattcgtgcaactcaataataaattccatttattatactttaataaatgttataaaaaatggctaatcaattattgaggaaataatattaggtcgtagatcataaatgtcttataacactgctttaaatttatatatttatgctctcagcttataacatatttttttttgagcaatttgcggcgaaacccccttatgttttgatttttatacacttaacccccttatctttatttttggtggcaaaa

SEQ ID NO: 168529 - DNA, 931 bp, Cannabis sativa
  modified_base (563)..(563): a, c, t, g, unknown or other
gtaacgtaataggtgagaaaaaatagaatagtggatagttgaagagtagagagagtctcctgatttgactcttaatttgactaactatttgtttattattattttattatcaataattttctttcaacttttaagagaaatattggtacttaaataataataattttgatcccttttttccgtgttcaacagtaagattataatatctttcccaagatcaatattggtcccagcctaatgtatactccatacatttgatactagcatacttttccaatgtcctggaaagaacataacacttatccaaggtgtaagtgagctttatcgctgactatcacatcagtgtaaatcagtgcactgatgaatcatgggacattaacttttgaagcatataatcacaattacctttcacagtgttgacatcactataattgtgaataactatatgttatggatttaacataaattgtatactaaatcttaagcatgaaactacatgtaaacataaatgacttctaatattctattgataacaaatcagattatattgaaatgggttttanttagggcataaaatcccaatatttgtagcagaaggttccttgttcggtgatgaatgatgtcttctcctggtcatctgggtgcatgagtatttggttgtatcttgagaaggtgtccatgaaactaagtaacgtgtgtccagttgttgcatccaccatcaggtctatgtgtggtaatgggaaagaattcttggggcacgccttatttagatcagtgaagtcgatatagacacgccacttaccatttttcctttttaccacaacaatgttaggcggtgtattctggagcaaattttcttctttttttgtttgaatggaggatggttagggtctacctgaaacttatgaacaataatgttaggatcaatacc

SEQ ID NO: 168530 - DNA, 924 bp, Cannabis sativa
aaaaaaaaaaaaagaagaataataggacacttattgtttgaagtcgagtagtagtgtgatgaaaagtcttgcaaccggagacggagtgaatggcatgatgaattttttgaacacttgaggtcgaaaagcaaatccgaggaaattcgcaaaaataatgtcatagacaaggagggcatgcaaagtttcaggaaattgggatgaaaatttttcaaaaaaaacttgagtttttgaaatggcaaaaaatggtggaaagatggattccttacggttttattctttgaacttagttactgcaagatcaaaatttagaagatccaacagataaaaatgggagagaagtggaaaagacagttcattaatgctaataatgtccctcgaaaccacaaaaccgccaaaatcaaaggcatgcatattttaaaattggattatgaccgaaatacccacaataatcatttaaaagcactttttattaataaagacattttaaggggaaattgttatacccaaaattcgactgtaccttagaaggtgacacgtgtcactctcaaagaatatgaatcaacaaatataatggcaattatatcattaaatacaaaatggaatacctcattaaatgcagaattaattgagtatattaataactcgatatctacacagtcttaagcgagattagaatgtacaaacaagtgattcacgtattgacaagaaaccacttcgcatcagaaggcataatctcgagggagacatagataacgcatagcgaggcatctacctcattgtatgtaaaaaagtattggcgaggtgaaatggttattagaacactttacttataatatacattataataactaagtataatgacttgagggacatgattgtccagtcttcaaggccttatggttaaagagcagttcttaagtttgc

SEQ ID NO: 168531 - DNA, 669 bp, Cannabis sativa
cagatttttgttttgacgaggccctccaccaaaatttacacatcatttgctctaactcttcacaaatgccttttggaattaagaacacactcatagcatagttaggaagtgattgagctacagacttgatgagtacctctttcccagcccgagacaaaaatttactatcccagctctctactctctttctcattttatccttgagaaaacccaaaacagcgtttttattgtgtttcattatatttggcaatcctaagtagaaaccgtcatcacccgcttccgtcattcccattagcgagcaaatattccccccgaaactcatgagaagtatttttgctggaaaaaaatggaggacttttgtcgattcaccttttggcccgaggcttgttcaaattgttcaagaagagccatgattttttctgcttcatttacaagagccctacaatagagatagctgtcgtcgacaaaaaacatatgagaaacatgaggtgcaccccgagccacttgacaaccctttatccaccctctactctcatagctccgaataagagatgaaagtcccttagcacaaataatgaaaagatacggggataaaggatcaccttgtcgaattccacgagatggtgatataggtcccaacgaatgacctcccgatgtgatccagtaacg

SEQ ID NO: 168532 - DNA, 1429 bp, Cannabis sativa
  modified_base (1324)..(1342): a, c, t, g, unknown or other
tgttatgcttttctttattcctcttactctaaatactccataatattgttacaaattgctctatctataaaagagtttatgatgcagaaacttattgtagcaacttgttaagattcataggccaagttatgtgattactgagagcaaagtcagagtctttccaaagacgtttaggataggtacaaaaaaactagagcatgtggaatcgtttctttatcacggtggcataaagaaaaaataggagaatccacaatgtgtcttgtatgtaaaatatcagccacaagcaagcagtcatggatggctctccatagaaaaattctgaccttcgatgggatatttagcgccaaaaatttcttccaccattgttgattttgtaatccactaaatgatggttgttgttcctttacatgagtagccaaatagtggcctgttttaatagtatacgtgccattagattcataatgccagatttgttggtcatgagaggatgttaatgtcaaaggaatactctgaattttttgaacatctgaatcaaggaaaagagtctgcaatattggtagattccattgacgactatccgtagtcaaactagagaccttcatggtagtatcaatacctctgtagattaatggattaaaatttgagaatccaggcagccacgaatctgatccacataaaatgctatgaccatcaccaactcgccatcttaaacccttagcaagtaactcttttcaaataatttcttgccatgttagagaaggatacgatctaggaccaacatctaagaaagagttgttcttgaaatatattggcttgagtattcgactcagtagcgaagtaagattagagaaaatacgccaagctttcttggccaataaggcctgattaaagtgagcaaaactcttaaaacccaatcctctttcgactttagaatggcagagagcaaatcaagttttccaattaattcttaagcctgaagattttgaaccccaccaaaacatattcatcaaaactttaattttatttggtaagggatttagagagacagaagcaactcattgcgtaagttggaatagattgggcaacaactttaagtagaatttccttgccaccaactgagaataattgctcttgccaagcagaaagatgattcaaaagtttttctttaatcccccgaaataaatttttttgtgtctgcctgagtaagatggaaggcccaggtagcgttcatggcacggctgaattgccatcagaagtatttgttgtaaatttgcatgaatggatgggagtgtacttggtgagaaggtgttggaaattattttannnnnnnnnnnnnnnnnnnacaagtatgtttgattaacaccctcatatgaattctaaaacaataaaaataaacacatataaagtttagagaaccttacagtgggtg

SEQ ID NO: 168533 - DNA, 610 bp, Cannabis sativa
atatgctttagtctaatttttttttggttaaaacatgatatgggaacagttttttttcattcatgaattaggtattgcattattgaaatggaagtttagttttggtgcatgcattgttaaatagacatttaacaataatgatgagattttattaattttgaaaaattgttgaataagagaaagcatgggtgtgaagtgggaatgaagcttgatcagttgaggttgagaggttacaccattgaagagtgtttcaattttcagtgtccatttaaggctatcttaaatttagagacatattgtcacattgtggccacacccacatatgattatgccgcacgtaaaatcaaaattaaaagtcaatggagtttccaccttttccatcctaaatatacacattacatatatgatttatatgcattcacatgcataaaatgccataatatctattgttgggatataatataatataatatgccattttcaatgatgggggatagttgtattttatttttattttttttatatttttctttcttaaatgatatttcgggaggctataaaattaaggttacttttagggctcgtttggaacgccgtattagatcgtatt

SEQ ID NO: 168534 - DNA, 577 bp, Cannabis sativa
aaaaagacttcggttgaagttgaatttttatgatggtaaagcacattatttaattttatattgcaatgacataaatttagcaaattatttgaatgtattaaaatatttggatgtagaagaagaacattttataaggggagagtacccttcagatcacatagatcatatatctgacatgacagttagaccaagagatctttattaggtgactaccatattattgtgtttcgatctctgaattaattccagctaatgcaaaccaaaggttttagggtataataaaccacacaatggtatatatatacatatttatatacttgtattgtatgcattgtaattgtaaataaaaataatgttctccttgatttaattaattaaattagagatagctaatctgattattgctgattatatcattacatttacatgtatcagtgttggcacaggaaaatctgaaaataagattataaaaaatgactggggagaagcttctagggcaacggatgcactcaaatctgcttcatctggtatatatatatatatataaatacacatatatatatatttctctgtagta

SEQ ID NO: 168535 - DNA, 902 bp, Cannabis sativa
ggtccaaaatagtatttaccctatgcaaatatatgtatatgttaataaaagtttaaagtttaaataaaaaatttattttggcacaatttttaagaaaagcctttgattagcaagggaatgcacagtgattagaaaatcactgtaggatgcttaattattagggcattacataaatgtcatcaaagcttaacgtcacataaatctctataagttaagcaactattccctataaaatctcctcagcctaaagaggaggacttgaaggtatctaactaaaaacaaaccttcaagtacatccctaaaagttaacgatgagtggggcaaaaaactttgacaccgatcgaagattcgatgacaacccttatgacgagcttcactttatcgttgaggaaaatttattagtcactaccgtaagagtaaaatgaaaatttcaattatttttggtgaagatagcaagaaaaataaaagagttgttactcttaataaaaatcttcaacttctgtaactccagaagtcttcaaaatagagaataaaaatttccatgtcaagacacaaaaaaggagtcacaatccatcaaaatagtgattttttaaaagcttcttttgaaccagacgagttaatagaagaagaacaaaaaatgttttgcaataacgatgtacctacaccttccccttgggtgtcgatgtttggcagacttgaagcaagcacatatactccatgagtgtcagcattgaaatgtttattttcccaagtgctcacagccaaagaaaactaaaaataaaaaagcaatgggtgccaaaatagaagaaatgcttcagaattactattcttcaagggaatgaaacacaagaagatgaagaaaattttgctcaagtcaattacctctcttttgaagaaagttt

SEQ ID NO: 168536 - DNA, 621 bp, Cannabis sativa
tgtatttatttggttcagtgtaattgaatttgttcagtgtagttagatcataaatcgatcacaatcattattaaagtttagtaagagaaagttttaaagttaaggtaaaaatatttaattacgtacatttataaagagtgtatcattatattttattttgagaaacacaacatttaaattataatttaactaaatataaagaacggccaataatttttacaacacaaattcaaaattgatatttacttttttacttcgcgcgactaaatttactagtatataaatatttgagttacaactcactaagagaatacacaaattagcagtccactgataagctaaaaatatgtcatagcttcactagctaggaaaatttggtacggctcatatataagaccaaactttttttttggacataaattaggggtgttcataaaatagttgatccaatctaatttacacgatccaatctaatttgtaaagtgtggatatccgtacttatgcggattagattagatagaaaaaattaaaatctacacttgtgcagattgaatgttgattgatatgcaaaagtaaccgatccaatctaatctgcacatctttataaaaaaaattaaaaaa

SEQ ID NO: 168537 - DNA, 1518 bp, Cannabis sativa
ctctctctctctctctctcgacgagaccaccattccagaccacgacggtcggctgctccgccttgaatcttgatggacaaaacccatagctccaccttgactcactaatacaaaattgggctttagaggtaatttttaaaggcttttagcgtcggttttggcaaattaaattcgctatagatgctcttttaggtgacgatgtagggttcataacaatcgacgtcatatggtccctatggcatcaattttttcataacaacaaacgccatagggaccctatggcgtcggttgttatgaaaaaacttacaccatagaatcttggtatttttcaacttcacaattttattttttagcataatttatatatattatttcattattaatataattaaattaagaataaattatatataataagcataaataaaaatttaattgaaaagttaaataaatacacatttacattaatctaagtgttgtgtatattagctatctttttattaatattttatattttactgtggttgtattttgtatagtatattaattagtatcatttttataattttttaagttatgttttggataataattaatatattaaataataaataatgtgcaatactttaatctttatgtaatttaatattgttatacatttaaatttttaaagaccaattaaataaaacaatagtttaaggaccagaataaatggaaaaaattagagaaagggctaaactttgcatgaatatttttaaaaactttgaacattaataacttttgatctgattgtccgtttgaggcaattttttttttgaacttgggtattttttcgtgttctccgcatcctaaacagcctacggtagttcggcgaaccattttgtccaaaaaaaatactcttttgtatattaacatcatgttatgcacctatttcacccaattttttgtattttattttgctattttacttaaaataaactgataaaattctaatattaagtatttgaatcaatatttgtgatgtatttgttaattttactacaatgaaatgtgtaatactatatctatcctatgtattacatcaatattattttaaaattactttaagtatttaaggattatctaaatatatatatataaaaaaatattcttataaaagtaagttaaagaaagcatactttatacttaaaattatgtacttgacttccgataaagtcacttccgataaaatcataacaatcaagtctaagagaatctaaaataaaatattatccttattttactgaaatttcggcagcataacgactataattgaacgtttccaaaaaatttaaacctattaataacaacaaaacacaattcaaaataatataaaataatcataacaacatttagcaatataaaagtttaccacccattcacagaacatacttcaccacggatgaatatttaagatattcaaactctactaagcattcataattaatttatcagaaaagttagtaaatgtatacctcg

SEQ ID NO: 168538 - DNA, 929 bp, Cannabis sativa
ctttcaaaggcttgaataaaataggcatatttgcatgagaacctcccatttttattttttagtccagatccatttatttttcccttgaccagacggattgtccctttttaaaatagttgatatggtaacatcatcaaaaagactccaattttcgacggtccgattccccattgacagttaacagatcaactaccttgttaaagccatcaacatgacgaccattaggttttggatagaaggatttatcatgagctacccacggatccttctaaattctagtatccaatccacatcaattcttgcaaatttcattttaaaaattgtgctgcactaaacactataaataattgccacagtggtcttacaatacattatttatttaattattaaaatattttcacactaagcttttaattaaattcatatattaatataaatataaacattatataaaatttaacatacaccaaatttataagtagctcataaaataacataatcataactaactaatctaacataattaaaaaaaaatattaatttaaattatttccaaatttagatcatatatatgtgttcctaaatattggtgaatatttctatcatgagttttaacatgcctttgaagcatagtcgaaaagtcagaaatcatacaattcatatgtattcatatgtaatatgatacatgcatatacataatatctttcaaatcatttcttttttgaaactgagcccagcaacttaccaaagacaaagaaagaggaaatatttctattggggcatcgatggggtaaaccaaagggactctgatgctctagtcagtacgattgtaatagaaaatagcaatacggaaaataaataaaacataaatggcaatcagacgaatgactggatgagcaaatgggcggacgggaggttcaagtacgatg

SEQ ID NO: 168539 - DNA, 803 bp, Cannabis sativa
tcaaatctcaaaccaatcaagcctaaatttttctcttacacccatttcattatggtcggaaacgggttggaatatttatgggccaattaatccaacccgggtcaataaatatagaaaaaaataaagctaatttagataaatatggtaaggaaacttaataggaaaaaatatggtatttaaaataaaaacttaacatatatgggattgaattaccataaaagatattaaaattcccttcatatttttttttaaaaaaaataaaacagaggaaactacagtgatcgttagagttgtcaccggtgccaaaaaaggcatcagagtttactgtcggtgccagaaaagtcgatggagttgctgccggtgccacgaaagtcgccggagttgcttctggtgctggaaaagtcattggaattggcattatcactagaaaaatcaccgaaaaaagtttcttggtgatttttctggtaatttttcttggtgatttttctggtaatttttccggcgacaatgccaattccgacaaattttctagagtttgttgtcagtactataaaagtccccggagtagctaccggtgtcggaaaagtcatcggagttgctgctgacgccataaaaattgtcaaaattagcattatcgtcagaaaaattaccaagaaactggttttttcatctggtttcttcatcaagaaactagtttcttggtaatttttccagggaatatgctaattctaatgacttttccgaagtttgctgttggtgttggaaaagtcgtcaaagtagctgtcagtgtcagaaaagtcgtc

SEQ ID NO: 168540 - DNA, 600 bp, Cannabis sativa
cagaattcgacgcctgtgtagcttttgtgaaggggacaaaaactcgtaagtggtctaaattcgaactcgacagagaacgcactcaccgctctctgaacaaatcaaagttcttcccattcgtcaaaagttcaagaatcctttatggcatcagtacattgggaaggaagatccattgtctcacatctactacttcaaagtgcagaccaatctacaaggtgtgagagatgacgttaggtgtacaatcttccctgctacactgacaagtgtagctcaatgatggtaccataagctttcctctggattaatcagctcatggaaagatctattggatgcttttggcaactagtttgctccttctcaataacaccaaactagactaatggttttctagacgtcaagcaataggaagacgaatccctcaaggactacatccaacgattcttagaggtagccgctatgaccaaaagtcttagtaaggacaaaagggttatggaactcgcaatcagactcaaggagatgagtcctttgtgatctaacctttgtcttaaggtggtatacaccatgaatgacttcttggatagagcagatggttttatcaaa

SEQ ID NO: 168541 - DNA, 753 bp, Cannabis sativa
taaaaaataaataaggagacaaaaagtctctttgccttatccctctacaaggaacaataagccctatcatatgaccaccgtgaacaacctaatacctcatcgtggaaaaacaacttaaaccaggtacccaatgttgtgaaaaatcaagtttccgaagtataaatatgagataattccactccaacatatcgtacgctttacacatattaagttttaatgccatcatcccctccttcccaaaaactttacacttcaagtaatgtataatttcaaacgacattatgatattatcaaaaattaacgaacttaatataaatgcactttgtgtgttagaaattacatgtggcagcactactttaaatcaattagccaccaccctcgaaacaatcttgtaaatcatattacacaaggaaattatattaaaagtataaatttgatttattaagttttttaatacatttgtatcatataagatttttaaatttatttttttctattaaaatattaattgtatatataattttttaaaaatatatataaatttaattaaatctgttattttacaatgaggataaattttaatattatatttaataatgtggatcaaattaaatttaatattttataaagtgctttttttttaatgcattataaagtgccttttaacatttcttaattggtatagcttttatttatttatttaggaaaatttatatcgtatactaactttaacttttgctatttttttactaa

SEQ ID NO: 168542 - DNA, 751 bp, Cannabis sativa
cacttctcctagttgagtactaagtcgttctatttgcatcgtttgagcacaatttctagattaggaaagtttgattggaatgaatcaccgaagactatcaaatcatccatatatacctccatacaattatcgatcatatcactaaaaataatcatcatgcatcgttgaaaagtggttggagcattacacagaccaaatggcatacaccgtagggcataagtaccaaaatgacaagtgaatgtggtctttttctaatcttctaaagcaatcttaatttgtcagtaccctgattaacaattgagaaagctatagaaatgatgactcgccacacgtttcaagatttgttcgatgaatggaagtgggaaatggtctttacgggtggtggcatttaatttttaataatcaatgcacatgcaccaacctattatgatcttagtagggatgatttctcccttatcatttggtaccattgttactcatgatttctttaagacaaccttagttgggctaacccacttgctgttggcaataggataaagtatcccaaaatccaaaactgtcctattgccgacagcaagtgggtattaaggttatcctaaagaaatcgagagtaacagtggtaacaaatgataagggagaaatcatccttactaaggtcataacaagttggagcatgtgcattgattatagaaaattaaatgccgccacccgtaaagaccatttcctacttccattcatcgaacaaatcttg

SEQ ID NO: 168543 - DNA, 755 bp, Cannabis sativa
aattctggaaaaaagacacaagaaaattcaaattagaaatcctgctgcacaatatcagaccaatatcgggccttatcggaccagtattagacaaaatacaaaaaaaaaatgcattaactatcgggccaacaatcaggccacaatcgggcgtgtatcaaacctacatacatattttgatcacaaaagaagctatcgggccttattgtcctctatcggacctatatgcatattctaccaaaatgtaaaaaattaaaaatgcatcgacccataatcgtcctatattaggcctactatcggaccaaatatttggaggcatatcggggcaacatcaagcctatattgggccaaaatcggccatttctcttcaacctccagacttttatttgacacagaccatcgggcctccatcatgcctggatcgggcccgacctgaaacccaaatttcacctgataaatcctaaaattcttaaatataatcctaactaacagatttcacagaacatcgcaacaaatcaatcgatttctactataaatcaataaatccataaatctaaacactaaaaattgtatgaaaatattgaaaagaaaaactcaccttagacattgctgccggtgatggattgttcatcggtcctcaattgttcgtggtatatggaagagcaaccgagaagtcggtgatgatggttttgagggttggggcggcttgtgtgggcgatttcgtgtgtggtgaatatgagagagagagagagagagag

SEQ ID NO: 168544 - DNA, 1063 bp, Cannabis sativa
gtcgggtaaaagtaattccgacaccttctttaaactcagatgttggcgatcattgggcttagggtgaaaagccgtaccatggataacccaaggatcatcccaaatacttgtctctctcccatcagatattagcttgcatgccccttttcttaaaatctctttagatcgcaccacatttctccaaaaccaagaatcggagctcttaacctcacagtcaagaaactgcttacccttaggtacttagctctgaggacattacagcacagcgattgttctttagtgagcagagcccagccccacttggctaacaacgcttggttcgtctccacagtcttcctaaattcaagccctccccgggatttggggaggcacaactggtcccaggctttaagacagatgcctctattaccttgctcacagccccaccaaaagtccctcaccatactatcaatcctagatgcaagctttttagagagctttgtcgtctgcatcaagtagacaggcaaagcaagccccaccgatttgattaacgtagcacaaccggtcttggataacgattttaatttctacccatgaagttttgacaccaggttatcaaggatgaagttaaaatctgcatctttatgactggagtattattaaagtgtaccatactatttgtttcctaagaaatatatctccgtataaaaaataatttggacacgtggaaagcttgcacccatacctattgactttatttttagtactattactacaatacctatttacttttcagaatgacaaattatgtggcgtagtgtaaataatagggtgtaataactctcaccctaccaaactcaccgtacaaaacatgggattcatttcaactttcacatctcccccattaaaaattagatcaatggtcataaaaaagtctctaccggtcaggcttttctgtacagccccaccaaatatatatagggagagagtatgagagattttttttttgaaaaacaagcgtaggattaattataatagttaagtctagacctcctggtcgttacataaaatgtttaccggtaca

SEQ ID NO: 168545 - DNA, 638 bp, Cannabis sativa
gcagctataaatcttgcctattatgagtaaagacgctagtttgaatagtggagggatcgagagatggtaaatatgagagccaaacaagcaacaatcgataatcattctaggcaggccactgtactgatcaagagatcctatcaagttaccgggcaacagtcaggggtagatacttacattcctactgagctacagtacgagctagaagagcatctagctggacacactcagaaaacccaagttaatgagttttccaatccactgtcacagggtcagtcagtgggccacatggtagacgagcaagtcttgccaactcattacttgggaggaaataattaggatattgtctgtccttagacaaatgtattgaactaacccataattcacaataggcagataagaaggcctccaagtgaatcagtctttgaccaatgggtactgttcatgacctcagtaatgatttaaatcgcagaagaggattagacgggcacgacatccctcctattgttcagccaaataatacggataattatgtaccagaccattttctaagaggtccacatgtgacacaagtcggtcaacaagaaggttaagttaatccattggtgcaagcccaaatagatcaacttaagagtctt

SEQ ID NO: 168546 - DNA, 1056 bp, Cannabis sativa
tacaccatcttaaaatctgggtgcagctacatgatgttcagtcgggctttaaaacggaaaaaatggtgacggatgcgggaaattacatagacagctttgtgaagtcagatgaaaataattttaacggagtgtggagagactatttgcgggtgcgggttcggatagacattgagaagccattgaagcggagaatgaagctccaacaaatcggaggggactggttttggatcaattttaggtatgaatttgttcctaccttttgctttatatgtggtataattggtcatacagaacaatattgttctaggctttttattcaacctatatccaccattgttaagccgtatggcactttcatgaaagttgttcctagacgtactcagtatgctatgagggcgaagtggttgcgatcgggctcatcgagttctggagttcatggaggtcaggcgccggtgggagcaaggagttatgggggggattctagtcaggatattcagggattacatggaaaaaattcgcctggcttctcgggtacaggggtgcgattgaatgtaattgatattaatgggagaagtatgggggataacataggcgtgatggctgggagtaatgagggagctttattgggtaatttggagagtagacaggtggctttattgggtaatttggagagtagacaggtggatttattgggtaatttggagagtagacaggtggcggtcaatgatgatgaggagggattacttttcttagataataaaagaaagaggttgggtaaggaagtggctaatgggccgattgggcctatggagggtttggtcaaagatattaggccaagtgggcctatggaggggttgatcatggatatgggaattgatactaatgctcaatcaaaaaacgatttattggcgggtccgacggatcgggctcgccaatcattatgagtactttaagttggaattgccatgggcttaggaacccagggacagttcaattccttaaagatattgtttatcaaaagaaacccacttttatttttctttgtgaaactttaag

SEQ ID NO: 168547 - DNA, 637 bp, Cannabis sativa
caatacaagtaagtggtatgttgtcacctgttattggttctataactcaatattatgtcctacattttttaattaaaaaaaataaaatataaaaaattgttaataacactatcttgtattattaattatcatttgtaacatcatattaggtttaattgtattgtattatattaaattggattatttatcattatttgatataatactatgttaaattttaatttatattaaaatattatatatttaggtatctataaaaattaataccacatatagttttatataaaaatattgtataaaatacaatttaatataatattatacaatacaatacggtgtacgaagcctaaaatgcttaataacaattgctcaaatattaacaacacaactttacttgtaatgatatatattgtgaacattgttatgagacaccaaagtatttaatatcactaccaggtttcaccttataattgattaacaattttttataatctttattaaagtaaaataagtggacttgatattaaattacaccaataacaatattatactttataagaaggctaattagcaatattatactaaattatgctcctgaaattttttggtcgttgatttaaggacttttatctaattt

SEQ ID NO: 168548 - DNA, 885 bp, Cannabis sativa
  modified_base (830)..(831): a, c, t, g, unknown or other
aacatgttgtcaaaggcaccgaccaatgcaattgctaagtttgatcatgttcacatactataacgtgttgtgtaagtaaataaatttttggtttaaattaataacatattaatctttttaaaatttggaataataaggcaagaccaactatacacacagttgtgaagtgatcaaataaagagtaacccaattgttgagacttaaaaatataattgtgaccaccttattatggtttgacttaaaaaatagtacttgtaatctaaaaatatataatagatacgatctaaatatttccaatcccgtgtgacaattattttggtaataacaaatgtattgaataaagttgcgtattgcaggagtagtattatataccgtgttgaaacatatatttttggaatccttgtgatgttcacgtatgtcgatcctaagattataaatattaaacttataattaatcagtgttataatcactaattagtaattaattaattaatgtgctggactggaccttaacaacttaagtacaccatacatacatatgttgtaatatttgaactagctagtgtccagcttttttctttttcttatagaaacctattacaatttacaagacgtgggatgtactatctatatttatatatgtaatctttcataagcatctataaaggatactctttattttttaacaaaatttgagctaaaatattaaaataaaaactcatttatcttaatgttactccaattatgctctcttctttaattaagattaattattttaataatatattaataatataaaataatgcttctgttgactgaggttttcggcnnccaataaaatattataagattatagaactataagaaaattagagaaggattttt

SEQ ID NO: 168549 - DNA, 888 bp, Cannabis sativa
aatttattttgtctttgttgtgttatttcttaattaaatacttggttaatggttaatatcagctgctaattcaccaaccggctcagcaatcccacctgcaacatctccatctgcagcagactctcccaatactaacacacctgatgcttctattactccttctgcctcagacattccttcaggtacttctttttaaaaccataaaaaaaaattattgtcgttttaagcattttatgtcgtttgttaacaaacacaaatatttgattgtaggagttggaggagggtcaaagtcaacggacggtattaacacatctggatctggtggcaccggtatccaagcgacactgaattttgtgctcttcttagtattcattgtctcatgttcttcaaactattctagttttttctttttttaagcctccattgtttaaccctctcttctcaatgttgttcgaaatttgccattgttcttttttattttttttttcgtttttcctcagttaaagtgtgattgtattgtgtattattgattggtttataatgttagagaaataaataaaagaagaatatactaagtttgatattgataaagaaagggatatggaccaaaaactagctgaactagacatatattttattgcacttaactttataaattaagattgtcaaaccctccaaattttactattgttttgatattacttttttattcaaaaaatttattaagtgccgaggtggactacttaaatttatactaacgtaaagataataaatttttagtgttcacacaatattaattatttaaatattataaaaattattttaaaataaaaataaaaataagttatatttccctataatttgttgggacttttttatttttacatt

SEQ ID NO: 168550 - DNA, 540 bp, Cannabis sativa
aatacttccattctcattcaacaaactgagacaaaaatacacatatcatcacccacgcccacagtttcccaatacttctggtagaaaccatctagctgacataccatctttcccaagatttttagaaggatgtatctgaaagaaggccacttgggtttagtcaacaagttttaatgaggccaattttttataagaaaaaaaaaaataaagaaaagaaaaggctagcacataagaccatgtcctaaatgtaatatttatgctatatttagaaaaaaaaaatagatattttcaaatatatttacattaaaatttagtaacagggaaaaaataggtgtctcaatttccctatccaaccgcatccttcccatcaataattgccgctcatcgtcatttattaatatttttaaacctacagctctgttaatgacccttaaattcctgtatcctcataacaacttttattaccatcttcgttaattattttaagatcacttctttatataatattatacatcatatttttatataatattatattaa

SEQ ID NO: 168551 - DNA, 659 bp, Cannabis sativa
agtatggggtatgtcctttttatgatgcccacaaccagatatatatggttgctgttgtttatgaatgttggtatatggtattgaaagtagtacagtacaataggtcaagagtagggagagttgtcaaaatatgattggtttctttgttcatgtagctttcaattcatggtatcaaaatctagatatatagctacgtttgattgagtacgtagtatttaaatttaacctacctacgtacgtatataactcacttgagaaattaaaaaggagatctatcctactagctttttcggtatatttttttataagacaacctatgatcattctatggctaaacaaaccaataaaactatgatccttctatgcccaattttcaaaagtacaattttttttttatgttttatttataattttacaatccaaaatttttatttataaagatactattataaagttttaaaataatatactttgctgtttcactacaaaaaattgttacatttagtgataactttttagtcacaacataaattttttatgactaaatgtgattttttatcataacaaaaaagttacttgtgactaaaaaataatatttagttacaacttgtcactaatttaattttagtcacaataaatattgtgactaaaaacacatt

SEQ ID NO: 168552 - DNA, 938 bp, Cannabis sativa
taaataaattaattttaagaaaaatatattatattaaaaaagtaattgagacaatttgttgctagttaaatatgtatattacacaataatataacatcttaattagcaaataaattatttttgtttcatatgtttatggagtatatatgaatattattcatgtttacttatgagaatgaaatttgagtatttattcatgtttgcataccgaataactttagaataatgctaaacaatatagagcgtaataataagtagatgaataattatatatacttaaatctcattcccatagtaaaacatgaatagtcatgatactccaattaatccaattaaaattaaatttgattgttattctaattatgtgtaagtaaacactaataaaattgtctttgagctttcatgaaagtgatagatgatgataaacccattgtcaattacatcatcaatatattttctattgaataaggtataccaataagacaagggtagtgagtagaatgttgtttttatattattgtacaattttgtttttatttttattatatatattttttttatttgatttcttaaattgaaattgaagtgttttgagagagcagagagtaaaaagatgaaaagctgttactaattttatatttttatttgttatttctttttaaatgttaaataggattatttcacatttttcttatgagaccgaaaaatatgcaaaaatggggtggagatgagaattaaaattgttaatatagagatacgaataggaggatccgtctataaaaggtgatattaatttggtttaataaaatatataatgataactgtaattaatataataagataagaattgcaaagaaattaaaatggtattttaatataataaattaaaaataaatgacttggaccaattaaataatgttaggtgtgtgtttaattgt

SEQ ID NO: 168553 - DNA, 673 bp, Cannabis sativa
atataatccgatgagttgtgtatatgcatttttcctagtgtttcttctcataatgttgacacgtaataataagatttacattactcaaagagctaactttaataaattaattaatatatattactaaacattggttaattatatactcagaggagcatatatatagtactattactttaatctcaccatttacaaatgtaagtaagtgatctctagtagtgattctccttttcacctataaatattccatgttattctacaataaccaatgttgtcatcaaataaatatatatattattatataataaatatattatggtcattgaaattttgcattttcccccttcttctatatgtatgctttgataaattttgtacagatcatacttttctgacaaattaattacaataactacattatttttcctgcctaataatatataacaataaaaaaattgtgaattaatgtatatatatagtcatcaaaactaggtttgtagctagctaatttagtatttatatatatatttttgtaataaacttatattttgtatttcgttgactatattgcaggatgccaaaaatgaaataagcatgctgaaacaagagattgaaatactacaaaaaggtctcaggtattagaaaaatgaccatttatatatatatatatata

SEQ ID NO: 168554 - DNA, 568 bp, Cannabis sativa
tgtcaagatggaacttgtcttttacgtggcactgatttagaaacaattgagcacttattatttgaatgcccatttagaaacaggtgctttcaagatgttaaatcttagttgggatggtaaggaacggtcaacccattaggagcttctttgaggtggatttctcgggcaaaaatttccaagtttaagaggaaagtttttgctgctatagctgctttagtgtatcaaatttggatcagtcggaataattgttattggaatgaatgcaaacagtaaggagttgtgtacaacaagtaaaaaatgaatgtaaaatagagaatccaaagcttactagtaacaaagattacattgattgattcaattctttacaaatgtattagttatatgtacaaactttttaaggtgctgattagtttgtaaatatggatgattttgttttttggcaatacaatttacctaattcagacccatttctctatgcaacgttatttacaaggtcatattcaaaatagttacaaatagaatcaaacctatccttccttctattatatgccctactcaagctgtgttt

SEQ ID NO: 168555 - DNA, 513 bp, Cannabis sativa
gattgctcaaataaaaaataatatatattgcgttgaattactgataaatattataaagaaagaagctgtagcctatctgggctcttccaaataccaaaaaaaaaagtcatctattattcataaattttattttagatcctcagttttttttttaaaaaaaaaaaacacataataataaaaaaataccctctgataattaaaataataagaaaaaatggtcccataaacatagtctttggtaaataaaatcttattttttgtattatccttcatgtttggtgaaaaaaaattattattttaacttaatgtgaattttggaaaaataattgtgtttcaaatatataaaaataaaaaataaaacatattttttagatcctaattttatcatattaaactattgataatttttttaaattttttttaaaagtacttacaataaaaaattagaaaatttcacaatacaccactacaaaaaattactactttaaattagtaataattttttagtcacaa

SEQ ID NO: 168556 - DNA, 610 bp, Cannabis sativa
agttctataataattctttttcaaaaaacaaaattctataataattggaaatgagaaattttaatgagcacttttaaaatgttaagcattatcaaaagtgacacgcttggctggaggtgttgtttgaggatgttataattttattgtattaattttttgaatagttttatctaatgtgactcgcgattaaaattttacagctcatgatttgacaaaacatgtccttcgattagacgatgagttatcctagttcgaggaggtatcgtcgccaattgtagattattgtatctttaattatgtgtgattttaatcaccatgtcaaaaaaaatgacacactgatattgatacaatttaaaatcgaatcttaaatattttgattatataataatataggaaatgttaactacttacaaagcgccacatagtatggtattaaatacctagtaatattgttaaaaaacttattaggatacacagtcactatttagttgtttggtcattttttttatcattgaaatttagcattcatcatacaagagtgtttgaaaatcatcaaggacaacattcccatgaatgctacaatcaaagaaaaaccgagaccgcctagcca

SEQ ID NO: 168557 - DNA, 1037 bp, Cannabis sativa
ggaaaccccatctcatcttcaaatttcagcccaaaaagcacaaggatcccaaccaaaacatgcatacactttaaattcatactccatggatttaaaattatcatagcaaagcattagaacatataaatcaagcttttaatcctcatcaaattatgcatcaaaaaatcagattataacaacaataaaaataagctcaaaacttgagctaaatcatcaaaattgcccattcgaaagcttgaacacctaaactaaaactcatgcttgaaaacaaccaaaacaaaaccaatactaagatttctaacccaatcacaacttttaaaactcactaaggtagtctagatgcataacccaaagttccacaagtgcaaacaacataagaatcatcaatttaacttcaattcactacaacatgcatttaatcaccttgaacatcaagagcacaagatattatcacaataatcagcctttaaacttaaaaattcagaggtgaagcaattacctcaagcttttccaacaattacaaatccaagcttaattgaatatgaatttttaagaattaacaaattggaagagatgagaaatagagacagagagagaggatatcagttttagggctggacataaccagagaaatgccttcaattttctaccaaaattcattttgttgaaaaatcaaataaatggtcaaaagaccaaaatgcccctatggctaaaataagacataagcatgcattcaagggcaagagtgtcattttcatcacatacacactcacattaatttcaagttattcatatatcaataaaatgccaacataaaatcccaaaaatttatttcggccccgaacccgatttggcccgaaatacccaattgtgattatactgtgcctaggactgtgcatgggttgtgttggtcgggttaatgctattttagtggccaacccaatgagatcgacctattaaattctaacccattcatatcaagttttaattataacccaacccaaaccaactcattattgatcgggttgggttgggtt

SEQ ID NO: 168558 - DNA, 1478 bp, Cannabis sativa
aactattcattaataagtaatatacagattacttacgatttttatctccgattataaatttatgtatgattgtgcttcttaattaaactttttagtccattaaaattctaaactattcacaatgttgtaaattattaatttttctatcaagttttatcacatgtagcaaataaaatgatgatatagttgctaagcgagttgtcatgtcaatgccatgtgtgtaataaatttgaaaaaattaatttattttttaaatttagttttatataattttcttaataattaatcaatttttaatttaatgatttttaaaaatatagaatttttattttttttaatgttaaattatacacattgcattgatgtaacaattgattaaacatttatgtcatctttttatttgtcaagtgtgataaaacttgacagattgtctaatttataatattgtgaatagttcagatcatttgtaacagactaaaaaattgaagggtataataatacatatgtcatagtttggagataaaaaatcttaaatagcctaataaataatattgagaaaacttcatctcttcctgtctaaaacacagttaaccatttcggaaactattaacttttaagagaaaaaaaaaaaactaatttttaagcttgaactaagaataaattataattttaatatttttatcattcttgtgtcgagttattttttgggttttttgcaggacctcgaggctcctacagtattgtcatcgtagtaaagtttaagcactaagttcgagatagaatagtgcggtttctttacgcttaagacaccaaaatatcagtatcttgattgagcaaagaagacgaaatgaagctacttctctatataatagctctattgctaattttttctctttctggtaaatgcatttttaaatatcatttgcttccttacgagagagagggctttaaagtccttgtcttttatttgctttaacattttggtagttataattttaacggtcttaaaaagttgagttgagagttattaattcacaatgaacatagtcatggtcacatttttttaattgtataattattgtcaaattttaccataaaattaataattcctacataacatacaataacaattttaaaaaatatgaattaaaaactttctttgaactaatttaaagttattatattcaaataatttcaatctatcatccgataaattaaaaaaagtacaatatttaattacatgcaaacaaagtttaattaggtctcttagctagcttctttaaatttaagttttcttcttctttttctttctccttattttaaaaaataatcaaacttcttgatcaataacttcccaaataataagaagaagtgatgtaccaatcgacatttctttcatcatatgtgcacgacttattcccgcattgcttttcaagttccaagaaatactgaaagtactcattaggatgaacaacttg

SEQ ID NO: 168559 - DNA, 584 bp, Cannabis sativa
atatctgacctttttattttaagcgaagtagtgacatatgtttctccactcacaggttctcttggtggaatccacttaatattgattacatttcccctccactcattcatgtgcatgcgtttcatgtacgctcttaaaagtgcgtcgaacacttcacttgttcaagcaaaatgcacatttttttttcttctgagcattttgcaacgttaaatcttgaagtacagacaaaaccttcatatttgtttaaaaaaaaaccaaatacttcatcttcttcttatccttttatggcctgtttggaactcaggattgaattagacaaaattagattgtgctgaaagtaattctgtgtttggtttaagaatagactgaactattttatttattttgtttttttaaaaaaaaacttgaattaaaataaaaaatatataataacaaataaataaaaaatgaataattcttaccaaaaaataaaaaaaaatagttaaattataaaataaaataaaataatatgtcatatataatcaaatgcatatcataaatatataataaaataatttattatatttatatttaataaataatta

SEQ ID NO: 168560 - DNA, 533 bp, Cannabis sativa
  modified_base (448)..(456): a, c, t, g, unknown or other
atcctgtgattgatgcaaccataaaatgttgccaaattacaaatcacctcacctttggtggggtctttaagctgaggttggaatttcaaccttatactaaatttgatattgcacctgtcaataaatgttacacagttaaaaattaatgataacaatgctcaaaatatcattcaagattagatattctatttatggtatagtcatattagaaaatatacctcccacgttgcaaattccattacattgtgccatttcaaatcattattcaagctctcttaaaacttaatatatgatacacccttctaactttaaaaggttattaggctaattggattttaattaatagtggactacaatttattggacaaattatagttataagtctcatctcatgtacttttaatacatttagggttcgtttttcaacgtcgtattaggtcgtattgtnnnnnnnnntattgaattggattatatatatcatatttttatataatactatattaaactttaatttatagtaaaatattatatat

SEQ ID NO: 168561 - DNA, 1200 bp, Cannabis sativa
gtctttggttcgtttagaagatctgaaaagcggaattcccaagtacgaagcattagacgacattcttttcatctcaaggaattgagagatagcatgagtcctagcccgaggaacccctctggtgaaagtaacagatgatttcatgaggttgattgattggccagaccaactacaatactcgttgaggcaatccataaaggctttggcttccttcaaagtagcttgcccaaacagaataatgtcatctgcaaacatgagatgggtaaccgagtcaccttgtcttctcattttgaatcccttgatccgattcttattttccatttcaaagaagagtctcgataatgtttctgccgcaatgataaaaagggtgggagatagcggatccccttgtcgcaacccgcaagtaggtttgaacttccccattactgaaccattaagtagcagtttgatctccttgactgtgatacaggccttcatccaagttaagaacaggggagggaatccgagagaagagaggacttgaatgatgaagttccaatccaacttatcataggccttctccatatcaatttttatcatcataaagcctctcgaacctcgtttcttcttcattgaatgaacgatttccattgcaatcattgtgttctccgtaatgcttcggcccttaacaaaagctgtttggttgggataaactattcttggtaatagaaatctcattcgattagcaaggatcttggatatcaatttataggagacattacataatgctatgggtctataatctttggggtaagcagggccttctttcttaggaatgagcacaaaggatgtgtcattgataaagtgagacagagttccatggttgaagaagtatgtcaccatctcaatcaagtcctctttcacggtgtcccagtgatgagagtagaagctaggggaaagaccatccgggcctggagccttatccctgcccatctcattcagtgctgtagcaatctcttcggccgaggggattgcggtgagattgcaacaatcttgagttgaaatacagggattaaaaattctgttagaagggggcatactggaaggggcattttggctgaatagctgggagaagttctcaataaacacattggaaatttccttaggctctcttatccaaatcccatcatcactccttttaatgcattggatatagttcct

SEQ ID NO: 168562 - DNA, 759 bp, Cannabis sativa
tatatatatatatattgtcatttacataaaattatatatttggatggttttttttagctcaaatcatctgacagaaagaatactaatttagatagagcaagttgccaaactattatttttaattttctttcctaaaagggttataatactgatgattcccctataatgtttattaacatgtgaattatccactaactgattactgactgtgcacatgccacaattagaccatcaaatttaaaattttacaacttggatatttcttcttcttttcaaaaacaaaaataattgaaacatatggcatctcatcagaacaaattaaatgaactcatccttgcaaaacgtacgtatcataattagtaaataatatgcagaccacatagaagtgagggggaattgtctgtgaaaaatgtatatgtattttacatatatttataataaaagataatatttatattaatattggtgtaataattaagttagatggtatatgatagagttcaaattccaagtattttttttaaatttacttttgcccttaactaccttaacaaaaaaaaaaaataataaataaataaaaatacgcccattttaaattttagatccgccatagtataataatagcttacttatttatttttaaaagagatacactaataataaattttactgaaagtcaaaacaaatgtaatctcgtaaaatattagtacaagataattacatataaatataagagaaatgttaaaagatattactagt

SEQ ID NO: 168563 - DNA, 527 bp, Cannabis sativa
tagttttatcataagtatattctgtttataatttttaggattttttttattagataattccaccagaaatttggtatctttctatttttttttataaaatggtaatttaaaaaaaaaacaggagtcttttgtatttaaaagaaaataacattttttttttataaattcagaacctcattaagtgaagcccctaggtagaggactagcctatttttggaaaaatttataaaaatgtgatttttattagataaaaaaaagatagaattttgggaaaaacagtctaaggtaaccagttatcttatactatttttctcattttttttattgtcttttttttaaaaaaaaaaatcatattttttggaataaattgtataaaaaacctataaaatctgtaatttttttttactaataataagagaaaaagtatgtatataaaataatttatttgattgtgacaggcatggtattaggcaacttcaaactgggtgggccgatgggcctggatatgtgacccaatgcccaataca

SEQ ID NO: 168564 - DNA, 1033 bp, Cannabis sativa
actttttaatactatttttaaacaatcacattcacatcttatatttatatatgtgcgcaacattttactaagtatctcttataattaattgtcatattaacgtaaaaataaaatgaaataattacataagaatacgtgcatttgaaaacaatagtataaatacacccttgtaaattaataccgatttttttcattaaatacatacacgcataccaaaactagtgtttcatttttttgtttgaagtggcaggttctacttttaaaaaagattaaaatttaattttccttacttaatttttgtcagtacccatacacactttttaaaaaaaaaataaaaaaaaacctttcaacaagtaaattaatttttttttattattactttcacaattctctctcatatttttcttttcatgtgtaggcaattttttttttaatatactaataatttaggtctcaaaaattacactattgtaatttattttttaaaatgatcagtttaatatgtaataagcatatatttatttgttgttccggaaaaacataactaaaattaatatggtactatttgagtctcttttaatcattaagcaaaccgtaatgaagcttaaacaaaattcaatattatcagacaactttataaattactaaaaagtacaatataataaaagaatttatagtaatttatgttatttcttgatatgttgaatattattttagagatatcatcacatatgtataatgtgtagttattaatttagcccctgggtgatttttatttatataatgtatttattttggtgtgttgtatgtagattatatatctctctcacatttttatatatttttttatttttaattttctaattaaactatataaatttttatattccttttaaacttatatgttataaatttcaatatattttttatatgaatacaaaatagtaatttaaacactataaaataagttttttttttttttacttaacccataaataagttatgtttcaaaataataaatacctatatatta

SEQ ID NO: 168565 - DNA, 713 bp, Cannabis sativa
aagcttcctcaggtaagaactcaaaacaaaaaaacataaatgggattttcgaaaattttactctaaagggtacgtttggttagaaagaatgaaaacagaggaatatgacttgtgttggaatgacttttcgaccaattttgaaatgggattgttattctactgaaattgtagaagagtcatttcaatgcgagtaaactaaggaatgaaatgaaatttgattcttttttattctgttacctccaaccgcacacaccctgatgagtggaagagtcatttcaatgttaccaaacaaaggaaatgaatggaatgaaattcgatcttttttctattctatgacctccaaccgaacacaccttaaggtggcgtttggttggaggtaatgaaatagaatggaataaaaaaaatttattctatttttttatttagttgccattttaagcgttggaatgaatgtcactataatggaataacttttccattattactatttccttacgaaatagaaggaatgaccattccaatgaagacagataaaaaatttaataatttttttatcaattattttttatgcattttaaacttgattccattcttattcctatgttttcattcctcccaaccaaatgctacctaatagtgcgtttagttgaaagggatgaaaacatgggaataggagtggaagtaggaataagaatagtcattccaccaaaata

SEQ ID NO: 168566 - DNA, 716 bp, Cannabis sativa
tggccccagacatttttcgaacacgcagatagctggagtgaaacctaaaatagtaggatactcaaggtcgatcttgagattgggtaggacttagaaaaaaaaatattgggccctttataaaaaaaatatatggtattttttaaaaatcactaaaaaaatatgtatattttcaaaaaaaaaaaaagttgttttggactcgggttgggtgggtcctaggcgtaagcctagttcacatttgctcaagcctgaccctgagagcactgtagcacgtcccctctgtacaaaaggtaaatgtgagacctttattacaaactcaaaataaacatagggatatgaacattggttattttggcattcacttttctcatacaaaaagtggtggcttgtaccttcaactgtcgcattagccctacctaccattctaattggacctccccaattgggtgggatgttgtattttactttcctaatcacatgtaagttgccctattagagtgttaagcttaattatttaataatgagtttttgttaatctagcctatgagggagacttttgcctattaatagtctcactcccactgtaaaagagatctaatttctttatttataagccaaaacaatattgttgaaatcattagaaatcactattgttgtaaacttcaaccacactaatatctaggggtgttcataaaatagttgatccaatccaatccgca

SEQ ID NO: 168567 - DNA, 626 bp, Cannabis sativa
aaaaaaaaaaaacaaaaattgttaattttttttatcatttctatattcttgtagttttaaaatacatacgtacataaaactaaagagtaccgaaatataaaaaaaaaaactaaagattaatgaatatagtattctctatatataatgtagtgcatgaataataaattttaagaatatatattttatgatgtttaatttatttgaatttgaattttaccacagaaaacttttatgagggccagaaaatagtaagaaaaaatgaagaatttttttccataaatttgatatgagagtattttatttataaattattttatattattttataggaccaatttgatacaacaatattgttgtgagaaaaaaaacaattatatggaataggcaaagctacccaagcataaatttatgacatgacttgcttgttggaataggcaaagctacccaagtataaatttatctggtaaagttttgttggatagttaaggtgaatcgtttattatgtaacttgaaattagaaacacacaatatattttctttaattgtaggtacgtactcagtgacgaagccagaaatttagttgagtgagggcttgaataaatattaagtcaaaactaataaaaata

SEQ ID NO: 168568 - DNA, 723 bp, Cannabis sativa
aacttttctataagctgcccaaaactcacattaaactattcaatctcataatcaaacacagcatatgtagaatcattgtttatgtttaaaaggtgaatttttttgtgtaaataagaagaatataaagggatcagttctccaaggtgtagcatcacgattaattcagacgcaaattacccatttaaaacaagatttcatcatctgccccaaaaatcaattaataaacaaaaaaaaaaataattgtaaagggggaagtgggaagaaagcgatcggaacctgtcgagattcacaataacatcattgttatcagcaattgactattgaatttttatcgtcacctcgccttttccttcgtctccacaatttcctctgataaatcttagaaaaaaaaaatcaatactttgaaaataaaaacaaaaacaaaaaggcggagagctcagaacttcttagagggttgtgtagccatcatcggcaagagatatgcctctggcacagataattcttcctcacggctcactgctgtaatagactaaggaagaacctgaaaaatcaaatcgaaagaaattttagggttttcagagggattagggttttagatgattgaaacctaggagagaaagaaggtatttataagagaaaacaagttaggaggcacatgcacggcacgtgaggtcatttgagattcaaaaatctcatatattttttaggaaaattctacaatgc

SEQ ID NO: 168569 - DNA, 1159 bp, Cannabis sativa
tctctctctctctctctaactatcgatccctctccaatctctttggttctcaacgcaaccacggtcagaccacattgttggcctaaacggaccgttggcggagcttgtgaaagccaaagcttgcgactgtggtggagctcgtgaaagccaaagctcgtcaaagccattttttgtgactccgattgatccatcccagggtcccgacgagccaaacgaagctcatttttttttgttttccctcgttgaaaagttctagatcagtggctcccatctccgagtgttattgtgaaactgagaccgccaccatacacagtggtgctccggtgagggtctcagccagaagctattaatattctgaaattaagtttttgtgtttggactctaccgataatttctatgtgctatgagattttttgttgttgttgttgagtttgattatttgagtttgttgttgatattttttctatgtacaatttaattatttgagtttgatatgttgtgattttttttttcattttcatattgttctgattaaatcatgagcaaaatattcttgcttattattcttagtattattattgaaattttatataaaaaaaaaattatagagatataataaaaaaactgagcaactaatattaaacaaaaaaaatattataattataattttaatataaataatatacatgtaatattatatataaaaaattaaatatacagtatttaagttttttaatttcttaattactaaacctatttttaacaattaattttgtttttcaaaaatacctattttagtgtcagtttaaaacagacatttatatcaattagtttcggttttaaactgacactaaaagaaaaaatatatatgtatattttaaaatgtcagttttaaaacgacactaaaactcattcgtctctgtttataaccgacacttaaactctgactttttgtaactgtggaataggtgtcggttctttgaactgacactaaaggtataaatgttagtttaaaactgacaccaaaaatacagtttgtagtagtgggtatggtggtaacttaattttggggtgaattaagattgataaatgagataaagagaagatggattgtgagaataatgatttgtgttgatgagaatgaaatggaagtggaggg

SEQ ID NO: 168570 - DNA, 558 bp, Cannabis sativa
tagatgtgctctagtagacaggcggtgtgctctggaggacaaaacctgagaaaagagcaggaactctcgaggtagagtggacagatgaaagatcgtttgagagacaagatgatctttcgtttgagggaaggattgttgggtgtgcaactaaagtcccacattggcttaaaatgagaaagatcatgagtataaataagaatggacaatatcttcattggttgagaccttttggaaaggtgcctaaaaacaaattccgtgaaggcttgggctcaaagcagttggagtgaacatttggacccaaaaaacctacccgcccacaaaactcagccaacccgaacccgaaaaacccgaaaaaatagggttttaaaaaatatggttcgagttcgggtggaacttgaaatcttttcggccaagttcaggtttgtataaagtgacaccaaaacacgggttagactcgaacccgcccaaaaacccaaaaatattaataataataatttttttattttttttataaggcaacttaactttcagatgtaaaaacaaaaaaaaaaaactaat

SEQ ID NO: 168571 - DNA, 788 bp, Cannabis sativa
gggggaaaggggtagccgaaattcgtcttcctcggaacaggacacgcctctggctaggcaccttcgacactgccgaggacgctgccttggcctacgaccgagaggccttcaagctccgtggagagaatgcgaggctcaattttcccgaccttttcctcaacaaaaacaataacaactccgactcatcggccggaccaagctccgccagttcttgtcctaataataaggctcatgaaagttccaaaagaaccgttcatcgaaaccaacctcaagctcaagaggagttgaatattgaggcatcggattcggaaagaatgccgccgcctgctcgagacgacaatcctgatgatgaatcgggacttgggtctacggcaaatgacgaggttaaggggttttctgctggggaaggtagtgtggtgtctcagtctcagtctcaggagttggtttggggtgacatggctgaagattggctgaatgcaattccagcaggttggggtcctggaagtcctgcttgggatgatttggacgccaacaacaaccttctcttgcaatcacatgatcttcagttcacgaatccaaaccagcagcatgagctaaaccaacaagcacctcaagatattcaaaaccagaggtactgctttgagaaatttggttcatcctcaacttcctcctcttcatatcctatgaagcctttcttttggaaagatcaagatgatccataagcttgaaactctcttcatttttctcaagggggtaaggaaagcatgcaaaaatatatatatatatat

SEQ ID NO: 168572 - DNA, 591 bp, Cannabis sativa
  modified_base (531)..(533): a, c, t, g, unknown or other
ttcaacctctctagcctctcctccgttctggcgattatactcctcatcttcgatctgtccaaccccaatctctttcaacaaaaacccaacgggatttgatgtaaaccctattggtaagtgtctagtatttccccctttctcttctcttctttgatgtgtttcgaagaaaatcccaatggggttctattttcatcaaatttcatgggtttaccgtctctctctctcagatctctctttgttcagtgtaaattcagccctacgccgaggtgtcgacggacttcagctcgctccaccggctacttgcctctcctttgcagatctctctcctcggtattatatatatttatatattgttatattttattcttaggtttcgttgatgatatttaaatcagtgtggtaatgtgttaaaagattttgatggattgttgtcctcatctaagaacaatgctgaatggagtaagagtactacctcaacaaaatatgtgataggaattaaaatgtatatatacatatatctattctatatannntgtgcctatataactgaaatttttggtttttgagaaatttatgggtgacttttaattt

SEQ ID NO: 168573 - DNA, 801 bp, Cannabis sativa
tgttaagataaaagtatatttgttggttattttaaacatgtaattcaggtaaaattgaataattactgtcctttgtaataattcttgtttcttcataataattattaaattaaaatatacaaaatttatatttaattatactaataataataagtaaagagcacaactcccaatataaaaaaccaataaaaaacaaacaattaaaattgaataattactgccctttgcaataattcgtatcttttttttttataataattattaaattaaaatatataaaatttatatttaattatactaacaataattattaaagagcacaactcaggacacaaaacaacaataaaaaacatcacttgttgtggtaacattgttttaacctaaatgttaaaacatttattacctcttatctagcaacatatatacttaatattttttattatgtttattaaattaaataatcgattatgtttattaaattaaataatcggtaagaaatagacatactagctttcagtttatcattattgtattttcataaagcacattagagtggttaaaaattatattacaaatactattagatatcaccacatatgtggcaccatacaaaatttatcacatgccaagaaggtgagattaacctaataatgaaaactctttaagggtacgtacgtaattggttaatgatttaatcattaatagaaatactattaataattatatgaaaaatatattattgatgtctagtaagtcgagtcacatataaaattaaaaaaaaaaataaaatttaaaaatatt

SEQ ID NO: 168574 - DNA, 1138 bp, Cannabis sativa
cctatattatttgttagatgacacaaatattctcatattttgagctgtttaatatgtaatgtgtaacatgtatgcatgctgttaggaaattgagattggggcaccccaattatatgtatatatgagaacctcaaataaaattgagttaaaataattgtataattgacaaaaaaaaattattataacaaagagattacaatatttttctttcaaattaggaaattaaacacaatgacaagaacctttctcttatatattttaggaaaaaggttataatatttatttatatatacatatatattttttcttggaaagtgatatatatcatatatttacttaagaattaaagtaaaacactttctttgaattttgtaatcaacttgctctcttagttgtataatctttgacttggtcaaagcttaattaagatttatgccaatacttgtttcatgttaattattagttccaaagtggtacgtatatagtacttgttgcatgaaattaagaataagcaattaagatgtttcactataaaaaaaaatcaaatttttagttacaacaaaacttgtgactaaaagtgaaaaaattatgtctaattataaattatcattcttatgttgtgactaaaacgtccatgactaattgtattagtcacaaaaataacaattgttgtgactaaatatatttttagtcccaagacttgttgtgactaaaactaaattaataaaacttgtatctaaatactatgttttagttacaatacttgtgactaaaactaaattagttacaacttgtatctaaatactatattttagtcacaagtaagattttattatgttgtgactaaaaaattgtcacaaaaaataattatttttttgtattgttaacattaattatatatttgtgattaataatgtttcatttgctctaatcaccccgggtagtgtccgggatgattttcgatcatcatggcatgggccgcatggccatgatgccaagatgtgaaggaaaaactactattgggaaggtggatattgtgacgaaattaggggtgtgcataaattaatccaatccaatgagaaccgaccgatccaattacaaccgaccgccaaacattggatattcaattgtaatcgga

SEQ ID NO: 168575 - DNA, 1103 bp, Cannabis sativa
ttgttaatggcaataccttgggggcaaaagctggaacagttcttaaggtcgatttggatgagagcaatccggccctgtggaagaaatctctcaatgttttgattagcctcaatgtcaaccttcctttgttttcgggttgttatttaactctggattcgggtgtccaatggtgggtacaattcaaatatggaaaactggggattttttgttataactgtggtacattgggtcatcaaagaagagggtgttctcttacctctccagtcacggtttcaagtgagaatggggttcctttccccttgtttgggtcatggatgtcaatggattcttcatacaaagatgtcttctcgggtgcccattccttctctccagcttcatcttcggcggctcaggtgggcactggttcaattcgtggggggagtcggccgttggctatggtccctggtgtgatgggttctgttcgacgtagcccaacgtctcggtcactgagtcgctctatgatggtgacggggcgtagattgcagggaggtgtgcagggtcgcatcagggagtgggttcccaaagcttcccctagatgagagaaagtcgcctgattattttccattttttaattcaaacttggctgaacccagtaaaaagagtgggaaagagaaaggtctttttgataaggatgttgggccggctcactcttctaatgggccggtctcaaaagtgggctttagtaatgatggagcttcctcccatgggccttatataaggtgtaatgtctccaatttacctattcatgggaccgagcccaatttggagaaccaaaattcagatttgcctttgattaatgtaagtgggccgtgtgctaattttgggccgagtgggcttcctggtttgaaaggaaaaaatagtgcttgttgtgaaaggccaaccaagactatttccattgagagttcaacttgtggccaagaagtgaattttcttcatgatgaatctcttgccctatccaatttttttcaggcacaagaaactcttattcatgagctcaagaagtttggaaacctggacttatatgagattaaagccataggtggtgacattggggtcccaactgc

SEQ ID NO: 168576 - DNA, 1498 bp, Cannabis sativa
gtgtttggatgctgagggctgactttattttgtgtatagattctctgcgtatttttctttattgatgtcttgattgaatagaggttggatctatgtatattttttggttcttcaggtcatgattctcctccaaaaattgtagaaatattataaaaattattttccatagatgacgccaaatgttgctggagaaatttagacagcactaaatttatacgagtattcaaaaattatttgaatactcgatataaacatgcgagtactcaaagaatatagtataaattatatacgagtattgtaaatagtataaaatagacacataaattatagtggttcaacaggagcttcgagcttggcttgcctaatccactattgaaaaaagatctctggctctatttctttattcagatcagtccagcctcctttaaatggaaaaataagcccctatttataggtagtgggtagggattataatagtccggtcataatgagaccgctacaactcacaataataatttacatattaattatattgtttacaacagttagaatacaaatgtaacgtttgccatggttgttccttgaatgcttgactgttaatttccgtcaatcgatgtgttcacattttttttattgatactgcagtgtctttaaatatgcgaggtatacttttcttgatatagcaaaatctctttcagttagtaattacaaggttcttttagtcctgcgagccattttaaataccaccaattcaatataatcaagtccttctcgcatgaaggaggataaatttatgccaataacaatagttcacctcaataatcatcactacacctcgataaaccttagtaatgttttgtatttcatttagttttattaatattatttacatgaggtctatcgaggataacatggcgaggtccactaaagtatatcgaattctaagtttgtacatgtaaaaaaaatacaaaatactattaaggtttatagaggtccaatgagatttattaaggtcataatacctcatctagatttgtcaatgtgtgctaagattcatcgacgtaaattgcaaacattttgcagaaaatgtaagatgaaagaaaacactcccatataataataaatcttttgaaatatgattataaatgttaaaaaaaataacatattcatatgatgtaaacatcgtaattatctatttattttgtcctccaaaaactcaaaatttggatggtttcagggtgaagacttgaaattgggatttactccgaaaataagaaacaaacaagaattaggtttggttgggaggataagaatgagaatgaaaataggaatagaatgaaataaaatttaaaatgcataaaaaaaattattaatttttttctcatttttccttcaatttcaaaatggaattgtcattctatcaaaatagtgtaaaggctattctagtagaacgacattcatcactttaatatgcaaccaaacaaaaaaaaaatagaat

SEQ ID NO: 168577 - DNA, 1537 bp, Cannabis sativa
ataagggtgcttactggtttactctctatatagtcaggatctacaaggagttgaagggcatatcctttttgagacacaaaaataccttgtgtagatctcgctaatttcaatccaaggaagtattttagctcaccaaggtcttttagcttgaacttggtgtttagtttaaccttcacaacttctaactcttgtgtatgattgcttaccaaaataacatcatccacataaataaggagtagaatgaagctatcatcgaaaggcttgatgaacaaagaataatcagtagttgaatggttaaaaccttcatgttccaaagttgtagaaaatttcttaaaccattggcgagaagcttgtttcaagtcatataatgacttgtttaacttgcatactacattaggtagcaactcccccttaggactatacccttgaggaatagtcataaacacatcttcatataagtcaccatgcaaaaatgtattagtaacatcaagttgatgtaatatccaacattttacagcagcaagagcaagaacaaatttcataattttcatgacaaattgaacacaccatgttacttccaaagattctaccaagccgacatccaaaaggaaggacatctctactgagcttccataaaaatagtttgagacgctcatggaccagaaacttccaaagatctaagactccactgatgtttgattaaggcattatatgcccattctgtggagaaaccaccatgcttagcatcatttcatatgtgtccatcttgataagaggatggtagcctcataactgagagaatcaactcaaccaaattacttttacacaaactattaaagaaggttgtccgagtcctagtcaccatttgccttaattagacaaggaataacaaaaagaagagaggattgcaataataggatcgaaggaagctcgataattattccacttaagccatgggattgacagagtgttccaaatatcaataactctaccacttctcataatgaaacaagattcatttcttaaaacattttaagtagccctaatgcctcgagcaccaaacgataatgtcccccgaatcttgatagaccagaaggagaaagagtttcgaccatacttagccaaaaaagtttggcaccaaagggaattaacactcgaggccatgatcttacttttagtcaacaatacttgtgactaaaagtgaaaaaattatgactaattataaattattattcgtatgttgtgactaaaaggatcgtggctatagttattgctgagtaaaatccacttataaccagtccctttacatacaaatatccacattagcattttacaacagaaaacaaacaagttggactcaatcctaggtggcttcgcctctactggatcaagaaataggagttagttacaactgttattgtaactaactcctagatctgtgatcaaccgactcatgtacaagtatttaaacacgaatcaaagcaaacagacggtagtacaacactcagatcagaaagatatatatatatatatagag

SEQ ID NO: 168578 - DNA, 514 bp, Cannabis sativa
gaaactttttggcacatatggaccaccacatggaaatgacaaagaacagttctggaatcaaatgggggaattagctctgaatgcgaataccccaatcctactttgtggggatatgaatggaacattgaaggactcggaatgttttcactatgttcgacgaagtaacccatctagatatgcattcgactttcgtcgaatggttcaaagagtgggattgatcgatctcggatacttggggcctgctttcacatgggttaaaggtgggaatggcagccaatcaggaggagcggtgaaacgggcaaggcttgatcatgggttggcttcaccggaatggcgaatcctcttccccaatgcaatcattaaccacctttcggcttctggatcggaccacagacctctattacttgataccacagctggtgtaaactgtagaagacgctctttcaagtatgagaacatgtggatgagagacccaaggtgttgctgggtggttaaagaagcctgggctagtcaa

SEQ ID NO: 168579 - DNA, 2179 bp, Cannabis sativa
ttttcagttttttcttctttcccttttagttattcacctccatttagctatagggatccaaaattcttaagataaacataagttattagttacatatgattttgatatatataatttagtccagattctttctctatctaaatacatacataataaaagaaaaataaaaggaataaactacgtacgtacttctccacgtaacatacttaaaagttaagcatatgtgcatgttagaaaaaagagaagctaggtgatatatatatatatatatgatgattaagcaattgtaaataagagagtgaagtgatgattactaatagtggctaatctactttcctagctgtgaactcctttttactttaattaaaattatgattcagttaaggaaagttttgtgttcttgttttcttaatgatcatatcatatatacttattatctatttatatatattattctcgcttaataattttgcagaaagaaagagccagctaatttttgttaataaattattttataacaactaattgttataatttgttttctttctcaagctatatatccctcgacaacaaaacctttttcatagacatatatgactcgcaattcaacactaacaagtcaagaacattattaggtgcatgcatatatacaacaaccctagatatatacacaatatataaatatatgtgtcacatatttctatcatatattaaattatactattttatagaagataatgcccgcaaatgaaaaagaaaaagcaatgtttatctttctgtccaattaatatttgcatatgcattgtatttgtccaagtatacgtataaatatatatattatatattcattctaataaaccgatcatataatacattaatggttagagtctcctttacacacttctaatttatttatgtctttttgaaggctgggaacttccaaaccccactatattggttagcccttttattttgtcttatatatatatataaaaaattatatacctattattatatataatcctgaaaagttaattaagcgcttgatgattaaatgtccaagttgtccaacgacaaaaaaccattattgttgttaatattattaaatgcctcgatcggtagaatgtatattttttttttgcccaactttgagataatgatttccctaaaaaaaaatagattactcaacttggattatatagttttttcagttacaaatgttaaagtatctcttacattagtatcattatattaaattaaattaatgacaccgaatataaaataaacaaagttattaaaaatacaattaagtaatatgaattaatttagttctggcaactagctagttgatcataaaaaacagaagtaatattaaaacaaatatgtatatgcataatgtaggttataatgagaataatcatagctaatattcgttaattgtcaaattgatcgctagtattaagaatgtgatttttttttaagaaatagactatcactacaacgttttaaagttttaattacattcagcgataacgtttttagaaaaacgttatctaatagttattggtcttattaattattgggccttaaagagttattcaaaattgggctcatttaaattggacattcttattgttggatacagtagccttgaagaagaaaggctaggtttcttcgtgcttcagctgagcgcccccaaggataatcgctggtgcttcgtgctcagctcctccgacgacaggaatttcgagtgtcttggtctcctccggtgaacggcgatccaaggtatttactgtaaactttgtttcagtatgtgtgaaattatttcagtatttactatccacagctttctcacccattcttctatttccgttgattgtactctgccgcggttcatttcctctgactccgatcatcttctccggttgaaaatggcttccggccaatcatctctctggcaaagcatctgaagactatcacatctggtaacacaagtaatgttataattctcagtggatacatggagtgaatgttcgaagatgaagagataccatttcttgacacatgcccgtaaagaccactccactggaatcaccgctcacttctccttcccaatttactctacctctctcactaaagccctcctccttcaaccatttcccaaggttttctccttctt

SEQ ID NO: 168580 - DNA, 760 bp, Cannabis sativa
tgcaaaagaaaacaaaacttagtgtgggtattcgggcttccaagctctctttaactctcttaaatgtattttattattttcacaaaatgagttgtgagctaggggaccagtaccttatatcgtgaacaaggtgaatcacttgacgaaccttctccatatcgccaactaattagcaggttgctctaccttaccttatcgagaccaaatatcacttacaatcaacaatctcagtcgattcatggctaaaccccgcacacatcatctccaagtcatccatcatttgatttgatacttaaaagggagtccaggccaaggtcttttatactctacctcttccactctgcatctacaaggcttctctgatttggattgggcatcttgcctaactactcgacgatctacaactagcttttgtatattcctaggtgattgttatgggtgttcgcggtgcgagttgtaaattttttttaaaccaaactgcatatgcagtttttgtaatttctcaaaccgcaactgtaccgcgaaccgcgagatcttaaaactacaaaaatatagtgtagtgcagtgcggtttgagcagtttacactatcaccattatcaaacattataataaaaattaatctaataaatttttaactgtagaaaaaaaaaattcttgttaaacttttgatatcataacatatatactaatcattaagtcattatattgagtcgtctctaaaaataatataatattcatatattacatatatttgttctt

SEQ ID NO: 168581 - DNA, 836 bp, Cannabis sativa
gaaagctatacaaaaattacaaaattataatttgacacaatatataaattaataagaaaatttgggaccacaggtgctaaaacaaagatatattatatacttattacaaacatttatgaatttaattaatgcccaaataatttataattgatataaaagagaattcttacgtgtataaaatgggaccaatgatagtatatatagtagtagagctacttaactttcttttataagtgtcggtctttctataaccagagatttctttcttcatcacattttcataatattattattatttctgtttcaaaaatgtcattttcttattaggctgtactgattggtttgtgggaaaatatataatagaagattcaaaagggaatagaaaaggaaaatgatataacatacaagggttgtttgtgggttggctagagatcacttgggatctctcttgcaagactggataaagattaactgttggcgtgaaagtagggagtggagcaatgtgcgcggtgacattggctagaaatcactttagattagttttgtgggttgcttgcaattggctcaccttctccgactccctcattagtgaagctctgggttgcttgctggcacttgagacgacgactaattggaaacatcattttgtgttaattgagagcgactctgaaaaagtaatcaaaactcggaatggagcttgttctacctggagtattgataactatgtactatgtaatagactctctaatcatattttgagctttaatttttgagaaatgtacatagtatactaatttttgctatttttttacaaaaatactgtcaggtggtatttt

SEQ ID NO: 168582 - DNA, 624 bp, Cannabis sativa
ggctgctgcaacattttgctgtccataaaacgactggcagcaagcatcaagaaaccttcccgtatgatctcgagcaaccatgccaaaaccaaaacgactctcatcttcaaagaaagctggatccacatttactttaaccacccttatattcggcttaacccaaagctctttcccatctcctggctgctgcagatcataggatggaatgctatccttttgatgagcttttctccaatggtgtaaagtagtaattgccaatgtcaacactttgatgaccaagagtcttttgtccttccaaatacaactatttcgagccttccatatggcccaagagatcatagccattctacaaatccaatcctcatctaactcctcaaattgcttcataaaccaggaaacaatatgtgcattaaccacctcagaaactggcacactagctgtagaccagcaggcagtagcaaaagtgcacgacacaaacaaatgatgttcagtttcttgagcttcaccacatataggacagtccaaagaaagggggacatgcttaatatgtagttgacaccgagttggaagacaagcagaacatactctcaacataaaatttttaactttctgtggtatttttaa

SEQ ID NO: 168583 - DNA, 1156 bp, Cannabis sativa
acaactcaagtaggtatgacccattctcccacatttgtggcaaaaatcagggagtttctcatatttgaaatcaacccaaaggctattagaaatgttggtgaatttgaggaaagtgccacggagtaggggttgagttgcatcaatatcgacttggatgcgcataaaaggaccccagccttccaataatgaatcatcatcaacctccagaaattcacctatattagagccaattttctcagccaaagttttacttttgttaaggaatgggagaccatgaacctgaacccaaataggaatgtgagtaaagttagattcaataggaattttaaaattagaaattgcaacaaaaataataggttgattattgaaatgccaaggttgatgatagagtgttctctgcatatctctagcacaaccaaactgaaccagaaaatagcccttccgatctgtaatggtgacttcaaacctcttggaccatagttcagacatttgaaagatgaaggctcctaggttaacttttttgtgagtgagaacgtaggcaaagacactccattcggagatggtagggatggcagaagtgcttgacactcctatttcatggacagctttttctttttcagtaagtttaatttgggaagacatatcttttagaattcgctccatgggaaggaagtttgggtatgggtacttcggagagaagagggacttgtatatatagtgtattttcagtgtggagatgctgatggaaaactggtagagtatgggaaacatggagtcggagtggaggacgaaggtgaggttgacggttaatcagaggttacacacgatcaagaggtaaggagaagataaaaccgccatagagcaaaaggtgggcggacgctcgattcaaaaaatatgatataaagagaatattagtatatgaaaaactatatctaatattatgtcttccaatttattattttatatagagtaactttgataatgtttaatatctatgtgtattttttttagatctatttctaacacatcgtacatagccaagtcataaagagtaggcgacatgtatataattttttttttttttgaataattatataaggcacaattttttgtaaaatatctacatttttacgtttaaagaatgttttttttatat

SEQ ID NO: 168584 - DNA, 532 bp, Cannabis sativa
acattttttaatttttcactgatgccttcttttttcaaacaaccttttattgaaattggagtcttcaccttgttggattctttaacacaaactgaatgtcttttgtgactctacctttgctctttcttacctttcacaactaccaagctttaattcttaatatttatttcaccatctcttacaaaatagtcatggccatgagtatctaaaactctgaaggagattaagctcttcctcaatgttggaacatgtgtaacatcagtcagtgttttcacaacaccatcaaacatcttcactttaatagttcttatttcatacaatttagagcaaaattattgtccatcaaaacagaacatctatcatatgtcttattataattatcaaaacactccttatacgggcacatgcatctagaatgaacaaccagaatccaaaatctaagaatcagaaaagttttcattaactatgatagagagaacatcagagtcactttcaaagccttcaccagtaataggggtgttcatccgatcca

SEQ ID NO: 168585 - DNA, 748 bp, Cannabis sativa
ctatgagcaactggcacacgaccgtcagttgcgactactactttacaacacgtgacttgcaggtgtacctaatacgacgttgtccccttgggactctatgtaatacgagccattatagctcatctataaaaaggtgcccacccctcattcaaaggggttggaaactttgtgtaatagcacatgaattatcagtacaattgttgctctacaaacaagctcaatttcttctaagtgtttatctcttttcttcacctctatcattcactatacaaagttttcgaccttcgttgatgagttcttaccatcgacagtttggctccatctgtggaaaagagagttcaaaatttcatttttcccaagtgattgacaatcattccattatgttgaggtattttcaaagtctccatggcattgaggtctacatggacaaccataacataagaagaaatataccactttcgaccactgaataacccaattgatggcaaatacccaacatcctagatgaaaatcttcaataaagtacatgttgccaccagttacacaagactcgagcaccttgatgcatagacttggaaaagaaagtctgcactcagtgagtttaagatcccgacctcactgctatgaagaagggataaaattcctttgtcggaagaaccaaaggttggagacaacagtggttgacatgcaaaaggtactaaatggtatactcaaaggaaaagctcatacttctctctctctctctctc

SEQ ID NO: 168586 - DNA, 577 bp, Cannabis sativa
gttagattataactaatctaatatcctaatgtagaaacttaaaacaataaaataaacacaaaagggattaagagatccttacagcagggaaatataatgtttccttccgttcatttctgtcgcaaaatataatcaagaactgaatctgcaccttcttctccttcgattgtgtttatcacagtcttgcacaatggcctgagtatcaacttgaataatctggttcatactcaaatgacctttgaagaatattttgatagagtatttagtgaatttcgaaaataataaagaaagagagcaagatgagacatttttaattagctttttcaattcttttctctttctttatataggtattcacttagggttagatttagatgagatggacttaaataaagttttgggttgaaatctaatactagggttgaattcaatcatgagctttagagttagatttttgtcactttattttaactaatgaaactaatgtgttctttttaattttaaatcttatctcagctgattatttaaataccaattttattttaataattataaataattatcaaataaaatacaa

SEQ ID NO: 168587 - DNA, 703 bp, Cannabis sativa
gccaccgccaccactagggaatgagtagtaaattaagtcattatatgttgaataatataataatattgcaagtagcttaattaaaaattaaaattggatgattagtatgtttgaattcaaagcttaataaacacctatatcataccaaagagaattcttggtagacttttcttctagtttcaaataacaaatcaccttttatttttactttattctcctatgactaggtaaatacagtgttatttcttttaacgtattctcctagaggagccatggggcactatgatataaatttagggtagattaactaaaatttgtactgaaattatatagattaaaataaatttcagcatctaaattatatgagatcaatttcaataataataataataataataagagtaatttgcggcataaacacataagttttactcagagtagcagataagtacttaagtcgtattttttgcggtaaaaatactttccgtcactagtgtggaacttccgtaggtacctttccattttctgccatataatatgccaaatggcatgtcatgtcattaaaataaatgccacatcactcccaccagtaacaataaatattgccacatcatataccttaaaaaaactaataaaatattttcaaaaataaaaaacactaataaaaaaaataaattcatgtaaaaaaaaaaactaaaattaa

SEQ ID NO: 168588 - DNA, 819 bp, Cannabis sativa
gactcccacattagtataatattactcgctttgggcctaagcaaattggtaggtagaagttatcaataaggcccaaaggacaccttgaaaaagtgccttgaagaggcaaaaggaaattggccaaaatttctcccagaggtcctatagtcgcataagactaatgagaagacctccacttggtaaactccatttgctctagcttatggctataagatgatgttggttgtagagcttgtgccatcctctcacaggaggacaacttatcacgaggatacaaacaacatccttctggcagaataccttgactaaatagaagaaagaacagatcaagccaacctaaagctacaagactatcaacaaaaggataaaatgtacttcaacaaacaagtcaaggataggaaattcttcataggagacctgttgctccaaagagtgttcctaaacaccaaagctccagcagcaagagtgtttggacccaactgggaaggcccttatcaagttacaaagataacgattaagggatcctacaagctaggaaggtacaacgagaacatggagctcattctcctaccaagatattgcaataatgagcactttcgcaagtactaccagtaactagcttatggaatgctactttgcaatagttgttgtatgaacacatcattagagtaaaaagagctagtacccaggccctttacgggtggcctcctaccgttcttcaacgatggcttctgctttccatgtcgagtagtggtagccatttgatatctagaagcagactttttattatgtaggcttgtagattcaatttatgtaagt

SEQ ID NO: 168589 - DNA, 516 bp, Cannabis sativa
accccagcattgttgagcattatgacaagttttccataggtcttccactgctttgtccacaacattcttgatttgggatacgtctgtgacatcatagtggacaaatatatacagttgttttggcctaaggattggctgaccaagtggccaagtttgtcctggatgtcttctatgactactttagctccatggtgagcaaagactttagctgtacattagccaataccactggccgcccctgttataagagctacctttccctctagtctgaaatatttttcaaagttgctaatgaataagactatttatccataatcaattaactattgcaaaagtttcaagtgattacacagaagaagcaaatcaagtaccttcttgatgctgcagaaattaacgatgaagtgcttcgtagagagatccaatctcgttaattaataagtcttggagccaaggaagaagagcagcaataactaacaagaacctgttgagtcattcaaatagaatatgagttttttt

SEQ ID NO: 168590 - DNA, 967 bp, Cannabis sativa
accatcaactaatccaaggcacaatatatcattacccacattaaccatcaggttgggactaattattgaccacactttatcgttggtcaataccaaatcgatgcgaggcacgtttggtcctatccaggtgaacccaatggacttggcattatagcaagcaccgaatggagccaccgctttaactgttggaatctttacagctttaatgtatgcagcaacaacagctttgtatatggaagtttccaatgttgtgtatggatcaatggtgcttatcttggttcctccatgaccattttcattcttgaaggttagtagtgtagtgttgaatttaactggcttatcttcgatattaatggacttgagtccaatgaagtattcggttgatggatttccttgtgaagtggttacaaggcttcttgggttacgaattagtggagtgtaaatcaaggaagttggatcagtgacgtgaacatcgtgaagcaccaaaggctccttgccaaagaaaacgacaccgtttgaatgaccagacaaacaaatgccaaactttctgggaaagttaaaagctgatgagagcaaagaaggaagggcaactttgttccttccaaggccaaccatacccacagttccacttgcaagacctttcaatagagagtttggagcacaaacgaaagggagattgggtacggaaacagattttccggggttaaatccattggtggattggatatagaagatgtctgtgaataaatcaccacttgtacttactgaaaatgggttagttggagtcacgctacaaatgctttcagttgacttcccattggaactgcaagccccagacaagctcaggacgcactggggtgagccacaagggacaggctttttggttgaggatttatagcccttttcacagtcaacccaaaggaactcacccccaacatctaagacaactttggcctgtactgcaggg

SEQ ID NO: 168591 - DNA, 1062 bp, Cannabis sativa
ccaaattaatcagagaatattgggatatgatagctctacttggtctgtggaaagtggaaaagaagttgttactagtagtggctgcactccttttagtattgaagaagttattactagtagtagcagcactccttttactactgaagaagttattactagtagtggcaacactccttttagtactgaggaagagtattttgactttgactttgacaccacttcttttgaggaagagtttggtatttccttggctgatttatggtcttgagagaaaaagtcttgtattgattatagttaaacaatatagctagcttaaggtggggtatatgtctatatgagattaggatattcatgagtcagaatgttactaatgcagtaacatattttgagttataaatgtatgttcattctttgttttcattaaatttgtaatttccatgcctttaaatggaaataaaatagaacctttatcaatagaactaagaaattatactttacttgagaagttatagatagaattatactagaaaaaaaaaatttaaaaaacaccacaatatattattttaaaataagttttttaagcctaattgattctaaattaataccatattaatgtaattaattaaaataaataagaaagtgtgtttctatgtgaagtttatttttttacacgatgtaaagtttattttttaactacccattacattcatttaactttactaaaacacttttttaaataaagttagagtcatttataaatgacctataattagtgtaaaaatttaccaagataataaaactaagtacgcaaagcaattcatataaacaatttagaacaattctaattatcatgtttctactatgagatgcatacaaaagactacttgggattttcataaaagcataaaatgcatgaacatgttatcaatctcatgaaaataagtatttaaataattaaaataattaaataaacaataaatgtttaaccgaatgcttttgggtatttttaattttacaaccttttataaaaataaaattaaaataaaaaattaagaaaggctt

SEQ ID NO: 168592 - DNA, 1093 bp, Cannabis sativa
agggcacaaaacccaacattgacttcatcctttagagcttgtgccttctccttatctagtaacctcctattctgttgtataggtcaaaagtatggatctatatttagtgcatgggtcattacatatgggtgtattcccaccatgttttcatgtgaccaagcaaagaggtcaatgtttgcccttagaaattttatcaaaactaattttatttctggcactaaaccctttcaaatctttaatttttttgttggaagagtggggtaaatctccacctcttccaattctttcacaagtccaaagcattctgcaagatccccaaagcaagaatctatgtttatgtcctcactttgggctagacttcattgccttttaccgtgctcttggtcagagctcttggctggcatcttctccttcttggctttagataaagccaggttatagtagggtcgggcagactggtgctctccccttaaacatcccactccatgccttgttgggaacattaggcatcgatggtagatggatgatactgccttcaagttgttttttcttatcaagaatttaatctccctttttaaatgtaaacactcgtttgtgtcatggccgaattcattgtgaaatcagaagaacttgggcatgtccctcttgttgatgtccttcttgattggaggaggcttcttgtatgggacaacaacttaagaggccatgtagatggtctcaggagtctcagttaggagggtgaagcatgtgtacttctcctccttttctttttggttcagtggtgtaggggaagtgttgtacttcccttttctccaccgttccggccagaatttttgttgttgcgcttgcctccattattcttactgcttgaggcctggtcggtattgcttgtactagctttcatgttgggaagatcttggggttgcattgcaccctaagattgcatgctattgacttgctctcctgtctgggcttgtcagattgcttccactaattttatgaagccatttgctcgttcgaggaactccttcatattattggttgagatcttccttatatctttccaaaagtcactcaatggaaggatgccccc

SEQ ID NO: 168593 - DNA, 728 bp, Cannabis sativa
  modified_base (669)..(697): a, c, t, g, unknown or other
atcatctcgaattacagcagagagcatagacccaactggagagactaccacatccgagttgcagcagacccaatccgaagggggcggcctccactcagtgatttcatgaactatcttcgcagagaccatgatatggtcattaagcttttgccgaatagaccttgaaatctgcattatatccatgtccatctctccatgaactctgcggtttctttctttccacactgattccacgatacacaggcaagtaaccatgaaatcataaaaaggaatattaggaggaaggtttgggcccttccagaatccatccatccattgcttccagttggttgcagtcacaaattcagttcgaatgccccatccaatactaaaccaaatggctttggtgaaagtacatttccaaacgagatggagagaattttcagcttcttctctacaaagaaggcatgtgcccgtaatgccatctacaaaaggagccagcttatctttcgtggggaagatgtctcgaatgagctgccaccaaacaaatttcagtcttgtgtgtaatggtgagttccagataagtttccaaacatcactatcgccaataaccgctgaatcccttttcagaattcgacaagctgaccttatgctaaatttaccattcggtttgttggaaattattttacnnnnnnnnnnnnnnnnnnnnnnnnnnnnnttattaacatcctaaataagaactttctaaa

SEQ ID NO: 168594 - DNA, 668 bp, Cannabis sativa
atatatatcaacaataatgtacaccaacaaagtttacttacctttatttttggttaggtattttattatataaattaccaaaagaatagttgttgaggttcaaaaggatgtttacctaaatatataaacaaacttccttccctctcttcttcttcttcttcttcctttccttctcttctcttttcatgatctctcataaccctccacaaccacccatttttatactttacttgatcattcactttatctagtctctttcaccttccttttattgtaaattggttgacaactacttcacacaacattttttttagctttttttgtgatacctttctacattttctctcgacttcgagatctagggttgttcatatacatatttctttttaataatttctaaaagtacttattatttttataagggaaatttgaaattccatgtttaataaatctaaaaattggtcccctaaactaatactatgtatcatttgtaaaatgggataactttttctaaaatccaattttaccccccttttcattacccccatcccctctctcttcttctcaatcccttattcattcaataactccaaccgaacttccctcatataaaaaattttatatgcataccaaaaatattttcataatacctagaattaagaaaagga

SEQ ID NO: 168595 - DNA, 1147 bp, Cannabis sativa
gatctgcttcagaccagtacttaatcttattcagtgttagtggcagcttcggcggaggatcgtgggagaagttaagcgaaggcagggattttactgcgacggcgacggaggaggccatggcggaggtcggtgatcttcgatgagtgcgggtgcatgtgaaagcaacgttccccagaatgaaggaaagaagtgggaatagggaatgcgtgtttggattaaatagtggcgtgtttgtttagggtgtgtgtttggtagcgtgtaaagaaagcaattggtgaagtgaaataatggtctcctttatataagttttttttttttttttaatttgaactcatatcaactactggtgcatttaaggtcatttgttatttgttgtcaagaaaagttgtttatacgttgtttttatggattaaaatagttgtttagaaatactaatactcatcacaaatataacaatttcaggatatatatggaacctgtgtaagtattgatatagagcaatgatcattgggatgacaacaagcaccatattaattacgaatcaagtggagaattaatatcaagagattgcacttatgctgaattagtgcaaataatattgcaggaactagactacaaccttgaaacaactcaaatacaactgaaataccaactaaaggaaggttgccaaccactccaaatcaaggatgacaaaagtttgctattttacataaatttattaacaaagaaaattgatttcacacgatatccattgtgtgtgaacacattcaactacacagaaacaacaaaataacaatcatttttggtagctgcccaagcaatggtgtgtaacaatatgacagtggctggaaagtgaacatcactcaggacactcaactgtgcagcaacctgacaacaacaacaactaaacaacttttatctgctccaaggaggggatccgtttcaaatgatgttatttttgttgatattggcactttgaaaacagattcaaccgtaaaacaacaagaaaacaacaaaaaataaactcccgaagaagctgaatattgaaaaatctataattatttgttcatcaattgatattatttttgttgaaaataacaaaaacaaactatataatatctagaaaagaataattaagttgttttca

SEQ ID NO: 168596 - DNA, 1210 bp, Cannabis sativa
tgttaaacctggaagaaatcttttttgttaggatctcattatgttatgttagaatatatggtgtttcaatgtaacttactataataatatttgtagtcctctaatcagattagcctattactaatcgtttttatcaacttaaggatgaaataataacaaattaagcgtcgtgaccattacaaacaatattattcgatatagagaaagtctcaattataccaattatattttgattaaacgcctcatttattcaaattgtgaactacataattacaaaactagacacctttaaaaacttacatccagtaaaagagttcataaggcatctatattgagttataaaattatcaatttttcatctcgggtttaacccattaacaactttaaagacaatgtcagaatcacactccacaaataacaaattgtaagccttttttaatagaaagatccaacgccaacaaataaaattctactttcccactaagagcattaacataaggtacatgcatggtaccagcccaaagcacctttctcttcatgatcacaagccatcactgcaagcatgatgatagtctcctgtctaactgccacatcgcagttaattttgatctaatctaacatctcaaactaaattagtgatgaacggaatatctcatcgactttatttatttatttattttttttatctttggagaaatcaataagggacttaataacaatattattttaaacttttctatctatgtcatgttccgagactaaacttaagaaatttgaaaaaaaatgatcaaacaagtgtagaattccttaatgtaataaataataatcctttcaacaaaaatgaacttaaattcaatgcattctagggcacttgggctaaatggaaagataattggctttaagacaaaacataaaataaataacataaataaaaatcaagacacatttcattattgaagttgttttcttagagcaatcttaatattttacaaacagtaaaataaagattcatcataaagtcaaaactatatctttaacaaacagcaatgactaacccaacttatgataattcataggtttattctcagtttctgtctgataattcaacaaataaataattttttttttattttttttataactattatatatagataataagagttattttcatagtatttgaatattgttaatagaaaaaaaaatttgt

SEQ ID NO: 168597 - DNA, 1647 bp, Cannabis sativa
  modified_base (1583)..(1587): a, c, t, g, unknown or other
actataaatagttgtgaaatcccctttgttctttttctttaccatttttgagctttccaaattcctctattttcaaactcaaactagaacccatatttttagaaattagaaaaactttgatctcgaagccaatggatgtaacagtgccttaattctgtcataaatcatcttctggacattcgagcgagcaattttctagatacctcatccttggacctcaatacgatctacccctagcaaggcaaagtcttagacgtttagacaggttttgaccaagtgatcaactgggtacgtgattcttgggccaattaccacaataaccgtccctctttagatcacaatacaagtaagtatccaaactctattgaacttttcaatttcatgctagggtagaaattagtgttcaagctgtgttctggattaattgtgcatgtcactgttaggatgagagtttaagaggttattagttatgaaactgactaggattgagattgtctttccataagtattctcacattctcaaggtaggtttgttcaaaagcttgaaccttgtagggattacttttgtgagttcaagttgctctttgtttacccattagaagtcattagggcttgtaatgggaatattgcttagtttctccctaattagtagttttttttgggttcccaacccaatatttagaggcaatgttttgcaagggagatgcttctaggtgatggttccggagcggacctctccaagaaattttagaggaggctcttcccaaaactcttaatatccttaagatatagggtattgttatacccgaaatttagatgtcacctcaatgaaggacacgtgtcaggatgaagggaatgtgaatcaatgcaatttctcttatgggataactcattaattacataagagtcagagtatatttgtaactccctgactgaaaggtcttaggcgaggaatcaatgtacaaactggcgcttagtatattagcaagaagccagatatcgctaaatgcaaatagcaaggcaccagagaaagtgacacatatcaaccatgaaagtccttagcgtgcaatgaacaaactaagtgtaaaagttggatcggctcgagaacaagtaagcgagaataccatctcgctatgggaagacttcctatagcttcatccagctaacgggagcgaggcttacaaccctggcaagtcaaaagaattctttgtaaataatcgcgatcgatacaagctatacattgtcgacctcggaaggaagaatggtcccagttcgctatctagacaactccagatagaacagttaaagacgtgtttaacacacgattattttgacccagtaaaagcgggaaaattaaagctacgcaattttcaaatgataaactgtatttacactacatgatatgtaatcaaatcccacgattttagggataattgttgtaatcatattccggtcaactttgtaaactgtccactatgtaattataaatagtgacaaacaagaccaaaaagggacgaaaaactcatacaagagagtttcctgaaaaaacaataatcataaatttgaataagattgactcgtgnnnnntgcagaattttaactgcaaaactatgtaaaagaccatgtgttcatatattatttttctat

SEQ ID NO: 168598 - DNA, 1196 bp, Cannabis sativa
  modified_base (1124)..(1131): a, c, t, g, unknown or other
aatattttgtcgacgagttaatgcgccgaaaaaactttggccgtaaattggagaataggcacaaaatttgcgccaaagttttgtcggcgcatgaactcgccggcaaaacgtcgataaggacacctcggccggcaccaaattgccggtgataaacttatgccggcaacttaattcgtaagtggaaacacttttaccagctctgaagtttctgacaaaaggtgatataccgacaaaccaagatgccggcacaaaatgtcgctagcgaaactatgcaggcgagttactcttacttttgccggcgagcttagtcgctggcaaaacacctttttcttgtagtgtctatagattttaatcccgagagcataacttgcttctcccaaatccttcatttagaatttttcagctaaccacttccttacatctaacaacttttctacattgtttcgaatgagtagaatttccttaacatataagaacaaggattaccactacattacctttaatgtatttgtatacacaggctttatctttgttttgttcgaagccatctaaatttgtgcacaactttctagttctagaattaacacttaaagggaactagtgttcgatctactagaaaattcaagattctataattatagatgatgttcctagccatcaacattattagcttcccaaaatagaagttgtaaaaatcatattctctgagaaatttaatgagtgaatcaaagaaactaataacacgaataagagtttatgattacttaggatttaggtcgatctaccattgatcatcattatgatatgaattaggtctttatagtaaacgacatattagataaagaaaacttcattcatatcggtcattgtcatttataatctctattatatacaacatattcactttgatgtcttactatatccataatccaaactaaaattacttccattgaagaacaagcaatagtgaatcgtactagcaactattaattaaagattctcaaactttaatatgttgatgactgttttattcatggctaagtgatctttgttctttgtacagctacaagtcacaactacatatatgagtaaagaattttataatatttatatataaattattnnnnnnnnaatattaataatttaatattcatacatatatcaaaatgttcaactctttattgataatcagaaat

SEQ ID NO: 168599 - DNA, 561 bp, Cannabis sativa
aagaactcaccactagctaagtgagttgcaatgttaatgccatatacaacaacatatattcaaagtttaagaagttttgcctcttcagatactgattaaaaggtgtgcatgtcagaaaaagttgtagttgtaaatgatctatgtatcttttttgaaaagagcaacaatgcaaggaaaaaaaacttattagcagtcattctcaataaatctattatgttgttctaaaaataagaaatctatttgtgccaaaatgcctcctcaactgtatacagctactaaagtcaccattttcctttgttcatttcagtacttaaataaaatttctgacaataccattcttaataactatccacatgcacacatctgttaatttttagccagctgctgctcatgattataaaaatattgtcaaactaaaaaagccaaattcataagttaaaagaaaaaaatttaagacagactaaacatgggaataaattttaattacttaacattcagacttgaaagaccaaagatcagattcagtaccttacaaacttctcgcgttggccactcaagtat

SEQ ID NO: 168600 - DNA, 1385 bp, Cannabis sativa
tttagggtataaaacccaacagaggggaccaagcaagaggcgtgataatcaccggtgaaggaaacaaacaagggccaaaatttgcgtaatgtgtagaaatatagtcaatacaatgcttaatgttacatttaaactattagtatgaacattatcgtttcgagttttccaaattgtgtccactataattaaaatatacaaaaatacttctttgacctctactcttttttgcttcaggctctaaaggaatttgacccaatctcacattcgtgccccagaatttagctcaggcatcacgccctagggggaggacctctagaggtgaaaagcaaagttacaataaaggaagagatgctccatagtttcctctttctcaccgcacaaggggcaagacacatcctcaatttgcattcttttatctagagcagacctaatcggtaaggcatttaagagaatactccaccaaagaaccttatggcgctctaggatactagaattctaaagtttgttccaaagagcgggagccatcgttgtatgtggtgctcttgacaaggcttgagcaaggtaggcagatttcgtagaaacgaccacttggttccttagtccaaattcatagttcaaaagtaatcttttggctacttatgacattgataggaaaccaataagtaactttttcataaaaacaatatcacttttatattatataatctgagatatattttggttacctctaaaacttacatgtatacactttaataataaattaattatttaggttatattaatacatttgagtaacttttatgtttatttttaaaaataatgagttgtcatccaataagctaccattttagtaaactgtattttaaaaaatatatatcataaatatttaactcacctatattttttaaatgtaaattaatatatgcgttttgattagttaaataaagaagggaacatacttatttagtaccttgtgttttcataaaaaacatacatatttgataccctgctttttttaataatacttcattagtactttatatttttaaattgtatatatttggtaccctaaagtaaaatttatcaatttaatcaaacatttttcagttatgtgtaatcaaataattaaatttgaattaagaattcattaaattttagactattgattgtattgatgataaaattttaccaaaaaaaaaattaaatttagggtaccaaatatgtatgattttaaaatataaggtactaaataagtattattaaaaaaacaggatactaaacttgtatttagattaagggaaatttacaccctatactgatttttcccaatttatttcatttttactgttgcacggaaattgcaacatttatactgtttttttttt

SEQ ID NO: 168601 - DNA, 1259 bp, Cannabis sativa
aaagggttcattatagtcctacgggatttaaagactgtgttctgaattgcaaattagaagatgtgaagtttggtgggagttacttcacttggagtaataaacaacaaggggatgatagaattttctcaaagattgatagggtgatggcgaatcatagctggttagacatgtatcagtatgctgaagcaatttttgctgcagaggggttatttgatcacactccgacaatattgacggttcaccctatgcctccaagtggtaggaagccgtttaaatactttcggatgtggtctagttatcctctatatcaagaacaagttgctgaagcttggtccaaaccggttattggttcgaaaatgtttcaagttgttaataagctgcgaggtctgaaaccggtgcttaatgagattaataaacgggggttttctaatgtgtatagtgaggagttgaaggctaaagattggatgcttgagtgtcaacagaagctggtgagtgatccattgaatgctgaatggcaagaccaagagaggaaagctcgagaatcatatgcagataagtataaagtgttaacatcttttttacaacaaaaagccaaggctaattggttaaaggaaggtgattctaacacttctttattccattcaagtattcgagaaaggagaaggcaaaataggatcctttctattgttaatgctagcggggaaagagttgagaatccagtccaaattactgaggctttccttcagtattatactgatctgctgggaaataaaatgcaggggaggcagatagtgaagacaagggtgattcaagaagggcctgtgattacagaagagcaagcgaattatctcatgacagaatttactaaggaagaaattagagcagctgtgtttagcatcccagggggaaaaagtccgggaccagatggatttggaagttggtttttccaagataattgggagctagtgggaaatgaagtatgtgatgctatttcttctttcttgggatcaggtaatcttttaaaggagattaactcaactgttattactctaattcctaagattacatgtcctaataaagtgagtgattttcggcctatatcttgttgtaatgtgttatataaagttgctaccaagctgatttgtacaagacttaagaatatcctccccaatttagtttctctaaatcagggtggatttataaaaggtagatatatagcacataacatcatgatatgccaagatctcattaggaattat

SEQ ID NO: 168602 - DNA, 796 bp, Cannabis sativa
cgatattctgtcgacattatcaaaaagtaaacaattacataatttagtcgacataatattagtcgacataatatgtcgatattctgtcgacattatcaaacagtaaacaattacataattatgtcgacataatatcgacatcctgcgacattcagtcgatattatcaaacatgaagcaacaacataaaattgtcgacaacatatcgacatactatcgacatgatgttgacattccaaggaatcggatcacaccaaccggtaaatcaaaattgtcgacatcatgtcgaaaactggtcgacatgatcaaagttagctatcacatataggggctacatctcattgtcgataacatatcaacataccgtcgacaagatgtcgacaatttaggtcaaaaataaacttaatcaactgtcgacatcctatcgatacacatacgatatcatatcgacatacaataacaacacagacaattctaatgatcaaacagacatccaaataaatcgacatcctatcgatattttatcgataacactgtaaaaaaacacagacaccattgaaacatatcgaacatctacaacctatcacaagaaagagcacaaaatctacgaaaattccactaatctcaacaacatgcaataactggcatccaaatctatgaaaaacatatttttttttcaaaaaacaaacgtacctttgattgaacttggtggtggtggcgacggttcctgctcatggtggcgacgacggttcctgcttgggtttgggtcgacggttcgccgattcgtgggtttgggtc

SEQ ID NO: 168603 - DNA, 952 bp, Cannabis sativa
gggcttaaaacctgcctctaaatgggatttttgtagtagtgatcagaaccgccattgatactggttgtgggtttgttaccaaatacgccagaattttggtcattaggactccaaagacaaagccttcgagcactcactggcagcggaggctcgagcatcttgccgacgatccgatatctttgatagtcacaggcgaagctttcttgagatcgatgcaattggtgaaggattttgtctttggaaactatttttcaatttggagaagatgagatttagcttggcgtttttaaatatggatgagattaggaagaagaaaagagatccagtttaaggttgctttgagtaatcaaagtgtcctacgaacgatagcatcgaagctccgggttttttcgttcctacctatattcttaaattcttatattcattatttcaaaaaaaatctattctcttcatgattatggtatgtaattacaatttatttgctctcaaacatcttttagagcactaaatatctctttcaaaatttatattcatttttaaaatatttgtttttatatttttgcttttttgttgatgcgtgaccatatcactatgccattgtcaaattttttgtggtttttgtttgtcactaatggccggggtggttactcatgcaacagttactaatggctgcttggctggtttgttgaaagtggtggagagttttttggttatatcattacgtgcctaattaatatttaattttcttacaaaattattgtatattaaaatatatatataactgtaattatttcgtgaatacttttatttaattactctcatcctttcatttatttgtagtcaaatattagtatttcaaacaaattattagctaagccttctctaatttttcatagtaaaatttttaatctaatttattattttaatctaaattgtaattacaatatctatt

SEQ ID NO: 168604 - DNA, 545 bp, Cannabis sativa
gagattatgtaggcgtgagactacatagttgttgagaacttgaataaattacttgagaccacctatattagcaagaagcatcatgttttggtattccatcatgaagaaactcgatggctaagtgttcctgacctgagtgatttcatttggggagtttttcgaaaaaaagcgtgcgagttagagcaaagcatgttagaaatgcttggattggtctctagggcaagtcgtcagtccaagaagcagctaaagtgatgcacacgtgtataagagccatcattctgtgactataagggcaaaatggaggattgatgcggggacgttaccagagtcacgtataaaagaatgttagggagagtagaggtatcacttatgtaaagaagattacctagattatatatggtgatgcggtaatgatgaagagtgcttttataattgactgggtagcaaatatagtgtataaggagaccgttgaaattttgagaaaaaattaccttcttaagcaatgacagaaaggcatacttagccagattggggaaaggtttata

SEQ ID NO: 168605 - DNA, 735 bp, Cannabis sativa
taattggaatatactattcttgataaagaaatgcattattggtgagaggtttcacattttaaacttttcaagtgaaaaaaaatagccttttcaccctcgccattattggttattaccacataacaaaactaaaaggatcgatataaagtttgaaaagaaaatccttgtcccagctatctataatataatatagtccattaagtgatgcccaaacaacattatcattataattttatttatttatttatttgaaaagaaacattaataaaaaaaaatacatacactgatacaccacgtgatcaaagtcaaaatctttcttaagtactaagtagactatatatataggatgattctccatgtgaagctcatttatgaaacagtgtggttttagcgtatatttgaaggggccactgcaaacgatagagccatactatcactatgtattaaataacttatatagtatggttagatctagcaaaaaggagtagatcgctatagttagggtggacccatattcagagccaacccaagcattttagatcgttttggcaaaaatataaaattgagcccttcaaaaaatatggtatacattaagactacaatttcattatcaactatttttttttttgtttaagatttatttttaaacttttagttataaattatttatttatttgaataaaaattataagatctattaattaataaattcgttcaaaacaatagaacgcattt

SEQ ID NO: 168606 - DNA, 644 bp, Cannabis sativa
ggttccaatgtcgtgagtgtttgagatagggtctaaagtcaaaaaaattcctattatgatgagtgtatgagagttgagctgggattgagggctggcgatctatgtgggggcttgggtgtggctctggccggggttgttgattccacacaataccctcatagtttggaatagtttttggtatttgtttctttatcttaccgatggatcaattctcgtgtgaatctagtttgggtcgtacgtggttgcattggcgatgggttgtctctagattttttttccttttatcattttgatcgataggtcttccatccaagaggatggggagtcaggtgtttggggattgtcgcatctgttggattcgttcaagaggtggatgggcagcggtccttcagtgggggttgtggttctgatgtcgtaggtgtttgaagcagggtccattgtcaaaaaaaattcttgttctgttgagttgaatgcatgagagttgatcttgggttaatgggtgtcaatctgtgtgggggtatttttcaatttattatcttgatatattttttttcttctaataatggtggttctccatcgccctatttgttattgttttgaaaagtgtcatgtacaatttttgtctttattggtcaattatcaat

SEQ ID NO: 168607 - DNA, 1166 bp, Cannabis sativa
ctttctcttttctctattttcgatcttccctctcccccgtctctacccaaactagcgtctcctcccatttcctacagaacaattgatcccacccatgactgatgatcattaatggccaagagaccatcgtacatttatcaactatcgtaccatattaaaccttcatccctaacctctaaattacactaatattgtaaccaccatcgtatcctatcgagtattcacaaaaattttatcaaactttatcatgccataaatttttttcatgacataaaatgtaagcaactatcataccactatctcgtaccactatcgtactatatcgtatatacttttatcaactatatcctaccttatcgaaccttcatccctaatctttagattacattgctatcgtacccaaaaaatcaaggagaacctaaaaaaatacagatttcaccaaaactcaatttttactaaaaaaaaaatataaagaaactacagatcatatatctaaacaataatggtgaagagagtctcgatcgttttcttcgatttatgggtctcggtctctttgatgggtcacagtgtggtggcagtcatcggtgtacggtctcttggttgatggtcgtcagtatgggcgggactggttgcgctacgagaatgggaggagacactggtttgggcgaagacgagagagggaacaagagaaggtagagaaagagagagatgaattttgggtgagggaggagtaatttggggatcaaatgaaaactaggcttaattgcctagagtgagtatctttggtttatttttaaaattttagactaatagaagtatcattaattaaatttccctgtgacccaataacaaaagaagagtattaagggcaataatatattttccctagtctattaaatgatagttaggtctattaaatttggtttgcatcccataaaatgataattagtacaccttattattaaaagaatacttaaaataattttaaaaaaaatgctcttaatatattttttaattttttttcacacgttattttatgttaacgtcaatacttattttaattttattttcatatatttttttaaatcatgtatatatatatattttttattttattgtcataagatttaaaatataatttatttttatttgatagttatattttt

SEQ ID NO: 168608 - DNA, 506 bp, Cannabis sativa
cctcgagaataggtgaggatgggggattgtcgtgatgttgttgctgagatagactgttctcaggagagtttaaggggatcgagtcaagttgaggatgatgaatctcagaatttttagagaagaagttgtcgatgtgtgcagtttgggacacacggccaaaaggataaatgtgctcatagaagaggacatctcttgactgaaatatttgttttgtttggagatctagagtgtatgctttcatgttgggaggatagcccaagaaagcacaagctctagctcgaggagagagtttggtggctgtcttgacatgtgaggcatatgcaagacaaccgaaattcctcaagtgtgaatattgaggtagtttgttgtgtagtatttgaaatgaggtttggtcttttaaaagaacagaaggacttctatttaaaaggtatacaccagtagcaacgataaaagaccagtattgcagtggtacatttgattggaaggttagagctcgagcaacgttt

SEQ ID NO: 168609 - DNA, 543 bp, Cannabis sativa
ttgtaattgtttttcttagaagtagaaccctcgaaactaccactgctgccccgagttaaagtgttgatttctaggggaggaagaagcgtagcaggcatagaggacattttatcccccatgtttatgatatcgtcccttggagcaatgacagggatgatggtcatgctaaccttcctcttcttggccccagaaagagttgggccaaatttggagaactcaatgttatcgtgagtaactacaatgtgggatgggcatttgtcagtttgggtcgggtccaccaattgttccactaccttctccaggcttttctctgtgggccatgttacaaagttgggtttaggatgttagtgggaaacccttgatttacaaatctcctcatgtggcctatccactagctgatcacgtgtaggcccaatatcaaccataaggctcacaatgatcccttcatctctcacacgattatcaatacgagtcatacactactacaatttgaacttttagtgacaccatatagtgacacgcataaaagtgtgggtcactaaa

SEQ ID NO: 168610 - DNA, 743 bp, Cannabis sativa
ttccaaatttgttgcatgataggatatataggatcacacttcttattgatcatgcacatcaaaaaatgctcgcaccaccttggcttgtaaaaatttactctatttatttacaggccaaactgaggtgcgagattttttgatgggtacgatgaaggcgtgtaattggactgtatattcaaaagattaatgtaaaaggtacctacacctaccttttatatatatatagtagtatagccctaaattgaacattatatatagaaatatataactcaaataatatatatagccctaaattgcattttttttcttctttaggcttagcacatatatatctctaattaaacattcaaacaatatttaaaatttcttgtctttatgttaatttaaagtgaaaaaaaataatattattagaaataatttggggaatatattaattttgttaatttttagaagtagtgaaaatttttatatatgccaaatgaatagaccacatacaaaattttgttaagttagtttcctttatataacttaagtatgagactattattcattgggttcaaaatagagttttctgaagagagccattgtaaaaaaaagagagaactctcttgagagtcattcctattagtgtgtatttacaaaagaaagaaaaagagagattactatctttataaaggaaaaaaaatagtgagaacaaaaagagagacaaagttgtactaagacgtgaatatgaagattagttt

SEQ ID NO: 168611 - DNA, 1540 bp, Cannabis sativa
ggtttgtttgagttaaaggtgactagaggtgacttgtcggagctgtgcgagaaaaagaacggaagacaatgggagtgcgagtggaaattaagttacatggaaaaaattgtaagagaaagagaaaaacaggaaagaagaaaaaaaaaagggaaaaaaatttatttataataagcaattttattttttaatactaaatatagttagtggggaagggagaggaagttggctagagatatagtttcggcgatgagtggtattaggaagggatgagacaatggtgttacgagccaatcttgtgaggaaaggatacacatttgccttagacacatcccttttatatctgtcatatcccgagttgggcaattttttccctatcataaaaagaccatatgggagatcgggatcaattccatcatcaacaagctccaagaaactattgcatttatcaaaagggtgacccaacccttccacaatgaaagcaaaaaacgggaaggttctcataacggaactccaaccaatgctcatctctaaccttgggaagattcaccatttttcccctcataagaggctgggaaatatcgatccatgctctgactaggacaaacggccccacacttcgtgaagagattcttcataaacatcaatgtattctcccatccattcaccaaccttcatatcaagggcccgtgatttactcaaaaatggtaggcgatgtatctgcacccacaattgaaccttaccgagatcctctttagtaacactttaaagcataaccggagagtgacgcaggattagttgattgaagtaatgccacggttcactagagagaatcttatgtttatcaccagcacaaccaatagttagtaaaaacaaatcagaatgcatttcagaaattaccacttcaaatcaacacttattgctccagaattcgctcatcttcttgatgaaagttttcgggttaattgaatttgagaggcagtaagcaaccagataaaattttggggcttgttgatcttccgaaatgtcatcagaagaaaaggagtggacttctcgttctttctccgacaaaatcatatttgaagacatattttgtaagattgaatccatataatggggaaaagcaaagtaaagatatatgaaacgaaggaatagagaataaagtatactgagagggttatatatagcatccaacggaggatgggactgccgtaagtagaggagatcttggtacatggtggtaatggagggctgttgtggatttgaattgaagatcatggggtagccacaaagaggaaaaaggggaaaacccagaaaatcaagtaactgcaaccttgagaacagaaccccactcgggcactacaattttttaaacaatttagagttataaaaggaaaaaaaatagtaaataaatatgttaattttactctcttatatctacatatttatgtattaaagataaattttgtttcaattttatggcacgtttactatacagtattcagaatcggaataaattaatagaaaaatgtaacgaaataaa

SEQ ID NO: 168612 - DNA, 1401 bp, Cannabis sativa
tatacttactcctttaagtaatgagtgagcttcactggtaagataaggtggaagtttcattttctctttaatgattttctcttgaagtttctttctattttcatgggtatatggtggctgcataatgaaagtaaaatggattgaaaatacaaggttagtggagtagtggtaagaaaagtttgcagaccattattcaaagaactcttaaggaataactacacaatacagagacaatgcactgaaaaaggaaagtcttaggagatgatgaataataatcatatcaaatgtttggtgtatgaagacactcaaaaatcaagtcgatctaacaaagttcaaacccaacttcacagcctattggaaagctataaattcaacagactatttgtagacacttgtccaaaaataagaaacaatgagtaaatgacagtggaagacagataaaatatatagaactccaaaagggaagaatgttttagagttttctaaccttcccagttagcatctcatacaagagtattccgacactccaccaatctgcgtctttgttgtgacctttagattgcaagatttctggagccatgtattctgttgttccacacattgaattcgacctgcttgattcatcgatttctttagctagtccaaaatcagtcagcagaatctgtaccacaacaagtaaacaaattagagacgaaacaagttgttgacacaaaactaaaaaaaaattaaacccaagaaaactatgtatcataacaagccttgcaagtttctacaaacagaattgagttaatgagcagggccattacatgtccgtcggcgtccatgagaatattttcaggcttaagatcccgatgaacaatcccgcatttatgaagatgggaaactgctgtcactatctcggcagtataaaaccttgcatcatcctcactattcaagacaccgaaagccaaaatcaaaatatgataacacaaaaccacaatcaaagcttcaaagttttcaaaagtaaagtacctgaagataccctggcggtacaattgaaagaagagatggcctccattgacaaaatcgaggatcaaataaagcttagacttggtctgtgcaaaaagaacaaaaaaaactagtaaagatcatactcacaaaatcacacagtaacatataatgaaataataactccaatatgacgggtaaatttcaacaagtgcaacttttaatgtctataataacacaaaagaagttctggcacaatttagtgagctattattacacttttgcctgcaaaagacataactttgaaagaagaagcaaaaaaaatgtctatatgagaatataagtaacagaccttgctcctcaagagacgtaatttataaaaataaataatgaagcatacataataagttatta

SEQ ID NO: 168613 - DNA, 530 bp, Cannabis sativa
cggagggtggtggctcgcattcattgtcaatgttcatcgattcaccattgatgccggcttgaagaaaaagagagagacgtaatcgatttttgaggtggtggttgcccttggatttttgggttctgattgtttaatgagtttgatttatggctttgcataaagaaaaatgaaaatttatgggtgaggaataatttaggtttttatttatgtcctggatatatatatttttgtcattattgttacagtatggaaaaaaaagacatataacagttatcaaaagaagacaaaaaggaggagatagaacttttaatataatttagttttttatttttaaaaaaaattatgtagtggatcaataactaagtaacacgtggcatagaaatattttcagttatatttagcggaaaagtagtaacgggagtgaataaaattaaactttgagtatttaatccgttgaaataaaagatgtggtatttaagtgtataaaattgaaaacatttggtatttatgccgcaaatatccctaaaaaa

SEQ ID NO: 168614 - DNA, 1457 bp, Cannabis sativa
gctagttagggtgttacaatactggtcaccttggtacgaaactggtttccactcctatggaacccaacatcaatctcaataatgagacaggaaaacaacttcaaaacctcgctcaatataggagtctcattgggaaactcatctatttaaccatcactagacatgacatctcattcgctattaacaagttgagccagtatcttcacacacctcgagaaccccacctccatgcagctgacagaatcctccagtacctgaaaggcacccctagccaaggtttattcttccatgcctctacaccagcaccacttaatctttaagcctttgcagacgcagattggggagtctgttgggacactcagccctccatctcaggatattacatcttccttggcaactctttgatctcttagaaatcaaagaagcagcacactgtctcacgttcattagctaaagccgaatacagagtaatggctaatgccacctacgaactaacatggctacactccatacacgacttcaacatcaacatcaaacttccttcaacactcttctatgacaacagtgcaactcttcatatttctaaaaatctagttaatcacgaaggtaccaaacacatggaaatagattgtcatctcattcgtgaaaagatcgataatagaaagatcaagaccaatcatgtctcctccaaatccaacatatttgacatctttacaaaaactcttttcccaacacattttcataatttattctccaagatgagtgtaaaaattttttacacttcatcttgaggtggcctattaaaacagttaaaggttgttagttaatttagtttaacagttaggttgttttctagtctttccttgtgtactctatgtatatatagttgttttacccaaagttcggtaagcacatcagaggtggacacgtgtcgagctgggaagaactcaaacatacaaatgacaagtactcgcagggtaggtttataactcggctggctgaatagccttctgcgagacaaaaacatacgaactgctaatttatgtattgacgataaaccatgtgagtgcatacgcttatgatgagatctcaaccttgctgcgtgaaagagaaagcgacaacactaaaaatacttagggtatattattcgaatatacaaactgagtatagatagtatggcgagtcaagagcaaacagcgaggcgtttatcccgctaaaagatgttttgcatgcgaggaagatcttctcgaccacattaagtataaccatcagggttaagacaatattagtctcgagaagctaaaatgacaagcagctgctcgctattaaagtgatcttggctccctcctcgacgaggtatccctatgagatacgacttgccgtatatctttaattatgctctcatctgggcccaataaaggcgggatattcatagctgtgtaaaaacctcatttatt

SEQ ID NO: 168615 - DNA, 1123 bp, Cannabis sativa
aaaaaaaaaaaaaagagtgattaataaatttattaattggttttgttttttgtttgaattttttaaattttaataaagaattattttattttgaaggcctaatgtcaccgaaaataatagtggaaaatcatgatatgatttttttttaacaatcaacaaactttcattgaaaaagatcagcgttaattacttcaaatagaaaagatataaaatcttccatccaaactaaaacaccatccacactgagtgcatgcatagctaattcacgaacagcccttttgatcaaccgacgaacatgaataaggaacgcttcaagaaaattaaacagtaaactagaaatatcatctaaaagagaaccaaaatcattacaatctctaagcaaaagcaaagatagcaactagacaattagattcaacagaatagagaggaagtcctattccaagcgaccaatccaacaccaccataaaaactactacttctgcctgaataactgtgaaatttcctataattaataccaatatggaacataatgttgggaatacaaccaaagtcccacattggctaggttgggaagaattttggatatataagaatggacactactccatctcgagaaagtgctcaaaaataaaagggaccgctaaagcttaggcccaaagcgaagagattaaaaagtatatgaaatttatttttattttttatttttttttttaaaaaaaagacaatttgaaatcataagatcaaaaaatcataaccacacaaaaatttgaaacttatctcctattattatttggaaacataaaagaatttcataaaaagacctgaatcattaaaactttattaagaacatcgttactaaataaaaattttgtcaaaatttttagtattattttgtaaaaaaaataaataatgtcattttaattaagacttaaaggaggcataaaatgaagaaaagataaaacaacagcaaatatataaatatacaacagtcagatatgaaacgacagaaactgcaagtattatgcgacattctaactattggaactttgtgaaatattacaaaaataaagtgtgtgagtaagagtcccacatgggatagaaacacttcatttgaagtgtataa

SEQ ID NO: 168616 - DNA, 607 bp, Cannabis sativa
  modified_base (564)..(575): a, c, t, g, unknown or other
gatccgacccgtgaaatggttcgggctcgcgggttcgtgggtctgcaggttcaggttgaccggattcgctaggtcaacgtcgttttttttttaaaaaaaatcaaatttgatgtgattatttctatatattaaattaataagttataaacttataacactataatttatattcgttagttcaaaataaaataaaaaatacattaattaaaaattaaaaaaaaatttaaaaaataaaaagttaccgggttggcaggcgagttcaagttcaacccgaaacccgacggtcataaaaaaccaacccgcgaacccgcgcgatatggggtaccgggttggaccccccgcccgaagagaaggggttttttaaaattttctgattgaactggttgggtccgagcggttggtcgggtccgtgtcaaaccctgtcaaaaatgttcagtcctagttaaaatgaggaagtgcactgcagcgttgtcgtaatggcgcaaaaactcaatttagagcaacgtgttctgttatctgtttatgatatgttgtcctgtgttttctgagagagagagagagagnnnnnnnnnnnnagagagagagagaggggagagagagagagaga

SEQ ID NO: 168617 - DNA, 593 bp, Cannabis sativa
aattggatgtagttatcttcaatgagttgctgtatgccgtatagattattttttctacttgcttagtttgccggtttgcccttgcaccttatctcagtctacattcaagcaaaaggaaaacataaatttgtttctcattttggggttaatttggatagtgaagcatttgtcattcatgctaaaagaaaacgtaatttgtttctcagtttgggttaagttggatagtaaactatttgtcaaagttgtgatgtcgtcttgtaccatatagcttatgctgggagttcttttcacttcacacaacacaacatagcaatgaacaagctcatcaagtgaccttaattttgtgcaccctttttcttttcaatatgatgctagatttgaatttttatcagtgttttgggtattattggctttttaaatgtatcataaaatttggcgttccttattaaatatacatttaaataaagccaaatagcctaaatatacatttaagggctcgtttggaacgccgtattagattgtattgtattgtattatatgtattttatgcaatatttttatataaaactatatgtagtattaatttttatgga

SEQ ID NO: 168618 - DNA, 1106 bp, Cannabis sativa
catggattaaaatcacttgactactgttaaaatcatcaagtacatgataaaataatcttattttctatttgcagcatgtatttggataaaatatgactaacaataatattatattattttaatacattacacctttgaaaaacagataacaataatattcaatcacttaaagtaaataaaaatccatataacacaaaacaacctaggcttttgagggaatgcttagaaatcttgaagagtagtaccaattccaatcaaaccgtcatctatattattgatagcaatacctatattcaacttaaaagaacaacttttcacataaatttgacgcaaaataaaatgagtttttatcataagtgttgatgagatttaagaaacaatgagcatgaattataaatgaacgacatgtcgtcgtctacagtgaaaattcagaagacgacactgcatattgggcttgggctatcacaatcaacaaaattcagattagtagtccaggcccattaatcgtctgcagccttctccccaccaaaacccaaacaaaaacagaaaattacactagatatacctcatttgaattgatacttttaatttttaccttctatttttaaatctattatgtttacctctttttttttaatcattctactaattttatctctatcattttatgatagtctttatttttctataaccaaaattttaccccaattttttcacaacacaatctattatgtatgaaactgtcttaattatgtgacagtatgagagtaaatgtaaatttaattaatttatatatatataaaaaaagtattcttcaatttctcttaaacaaaactctaattaggactgcacatttaaatcgttggcggggccaaccctacccaaaaaaaataagccgaaaaggaaaaatagtggtggactggaattagttgggtggaaaaactcgcagctcaaaggtattgggtcgaaaacggacccaaatttctcaagagataattacataaaacactattatttgtaaaaaaaattacatttttacgtttaaaaattttttttacttttttacggttttttatagaaacaacatgaaaactacataaaagtaa

SEQ ID NO: 168619 - DNA, 593 bp, Cannabis sativa
attattgttgttgttgttttttgtgaaaagaaatacatattatttataatttacattttttattttttatgactatttattgaaaaagaagacactctatacatgtcatgtatattaattcggacctttttcatatatatatatactaaaatggtaaaaatattatcttggacagcaatataactgataaaactaatttagtcctaattcataaatatgccttagcccgacttgtgagcaacaatataattgataaggctaattgagtccccgttcaattccttgaagaacccagcatcacctgtacggaagaaattgagatgattgaccattttcgaattggatgacactaagagcagcatatatatctcaatactggagaacttccaaatgattgaaacgaagctcaaaaaaatgagaagaaaagttgtacggtatatcattgtagaaggagtaatgtatataaggggattctccatgccaccacttagatgtgttacacaagaagaagctacatggcttttgtctgaagtacatgatggattctatggaaatcacgcagtcgggcaaagtctatcaaagaaaatactaag

SEQ ID NO: 168620 - DNA, 578 bp, Cannabis sativa
ttcccttatcatttcagaaacttgtgtattcttgatcttccatgtgtattttaatttagttatacctggagtaggattccatgaaggataataagtcgtgttcggaggtggcatcagcaatctagtcaatccttggcaagggaaagcaattcttgggatatgccttatttaaatcggtaaagtctagcaaactccccaggtccctttgggcttcgggaccaggactggattagccaaccattttggataatccacatcacggattaagatgcttgttaacattttctccacatttttctttagtacctctgccttcgctgggtccaagggacaccttttttgttgcaccgctggcatatgtctctgttcacatttgacatgtgacaaatttctctcggatcaatcccagtcatatccctatggcaccatgcaaagacatcaggcgactccttgatggtgcttatgatttcttctctgattttaagatcatggcctttcccgatgtagaaaattttagctagatcctggtcacaaatttgatggtgcttatgatttcttctttgtttcttccatcagct

SEQ ID NO: 168621 - DNA, 516 bp, Cannabis sativa
aatacaacaattaatgaatcactcaaaaatatctacagtataactaactaattaacaaaactaatatatatatatatatttatatatataaataaataactttaattctaaacctaataaaaatctaatctacggctacacctaaatctatctatatatatatatataaatatataaataagtttaattctaaatctaattatgttttatctttcactcttctatctctttttctcactctacccattattctttttaaggttttcagcacacttttgtatggaaaaattattttttacttccgtatcaatattattttcaatgtagttttgttagaattaattaatttcgttttttgtttacaagtcatcgtcttaacaattgatgatgtttttaaattgtattgatttgtgttgataatgtattaatttgtatttataatgtattggtttatatactaatgatttgtgttaataatttaatggtttatatactaatggtttttttttttttttt

SEQ ID NO: 168622 - DNA, 565 bp, Cannabis sativa
atcacgcgctttaaagcgcgtgaagaaaactgtaagcctaaacactgataactactgcagatgagtgaagagtacagtgttgcccacaaaaatgtccagagaaatgggcttggtgcaactcaccattgtacaatttgcaatataataatacccaaattaaatctaatattctaagttgggaaaagtttaatatgagctaagagcatataaaatagtatttttttatatatatatatattaaaaaaaaaaaagtatgataatagacatggggacaagcattataaaaataatcatgtcctttttcatattttgtccttattatattacatcatcttgcaataattacttaattactcaattaccactccccatcattatttatatatatatataatatacactctctcctagcaactctaagaaaaacatcaaactaaaaccaaaccatattactctctttttcttctttgcattttggctgctctgtttcagtgtggtccttcttctgttttgaataaagtattgttctttgttctttttatatatataaatttttctagtggct

SEQ ID NO: 168623 - DNA, 788 bp, Cannabis sativa
tagcgacaatgatatgtttggtccccactgttgacggagtgggaaatggctccctgaagatcgatattaacggagctgtttcaatgaaagaaaggaaaaacaggtgttggcgcactcattcgaaattcctcagtggttgctatggctaggagtcgtcacagaatgatgccccccaaaaatagctgaagaatgggcattattacaagttatgctctggggtcgagagaataatattgaaattcatcaagtggaatcagattgcttaaacttcattgaagatatccaaacaaataagcctattttatttgcatatggagcgattgtgagctctctaagagaggtgatcttcactccccactgtttcccttgatcatatttttaggcacaacagcacataatttaacatatatggctattgggctagatagcacctgattttggaatggcaatgactcctacctgtattcactgtaacatgtttttgggttgtttccattcaaaaaaaaaaatgatatgtttggtccttttactaattcaaagctctaattcactaatattcagggtaagagctacatgggttgagaaattgtattccattaatcaaaaatactttctatattttattaaaatgtacccacttttgtgagtggattgctcaatatactctcactctctacttaagtctaaacctaaagtatataatggaggcatcatctataaaaataaacataccttaaaagaatatgaaaataagggctcgtttggaatgccgtattaggtcgtattgt

SEQ ID NO: 168624 - DNA, 1377 bp, Cannabis sativa
gatcttggatttattactatgagtgatgttggttggtgagtaaaatgtttgctttcaatactcataatctgtgattgttttaacaattggtatcaagagccaaagttattgattttagagctcaaatttttcataaaccctttttttctaaatctaaaatttgtgataattttttaggattagtatgtttaatgttgtatgaatgtgagttctatgatttcaaatgaattcatatatgttttgggaactattgttttatattttccattgaggtacatatgagtttaacaatggaggatatccatttcggatttaccattttttggtatattattttgtatttttgaattaaatgggtattggaaaatgatagaaggttgaaaatggaacaaaacccctcaaatggcgtcagatttagtgatcggacatggtctatccgactgggtcacgaaatgggtcacgccgatccgagttgcagacccgtggacccgtggagaagtttgctgggtgacaggagtgacaaaaaatgacttgtcattttgcctctgtccggcaaacgaatgtcgttttgaatgggtgaaaaatgtcgtttttggagcagaaaaatgacttgtcgtctggcctctatcgggaaaacgacatgtcgttttgtatagaatagaggtcatttttttgagcagcaaacgacgggtcattttttaccctgcgacacgccatcctccacaaacgacatgtcggttttggaaaatgacatgtcgttctagcagttaaaaaagaagaagaaggcgcgtgtgggcacgtgcaaggtcaatttttgggccattttcactagtttattctatttttagcattctatcatttccccatcttaattttatgcataatattaattcatgaatttattgataatcttaattattaatattatcatgttatggcatatattaatgtttatttaaacaatttgtgcttattttcttacctatcgtaaaattaagcattgaaaattatttggtaatgaggaacatttaaatattaatttatttaaatattgtatctttctccaaaataacattaagatccttataagtaattaattatcctatcgataataatgcttgctaagaatgtctaatatggtgaagaaaatttatgaaatattatgaatcacaatttatctatcctttcaagagtaaattaatgtatttgattataatatttaatagattcttcttacctgtgtatgagttctactttattaatttcgtttaagaactctagcatacatgatgatttgttattttgattatgagaaaaagagcacaaatgatatgattttgttataacatgcatttaatggttattgctcttgtttct

SEQ ID NO: 168625 - DNA, 888 bp, Cannabis sativa
  modified_base (772)..(778): a, c, t, g, unknown or other
atttaggtgccccatgaaaatttttcttgtattaaattgattcagtccaattaaattggattgatgttgcccatccttatatattttgcatcaaatttggcactatttttgaaatgtgctaaatttaaatcacattatataatattattggagtttaattttataaatatgaactaaaatgtatatattatttatagcactccattaaagatgctttaataataggacaaaatgcttttttgtcccccgaactattataagtgtagacttttgctccctgaaattttagttggcaaaaatcctcccgatctacaataaacatggagaagtcccttttccatctaaaatttgaaggatgtatatatgtggcttccatgttgttttataaaatgataattgttgaaatatcaatactcttgacataaattggcgcccttttcattcatcaccatcttccttctttcttcgtcatccttaaacctacgttctctcccaaatttctgtaacttgcaaccattctccaaaaaaatatactggagttgttcttggttttatgtcattctccttgaatttctgtaacttgcaaccattctccaaaaaaatatatttgttttgttcttggttttttaatcatgaaatgaaagttaaatttttgtttttaaaaattttatttttaaaaaacaaaaatgcgttctataattacttttattttttaattttaaaaattgaaaacaaaagtgcgttctataaaatttatttttatttttatttnnnnnnnttatttaagtcgagtctaggtccaaagtcggattcgggttcgggtcaaaggccgagttcagcaccagggctatgggggagaaaatttgggtccgagtctagtcagagtct

SEQ ID NO: 168626 - DNA, 505 bp, Cannabis sativa
tcatcttttactaatttttggtcaaatgaccattttacttataactaaaaatcaacataattaataagcaagggcatttatgtcatttcacaacacatatattcttgtataatgacatatatatcatgttattgccgtaattatataatatataaattttggattccaaacgagccaaaatatctgattgttactatatcgcattaacttatcaaaattctgtaacataataaagtgaacataatgcatagtaatatagttccttagcacaaaatataataaaatcatcattttaccccttttgggtaaaaaatacaaatatgcccatatctcataaatggggtcttgaattcaaatatactcaaataataacatataattaattatagccggcttgttactaggattgacgccttgatccgcgacttctggtggggttttgagaaagggaaccatggcctctatctcaaggcctgggataagttgtgtctccctaagtccttag

SEQ ID NO: 168627 - DNA, 773 bp, Cannabis sativa
tcatattattattttatggatcatatattaatatagtgttgaattaataatagcaataatatatcactacatgaaatctaatttttaatcataataaaatttataactaaaagtaaaaaaaattgtaactaattataaatcactattccttcgttttgactaaaacatccataactaaaactattagttacaaaaatcataatttgttatgactaaatgtgtctttagtcacaatatttgtcgtgactaaaactaaattagtaataacttgtatctaaatactatgttttagtcacaaacaactttttattttgactaaaagctacatttattatcaaaaaatttatgttgcgactaaaatgttgttactaaaggtagaatttttttgtaatgtataaaggagcattgttatcggccggcaccgctagtgcctaacactttctatatgcatgtagcaccttacgattagttaacgatattcttaaaaaactattttcttaagttatatgagactcgatacttaattacaccaacaacagtataacaccaaagaaaatactagacacaagttaagtagtattttttaacatttttcaataaaaagatctacttaccaactaccattactgtagtcgatctctccatgacccaagttccaaccaatctccattactatatgtaggaaataatggcaattccgaaactgccccctacaccaacacccaacagtcataaagcaagggcataatggtacttttctctttgtgcggatc

SEQ ID NO: 168628 - DNA, 557 bp, Cannabis sativa
atctacttctgtgagtcaacaactttttaagagtaactttttgaaatttttttatttggataaattattccacccaaggtaatttgagtatgcatgttatttacttttatgataattatgataaatgtgaatatattggtaaaaatgaagctccatgtgggatcgatgtgtcgtgtagaaagatttccaatggaatatataataataataataataataataatgccccaaaagaagatgcacctaatgtatataatttctatctatatatagagagggaaaaaacatgtttataaattaaagtcaactagctagggttatttccacctttttaaattttctaaaaataataattaagtttaaagtttctttttttctttcaattttttttcttcatgtttatcactttgttattattaaaaaatgaaatttaaatttctcattggtttttatatacgaaaaaaaaacgtaaatattttttcgtttacattaaaaaaatacatattgatacgtaaagtttatcattatttcatccaataatcaaatatttttgtaaa

SEQ ID NO: 168629 - DNA, 1102 bp, Cannabis sativa
tttttttttaataaaaactatgaaaaattatttaattttaatttcttttttaagagacatgctttagaagtagataatgttcgagagaaaaaaaatactaattaacaatgccacattaaattttagatgataaaaaagaatgataactaacaaaaatattatatctctataaatagaagagtttacaaattttttttaacatggtgtacattttaaatgatataattttttaataagttcaagagataaaatacaaattatttcttaaaatagttatacttaaataattttaagagtcactcatgtgcgaagccccgtgctttctcactagttatagataaaaataacaataaaaattgatgaatcaatctttaagaatttggaccactaatttaggacaaaaaaaaaggaaattaaaatattttaacatttttataaattaaattagtgttcgttcattaattataaaaaaaaataaagaaaattcttacttaattacgttattttaataaatatcataataactgcattatcccaaattaacatttttatcaagcacaagtcttatgtgtgtaaattaaaagggttattgcaatattatacctcaaatttattttatttataaaaatacttttaacaaaattatttgtacaaatatcgatgtgccatgtcagctcaaataccaaaatttaaaatattttccgaaaatagaaaaaacttgaaaattttcgcttccataaatttcaatgttttataagtttttttttttaaagcaactttttaattgcttttgatgaaaataatatatcaattagttaatttttattaaaaaaaattatttcaagataatttttttctcatacacatttgattgatcattttaaatttttaaccagtttactttaaaattaatatatatatatatattataattttataatataactaattttattatatttaagatactatttgataactttataaattttttatacgaacgtatcaaattttttttgttaaataaatttgttattagtatattatatcgtaacttttaaatacaacataataaaaaaatggttaattagtaatttttccc

SEQ ID NO: 168630 - DNA, 1382 bp, Cannabis sativa
  modified_base (1342)..(1343): a, c, t, g, unknown or other
ctgtgcataccacggctcgcatgcaagccctcgatgctcataacatgcacacatgcatgcattcgacaaacacatgcacataacaccacagctcacatgcgagcccccgagactcacaacacacgcacacactcaccatgcacggctcgcatgcgagccccccactcgcaacacacatacaccgcacacaccatgcatggctcccatgtgagcccccacatggactcgcatgcaagtccctaacctaggcatgcacacacgactttcacgcatccatgtatggttcacgggattggtcttggggccgtacggatgcatcccgatacccgcaagtagagactttaaaaaatgtgcactgggtgagtagactaactgaatgatctcttgcttatctcttggtctttaggtaactaataccgagaattatagcaacgctaatttttgaggttaacagtttatatcacactaaatttgacactacaaaaatatttttcctttaaagacctcacgtactatattatttacatgaataactaatttctgatataattatgcatattatcaaaaaaaaaagttaattatatttcaaaataaattaaaagaatagctagaatgaaaagaaaaagttatgcactgatttggtgcataatcaaaatctaacactatatattaagactatctctaatagttccaccattttgggataatttttcaccaattttgtgatgaaactattacttttagtgcatcaactctaatgattcacaccaaatatcaaacaaaatatgacacaaaataaatatattttacttaaatgatcccacattttattctatttacattaataaccaataaatatattttttggttttgaagtctaaaaattctaagtcttcacatggagggataatgtcatattaataggcatatatatccttgatgggctagactgattcagacccattaagtgtaaaatgcttattgatggggtaaaatacaattgtttactgatataatttgagctaatggtctaggtaggtgaggactaagttgcattgagctgtcttccgtacacggtcgattagtgataggtgaggcatgagctgttgttggggaaaagaacgtcaaaatagtgggtgctcacccaaaaaggtgattttcttttctttgtgtgcctttctaagacttgactgaggggataagctgtcagatttcttcgagagcgtgttagctagaagtgccatgtgagcaacctctgggacaccaagtgatcccaggtgcccatttcgtattttattcccagatgacccctatgttggaaatattttacgaggatctaganntactaccaagtatgtttcattaaaatcctaatatgaatt

SEQ ID NO: 168631 - DNA, 551 bp, Cannabis sativa
ctgggatagaggaacatcatcatccatatcgggagtatgcccaccaccagagtttgcctcctcagtagttggggctccatctaaaccacctaatgggccctcggcccccgtaactgcaaactcgagggatacaagttgtatctctaaaagttggccatgctagccaaccttaatatattcttcttctctactgatgggacaagatgtggttcgctctatccttcatcctgaggataggaatggagcgcttgcaggtgggcacttgctgaaaacaatagtgttgaacaagctggatgtcccagacaatgaagtaatttcgggcatataccttacttttgacaagggcaaactgttggtgtcacccaaccaataatagctgatctagctgaagtagaagtacctcgtccagttctgcttcaaagctgacttcaagtcaaaataatatccaatctcatacagagtagactgaggctagcctagctctgcatagtgaaaaaacatcgttaaatggtacctgatacctttcggggtgatttgcgttggacatatct

SEQ ID NO: 168632 - DNA, 747 bp, Cannabis sativa
tcatcctggaatgattcaggttttcttaggccataacgggggccttgatactgatggtaatgagttgcctcgacttgtttatgtctctcgtgagaagcgtcctggcttccagcatcacaagaaagctggagcaatgaatgctttgattcgcgtatcggctgtccttaccaatggtgcgtatctcttgaatgttgattgtgatcactacttcaataacagcaaggctcttaaagaagcaatgtgtttcatgatggaccctgcttatgggaaaaagacctgttatgtacaatttcctcagcgtttcgatggcattgacaatcacgatcgatatgcaaatcgaaatattgtcttctttgatatcaacttgaaagggctggatggtatccaaggtccagtttatgtgggaacgggttgttgtttcaacaggaaagctttatatgggtatgatcctatattaactgagaaagatttagaaccaaacattattgtgaagagctgttgtggaggttcaagaaagaaagcaaagcatagcaacaagaagtacgtagacaaaaagagagcagctaaaagaactgagtctactattccgattttcaatatggaagacatcgaggatggtaatgttgaagaaggttatgatgatgatgagggtcatagagcacttcttatgtcccagaagagcttagagaaacgttttggacagtctcctgtttttattgcagccaccttcatggaacaaggaggtat

SEQ ID NO: 168633 - DNA, 704 bp, Cannabis sativa
tgctagccatagggtcagctaaggagggtccggccagaccccttaaggtagcctattcgttgtctctttgtcccacttaagtattcgaactttccgtcaactgatatgttgtgtacaatgacttggccttcgtgttgataagttgtactccacgtggcattgatcttatccacatggacatgctacgtcatgtgtgtaaaaattggaaaaaagtaatattcttaagaaaatgctaaaatcaatattcaaaatcaccatcaagtgtcatattattattaatgtaattaagtatctaagttaaaatattttaataattattataaaaaaattactaattacaccacctaacaatagtatggactagtatctaatagttatagttttgtatttatatttattatttatcaatttaagttaaaaattatatgtttaggacacttaccttttttcccctcatttttccaattgcactacctcctctttgttgtcatgtttttccattcattcccttagaaaagtatttgaaccattatattaagaaatctataaactaattaaaagtcacaatgtgttgggactttttgttattgaattatatataaataatttccaaggttttcaacaaactaatatagtgtcccggtaggtgagagccaaagatatcattcattgaaaagaatagtcagctcatctaaaatggacac

SEQ ID NO: 168634 - DNA, 2238 bp, Cannabis sativa
taaaataatttccaacagctaatatccatgagttgcagatggccttccacgaagaatctggtcgggccttcaacatgccttctagagaagggaggattgacttaccttgcaagaatgtttcacaagtaatcccacaagaaagataagttctaaaaaggacctggtcgggtagtcagtatgccgaccaggagaaacgaagtcaggaaagttaggcaaagctatacaagtcttaatttcttcttcaacaacatccacaaatatctctaattgaatcctacaaatgtgaattagactggtctactcaagattgtaggagctttaaaagatcgtaactgcacccaagaatataggaatatttactctttgatcactccttttacagagttaattgtaatacccttccccctataaatagtgaatgaattcacaaggagaagggacctaaaatcataatctcgcactaagagcactttgctgaatattctttgtaaacatcctgagagttgtagctagaattcattttatctttcttagtgatctgcacagcattatctcacaatcaatacaactaaaaggggagtatgtcattcaccatatataagtgggttgaacctatacaatcttgtgtgttctttctatttatttattattcttaactctttattggtgattactcaacgtttattggtctttaagttagttggctattttttcagccaacaattgtgatgttgtaatctttttcatctcattttattttttgtttttttgccaaatgatctgagaatcaggcgctgattatttggctcatttttctaattataatcctggtcgtgtctccaataagtgaatggttcaaattggattgccgactattattttgagtgactgctattaataaaattttatgatttattcaaaaaaaattaatataaaatctccttacaaaaaaaaaaagaagttttatttttacccaaaaacttataaatgtactgtaataccctaacattaagaaaataaattagcgaaccctgactagttcaatgtgtattaatgtggaattatattattatataatttaatatgtgtaaattatgctgattaatgacatgttaagaccccattggtgagccagaggcatttttcgtattttgacccgaaaagggtaaaattgtaattttaatattattgcattcttattggactatattatatagtatactttttgtgtccttttacaagtgtattctgacaagtgggcgcggtatagtcacaatcgggtattttgggccaaaccgggtttggggccgaaatacatttttgagattttattttgatattttataattgattaattaatctaaaatttatttgagttatgtgtgtgtggttaaatgacaattttgcccttaattgaggtatatgttgtgtaatggccctagaggcattttgatatttttaaccatttgttttattttcaacaaatagaattttcggtagaaattgaaaaggattttttggttttatccagtccataccgactctctctccctccctatttctcattttcttccaaaatttgattcttgaaatttaaccttgattcaagcttaaattggtggagatttcggtgcttgggttgtgaggagcttgaggtagtatttccaccattttaattttgaatttgttgctgaagttgatgattgaaaaagattgtttttaagttgtgggtgttcttgaatgcatgttgtagtggattggagtgaattgatggttattatgttgtttgaacttgtaagattttgagctatggatctctacttttttagtgagtttctaaggttgtatattgagtaagaaatctgattgttaactctgtttattgttgtttgtaagttgaaaaatatgatttaggtatttaagctcttgaatatgaaattgtgatgattttgcttaagtgttgagcttattttgaatattgttaaatctgattttgggatgcatatttagatgaggattaagcttgatttatgtgttctaatgctctgatttgatatctattaatctttggggtaagaatttgagtgtatgcatgttttggttgggatccttgtgcatgttgggctaaaattcaaagctggaaatgggatttctgggtttaaaacccagacgctgcggcccctctcattgggtgccgcgacccaccccttgtaaatcctgggttttcaacccaggtgc

SEQ ID NO: 168635 - DNA, 1168 bp, Cannabis sativa
tattgcaaaagaactgttttaataagggatggaagcaagccaggttcactcacatcaatttggggcttctctgcattattgtcgttttttttttaaaaaaaaaaaaacagctgtttttgtttaagggaaatcaataccacaaaaggattaggcttatgagctaaacaaaaagcagaaaagagcaatattaataaaataatgttacaattctatgacataaatcaagaaatacaagttatacaactctatagcataaatgtgatgaatgaacaccctaaaaagcagaaccaatcttaattgttacaacaaggacaattattaattatttctataaatacaacaaggacaataatattgataaaataatgttacaactctatagcataaatgtaatgaatgaacactctctaatcttaattgttacaacaataacagtgtctaagaaaccacaaacaaagactagaaccaataaaaataaacaaactaaaaattgagagacaaaacctaactttgaatgaattaactgcaatctttattaacatgaaaaacaagtatatacagaaagtgtatcaatgaattacaactcaacaatagaggatgaaacctcagatacaacatgaactcacaatgagatacacatgatcatatacacatatgacctatttacattcctccacacacgttaataatcttggacaagaactctaaaacaaatctctaagtttctgaattttgagctaacttgagttatatatatagagacacgattttgtcccgttattgtactttcatggaatgtaatccgtgatgtacggcaaccgttggatggggtggttatttgatctaaggactgaggtcgatctaagggtaattagggtttaaaaaaatggtaaccggatatgtttttgaattttaaatttattaaatttgaaaaagttgaaactgacatccatcaatcatatcaaccgtcctccactcttccatttcattcttcactttctttttgtttttcatttttcattttctattttcgatcctgctagggcaaaactctcattttcattttccattttctttttcattttctattttctttttccattttccattttcgtttcaacttaggtaaaaacccatattttacattttcttcacttttcatacttcg

SEQ ID NO: 168636 - DNA, 649 bp, Cannabis sativa
gtaatttaacttgtaaaattttaaattattattcaatatttagattaatgattttaaatctaaataattttattctcaactttctttgcccatataaaggctatcaaacaaaagaaaaaatacatttccatcactatactacaattttgattaaatatatttttttttataagtatcaaatattaatttgaatcacaatattttactttatagttcgattaataattatgagtttcaatttcaacataacaaagaatatttctactcttaactttgttttgttatatgaacactatggaataaaatttaaaaaagtattttgatcacgtacattttcaattattaattaatttgaataaagatcttgtgtgaaaaagggactcttaaagtgtttagtcagtctttaaaaataaattttacgaaagtttactttatagttggattaatgattacgagtttcgaaaacaataaattgattaagaatatttttactctcaactttgttctgtcatacaaatactattgaataagagaaacaacatttcgatcactataccataatttcagttgattaaaaagttgaagagaaatcttgtcttcgaacataaaatcaacaaaattttattagatatactgattctgaatttca

SEQ ID NO: 168637 - DNA, 1453 bp, Cannabis sativa
aaaaaaaaaaaaaaacttaattgcaattactttaatttttttaaaattttgtattatttatataatataaaaatcatatacagttaatcattatatttttttttattttcattaaaacttaaaaataaaatcaataattaaaacaaaaaaatatcaatctcttctttaatatcgataaaatcatagcataccacacttatgattcatcaggcattgcttcacagctcattcgattggtagtgaccaattcttcattaattgtgatatatatcaagtatatatctcctccacttattaggataatatttatttaaatgctcaattgttattcataaaagtattatatatcatcaaaacataacaaattcattaagaatttaatttaaaaaaaaaagagtaaaacaaatctaaaacattagatagtattaagattaatacattaaattcatctaatttcttttatttctctaattcatctatttctatgtaggtctaagaattaaattcaagcgaaatagatgaatagtttgtttatgtgtatgaagttatttatgtgtaccttccaccaacgttagaatacaaggtttatgtgcgtttttttttaaatggaagaatttaattcaattaaaatcgtattcaactgaggtacattttcacatttagtatatcatatatttatgtagataaatgtgtaatatcttttctacaattacaaagcctactaaaacttatattaataatcataaaagtaatttcaaaattaaattttgcagaaacatcatttgtttctccaaaaaactacgaagagattattaatcattgaatggagaatccaattgtatgtatatccaaaaccacggatgagcccaaagtacaatcgtttcactatttaaactgatgagttgatggaagattaagataacgtttcactatgcttacttttatttttcataaggttttttattgaaactttaagtaatagtatttttcccctattttaagatgacatttttcattgatttttgttacataatatttcttttaaatttttcaaaatgcatatattgatccttttaattttctcgaaataaaaaataaatgttaaaatcatatgttgttatgacttattataaattatttcatcacattaaggataattactatatgagtataaacttaaacttactctttatgattaataataatttgtatatcctaggtttatatacacaattatggcattcttaacaacttcacttttataaaacaaatcgtttaaaaaataatttaaaattagttaccaaattcttgaaaaaaaccactagaacttaaataaaactaatatttacgtggctcgcccacgtaactttcatctaatataatatatatatagtgtatatatattctatattatgtgttgtaacatttatttaatctctttgttggtccttgt

SEQ ID NO: 168638 - DNA, 914 bp, Cannabis sativa
tattctttccatatattatctttccaagtagagcgtcatccaaattaatcaatagtcattttcccctacacaaacatgtatgagaaatgcaaaaaaaaaaaacatctttaatttaatggtgttagtcagtgacaaagctaaaaaattattttagatacaaggaataaatactataaattaaaaaaataaataattttgtactcaaatatataattttgttattatcctccctaattttaattataaagcataaataattttcctataaaaataatcttttttattactgttttcttttgaaaatgattactaaaatatttttacgaacataagttaatattctgtacaattaagttaaattataacaatttttagtaaaataatttatgcaacaatgggaaccagagaaaaaaaaaacaaaaattaaagaaatattttttttttactaaatattgttgaaaaaaaaaagataacaagtattgatattgtattattgagaaaaaattatgtttaaacaaagacatatcgtagtataagttcaattattgacaagtattcataacaaataataaaaaaaaatagatgtcatttttttgtcaaatatagtataatttttacatatctcattaaaattgttcttgcaaacttataaataataacaaaatattaaaattctaatcaaaattaatgaagatatgtacatattaataacgaaaatgttaagcgacacattaaggtaccaatcactacaaaaggtaacatatcattattggtgcatttttaaatcatttcccacaaattttaatttaatataatttaaaaaaatttaaccaattattgtatatgtaaatcggtatagtattaagcatgtcacataacaataatagtacaaaaaattatttaaaaaaaataat

SEQ ID NO: 168639 - DNA, 729 bp, Cannabis sativa
taaattaattagttgttcttttgaaattaatgcaagaaataaaggatagaaaaattgcatttttactattatgcatgatcagtctagaactattgattattagtaactccagttggatggctattatcggcctagtaccaacagcaatactcaccctctattctatagcattgattatggaccgatggtaatgcgcattagtgtccatatgtaatcgatactaaggtggcatttggttagaagtaatgaaatggaatagaatgaaaataaaataaattttattccattcatttatttggttgtgtttgaaagtattagaaatgtcatttcaatagaatatcctttcgatcattttagtagaataactattctattttaaaattgaaagaaaaaccattttaatgtaacatgagaaaaaaattaataaatttttatcaattttttttatacaatttaaattttattcgattcctattattatttctattattattcttataattttattcctcccaatcccaaccaaacgtgtaagtagtctcattttttttttgtcggttgcatatactttagtttgaggaactcaaggtaaaagtataatggtttgttgaaaactaatgcctaaccctttttcttagagcatctccaaagagataccaaatttagtgttacactatcactaaatttagtgtcaaaaattatttctactccaaccacaacaccaaaaat

SEQ ID NO: 168640 - DNA, 534 bp, Cannabis sativa
  modified_base (506)..(508): a, c, t, g, unknown or other
cattgcatggagtagtagagtttgggtccatggagtcccatgccttcaaagagagatacattccctctttacagtgcccagtccaccaaaatttcctcaaaatggaatctatccggtcagtaattttgcgcggaagcaaaaaaactgacatagtataaatgggaatagaagctagaacactttttgataagggccgctctagcagcttgagacaataatctcgccctccacccttcaaaacgagaacagatcttgtcaataattgataatgtcagtccagtagtgcttgtttgtcattcaaaagagagtgagtttcacatttatcctcataaataagaggtctcaagttttaatctccttctcaaagtaaaaaaaaaatgtaaaaattcaatatctttattattttcttcttgtgtcaactctacatcgtaagataaaatctcattacacttacactgatttcaaaaaaattaatttttataatactgtaaagaccgcttagtttnnnttggaaattagcagttaatcacgttt

SEQ ID NO: 168641 - DNA, 1186 bp, Cannabis sativa
aaatgacaacaattgtattcaaacaacttttttatgttaaaaacacaattaaagaacacaaaaggttttcaagtggtttgttaaatagttcactagtctttcttatttcgggagaccttgaagaattagagaagttgaactcaataacttttctccaaagcttaaaagttaaaacggcataatatttggcaatgtatttattttaaaatgagtaaataaatctgacctatttgggagctatcccctaagtttaaattcaaatacataagcaattagtttcttattttgatgccctggccttgaccaaatttgattgcaaatcctttatcaatttccgggtccaaatgtgattgtaatccgttacctcataaaaaaaaaatttcttcacatattttttttcttcaatccaaatgtttttatcaaggtaacatgtaaatatcttacagataatcaattgcatatattataagtaattgactactttcataggaataactctttaccatcttaatgggataacttgttagcatagtaccatcaagaaaacttattactattttaggggaagccaattgaacatattagtaacttgttactatcttaggggtaaccaataacctatgtcattatagtaaccgattatcacaaacttaactttagcactgcatagctagatattagataatgtcccaaaaactcatgcatgatgttatattaaaaattttcaaacgtgttcatgataactctattgttttccataaaaaaaatactgctaagagcatctttaatagtgtacaatttcactaaattggtattgaattttcatacaatttcacaaaattagtgttgaatcttcatataatttcactttagccacaacatattatacaccaaattggtactcacacttacaactccattaattgttttgaagatgccagaggtcgattgtttagtggtccaactcataaattattaattaaaataaattttaagatgccacagacgaaaaataaaaaaaactcgacgaaaatataactcgcccaatttttatattaggcgggttgaaaataatactaacccacctaattaacccgaactaacccaactaacccgattaagaagttttttttaaatatatatttatatattttttaattataatataaaacatatattttttttt

SEQ ID NO: 168642 - DNA, 758 bp, Cannabis sativa
ttctgttcgagtaaggagtgtacaaattctccaacccaactctcatcacatactcttcgatacgaactttcaatatccaagagtgagagttggggaaaagagatgttctcacacaaccatttgacaccatcagacgattcagcttggtcaaacttgctttccagaaagattttgagggaagaagacgaagttgagtggacaatgatgtaccggcaactaaaaaaatcaggtgttaatgacggcccagggaattttctcaaggaaatttctttgcatgatgttagattgaatcctgcttcgacgcatggggtggcacagcaaacgaatttggagtatctgttgatactagatgtggatagcctagtttggagctttagaaagacagcaggtttggcaactcctggaacgccatactcaggctgggaggacccaaaagttgagctacggggtcattttgtaggttggtttttcttttaattctaatattcccaagtacacaaatacgtatgtgctcagctaatgatatgtttctgataaatatatgttagaatttgacgaataaagtgaataagtttccatcctaaaatcgattggaatatcaattgacaatagaaggagtagcccaatcatcttatatataacaatttatttccacacgaactaactcttaatataatatatataactttatcttatgacacattagtcaatattttttcactatgttgctctattcattggtacattttataatagaa

SEQ ID NO: 168643 - DNA, 613 bp, Cannabis sativa
ggtgtgggactaagatgggcgtgcaagagagatcgtgagagaagagaaagaagagagggacaggagagaaaatggggtgcagttttgatggggtgatgctgaatagaaatttaggttaggtattttatatagtagggttttatgtgttattgggcttgggctttactttttttttttgggtcagtttgaaaatgacgctgcatggcatctttttaaaactgagacaaaagcctaatatgtaatttttcaactgatgcaaaactgtgtcaatttcaaaatgacaaaaaatctcaatgtgatctttttgcatcgattttaggtgttgattgacgcaaaaagaccattttgtagtagtatttttttcatatttttattttaaaattagaagcaaattacttaaagattattgtatatttatattagttttgatctcttttatttgaaagttttgtcgattttttatgagttattgtgagttgttagtatataaattttttgtgcagtatattattgttttgttgtatggtacattttattattagatgatatttattttttattttgctatgtataatagtagtatataattttattagcataataaaaatatttt

SEQ ID NO: 168644 - DNA, 636 bp, Cannabis sativa
ctaaagtagagtatcgcagtttggctcttgatactgttgatttggtctggattgagtctttactcacttaagttatagttccttttcaacaaccataacaatgtggtgtgataatcagagtattgtactcatgtctgcaaattctattctccatccttggaccaagcacattgaactagcactactacaaaaacaagcctttacatggataattttttgcatgcgaatgtgaggattaagggagtagtgtctaggtaattttgaagtcgttgggttattgacatgtaagagtgggtagaactctgggtagtcttattcttgattcattttttttttgtactggttgaacacaagtcatgcctacattaaatcatgcttaaagtccttcgtttggagtcattagggttcgagatgatatacttgggtttgtgtcaattattcttgtgttcccaacaaattgttcgaaggtatagctccacgaggacaaaattgtgccttcaaatgatcggtccgacgatgacctcttcaagcagctcttaaggggggtcttcctagtaccatgctattcttttagggcccgtttggtacgcaggactgtattggattagacaggctaatttgtcccatccagtggtt

SEQ ID NO: 168645 - DNA, 651 bp, Cannabis sativa
ccaatccagcatagtcccaaactgctcagcaatcccattgtaagagctagtacatctaatccgaacatggaattctgggtaccagctatcaaatctatgtgcaatgcgatctatgagaaagggattcaaggtgtaaaaattgtattgactatctcgaaaagacactagtgtggtatgctctgccaaaagcattgtaggtgaccatccatattgatttccttgggatgctccttcttcagcttcctgagggactacgttctgaaggtaatgcgcccgagccacatagtcctgagtctcctcgtcagctgggactggaacctgctgccacgacgcatacttgggatacttataattgcaagtatactagtttttggcaagtaggcattggccttgtttaggagaaactcgtctgatcgaagaccgaagggaagacccagtagaagcatgcgtcgctcgaccattttgggagtgggggtgggtcttttcgaaatagttgtaaaaaaaagagtaaaattaaagttagcgaggcaaaaattaaagacatggaataatctaaaaccaagtttggagaatatttacttatgtattatacgaaaggtggttttgttgattggggagagaccacttgtccagaagaagtcttctttgaaa

SEQ ID NO: 168646 - DNA, 866 bp, Cannabis sativa
tggagaatacattgtgagtgttcctcccgttggaaggggccaaatgtgcttgtgtagtattgcattaaccctagatttcttctaatcacagtcagtcttcctttgcacggtttccatgtgccatgtacttatttcttatgtggggtttgattaagtctcaatgttgtggtgtctggcaagttgccaacaccgaaaatattctaatgagatatctatgcgatttagaacaatgctaacttgtaatttatttgtgtttcacagaagcttccttcgaggtttactcctcagagcaatgataaagatattgaactgaaccagctagactacaatgaatatgtgagagaagagaactattctcagaaaagtctacaaaataattataaacgtgggagagggggtcgtgatcaagcacgtggtaaaaagttgcagaaaagggctaatggctctaagtctgctgtggcccggagaaattctaatcaaggattaaggcagccaggaagaacacttaaacaagtgggtggaagaggtcgccggactgttcgaaaaagaagaccagagagcaaggtggttgaggagacagtgcctgtacatatggttgacattcacagtagtcctgagagtggaggagaatcaactagaaatttcggtgaagattggaattatgaaaaggttgatgcagatcattatatggatgatgataacatcatcggtgaagatgcaatggaatccgatgacaatgcccaagaagaagaatatgaacaaggaaactgggaggtgagttataatggtgttgccagtgattggaatggagggctaatggacgagagcgatgaggatgaggatgaggatgaggatgatgcagatgc

SEQ ID NO: 168647 - DNA, 541 bp, Cannabis sativa
caaaataagaagtaagtagacttccttatataatatattgtggtttcaccaataattaattagtttcatattaaccaggaattccaaagactactcctcataattcaatggcagtatggcttggtacaacatcaatcttatgcataatatgcctactatgtttcatatgttggaggaaggccatcactagaagaaatgggtccattccagagctcaattctatagtgcctcaacaacccataatcattatgggcttagatgggccaactctagagtcttacccaaaggtaatattaggtgagagtcggagattgcccaagcccaatgacaacatatgcccaatatgtttatctgagtataagcccaatgagaccctgaagaccatacctgaatgtcagcacttctttcattctgattgcattgatgaatggcttagattgaacgcttcttgccctatttgtcgaaaatctccaaatgtatacaattacatctaaagatgtattattagaggtgttcacaaagtatccgatccaatccaatc

SEQ ID NO: 168648 - DNA, 1988 bp, Cannabis sativa
atcagtagtaggagaagaagaatgggatggggattcatgatcaataggagactgaggcaatgaaaagaagctttgatattcaagaggcaaactgctagaatcaacaaaaaggaaaatagtctcatgaaaagtaacatccctagagtataaaattctattggtatttagatccaaaagcttataagctttcataccaataggataacccaaaaagatgcaaggaacatccctaggtgagaacatagaactagaagtgagaagtgttgaagcataggcaaggcaaccaaaagctctcaaatgatcatatgctagttttttggatttacggaattcaaaaggggttttaaacttgagattgggtgtagggggttcgattaattaggtaggcagcagtccctacacaattatcccaataaggaagaggtatataggattggaaaagcaaggccctagcaacattcaataagtgttgatgtttcctctccactactgaattttgttggggcctttaaacacaagagtgatagtgaactatgcctaaggaactaaacaactcaggaaattggagttccttagcattataagagctaatccctttaatttgaaccccatattgtgtcttaataagctgcagaaatttaggaatggttgtttgtgcctcggatttggttttaataaaactaacccatgtgtacatagaatgatcatcaacaatggtgataaaatacctacaaccagcaagagtaggtgtattaaaaggcccccatatgtctatatgaatgagatcaaaattatgagcaacaatattatgatgagaaacaaagggaagccttttttgtttagcataatggcacacagaacaatgaaaatcaagaatggaattattgtaaaattgtaaagctttattcatagaatgatttttgatacaactaggatggcccatcctatagtgccaaacagtttggtcacttattctagaatcagactaagaaaagataagaggtacactgattttagaatcacaatgaatgtaataaagcctgccaatcttttcacccatcccaatcatttgcctcttcaaattgtcctgaatgtcacagtttttgtcacgaaagaaaaaggaataagcagcagtatctgttagtgtggagacagataacaaattatcctgaaatgctggaacataaagaacattatgcagaggcaaattaagaaaaatattcacatcaccaataccttcaactttgatactaccaccatgtggtaacttgacatgagtaatagagttatcaatatgaagattatgaaacaattttctgtcacaacaaacatggtgcgtagcaccggtatcaataatccactttagaaagataggaattctcaccagagaaatgagagacaagtggagtatcctgctttggagttgaaggcaggtctgaagttctttgaaacagtatggccattaatttttgacactgcatgacaatcaagcttgacaccagatcctaacctccttgcatagcatctccactgttattttcatttcctccagagttaccttcaacattagcagtagatggcttgacattgccatttccagtcaattcagcatttcgatttgaaaattttccatacaatttgtggccaggaggatattcgtgcaatctatagcactttgacatgatgtgaccagcaacaccacaatggtgacacaccgttttaggcttgaaaggcttaacactgccggcaaattggccagaactcgaatcgcttgtagatttctcaggatcggatggagaaggcaccgattgagaaacattagttagagatctttatctctcctcctagataataaaggcataagctctattaatatttggaagaggatcctgcattagaatttgcaatcgagcagcactgtatgattcattcaatcctaccagaaattcaagaacacgatcctcctcttgatgttcttgaaaagtttt

SEQ ID NO: 168649 - DNA, 1358 bp, Cannabis sativa
tacatgaccgagcatagctgacacgtgaaaaggtgtctgagaaaaactattattgatgaagagcttgtcgagaattaaattatctagctgaagaagttctcttaaagccgcgacattcccttcccaggcagcttggtaaagcaagctgttggagtaaacctccacttacactgataatcagacttaatacaaggacagaagagtaattacatgcaaatccctaatttggccttcggcctctagaatccctaacagaaattagttagaatggatttggttaatccacacctaactaatttctgtaactaaattaactaactaactatagaaacaaaaagagagaaccctagatctatatatacctgtatcgatacacaaccagggacggttgagtgatttcttcaagatccagagttgaaaaaccttgaagaaggaggaaatgaagctcgtacatgcacaagacaaagaagaaagttagtacagttagagagagagagagggattaaacacattatatgtaataaaataaaagagattaccagtcaaaaccatacctgtgacttggaatctcagccttgtaaactctgaacatcaatttcatagtggaatcgagctctcaatctgaggagcagctcaaacggagacgtagccaatttttggtgaacttcgggaaaaaattctggtgtattctaaccctattctttctggtttttgtgtgtttgtgtgtagatcagatcatgttagatctgatctagggcttgtgtttgtgttgagatttctgggttatcgagggcttgggttcgagtttctctgagagaaactctctgctagggtttcaaggaaaacctaagggagagaggaagtgattgagaagcttctcaagtgttggggggttttgttcaaagacaaaatgaggtcgtattgacctgctaactttgaaaagtcagggaagtgttaaaggtcgaaattgaccttggtaaaactgattggtttatttgttggtgtagggcaaagttggaaaaacttaaaaattcctacaatggtatcagagcttggttaaagctggaaaattcaacattcaaactaatcaggaaggaagaaaactcaagcaagaaaccaagaaacataaagaagaacttcaagaactaaacctgatcaaacagaaatcattaacaaaggatttctgggacatttttttaattaatctttacaactaaattgcttattatttatctttacctgattttatctgatttcataatgagcaatttaaaggtagacattgacaaattcgatggttctggtgattacaggatttggaggagaaagattaagtcactcttggctcaacagaaact

SEQ ID NO: 168650 - DNA, 557 bp, Cannabis sativa
aagtcttcagatttcataattaatcaaacttattaacatggaataattgaaaacgaaaaaataaaaaacaaatgatccatttatagctagtatagataataaaaaaaaattataaaactaaaattcaattaaactcatatgaattatatgccaatacaaagttagcccattaattatgattaaatttattaatattatatagatctttaaactctaactaattaattattgaaaggttgatagaaactctaacttaacatatcaacttaaaaattaaaaattactatcaacttaaaaactaaaaattactttttactatgttaaatctaaaaactctaacttattaaactatcatggattaaaaaaaaaaaaaaataagaacaaagagagaagaagactaagagacaaataatatgtagttgttatgaaagatacgtgtgcataattttttttttttattcttaaaaaacgtttagagtcaatatatatagggaaatttgaatttccatgcttaataaacccataaattggttccctaaactaatactatgcataat

SEQ ID NO: 168651 - DNA, 969 bp, Cannabis sativa
tcaatatttctcatccattcgatcggtcatcattaagatcgaatagttaccattatttggatgtaagatcagctgcttcctttgtattttgccattcctgttttactaagcttcaaagaatttcaaattccaatccctattttctctgaaagtgcatgccctatttatctctcatattcttccttcgagtttttgacacctttttctctcaacccagacattgttacgaaccagacccctggtataagaagttctgagtgaggaattcttcaaggcttcttttcattcaacaacccaataagtgtacttccaccattgttctttgattatttttttccatatatatttttttatcatcaattttcttgtatggaatttttatatggatttttaacaacttaaggttagaaattagggttaaatgatttagaggctctgagtttttatgttctatatttttagaattttgaagtattttttcttttaatcaagacaatgcctcgttctgaataagattgtaaacacccagaccttgtcgaacttggttttccctaattctaagccattgtttttaaaccccacactcatagaccccaatccatacttgagttgaatgacaaaaaaaaaatagaaaacattcacttagggttagttaagaagaaacacaatctcgctataggcaatatatagatgaaattattgagagtagacgttgtaatctataagaagcaggctcgcctaaattgctcaatttagtaaaaatccccttagtgaaaccattatttttatcccgtgtcactgttgattttccaccaggtgatcttagttttgatattatggctacaaatgttagaatttattgggtcacaattgtatatataaaatgtgtgttgggtcatcaaataaataagtcaaatttatgtggtctattttggaataaagttcatgtggataccaattagacaattt

SEQ ID NO: 168652 - DNA, 527 bp, Cannabis sativa
gagcatccattcctgtacagaacatgtaattgtcatcaaataaagcagaagtgacgtttcctctgtattgttacttttttgtatgatatagggattgcggattaagaaacaactatatcttttctataatttcagctactagaatatctattgcacaaagcaaaagaaaatgtatgcttctaaataaagtagagattagtagttcactactattacacttcaattgtctgactaatagtagttgctcaataaactgaaactgtcctatgcatcacgtaagtactttaagacaataattcattcttacccatactgaaatagttccagaatcctccacggtaagtgtggtagccttcctgagaacagaaaacagaacaattggcaataagcatgcaattttacattccataacacaaacaaaagggaaatgacaaagtaagaaaattggtatgacttgtatcttgcttctttagttcaagcaagtaaacttcaacaattgagtaaactaaaatgaaaaaaaaaaaaaa

SEQ ID NO: 168653 - DNA, 649 bp, Cannabis sativa
gttcatttactttaatagtttatagtttgacaaagcatacattttgagttagatgatgagttatcataattcaaggaaatttttatactatttgttgtagatatttgggtttatctcatgttgttgcattttaaatttatgagtgattataattaagacaaaaaaaaaaaaagtacaaatggccaaaattgtcatatcaaatgcttttctttccttcatttcaattttatggaagataaagaaactttagaaacgcggcgttttttttttttttttgtaggaactcaactcggtttgaacgcggctgtaccacagcccaaaaagaaataggaaagaaatagattgacccaaacctacaatcgacacgtgttcaaactaactaaatatcaaccgtccgattggggctttcaatggtacatccatatcttaatatattattattattattattattattttgtcgttttctacttgtgaggagatcatgaatttttcttttttttgaaaataaaacgtatatatattagaaggaaataaatagtcaaacttcacggtcattataaaaaatgttactcggaatagtagagacttctaccataccaaaaatattattggcaaacgtccacttggccacattatgggccgcaaa

SEQ ID NO: 168654 - DNA, 715 bp, Cannabis sativa
  modified_base (673)..(681): a, c, t, g, unknown or other
ctaatctcataataagcttaattcgcaagagcatattatcataatatatatacccaaaccaaaatctatctatagtatgttaattaaagtctctccggcaatatgtattaaatagacccatatcaaaatttattgggaggaataaattcgaactaaaattattgaatgagaaagaaaataaattattgggttaagtaattatatgttatcatcaattactaaaataatatacattaataatgtacagcaacattcattaataatgttgaaaagctaaaagaaaaatataataaataataattttttcaccttcatatgagataacaaataaataataattgtatcaccttatataaattatagtgttggtgttgagacttgagagtattgtagcatgttgcatcgttgattgtagaatatgttgagcggtcgagtggtgttgagcggctgagtggagaagggagaacaacaatagttatatatagtgttaaggatacaaataaattataagaatttttttaaatatctaattataaatttgaataatttttaaaattaataatggtaaattcataaaaataatataaaaattagaaaaaagagaaaaaagaataataattttagagcgattttagattgccacatcatcgcttcatacttctcctttatatannnnnnnnnactagcaaaaaattacgtgcgaggcacgtatact

SEQ ID NO: 168655 - DNA, 1324 bp, Cannabis sativa
  modified_base (223)..(226): a, c, t, g, unknown or other
  modified_base (1261)..(1262): a, c, t, g, unknown or other
aacatcacatcaaatctttactaaaattttatatatttttttttcaaaaaaatatactgtattaaatatgagacaagtgtcaaaatttatatactgcttacaaaaagatagtatataaataaatagtaaaaatattaaaaaaacgtatttaagtataaaagtaataaatataaaaaaaataatataccatgtacaggcccggccctaggcataggcgggctannnntgtgcctagggcccacccagcccaggggcccaaatttttttttcttcttttaaattatacattttttttactgattttgaaaaataccacattttttctaatataagggtccaaatttttttttcactatgcccactttgtttcagggccagccctgaccatgtaaaaactccaaaataaaaacctaattcttttaaaaagtataaattaaattataaaaatgatataatttttaatttaaaaataataaaatatgttttgtgtattttttttttttgaaatattattttttgagttgaattttataacatacaatacatgaattaaaattttgatgaatgatgtgtatcatttcaatattatttaatttctaattttttttatagaatattaatcaatttatcttatattagtacatattatttaaattaataaaaataattttataaagtatttataaaaaaaatattttatagttaatttagtcttctagtacatctaatatagtataatatcaacatataatccaatgcaatccaatcggaaagtttataaaacaactgacttttgatctaatttttacaaaaatactgccacatatcagaaattatttttattgccaattttttttgcttttatactgtaaacaccaaaaaataaaaaatgaggcctccatcttctacacccacgaacataaccaccacaggaacaccataataattgaaaaacaaccgttaattccggtgagattaagaaaaaaaaaagtaaaatcgaagtcaaattaataattatgacaaaacaactgtaaaacattactacaaaaaatcaaacaaaagagaggaaaacatgataaaaaaaactaaaaattgatctgcacagcctccatacccaatgcaatagcagttatatttgcaagctcaatcttaaaaaatcagaacaaaaaagctactaaaacaacacaaaaaatgtaaaacaataggcaaatataatcacttataaaaacaattagcaaatatatatgggtgcactcttaannggtattacccatgaatgggtaaaaattagaaaattttgagtttttatgcttaatttttctat

SEQ ID NO: 168656 - DNA, 1666 bp, Cannabis sativa
ctaagacccctagggccgagatgatgcctgttgggcctctagagtcgaggtgatatgttctaggcctctaaggccgaggtgatatatgaaagggtaaaggtgattttcttgcttcaacctctctaagtaaaacgtgaataacgttcgaataaaaactccaaatattctaattcaagatgtgttttagaatctgaggaaaaggtctaaatcttttacgttttgactttttttccaaaaatgtgaacagaacatggtcgtatttaggtttgaaattcggtctgaggtgacgaggaggtgtcgtgaggagttattgtgaggagatgccttctttgtctaggtggaggagatgtcacttttttggtctgggtgaggatacgccaccttggtcagagatccatgaggaggtgaggtaccctattgggaggactatctcattggggaggaccccattgggaggaccttattggggaggatctcattaaagaggatcctttagaggaggaccccattgaggaggatcccatttgtggtgaaatattatgacatttctcatatccaacaaaaaattaataccatcaatttttttgtagggagaacatttaccttccaagtttgtcataatattgcattgttatgatggacttgtagaaaaaaaattctcgcattcttaacttcatattttcgaacaccaattttttcaggaactactagatagcaataccatttctaagaacttagaaatatttctatacaccaatatctctaatcacttaaaaataataaaataaaaaaatatataaataaataaaattaataaagaaggccatgatggcctttcatcaacttttctccttctttttaaaaaagagatttgggctcagtaggtccctcctttttttagaaaaaaagactcaggctgagggtgtccctctctaggtttgagatggtccctctctatggccgttatggtccttctctaaggtcgaggtggtcctttctagggctaaggtggtcccttttttttgtaaaaaaaaacaaggccaagatgctcctctccattgagcttggtcctaactcactttcttgttgttgggatgtgggggtcaaatgatgcttctttggagtgaaccaaaattgtgagttttgcattagagttgttgagaatcatatttgagattgtgagtcccggcattgggtcgagataatggtcttgactctcttggtgttaggccaaagtgatcatcttgaccttgtcccaagattcttcacaccctgctggtatgctcacctcccctacgtacttatcatgttgtagatgtatgctcgtgaccatatgggaggtgaaagccacatcgatgaggacctcaagctcttgttttgccttaagcttttggcttgagtaacatatttagtagtgtgggtgaaattttcttaagcatcatacttggacacaactttcttccatcttgaattatgtacctccagtatggagttagaatgtagaattaagaatcatgactttcctttctctatgagttgagttacatgtctcattccataataaatctgagttaagttgcttctcttactcgaattcggcacctgattagagttagcactactacaaaaatcccctttagaggcggtttttaagccctttcagcgt

SEQ ID NO: 168657 - DNA, 891 bp, Cannabis sativa
agaagtgttaaacttttccttttttccattgttcttcccagagttgttggtgttgtgcttgtttctagtgttttttaccaatagaagtctgggcagagttttgttgtctgtttgtgcgcctggtgggtcatgagactgctgggtgcctcatgactgcttgttattgacatgcctcgcctgggcctattgtatggcttcgtcaagttttataaagtcgctctattgaggaactccttcatgttgttgttagatattcttcagatatctttccagaagtttctagtgggagtatgccccctagtatggtcgtatatcagcctttgactttggcagcctcgaccataaatttctgaatataatccttcagaggttccccttgtcgatgtttaactttgacaaggtcttccaactgcgatggtacatgtattgaggatgagaattgtgtatagaattctcgtgagaacttaacccaagagttaagtctcctcagggtgagtttaaaagtaccagtgttgggctctctccaatagtgtggctgggaatatgcaacgtcgtacatctttaataaatttttggaggtcgagttgcatctcaaagtatttgatgtgagccaaggggtcttcttacccgataaacatcttccatactggcattttgaacttcagcaagggcaaggcatttatatatgtcaagaagggtgatccccttgatcgatcaagtttaaggtctaaaggctttaggccagctatgctttaaatcatgtccctgagttggtccaactatgcttgaacagaaggatctcttgctgtgaggacctagttgaaatgccctccttggggaggctgcaggttttgaagagataggggctgactggccataccctgggagagt

SEQ ID NO: 168658 - DNA, 868 bp, Cannabis sativa
tttatatagatgtgttatagtgattattagggaggtgagcaccgagtagacaaggatcttcttcaactattgttcgaagattgtccagcgttgcccctacacaactcttttggggacgaggggtctagtagtgagtcggaaatgcccaaccacctctaccgagagatgataggtggtgaagcatacagcaggcacatctaggagcttagaaaggggatacgatcttattttccccgagagtggacatacacccttccttccggtgagactaacattccagtagggtgcccattgatgccttaggggagttccccctggccgagactactatagccactacaaactgcctgtcatgttacccgctatggcttgcattaaaaaaaaagtcgggctagctcttccagcagtcctaatatggcgggggtcattaccaagaggagggtgtcggacgatctcgagactggattagacaatgaagccatggaggaaatagtgagagcgtttgagaagtgggcggaagaggaagccgagaataccttccataaagacgccactgagaaggaaccagctgagggttccaagcaagtcactctcaaagtcaaagagttcgccccgatagtgcttaaggaggttcacactacccgttgcaaaaccacccagactccctttttggcccctcctcgtagtcttagtgaggcccaattccaaaatgtggaggaactgactgtgaacggcaaggattggcagttaggggtgtttacggtgcgggtggtgcgatttttttaccattttttcaaaccaacccgcacatgcagtttttcctatttctcaaaccgcacccgcgccgcgaaactaaaaaactgcaaaa

SEQ ID NO: 168659 - DNA, 748 bp, Cannabis sativa
agcatcctatgtgcataaaagctagaaatgagttatttttagaggtggaataataatttttgagaaattaaaacacaagaagaaaacaccttattccttatatttacaggtaagagtgtaagaaattacaatgcccacgttacaccatacccatacattgtcatgatctctctctcaacacgttgcaatcaatcaatccctctaatacttcttcttttttgacaatttcaatcaagccaaaatacaaaaactgttcctatttgtttctagtgaatcttctctatctatccacattcacttgtttgttacataataatgtataacaagtttataaaatctttacttctttaggagtactgagtttaatttgatcaaaagaaaagaaagaaaccatgtcgagtagtactgctggtcttgtaatttcctgtaaaggtatataattaacacactactaattaattaataattaactatgatgatgatatcatgatcagtttcttaattagattttatttttgattattattattattgaattagcggcggtggcatgggaggcagggaagcctttagtgattgaggttgttgaggttgctccaccacaagccatggaagttaggatcaaagttaaatacacttcactttgtcatactgatctttacttttgggaagccaaggttagtactttagtagtaaattagtaattgttgaaaattatgggcaatgagtggagtatcccatgttgatg

SEQ ID NO: 168660 - DNA, 706 bp, Cannabis sativa
ttgattctggttttttccacccctcttgttcttggaatggcttacgtttttgttctggaacctccgtttgttgcttcgactgcctgggagcgatactacatctaatttttgtcgctccatgcccagagaaatgggtttgtgttggctcatgcctggcagtagaaggtccataaacgattggagagtattgggttctgggaagtgtaagtgccaaaatcattacttgtagggtgaaactgggtgtagatgcggaagaagttggagtcgaagggactccaaaatcttgtagataggcatcttccaaattgatgataccttgtgcattggcaatgaactcagacagagtctcagccctttttctttgcattttctccccataacaaggagccaatattgtaagtccatacagaagggctacgagcttcttgtcatcgctaaccttggtcttagttgttgcctccgtcatcatttgaataaaggttttcaagctttcacttagttgttgcttgatgttggtgagcgaatggacctccgtatcatagtctcttgctgcaataaactgcttccgaaagcagattataattctttctagctatggattaatctgagagttaaccttttccactagtctttcgcaaaacttggttagcgttaataaaaaatagatacaattggcatcatcgcttactcgtgctactttcatcat

SEQ ID NO: 168661 - DNA, 748 bp, Cannabis sativa
aattataataaagtatggaaagtggctaataataaatgaggaaaattggcttgtgggataagaacatagattctggatgaggtcataatgaaatctaaggggatataaatagtggcgtgtgcaccctgcacttgggtctgtacacgcagtagtaaatgttttatttggtcatacactcttgtgtatttgttttatttttttaagcaaattgtgtgtatctgtttttttaaaagagctttttgagactcaatcatggtctttagtcctaccaagttaaattctaccactactcgattcatttctttgactttccccctaaactaaagaacagcaacactacaaaaataaaaattaaaaaaaatgggtccttgagtgtccattgaatttttttcccactgctgcatgtatgtaatatatatagatataataattatataatttgtcttgaattctatcatttttattacgttatatgcatatcaaatctaatgaatttggattcaaccgattcaatataattatttattggatattaaattttggcattcgatccaattcaattaaattaggtcatccgatccgatccgatctgatccaattcaatagatgtattgaatttgatcggttccaaccattgaatgcatttactaattttttattaaattagattggatccatccaatccattttaactaccatttaagttgattttattaaatatatataagataatttaaaacctaataat

SEQ ID NO: 168662 - DNA, 3479 bp, Cannabis sativa
ccgagaaatcttctcgagccgtctagactctaataactctgccaaaatgattccttgccacaacagcaatgcacatgctattgaatcccaccttcacatcacaattcagcttaatccaatccggaggaggaggggaccaagcttcctttggatctggagtgggactgggaagcaaagaagcatgacaatctgcataagaagtacaaatattatcaatacacttttttatatcaggagaacagttattgtggactttctcattacgcgccctccaaatagtatccacaacaatcgaggcatataagaaaacatcatcagctcggatccctctgttgctcaggtcccaaatgaacttgacccaatcccaaactcagatgcctgtatcacacaccgggaaaataccccaaggagaggagcgccaaagatgaaacgccacattgcaagataggaaaagatgttcaacggattcctcccctaagccacataaggggcaactagtatcctctatgtggaacctcttcccaattaccgctctaacagggagggcactggaaaggatacaccaccacaaaaccttgtgtctctccaaaattttactgttccatagcttattccaaagtttcggagcaacctcacagtgaggagccctctccatagcttgaaccagataagccgatttagacgagaagcaacccttactttcgagcgtcaaaatccatctatcggtaccaatccctgaaggatggccacctttaagaatatccgagaccgtttctcggtcaaaagtatctcgcaattttcgaatgtcccactgcccgttacttaacataaggtcagccacacaattatagctaggagcggcattcccactcggtttcggacagaagcctttacgaagcggaatccagggatcctcccagatcatagtattctcaccattggctaccaacttgcaagccccttttctcaaaatggaattttccttcataacacttttccagaaccaagaatctgaatttttatacctgcaactaagaaagtctttccctttgagatatttggccataagaactctacagcacaaagattggcttccatttaggatattccatccccatttagccagaaaggcctgattcatctctttagttttccggaatcctagaccacccagagattttggaagacaaagtttatcccacgcctttagatggatcccatgatttcctttctcgaaaccccaccaaaaatctctaaccaaaccatcaatcttatttaccatttgagtagagagtttcgtggtttgcatagcatacataggcatagacaagcccacagactttataagagtagctcgaccagctttggacagagtttttgctttccatccctgaagctttgatgtgaggttgtcaagaatgaaattgaaatcagcatctttctgcctagatctaaacagtggcaaccccaaatatttaatgcaaccgtcagggtaatcaattcccaaaacctccttgatttccccccgcaaccttacaggggtgtttttactaaagaaaattgacgttttgagtttattcacctgttggccagaccacgagcagaagttctccaaacatgtccagaatccattcacctctaataaattagcacgcccgaccagaattaggtcgtctgcaaagaagatatgggaaagaaccgggcctcctctactaagtttaattccctgaatgatcccctgatcaagggcatcatgaaataatcttgaaagcacctcagctgcccaaatgaagagataaggggaaagggggtcgccttgccgaagcccacaagaaggattaactctcccaacttgccccccattgaggcagatatttagcgaggtagtggagatacattgcgagatccaaaagcggaatttctgagggactccatagcaatccaaagcatgatcaataaacctccagctcaacttatcataggctttgaccaggtcaatttttattgcgaaaaaaccctccttgcctctctttctgttgaaagagtggataatttcctagacaatgacattattatcatggatattcttaccaggaacaaaagcagcttgggttggacaaatgacagacggaagtaacggttttatcctattcgcgataagtttggagattactttgtacaccacattgcacaatgagatgggtcgaaagtggttggtacgagtcgggttttggaccttcgggataagaacaacattcgttgcatttatacctttatgcatatttccagaaataaaaaaatcagatactgcatcacagaagtcagctcctacagactcccagtagtgtttatagaatagcacagacataccatcagggcccggggccttatggttagacatcgcaaaaagagcccttttaatttcatcagtactaggacagataacgagggcatccgagtcttcctgagagattttgtgttgaaacaagtgagcacagttgtactccacaccaagatcagatccagtaaagatgttcttaaggtactcagtgaattcatggccaatagctccacgtccagaaatccagacattatctttgttcaagatactctctatagcatttcttctacctttaacagcagccgagaggaagaaaaactttaagcacttatctccatctttgagccaagacactctggctctttgcttccaataaatcgctttcctttcccgagattcgttcaaagcacgacgaatgtcacattcttgattccaatcccgggaaccagccgggaggcattgaatacgattaagcttttgttcaagctcttttatgacctcatccaactttccgaactgggagcggttccaattaagaagagctacccttgtagcaccaatcttcttgaaaatacgagcagggcccaaacatggctgaccgatttccaagcatgagctactactagattactacgagcatctcgggtccaaccttcttcaaatttaaaacatcttttgaatttgggatccaagcccccggagaggagacaaagcggcctatggtccgagttactggtttggtcagagcagagaatagctcgaggaaacaaattaatccaagccccattcactaatcctttatccagtgctgatttcacatggtgcctcgcagggcgatggttatcccaagttagtttgtccccttggataggcatattgatgaggcctcttctttcaataagattggtaatgatcggaatgaaaggatcccggccagacgagccctctctttccgagtcactaaggacaaagtttgtatctcccaaaataagccagggccctccaaatcagtcgcctattttcaaaaactcagaccagaactttttctttgcatgcagataggggggaccataaacacacgaaagtagccacgggaacgagggaggatccgaataaacaagccccgaaatatggttac

SEQ ID NO: 168663 - DNA, 585 bp, Cannabis sativa
ggtaaagtctgtttattatttggctgccaacttagacgaccaacaaaattctaccccctcggatttacatagcacttggtggaaaacgttttggcatttatctatcccttccaaggtcaaaatttttgcttggaaggttatgcacaatgctctccccacagcagcagcgttacaacgacggaaagtactcgactcgactgcttgttcgatgtgctctagtgcatgggagtctattgggcatgctctttttaattgctcacatgcaaaagctgtgtggaaacattctgcctttaaaatggacttaactaaagcacagcaaatgtacaatggtgattacattttctatctctctactcttcattcgcaaaaagaatttgagcttatcatttgcatcttgtgggctatatggtcgagtaggaatagatatttacatgggggaaagaaacctgatgggaaacaaacgcttgcatttgctatggattatgttgaaaaattcagagtatcatctactccgaagcactcaaaccattcttctccaggtgatgcgaacactgtatctttgaataatagttcccacaacaatgc

SEQ ID NO: 168664 - DNA, 815 bp, Cannabis sativa
ccaagggtacgctgcaaccactatcttggaacctataatcggggaccacatactgcaaccattctcctaaaacctgtaatcagggaccacacattgcaaccactctcttaaaacctgtaatttgggattaggggaccacatgcctgcaacaggagactgcatgcctgcaatcgaggatcattatcctgtagtcggggaccacctgacaccaaacaagggtatgaggtgctaaaccagctccagcacatgcaacatgcagggtgaaagcgacgttttatccccataggaccactttgtacaccagaccattagagcctataaatacccccatctcagatgtgagaggtgttggaaaatcacttggtgtaactcatactttgaatgcaatagagagaaaataactttcaaacatcttttaatcttcatcttcttctgtattgtcatttaatttatgggtttctttgtattttttggccactagattagttgatgagttctcatcgtcaagagtttggcaccgtctgtgggaacgataagctcaagctaggttgttcctttccacacaatcgttacaaaatgactagacgctctcatctttgtcagtacgtgaaaactcacctagacaaagactggttgattgcactagagcaagacctatcaccatccgccgtcaggagatgaggtgcgagcatcaatagggtgcgaatggatgaggagcaccggcaaagagtacctgacaatgtaatacccagaattaagaaaaggattaggaaaaccctaattagataattatgagttaattgaggaattatatt

SEQ ID NO: 168665 - DNA, 1202 bp, Cannabis sativa
aaattatgaaaaatctatttgcaataatcttaaaattaatctgcaaaatttacacttacaaaaaatgttattaacggccttttttgttttagaaaaaatcaataattaaaagttcacttaatgtcaaatgaaattaatgtaataatggtacataatataatcatgttttatagaagtttgtcttacgttaatttaaatgtttataatgattttgaataaattattgcataatgcgatgatagttatacaattatacaagaaaactgtccaaatacttcacatgcatgcacaaacagttaaaattcaaaaatttcaatacataatatataaattataatcacatatatctctctctatatatagaagaaataaaattataatgtcacttggtttcagaagatccatatgcaataattaattaattgataatatactaaaatgatctgtattgtacatatattattactgggaaataacagaaatgaaaattaaaaaaaaaaaaaaattaagtgccagtggtacgtattttcctgcgacccagaaaatgcaacgttgcgcactcattttgatgttacaaacaaaagaattacaagtttgttgatcttatcttaattttcaaacaaataaattacaaaccgaaaatgtagccactgattttgatcatcatatatatcatcgatcgatcatgatgaaaatataaattaagatatcaaaaatttaaaaatgattagtagtagggaattacagggggagggggagaaccgtatgacactcctacaatgggtggaagaggagtgttatcatcatacgacggcgttggaggaggaggaggaggacttgcatgctcgtaatgtgattcaggtggtgggcttggtgtcaccacagggtgctcctgatgatttattggcggcggtggtgattgtactactggtgtttcgcaaccgcctggaggagatgatgactgaggtggaggagttcccgcttcaggcgttggatatgacggtggtggcggaggagctttgtagtaatgctccttcgtcggaggaggtggagagtgagatgtgtaacttggagttgaaggtggtggagagccttgatagtgctcacttgaaggaggtggaggcggagaagagtagctgtaatgagttggcgatggtggtggtggtggtggtgatgagtagctgtaatgagtgggtggtggc

SEQ ID NO: 168666 - DNA, 721 bp, Cannabis sativa
tttgctgtcaaaatttgagttttggggcttaattgctagtatagtgaaaatattggaagttttgctgcaattaacccaaatttattttgtatttttgtttatatgtaaagatatagatatagaatactaaataagggccagtttggcacagattttagaaaggctgaaagctgctttttaaaaaagttgtgattaaaaagtatttggtaaccagttataaaacagcttattgaaaaaatttatgaagaaagtacaactaaaagctaaagctggtacaacccaactgttgcccttaatttcgcctaaaatacgtggatcaatatgacaacgacatgtggatctaagaaacacgtttattagataaattgactaagtctttttgcatcaaggagtgtcaacgagaatatgccccccggaggggaggtgaaggctccacatactcccggaaaccaagggaacgctaaggtatctccgggaggtgctataccttatttgatcagtcacctctcatttaataccgcatgggagaaaacgtattgaaactgtcataagcaatatgtctgatggcgtaacccctcttttgcagctattacgctatgattaatagggctagtgacgactactctgtgagggatcgctgttgggttttatgccttaaataaaacttcatttcaatgtaattcgtattattcaatatgaataaagaaacagaagtattttt

SEQ ID NO: 168667 - DNA, 800 bp, Cannabis sativa
ttgtccacctaacatggcttgtccacatagtcaaaagcaaaagataggtggagaattgcccatcacttactagctaggttagtgcttgcaacctgccaaccttctaggttagtgcctaaaacttgcaaacctgctaggttagtgccttcagtctgctaccttgccaagttagcacttacaacctgccaacctaccaggttagtgcgtgcaacctttaagtttccaggttagtgcatgaaacttccaactcgcaagatcccatggctgcatagtcgacacaagcaaaaatagatccccatacttgccagtaaagacctggacaacctttgacaaggttgataggcaaagttggatagcgttcaataaggctgacaggctgggcttgagagccttcagcaatgctggccagccaggctggacaaccttcagtaaggctggctggcaaggctggacaaccttcaggaaggctggtcggccagaacatgcagacaacttctaaaaggctaacctacaattacggtataggtccagaacccatgaagattgggatattccctcaagatattagtcctatatttcagggatttaactttcctttattacaattcaaatataagattaaaaaaatgttattttccctcttcaaaacggatatcattaccaattttaattaggatcttttgtaagccctgcactatatagaggacattagttgaaatgaaaaagggtctgagtctatgccaaacatccaaagctctctctctaaagctccacatgcacctaaggcttcctagactcta

SEQ ID NO: 168668 - DNA, 1125 bp, Cannabis sativa
agagattgaaagagaaagagagaaaactaaattcattgattaaagaaatggtaattacaagaggtatatatatacaaggagataagaagagaacagagtaaaatcactaaaagaaaccaacataactaattgaactaatcacctaaatacacggtagatactaactaatatgctaactgtaataacagatcatagtatcaggtaaataacaaaataacagtaaaccagtaaacttgatacctaaataaatctcatacatatatgtatatatttatatatattatgtgtatacatatatcaggcaatacatatatttttaaaaacctaaaagttaaaactgcaaatatgaaagaagcactacgaataccaacaatattattattataaataaggaagaggaacgaaataaatatgataataattaaaatctacaaaataacaagagaaatcgaggaagaataatagctgacccaaatatgaacaatttaatgagagagagatttgaagggaggttttttgagagagaggtttcgaatgagaggatataaataatagatttgatactggaaaaaggggctagcggtgggtgtgggtgtactgacagtgaagaaggtgaagtaggaggcttgggtatactgaggtgtcaaattttgattgttggagagtgggatgtagaaagtcagtgaaaggaaaaatgaaattgaaaaaataaatagaatgcataaagaaatgatgtttgaaagggagtgagtaagaaggtgaagcagaactttaagataaataaatataaaatcacagcaaagggcattgaaaaatataaaaaggaagaatatatcagagaattaagctggaggggatgataagggcttgattcattgaaagagcgacgatatcctccccttcggtgcgacaaaatcctctacccctttaattcattttctttgatttttaactcgaaacttagtatttaagctttggtagtagcaggatagtaaatcattgaagaaggagagcataaggtaagggttggttttgttttaagttaaaaacgattggttttatatagtggctttgtgatttagagtggttatggagattctgacttcgtaaaattgttctttggta

SEQ ID NO: 168669 - DNA, 1855 bp, Cannabis sativa
  modified_base (1818)..(1823): a, c, t, g, unknown or other
aaatcaaatcaaatattagatgggatgtttaataatccaatacatccaatatccaacgaactaattagtattttcatttagtttagatgagtaattaaattttatgttagtatactaaaaatatatatgtatatatagatattaaaattgaaattgtactcttttttctttggattagacggatctagtctaatccgataaatagtaataatttaattagatccgatctaaaaaatactaagtctaaaatattgtataaatttaaaccaatccaatagatatacatgaaatacatgatagaatcaattcaatctaacttccaacagatattggattaattgaataactgaaattaatttgatcgcatcagatagtaaaatctaacttctaatatattagattgaatctgaataaatctaaaaatattaaatgtattaaatgtagaccaataaacatctctagcctccacatcccaacacttccccttataataaatagccctagtaatttgaatcatctaccaaaaatttacaccaacctcctataaaattgaatcactgaattattggcaagaaaattttcaaagaagaaaatcttgtaaattgtaccactcatttgtatgaagaaaaagaatgtgccacctactctctatttattatttattaggctccatgacacctttgctgcactttttttttagggatatgttagctaccactcattttatttgagcattgttattagacactagtagtgcctagcatcttctcgacatgtcgtgttgcgattggttaacgatactctctaaaaactattatattaaattatatgggacccaatacttatttggaccaatagcgatattgacacataggagggtgctagataccactagtgccctttagtatttctcattttattatttacattatttaacacattaaattcttaacatacttgttacttggcatttctcaatttgtaaatggtacatcttataaagtgtatttatttgtatcaaaccactatatacttaaaaattatctgttgaaaagaaaaacaaaacataaactggcttggttatacatggctattattctatagttactttcactaactttctctagctttagttttctttttatcacactaaaataaaaatggtactttatgtatatgaggtaataagatccaaaccatgatgtctgatatattaattccctttagaattatatatataataaataggtcatgatccaatctatcataaaaatgaccagaaaaaattaggtcatttgttggagagataagctatatatgagttagctagctagctctataatattagtgactagtgattaatggagcctacattcactacttgctccaactaaaagaaatgctatgaattaaggacattttaaggtttctctaactctatacacaagtgtcttatatccatatatatagtttaatattataaagggtaaattgcgtcataaatacttaatgtttccaattttatacacttaaatatctaatgtttattttttgtggcaaaaatacttaatgttacaattctcttacactgttactactacttccgttaactcataaatatggacacgtaaagggtttagatgcattacatttatttttattttattttaaaacttaacattcttaccatcagaaactaaatgctacttgttttaaaaaaaatgtgttctcattaacaattttcacataatattggcattttaattcgattatcatgttccatatactacaccggttcactcagctatggtaatttannnnnncatctctcttatttttttttaaaaaaacaagt

SEQ ID NO: 168670 - DNA, 853 bp, Cannabis sativa
acagtgataaaataattacgatttgaactttgaggtttaataaatataaataagtatatagtttatttatagtataaatatgtgttacaatttggaatgagaggtgctaacatgaatgaagtttcatttttaaaattaatttgtaatgagaagagtagcttgaagtttcattttaaattaatttgcaatgaaaagaggagttcattcatcctatatatagtattttatttttataaattagtaatgtgagactaattcaaagtatatgtataacgaacaacttttaagagacagaacgtgacatttgaaagaatgacacaaggctagtttatttatagtataaatatgtgttacaatttggaatgaaaggtgctaagatgaatgaagtttcattttaaaattaatttgtaatgaaagagtagctagagtttcattttaaaattaatttgcaatgaaaagaggagtccattcatcttatatttggtattttatttttataaattagtaatgtgagactaactcaaagtataggtataacgaacaactattaagagactacaggacagaacgtgacatttgaaagaataacacaaggcataatcgagaaatttagagattttaaattaaaacaagttaaaagatcccaacactaaaaactgacacatattgacagaaaagtgtgtggaaaaagatattaaaagagagacagcataagttttcggtttggctcctcttggtagactagcagcactttagatttacaactaatcaagcagctctaataattctaataatatgattactaagagattgcattgcataaagtggaaataataaaacaaagattaaattc

SEQ ID NO: 168671 - DNA, 844 bp, Cannabis sativa
aataaaatttaaaacccaaactctatcttcttcccctttttttcttctactacaacttctctttttcttcttctttccaaatagcaacaaaaaagcaaagcaagaaaaaaaaagcttgatgtcttgttcttccttaggtgttctaagattcctcagatttaaattctatagcatcgtcaaaacctttattatccaaaacaatgttgtttaggcaaacaaggttttcctttttctgcaaaaaaaattagacatcgtcatcactttcatagacattgtcactccaagtatcatttaagccatttttgttcttttttaaagtattagcacattcatattgtatgtgaccgaaattgtcacattctttacattgaacgactcttttattgttatgcacaaattattttgaagatgaattattttttgagaatttagaaaaattctttttgtgtcccattgccttcatgtattgcaaaaacttcttattaatatcgtcaatttattattttcctcatcatcagcactaacattcttcgaacttttgaaggttcatcgatttttctttttcttttaccttattgtgtttggatttgttttttggaaaagagaaagaggcctttgtctaagactgacccctccccctttatacatagataacctcacttgtggcggaggaatgccatgattacatgtgctatatcaaaaacatttaagacatttgaaacaaaaccaatccaacgagacataaacaaattaggtactattaagcaacattacacaacaatctccaatctctattcaaatctaagaacgaaaactgcttaaaactcttaggtggcgtttggtt

SEQ ID NO: 168672 - DNA, 713 bp, Cannabis sativa
  modified_base (79)..(79): a, c, t, g, unknown or other
aagttctgtggagcataaatagactgctatcttggaaatgagattttgtctacacaattgaactgcagatagctcaganaatttttctggacattgaagtcgaatacttctccatctagcaataaattcgttgacaaattcatctattctttgcttataagtttcagctaggtcactaatagtgacttctcttattaagcttacaaactgagcaatataagctctttgcacgtcgtcccatgtgattattgatcctggtggtaattgtgtagatcaagtgaatgccatccctttaagtgactgcataaattgtcttatgagtaatgtatttgactgagcagattcaccacatgttgagacaaagtatgctagatgctctttaggggacccatttatcccatcaaactttttaaattgtaaatttatgtaatttggggatatagaacataatcataatgggccgaatatggtttatggtatccaagaataggcatattttttgtttcatatcattcttgaataattcgtgatgaggtactgaagttgatggtgtaggctcttttaaataaggttgtgtcggcaaagttgttgacacttgctcctgttccacttatttttgcttacttacactagcttgtttagctaattgtgttgtaagatattcaacttcagcgtttttctctgccaactttctttgcaactcttcaatttgt

SEQ ID NO: 168673 - DNA, 1053 bp, Cannabis sativa
cagcaagaaagtcaagccttatttcctcaattgaccactacacaatatcagcagctacttaatctgcttgcctcccaacaatctggtatgaatatatccgaaccatcctcttcatcaggcaattcaggtatcatactatcccataattctcaatctcctttaaatggttcttggattatggactctggagctacgagacacatatgttctaacataaaactcttccaatatgtatgtaagatacctactaccaaacttgttttgcctaataatgattattttcatgttcatcaaagtggtactgttactttaaacaacaatattgttctcactaatgtactttttgcacccaattttaaatacaatattgtatctaccagctatatgacagagaatgctgctgtatctgtgattttcgattctgatctcttttatatccaggacaaaaccaaccagaggatgattggaaaaggtagcaatatcaatgggctctacattcttgatgatgcaccagattccactcaagttttctccgtttctgccgagacttggcactctcgattgggacatttgtcaaataaaagattagatactcttaaagaaattctacattgtaacactactactttacataacaaaccttgttatatctgtcctgctgcaaaacagaaacgacttccctttcagaataaaaacaatatgacaaatcacattttcgatcttatacattgtgatgtatggggaccttatcacatagcttcacacactaatcacaagtattttcttactttagttgatgaccactcacgttttacttggctttatttaatgcagcacaagtctgatgtcaataccattattcctcagtttttatcctatgtacaaactcagtttcattgcatttttaaagccttcaggtctgataacgcacctgagctagaattcaaagaactatttgcaaaacacgggatcatgcatgatttcacttgtgtcgagacacctgagcaaaatgctgtagctgaaagaaagcatcagcacttgctcaatgttgca

SEQ ID NO: 168674 - DNA, 585 bp, Cannabis sativa
gagctaacaaagtagcaagaaactgaagtagttgtgaattaattgacagagaatataaaaaaaatgtagcacttatttattggagggacaggattggaatagggtaattgggagaggtgattttttttcataatagacagcctgtatgaagacaatacccaacccacttgaatcaatggcggagcggggcagggtaagtgtgtggggactggggactctatccccattttggaagggaaatttcattttttgaccctaataaaatatcccatattaaaatttataccccttttattttttgtacaaattgattccactaatttaaaaagattcctaaaatacccctaaaataaaattttcactctctctctctgactttcccactctctcgctctctgacttttccctctctcgctctctgacttttccctctctctcgctctcttcacgaactcacaaacccacacgaaccaggcgaaccaggcgaacacacacgaaccaggcgaaccaacaaacccaaactgacgaactcgccgtcgaccacgaaaccaaaaaacccacaaaccaggcgaaccgaaaccgtct

SEQ ID NO: 168675 - DNA, 634 bp, Cannabis sativa
ttttatctaacgtgtctaaaagaatttatggcactttaaacaatgacgtggtagtgacaagtgacctgtcactaccacgtgtattaatcaaataaaaataattaataattaattatacatttaaataaaaagtttatgttaatcattaatttagttcagtattattttttagtattgaatatatatttaaatttattattagttattttttatttaaataatacatgtagcaatcatgtgacagttgtcactgccacatcattctattagccaaggggcccaataatgtaacgataatagtttaagggcatttaaaacctgaaaaggttcaatgggcataataagatagtggtaatagcttgggagcaaaattttaatttactcaatgataataacaataataataataataaacttgaggaaaattctatgcactgaaacatctctatccgtttattatccgaaataatttttagtcaaatttcttctcataatcatgtaaattatagttatttaagacatcctgtaaaatttaagaaattcaaataagttaacacgccgaaaattgcattgaaatcgtgtgttgtactcgtgattattttattttatacgcgtgtaaaatagactgtttaaa

SEQ ID NO: 168676 - DNA, 651 bp, Cannabis sativa
agtgcagaaatcaccaaaaatcacctatactcttcaaatcaaacccaaacctcacaataacttttaaattacctaaatataccataaccaacataatccatataataacatcaagcaataaacctagaaacaaaattcaccatgtgagagcaaagtttgagctcttatgctcaaaccttgaataaatctcacaatcagccaccatacacttcaatgtaacttagataacttcaaaataacatcataacacaaaatcaaacaattctaaaagctacagaaccttaactaacaaattcatgcaatatcttaatttcaagcttaagaaatcaatagaaaatgtgctaaagggattaccttcaattgaaaacactaaaaacttgctagattatccagaaatgaaactgaaaaattccaaaatctagctgcttctagggagctcaagaaagaaagagagtttggagaaagaatggctaagtgttctttcttaattttctttgataatgaattaaatcaataataattctataataagtcccaatatcagatttataacataacctagaaaggtaaataaagtcactaaagacaaaagagacaaaaggccaaaaagaccatgttgcccataaagggtattttggtcatttctaaatc

SEQ ID NO: 168677 - DNA, 806 bp, Cannabis sativa
tctccatagtgttccatcctaaagtggtggtcatcaaattctttcattctatatattataatcgtggattgaggtgtatgttgttaagaagaaaatttatcttcgataacaagatttttaataaggaaatactataaatttgatctttattaattgattaaatcgctggactaaatcaagtatatatgagtgtgtttcataattaaacttgaagaaatgacccaataaaggtacttgtgagaagaaccttcaatggtaaggtgataatgaattcacttaataattcaacaacataacagtaaggtttcgtttggaacgtgatattagatcgtattgtattctattacattaaattgaattatatatcatatttttatataatactatcttaaattttaatttatatatttaagtgcccataaaaattaatattacatatagttttacataaaaataatgcataaaatacaatttaatataatactataccatgctttttggttttgtaatatgtctagttttgtaagtggtttgtttttttgattttgtaaggccaatgtggtagtttttttgtatggctaatgtggctagttttatttgtacggtcaatgtgactagtttttggttttgtaaggccagtatagttagttttagttttgtatggctagtttttagttttgtaaggccagtatgactagttttaattttgtaaggtcagtatgactaattttaactttgtaagactaacatgactacatttggttttgtaaagttattatatggctagttttaattttgtaaggtca

SEQ ID NO: 168678 - DNA, 622 bp, Cannabis sativa
gagattagtcaaaattatttgaattttgtagcttgtttctggtgtttggttgtttttgcattttttttttcgatagtttatcgatatctttctaacaagatactgataggatttcataggattgttgatagttttcacataacttaattttttaattaattttgtgtttaccgatggtttcgtgacaggttttcagtggttttttcgatgattctttatgtttcatgttgtttctatgtttttgaattttttcaatagttcatcgttagcttcccgatagtatttcataggattgtcaataactttcacataatttagttttttgaaaattttaaggtttatcgatagtttctcgatagggtttctttaatttttcgataattttgtatgctttatttgtttcagtgtgtatgcattttttcgactgtttttcgataaggataccaataatactattttttcttttaaagtttagttttattcatagtatctcgacaatttttttatggttgttttgtctttaacatttttgaatttgttataactgtgatttttggacgaaggtgtgcagagcaaaacggaatcagggtttaggtagtttagccgccaaaattttggtttt

SEQ ID NO: 168679 - DNA, 1258 bp, Cannabis sativa
attcttaaacagtcttgtaaataaacaactaagtacatatcaaagctttatttaacagaacgtgatgggccccgttggtacacaagtctgaaattaagagaaacaacagcaagaacaaacagagaacccaagaaatagtatctgaatttattgataatataacagtagcagcaaatggatgaaacttatgtattatagatgatatggcagcaagagaattacagtaaaatggccctaggcatttgagaggcctagactctcgatgatgctgagattgaacactcaattcttgcataaccttctcattcttcttagtctcctatatattatattctattctctctccaacactaccccttaatacaaaggacccatatccccttttttcaactctcttatactatattctattatctcgcagtctaacagaacgcaataaagaacaatgcattcaataatgaagaaaatgagagcaaaattacttttacttataagaagctcaatagttgaccaaaagggaaaataaaaagacctacctcaacctccattgtaatattttttttctctagatatgcatctacagattttacagcacttgtgacgctacctgcggctgaaatatggttatcttttatcaaaaccatatcaaatagacccattctgtgatttcttcccccaccaataagtacctataatatgagaattcataggtcattattaaattacatttcatggtatgataatcatagaaaaatgaaaaacgaaatataccgcccacttatccaccaaacgtaagcccggagcagtctttcttgtctctaagataatagcaggatgtgcaagatcagccattgcctgcaggaagaaagagcctcataaatctctccttcttagatttacttgattatgatcatgattcaaattattaaacaagataaaattcactgcattgaaattcatcaatggattcatctgccgcacacatacagatttaagtagccagcaatagattgttaggaaactaaatcttataatgaaatgctgagaagtagaaaagaagtttcaagttccacataagggaatgcttgcatgccctcccggacaccaacacagtttccctgtatatgatgatagccctcactgtctccagatttctaacctttgttaggctatttttagcctaagtttcgggtcacattttatagttgtttttcttctttattattatttttgaaatagaattacgcttattttcttt

SEQ ID NO: 168680 - DNA, 680 bp, Cannabis sativa
ttattatcctaacaataagattttagtattcgtcctctaataaacgtcacaaagaaatgaattaaaaacagctgttaatataatatatatcaatcttacatgtaaatcatatttgatttcatagactcgggaattgtacccgtgagagtgttgtagctcaagtctctgaaatgcaataacataaaccattataaaagtgatataatgttaatagtgtaaataaatataggtgggtctcaaatattttaattattttaatttaataaataatattaaaaaatctaaccactcgtaacgcaatgaatatagtgaacattacgtaaataaatttattaaatgaaaattaagcataataaattattgacaatctacttttaatatatttgaaaagagatattttaattattattttggttaataagcaaaagcaattaaaaatcataaagctagatgaaatattttacatggtctactcctttattcaggtgcatttggtaaaaaaggtgtcaaaatattatacagggaatcccttcctatagtaaacaccattcaaaagattatgcactctagccttgcttactatatagtctgcagcctgattgtctaagctgaaataagaataaaattacaaacttaaaatccaaaaataaaattaaaaatctccaaagcaatggtcatcc

SEQ ID NO: 168681 - DNA, 1232 bp, Cannabis sativa
tccacacacactaatcttggacaatggctctcaaattctttctctatttttctgaaatgaactcatgatttgagtgagttggggaggagctatttatagacaagctcgatcataggctaaagtaagttaggtctgtacctaaggccactcaaaccgagggtccaaaatttttatacatgcctaaagccacctcattaccgaaagctatttcctaggcctatgaaataacaggaccaaccatgtctatagatgagagaggcctaagttgagttgcaaagggtacccatctaaataactaatatagagctaacatagattatggttaagtgagtttaattcaaacaattaaagtaatatgagccaccaataatagtatactaaatttaatataaaaagtgaaaaatctttcattgggtagagtagaccctagctgaaagatataataaggacttgaataacttttaaactccataataaaattattttgaatacttaaggagaatagatatacacctaattgtttcatttgttacattagtaaagatagaagaggcattaatttataccttaaattataaattttatgaattgttataatttatgtgtgaaactatgattttttttttttttccataagagttatttaatgagaaaaattgaagaaaaaattaaaaaataaaactaaccagttaccataagaaggtaacgagttaccttatattgttttactcatatttttttaattttatttctaaaatttctccataaaaaaacctttttaataaaaaacaataattttccaaactcatatcttaaaactcatatgaaaattctcctttattatatgtactcgatttagaagttacaacccttacacacaagaggtatgttatttaagtactttattatataagctaaataaactcaaaactcaaaagtcttaaacataagagccattttataaaaggcctacttttattatttattactcgatagtggctaattacttttaacaaaaaaaagtaccctaattaaaccaaaacaccacgtgtggcgagctgtactattaagcacattaggtaatattatacatgataatatataacattacatgttgttgttaattaatgtacttaaacaacaggcctaatcccctggtgggaggtggtgaaaagagtagcctcttctctgttgtacttgagtctcctagcttgttctctcgagatttggta

SEQ ID NO: 168682 - DNA, 799 bp, Cannabis sativa
tataattaaaataaataatatattcataataatatttttttaatagttataccattgaagaatttttaaaaataaaaaatttcaaaactaatataaaagataaataaaataaaatattattttttatatgatatgaagaggtttagcatagaattgtaaaaaggtaacacggtgtcatattactattagtgtaattaaatattgagtctcatataatttaagaaaataacttttaaagaatattgctaactaattataagctgctatgtgttcggtattattagtgcccaatagtaatattcttttaaaaaatactattattggagatgatttaatcactcaagaaaaagttttcttctctttaggcaaggttccaatgtgtgtcgtggcactttaattatgtcacgtgttaaatattgattggattttaaaataattggtgagaattgggtgtttgagtggtggaattgatttgttactgtggagtcgaatgcagtggattgtggacctaggaaactatgtttgataatttttggtggccttggcgtttaagttgtgaattgcttagacttagttattagaatttcaaattaggctgaactaagatacttttaaaaaataaaaataaaaataaaaataaaaatgatggttaaaatcgtaatttaagcttgaggaatgaataattaagagagagagtaaacactgggcgtttggtatgaggtgttcaaaataatttgattatagggaatattatgaaggagaatataattatagggaaatgtataaactgtgtttggct

SEQ ID NO: 168683 - DNA, 684 bp, Cannabis sativa
aaatctccctattcaggtaaattacagagacgagaatgttaaaaaaaatatataataatttaataaaattactacagatttaattcatacattttttttttcaaatcatacatgttccttttattataatatataatatatggtggttatgcacccccatgaaaaagaaaaaaatagtgtaataatgcatggcttagccatttaagaaatttttttagtcatgtatattatatttattatttaaaatttttggtaaatttttgaaaaatattaaaaaataatttataatataaaaaataatatttaatatgtttcacacgcatataaagtaaaagagttacgcgttcttatttgaactatatttttaatattaaattttttaaaatttcttaacattttaaaaattatcttaaataattacaacataaactattataaaaaaaaaattaaaacattgtcatgaatgttaaatagattataaataggaggtgtttttgaattttccaataatacatataagaaaattatatgatgcacatctgttttgatatataggggaattttgtagtccattttttttttttataaatactattttggattctatattttacaaaagttattaattggaacctctattttgttaaatgacaaaatagacatgtatttttcaaaattgtacaa

SEQ ID NO: 168684 - DNA, 2326 bp, Cannabis sativa
agagagagagagagagttgaaattttctaaaggaaagaaaaagcttttctctaattcaatttttctaggttttaatagatgaaagagagagttagtgaatcaaagcctttatgttcctttaatagtctctctaggtttagggttttagagcagaatgagtagtggccctaaaaatctacccttggccgaagtgaactattgtggcccacgagtttcatttttgccactttctttcgttaaatgaaacttctttatctttttttgaaaataaaaattttctattctaattatttaaatgctaattttatctatttaataattataattaattattaaacaaaattactatttaaatatatttattagttagatccacaaagtatcttaattaacaaataaacctttacaactcttttcttctcaaatatgcccttgcttagtgaaattcttaaataagacatagtcttctttagaattataattgattaataaatcaattaattgagtctacaaataaatattatttcaaataatgtggggaccatgggtctatgtaaccaagctcccaataagtagttcccgaaatttataggcggtttacattgagtaggacaatttaccgttttacctttcgattatataattactgaaataagatctcttccatttatatcgttttagccaagctctaaggaaattatcgtttcacttctaaatagatatagaagctatagattctatatttatgattaacgctcacactcaattacactattgaattaacaagatgtaagtatgggctattcctatgggtaagctggtaacaaacaagtcaaagaacctgtgtagtacaattaaattagaacctaaccatctcaagattaagatcaattaacctaagatcaactaagtgacgccaacttagaaaagatataacaataagtatataatatcttttcactgtcaatattggtcaagtttgatgtataatcgatacttccaatacaagtttactttgctaatgccttggaaagaatattccacttatacaagtgtaagtaaactacatcactgattatcaagtcagtgtaaatccaatgcattgataaatcgtgggactaaatagtttaaagcatataatcatgattattttttactgtgttgacaatactataatcatgagtagcaatatgtttgaaacttaacataatttatatattaaacatataatcatgaaagtaacatgtgaactaagcatcataaaataatttttgatattttattaatcaataaataagattatattaaaatgagttttatttacggcataaaattctaacaaactcacacttccactaatataaaactaaaagtgcatttcaattagtcttatcttcttgatgtccatagtatgtagtattatctttgtaataagatctaaaaggttgtatttagtatcagccttctccaccattacatcctccttagtcacaaaatcattgatttgagatattcctatctatatgtttactcctcttagggtactggattctttactgtttggaaactatattagtattattgtgaagtaacattagtagctagtccatgacaagaataacgccaaatgatgtatagaactttccctaggctgaataattgtgttacccacagaagctactaaaataatcaaagaaatccatgagggcttttgtggagatcacataggttggcaaagtttatcgaaaaagattatccaacaaggatactattggccaataatcaacaaagacatgcatgaatttgtcaagagatgcgacaagtgtcagaagttttcacatatacctcatgtaccaccaacataactaagaatgatgacctcgctatacccatttgcaatattgggaatcgaccagatttgggcattacccacatggcaaggaggagcaaagtacgctgtagtagcagttgacctctttacaaaatggacaaaggtcgaacctctagtttccataacttgtaaaaaagttcttgattttgttgtcaagaacattatttacagatttggaataccaatcaaaatagtatttgataatgagactcaatttgacagcgagctatttactgaattatgtgaaaggaataaaattatcaaaagcttctcgtcagtatcaagaccacaagcaaatggactagtagaagctgttaacaaaactttaaaagatactattaagaagaagtcggatgcgaaaggaagatgggtagatgaactaccacaagtactttgggctcacaaaataacagagaaaacagtgacgggacacac

SEQ ID NO: 168685 - DNA, 871 bp, Cannabis sativa
ccgtaaggagcagcggctgagtatttaattgtttgacaaacaatgcacgcttggataaagctgcgaacttcagatttcataccgggccagaagaaatttgcactcaatcttaagaatgtgcgctcgacccctgcgtgtccccccatcttagtctcatgaaattcccgaataagcttttgtttaagattggaatgagagctgactctgatgcgctgtttgtagtacaatagtccctcacgcactgaataatcggtcgtagacaatgaacccgcagctagttgttcgtggaggtgccgtagctctggacatgttgtattttcccttctcaattcatccagaaaatcaaaggtaacagaggatatagcagctgtaagaagagaaggagcagtatcgtattgccgggagagtgcatcagccgctgaatttgttttcccagccttatattcgatggaaaaactgaacccaatgagcttccgtaaaaagtgttgctgttcgggtgtttgtatcacttgggtgagtaattcttttaaactacgatgatccgtgcgaatgacaaagtggcgacctaacaagtactgtcgccacttagtgacagcttccacaattgctcgtaattctcgtaagtatgctgatgtacccacgaacttgggacccaatttcttgctgaaaaaagcaattgggtgattatcttgcattaggactgctcctatacccacatttgaagcatcagactcaatgacaaacactttggaaaaatccggtaagacaagaactagagtctctgtcatagctgtcttgagctgaataaaagctaactcagcttgtgtattccacgcaaaattatctttcttcagaagctccgttaaggggg

SEQ ID NO: 168686 - DNA, 780 bp, Cannabis sativa
aatattcatccctaacctctagaacatactaacaagccttaaccccatgatatgattttggtaattagatgtgtgtgattggaatctatcaaaaaaatctctagaacatgctgatattgagaacccatcgagcactatcaaatttttatcagtagaaagtgcaaaaaaatgctgtaaaacctatatccaattttttttgcaaaaaaattagcaaaacagcttacgcgcaagaaagagagagaggggatgtgcaagttcaacgatgatacccaataatcgtttgagtttcatttgggtcttgttgtgagtttcttgtcgtgggtttcttgtggtgacgagggggaatgatgatgacaatgtggtggcaaggtaggacgatgacataggtcaaaatcgatgggtttaggcgcttggatttctcttgttggctattgcgcgtgaaagcaagaaggaaagaaagagaaattaagttagagtgaaggagagacttttcaaatagcaagggtatttttatacctagcaaaacatgaacattgatttgatagtgtgaccgtggattactctttaattttggccttattttaagcataaaaatcaaatctaataccaacttatgtaaagacattattgtgaaatatctagtctaaattttgtaagccttaatatataattaagggtaaatagcggcataagtacctaaagttttaaatttgtaagcggcataaactaattatttatttttagttgcataagtacccaatatttacaaaactgtaattt

SEQ ID NO: 168687 - DNA, 1306 bp, Cannabis sativa
ccagccatagtatgtgttggccatactttgtacgttttggccagccttggtttgtcctggccaaccttaatatgtgctagccaaccttagtatgtgttggccttccttagcatgtgttggccaaccttagcatgtgttggccagcctttgtactacttttcttgcaaatgttaggcttccttggtcaaacaggcccatcttggtctgacagtcactctattgccgaacaagcttgtgttcaattcttggccagccatacaagcttcctttggccagcctatatactccccttggccgaccagacatggttctgtagcttcttggtggcctgtttaactcctttttcttgtttctcgacaattttactatgccttgtaaagagactttgtcttgctattgacaaggttgtattccacatgtcctcagtctcaacttacatggacatgcaatgttaggtggataaatttttttataacatttacccccagtccctgttcaaacatctgtttagataaggactttttagctttcatcttgcttgtagtgatctttgtcgagcggcctcttctagcgaagtgtctggatttttgcatgacatactatctagagctttgatcaactctctccatataagccttatcttcttttctttgacatctctgctttgaatttgacattgataactgttatcctatttttcgcaccttgatgtggcaataggaatgaatgacacgtgtctcatgttttcaatacctgggcgaaggaaaatactcctagcagctcagttatagttagtcaatatccatagtgctcgggtgacggagcaagttgatgaggtagatgtccaaccaagatgcagatgtacttatgtcgagagaagcatggaagatgccaattttagagatgaatctcgttgtgtccagatgcgaagacaatcactataatcgcgggattgatcagagaataaaggcaataagccttgattttccattctttgcattgtagttatagaattaatgtagttccctatattactcattataagcaaaagggaaaccatccccatgtattaagtccctataaatagtgacctagcctcactatgaaggggatcgagagaatttctacaaaaatatgctctagagagaaaagagttatgaagagagaaagttattcaaatatcaattgtaagagctttcaagaggaggaatgcttcgttccttctttcaagtcaataaaatacaaggggattaggctattaccatacttactgtaacaccctaactaccataggcgtattacgtga

SEQ ID NO: 168688 - DNA, 566 bp, Cannabis sativa
tctgtaaatacacacaagttattaaattccattttaacaaaagatataaaatagagaactaaaaaatttcagatagactacacaagatctccatacatgaacaccctcagaatgaagagactccactctgccagtggtcctttgtattatatcattaacagcttgtcctgataaagcactagtaaacctgcatttctcaagcaaacaacacttcaatgttacatgtgtgaaagtattgaacccaaaaaatgagagatgaaaaggaataaaaatgaaaaatcaaaactcagaagctttctagtaaataaaaaagtacagtgatgtaattcagccactatagaagtggggtcctgatggccctcctacattattttagctctagtaatctcaacaacagtagttccgcaagtacgtctaccattttaagtgaatattcaaaatcaaaggactcaatcgtgtggatatgtaaaatacaggatttccaaccctagtaggaaaaaggggaaacggatactcaatttaaagtgagtaaacagaattccatacccgatctcatagatacatag

SEQ ID NO: 168689 - DNA, 979 bp, Cannabis sativa
ctaaccatactctttagccttacttatattatattgtttcttttttacttaggggtgtttgttataaaaattagtatttagatttttctcaaaaaaaagaaaaaaattagtatttagatggatgagaatttaaattgaattctatgtttttattgtaattttgtaggtgagaatatggtgggccccatgatattttagtgtgtaatattaataaataattacataaaataatattttttttaataaaatttttatattttttacattttaaagatattttttaaaaatatttttagagtgttttatttttatataaaaaaattacatcaaaataataagaaaataatatttaaacaatatcaaaacaataacaaaaaaaaaaaaatatcatacaaataataaaatatcaacaacaagttaacaatggcataacataaaaatatatattttatgtaaataaaatcataaaaattgtaaaaatatttaaaattctgtaaatctgtattttttataatttttgtgtatttgtaaaataatttcaaatatcaacccatgtgtacacgaaaaatgctagtggacactttaagtgctaaggaggtgtaatttaatatctgcgtattttacgtattttaatttaataaataatatagaaaattattaaatattcacaacgcacaatattagtatgatgttgaacaccttaaagtgtctaataacaatacttgtatacatagcttatcctaacccttagtattggtttgagtccaagatcctaggttggggttcggggtttaagtccgaaatcctggccggggtctgagattcgaggttcgaattcgggtctgtcagtataatatttgtaataggtatgttttgtaatattattttaattagttttttttttaactagaaaagaaaatatttttcgataaaatgttttatgaaattatttttattttttaatacattgtaaagtgag

SEQ ID NO: 168690 - DNA, 538 bp, Cannabis sativa
  modified_base (483)..(497): a, c, t, g, unknown or other
agtgtccatctcttcaaccagcttattagcccatttgaatttcgcctccaagttagcctctaacttgtcaaccttgggcatattaaacaattgttattgcaagttgtcgaccttcttgtttgcctcacacaacttcttgttcacctcatacaaagccttttcctgctcccggacctagccttgaactttctttagttcaataccatctgaagtggcctgggcgaccattgccttagcacaggagtagacatacccgacttggagatttagctgagaaaaataagcaagacagaatgggttgtacgctatatcccgagcaaagtattcaaaggaaataaaaataccttagtgatctccttcagaaggttggctattaggaactcccctagcagcatgtcccacccctttaactgctccttcgtcttgattcaaactctatctcggtagcatccgaccacatccttgttggaaatattttaccannnnnnnnnnnnnnnaccaagtatgtttgattaacatcctaatataaattctaaaa

SEQ ID NO: 168691 - DNA, 552 bp, Cannabis sativa
agaagactgtcactatatgtttttattcaaactggcccgaccttaggcatagatggactggcctatgcttacggttcacctagctcagagttgaagaaaaattttacccttttaaaattatacatttttttttactgattttaagaaatatcactttttttccagctcaaaaatatcactaaattttaaggtcagtcagcgtccagattcaatgatttagaatttaagtctcacatgcttactgtttgagactctaatgaagtttgtactaacaaaattagactaaagtaataattttattaacattaggtacttatactgctaaaaaaattattgaatttatgtcggttagaaatttaaaactttaaataattatgtggtaatcatccctaaaacttttttttttggtaatgatttgggtctgattcataactactattgatgcttgttgttaaatattatgaaataaggtgttaatagggtgcgagggagtgaactcagtggtggcaaaatggctaggattcaataaagctacacatacagggagatatg

SEQ ID NO: 168692 - DNA, 555 bp, Cannabis sativa
aaaatctataaaattaagacaaaacagaattagtaattattgaagaattgaagaaatgaagaaaaattgtttttgtacattaccgttattgatgaatgaatggattcaagaaatgcatttgtaatcaaaagaataataattaagaaagaaaaaggttggaatggttgatacttacttgttattgttgggtggagtagaagattttcttgtgtgatgaacagtaatggaagctaaagagaaagagaggattgggaaatgggtttatgtttggcggcaaaacccctttgaatttgtataagagttgtttggtgtgtttacttgtgggtttgtggttgggattagggaatgaggtaataatctattcacaaagtaatgtaataaaacataataaaaataaaaataataaaattaaggtaccgtttggtaaaaaaaattttctaattgaaaataccttcaattcgagaaagtaggcctgcacatgggttgggttgggcggtttttgggcggtttggcggtttttttatttggcggttttttaaaatcacaacccatacc

SEQ ID NO: 168693 - DNA, 516 bp, Cannabis sativa
atatgatgattgtgggaattccaatatgggttttggtttgggttttgagtttggtgtggtgcgtcgtgtggtcacgggtaagtttacgtgtgcaggtggctaagccagagtaaagtgctattgctatgtgtgaattcaaaataaaaaattgaaaataatcattgttaaatttaacagtctttgctctttagtctttagtttttaatttggtttactttatttatggaagtttcattacttgtcctgttgtactaattagtttggttgtgtttcagacaatttgagaaaaatagtaatatagagtgtgaggctctgaggtgatgttcctttaaacaatgaataataagaatattttttactaagtaaatagagttgtcactgctgcccactccattgtagtaggtgggcaggacaggggcagggttgcttactctactaacttataagagtatctttaaagagtaatttgcggcataaatacctaagtttaactcccagttgtaaataaatacttaa

SEQ ID NO: 168694 - DNA, 655 bp, Cannabis sativa
atttaacaattttgctattgtagaaaatcacaacattgtttggggatctaagcaatatatgcccttgaatagcaatgttatatcagtttatcttcacataattatctaccccagaataaacgattgatggcccaaacaacatctctaattcagttgtttctacccctaaacattagaagaaaaatataaagaaaatgcaaaagaataaaagaagaaaaaaaaataaaaatagaaaagaaaaataaagaagtacctagtcataaccttaaaaaagtattctacaacccaaaaaagtgcggaaagaaattattctaaaaaatttacacaaaataaagaaaaaaaaaaataaaggaagaaatctggagataaaagaatttttttaagaagaagtagcaaagacaaaactaaagtcaaataactattaaaatacaaaataaaatatgtatatagtacaaaaataataacacttatgaaaaaaattataatagaaatcattaaaataattatatataaaatcataaataaatcaaaaagatgttttaatggttacataaatatgtaaccagttacaattttttaaccattagattaatattgaattggttgtgattaatttgaaaattaaataaaaagaaataataattaacttataacc

SEQ ID NO: 168695 - DNA, 933 bp, Cannabis sativa
tactaatttctgcaattaactaaataaataagcaagttataaaattaaagttaattattatcctaattacacttgtactaattattgacattgacccccctcaattagtgtctttaaatcctaaaattaacctggatttgctatttgtttttttgttactattttaaaaaggaaaaaaaaataataaaaaggttctaagctagtcatgtcatcatatatatatataatataaatatatatatgctttttattaggtcctctaaaatatcccaaaaaaaaaaaaaaaaagattccataaaaatgagcatgacccatctctcttaattttatagattattggtttggctgatttaataacttatattattatttattatttattatttattatgtatatatattaggattattttaatatttttaggtttgcaaccgacaaatatttaatttttaatattttagtggtaaaatattcaaagttattaaaatatatagtaattttgttactactatatctttgataattaggtctttaaatgtgatggtaaaaaaattattgttttagtaactttgagtatttatacctatatgtttctcctatatatttacatatattaattatgtgataattatttataataataatctttattttgtcatctattaatcaagagtttatttaggataggaaagaaagaaaataatttgttcaaggtttaatcagtgaacttgatcaataataatgatttttttccctttataaatagaagtatataatatataaatcaatcgatatattaatttgagaaaatagttacacgtggcatgatccccaacaattgggggggtcaaaactcaagaaaataattgcaagcaaagatgttttttttcctatctaatcagtcatcttctttattaataatccatattaca

SEQ ID NO: 168696 - DNA, 924 bp, Cannabis sativa
ttgattttggggatagagttttgcaatgtccctttttaagcatgagcttgggctttagagttgtattttcttccaatttttttaaatctcggtgggttcccttggattgctatttggatgttctggctctaatacacaattgctcgtgttgagctctcggggttttatggatgtagagggagggggactcgagttctacccaaacagatgcttcccttgttccgtcttcttcaccatttagaaccacaatgggaggctgagtttggacttttctcgtaggaagatgcacttctttacttttggcctgcttgtttggggcttttgtgtggccttttgtgcatttggggaaggtctttgaagtcgttctatttcttttatttgtttgacttatatttttgagttttttcagtgttgtgcaccctatgtccttagtgttgttagcgttaggccttttttttgaagggttttgtacctttaaatgctcttgcgtaagccttgagctctttgctccttttattatcggcgtggttggccaacagttgatcatctcctagtgaaatttgtgcggttctttttccgcatgacttgagctttatccctttgaagttcaccattcaaaaatccttaaaatataagttaatatattacgagactacttactttatatcattattctaacgtttattaatatcatatgtttgataaatctagattttttttaactaatcaaaagttttattaaataaaaaataaaattttggtgatcacataaaaatacttttttataaacttaaaaatccaaaacattgcaagttcatgataccccacaactttgctcttgaaatttttacatgaaaaatcctttttacacactttattacaaaattaccctcacacgcctattactacatttctacttacaaa

SEQ ID NO: 168697 - DNA, 597 bp, Cannabis sativa
catcctccacttgcaacaccaagttacactcaatagttgattgggctaagaattccactagtatggattctagaacattaatttcccaagttgatgcaagctaagaaagggcatcaacgttggcattgctttcctttgggattttctcaatcgtgaaatgttgcagttgttctagataactcctaaatttggccaagtaagccactatcttcagtcctttagcttggtattctcccctcacttagaaaaccatcagatgggagtcgctaaaaatttgtagtcacgtgaccttcaattccttggcgagccttaatctagctagcatcgcttcatactcagcctcattgttggaggccttaaaagaaattaaaccttattgcataatgcatttggattcccccaggtgctgtcattacaaccccagcccctgttccactatcattccaggctccgtccacgtgcaattcccaaatggaattttcttttgcatcactttctgactcttcaccgacctcttgcccttggtcttccccatctagatgataggtgaattctactgcaaaatctactatcacttgcccgttgatagacactttt

SEQ ID NO: 168698 - DNA, 978 bp, Cannabis sativa
ggctgcaacgtaagccattacgaatgcaacataatcgaagtgcccttcacttaatgaagaacccatgtaccataaaatgtcaaaacacataaacatcaagctacaattcatcaatgaggtaatacctagaaaagaaatctattttaagaagattggtaccaaggaaaatctagcagacatgttgacaaagtatgtcactcgagttaagtttagaatttgtcttactcaacattctcactagctgagaatggtgagaatggtaagtccaaaatgttgtgttttggccaaatatcactctctttttaaattgcccctactgcaactaacttaaccaacttttgttatgacagttggtaatcgagtctacaccaatgcctatataaggaattcattctagtgaactgggtaacacatcaagaaaaccatatagagatagtgaaagatttaaagggagctatttagagagaaaagaaagaggaggagtgagttcttgagagctataatggtgtgatgcatttctaagcatcatcaccactagtgagattatttgtaacagaagcaaagcttctcaagttgtacaattgaacaacttgtaatccttttttgttcatcagctaataaagactctcatagccctcttatggttgtatctagccagggatgtaggcaaggtgaatcatcattaccttgttagacactacaacaaatttcctaattagcggtagaattattaacgccggattaatccactactaataatggtagtaatagcggcggatcccaatgtctgccgctaattgggggtttaatttttttaaaaaaatattattagcagcgtcctgtccgccgctattgcccgccactaatactccactgctaataagtgagcgggaaaaattctgcccattcagttcgaatgttattagtagcgaggtattagtggcggaccacgccgctaataataataaaaaaataaaa

SEQ ID NO: 168699 - DNA, 818 bp, Cannabis sativa
  modified_base (489)..(492): a, c, t, g, unknown or other
aaaaaaaaaaaaaaaaactaaggggattattttaggatttgaccgtgtctatgaacacaatatgttgtgccaaacattaattatttgattttgttaattacaattaattcacacgattaaagaagaaccacaattttttctttctttctttttttttttttttttttttttccgaatgaaaccccaattaatattgggtgcctttgacaattttttaatcaattttctgttttttaattagcaaagtaaaaatattttcaaaagatattttctatgaaactgtattgatttttttttaattttttaattgagaatcaaaatttttattttttcaaattttttgaatttttttcttaatcaatattgtagactccgaatgcaatctggaccttgagatacagactccgacctcaactccaatcttgaactcggactacggtcccaaccctagacacgaacctagattcgacttaaataaaatcaaaaaannnnaataaaaataaaagttatagaacatacttttatttttttattttaaaattagaaaacaaacatagttatagaacataccttttataaaaaaaatacaattttaaaaatataatttttgctttcaagtaaaaatattatcaaacacctttattaaattgctattaatagatgttaaacaaagaaaagcctaatagagcaaaggaaaacacgtcgtgaagaaattccaagtcaaccacttgaggttagctcaagtggccatagatgggtgcgtgagtgttggaggtcttgggttcgagtcccatgtaaaacatgttgtaatatataaa

SEQ ID NO: 168700 - DNA, 566 bp, Cannabis sativa
aaattaatatatacaaaaagatcttaattaaactctcactttatgaaaatactagtatattaatcttttttgtaaattactttctgagattgtgtggagtgggtttaggataaaaaaaatgttattgggccattattataaattaatatgtagtatttttaaaaaatacaaaattatgtgtacattttttatctcaaaaaaaaaaaaaataggttgaaaagtgatatctagctcatattgtgttaaattaatttaattttgacaagtcatctaacttaatttatattaaatatactaactacttttgttgactcaattaaatgtttaattttttaataaaaaaattaattgacgtattaaacttaaatttgtttaacactagaacattactttttaacagagaattttgtgaaatttttgtgagcgtgtgaaaaaaacagtttaaacttaatttagatactttagataaaagtttcaatttctatatataaatgaattgttatataatagttgtaaattatatatattaaaaggaattgtatggattgggaacaagaagaattggg

SEQ ID NO: 168701 - DNA, 1403 bp, Cannabis sativa
cgaatccaacctatactcagtactggagtagtattgatgtggtaacaattagttcatactatttggaagcctatcatatatatgttgatatctcagtgcaactctatgtacacttcacaaatatcctgatatgctaatctcatggctactgatttgcctaacatacatttattggcatctcgatgcaactctatgtacacctcactgataccctggtatattattctgatggcaacttacatgcacactaaacatgtatacatatatgtaactattatactaatcttaccttgattctaaatgcatgtatgccgataactctaagtgaaagcagctgctcgacaatttaggtacctaagtcacaacacacgtaaaactgataagtgatacgctaaattactttttgggggacttaaactgaaaactaaaaatttttctgtcgataaatagcgtgaaaataccttaaattttgataaaatataaaaaaactaagccccaaaatctaaaaaatccagtgaagcaaaaccccaacgatctaccatttttttggattctgctagaaaaactggttcttcgtttttggggaaatggtgaaccatttttccctgcaaaaaactcccaacatcaaaaacctgttccaaacttccccgaatctaaccaaaccttccaaaacacttaaataaggcataaaggaccaaacccgaccaaaagtagcatcatgacgtccttcttttatgcaatggagattataaaagtatctattatctcttatagggactcaaactgtttttacaaacgtcgggattgcaacctaatccaaacaagtcagctatctactgcaatggaatgtcagattctgaggtacaacgtataattgatgcatcgggcttccagagaggtgttgttccatttacttacctgggtatccctatcagccctaaaaggctctccctaagagagtgtcatatcctagtagacaagatgactcacagaattcgaacttggagcacacggcatatttcttttgccggtagagctgttttagtcaactcagctcttctcaccatacacacatactggagtcagattatgctccttccaaagaaggttatcaaagaaatagaaaccatttgcagagctttcttatggaaagggcagcaactgatggaaagaccgggccaaattgcttgggaaaacatttgtcaatctaagggagccggaggaattggctttaagagagtcgctgattggaacaaggcagcgatgttcaaatatgtttgggaaattgaaaccaaggaagacaatctatgggacaaatggatccatagtgtgtatatcaaagaaactgattggtggagttactctgctccacaacaaggtagctgttaggctatttttagcct

SEQ ID NO: 168702 - DNA, 1331 bp, Cannabis sativa
ataaataaaggaaaatatagtaccactaaactatacttgtaatgtaactatgatatattattggatttactcctataaaacactatttttatttttttggggggaatttttatttttatggtttttttttacagttacaaaatatggtttcttttaaaaataaatattttatttaggtaactagatatctttatcagggtaattagaatgataaccaatttcttcctcagagcactccaatagttcctttaaaatgaagattctttaaaaatttaaagaataataacgcaaatacaccatctaacaaatgatgtaaattcttttctattttcttcatatgtattcctcctttaaatatattttcataatattttattctatttttaatgatatgcattattcaaaattcattattcaaaaaaaaaaaaaagtctcaaaatccaaattttgtcagcaaaatctctaatacccgcattctcttagcatttaatcattttcatctatttttaacagttaactactaagctgaattgtttatgcgaatttaatgtatacgcagtacaattttattagtccaccaaatttaattatttcaaataaaataaatagacgaataaaattgtatcacgcatacattaagttcgcgtgacaacccaccttgacagttaattggtaaagtatatatatatatatttttttttttgcaaaaaaaccatatttttctataaattgtataaaaatccataaaatacatttgttttttttttttttgggtaaaatctccttacttttatatcatttataattgtggtatacataaattattaagtaccggtggaagctagaatgtagttccacgtgaaactgattgatttttttggacaaccgatcgattgtgtgtgtgaacatgtgtttgtgtagctttaggaaaataaaagctaaagctttattttgaggaagatatatattttgatctatcaagattcagactctctaaagttaaaggaatgtttttctcaaaatttattttgaaagatatcttttcttgaatgcagtagtagactatttcattaccacaaaataaatacccgtgggcacagaagttcttagctgatcaaaaatccagaaagtgagtcacacatcacaccatccatgtcataaattcacaagcaagaatgataattgggataactactaccaactatgattctcaaaaaccacacaaattaaagtagaaaatcatcacaatattattattactaaacataattaattagtttgtcaatattatataaggggtcaaaatgaactgaaaagaaattgcaaaatta

SEQ ID NO: 168703 - DNA, 915 bp, Cannabis sativa
tgaatatatgaacactctattataaatcacataatatcttaattaattacactaataatcatttgcaacataaataaatataaggataataaattaaatttaaattccataatatgttgttaatggcatattaatcaaaatagattaattcagactatagacttaatttggtaatacaaattataattgcacactatttaattgaaaaacttaaaatttgataacattacaaacgtaaataaatcatgtaattaattactaaagaaaaattttctaatttaatttataccaaataacatataaataccaattttttttattgaccaaatttacacaaataaggaatgcacttaagattccataataactgaaatttataaaaaaaattaagattttttttttcaaaaatcttccttagaaaagcgacatgtcctttggggttatcttcaagctttagcgtgggtcattatgacccattttgctacaagtggttttgggagacctagtccaaacccaatcgtaaaattactttttgatgaccaaaacatcaatgatcaattttgaatgaatttaaatgtaaaaattaagagattcatgtttattccatgtatcgaatacatgtaaaaactatacttttagtttcacaaaaaatttcgcacccgaaaacatgtttttgtgaaagtttccaaatttttaatacttttttaaattattttcatgcacaaaatcactacatatcacaatatgaacatgataataaagaaggatttaaaataaacatgaaaaatgaagatggaattttttttatatacacggataaaaaactcaaaattttgtgtatatatattgtggaaattgatcctctaaaccaacttattatccaactcatttaaaccaactaacttaactaacttt

SEQ ID NO: 168704 - DNA, 1156 bp, Cannabis sativa
ccgaaaatcaaaaaaacttctaacggttaaaatcgctattgaacttttttgtgataaactgaccgaaaaaattaaaaccgactgttatacatatatatatattaatttattaacttttttttactttatagttattaataatattttattattttgttaatattaaagttaaaagaataaggtaattagtttttgaacagttaatttgtaagtttgtagttgtacaatatagaataatgtgtttataaaataaattggatcatattttaaagaaaaagaataagttcggtttgggcagtttaaaccaaccaaactgaggttcaaaactatcagttttaagataggttctggattggtcggtcggctttgagattgcaccaatccagaccgacaaccgaattctagatatttatatagaaaaaaatcgaacaaaccgaccgatgctcagccctagtccaatctcaccaagtcttggttcatcatcttaattgtctctccttccaatgaaaacaatataccttttgattgttaggaaaatatgagataaattaatggaagaataaaatataaagacattgaaactctatatgcaaaagttgcaaggactaaaagattaaataaggttacagtcctaaagcacaaaattacaagtaaatagaaaaaaagagaaagggacaagaattgtaactcaaaataccaaattaaagtaactgtaaaataatataaaagcacatatatatataacataaattatatataataatatatacataataaggaatatatatgatatattgatatatatatatatatatgtataaaagtgagtagaagataaagaatatattatagtgagaagaatgaagagaagatatagaaagaagaaccaaagtggtgagaaaggatcaccaaaagcttgaacaaggttttaacatctttgtctaaaaatctttctggtatagttccttcaaatgaaaagatctccataagaatgttcaagtaatggaaagttagctgtttccaggaagtatgttcccagatagctaacttgtccctccagaaagagtctcgtggaatgatagttgtcatccgaaagactgctcccggatgactatcatgtccactccaggtatcataatattcaacttgtaagatg

SEQ ID NO: 168705 - DNA, 800 bp, Cannabis sativa
ctgtgtctagctgcggccagatatccagctttcctcgaaatggtgtttttcttggcccaactcgtcttttactagacttttacatcccgagttctctattattccaacgaacctgaaaacatagaaaacaagcgtaattctgtcccaacacagtgaaaaatgcacataaaatagatccaaaatataggctaaaaatagcctaacagtttcttcttgcaaccaaatttttttaaatccgaaccttgattttgatttctgttgaggcacatgttgcagaggtgtaattctggtttgaagtgctctatgatccgattggaaaaagtctaaatgtttaatagttggttcggagatgactgtagaccagtaggagttaatgaaaccataatccaatctctctttgacattaacaccattgacaattttgttatgccgcgtgaatctttcaccttcaaagtttatttctcttaagccacaaagatcaacaacatttcgaaaagcatcgatttggtgttcaggttttggtggaccaccagatttatccgaatgggaaaaaatttcattaaaactcccatgacaatccaaggcaataatggagctgtgtctttgagtttctttagtaattcctaattaagaaatctttgagaggcattgggagcaccataaaaacccaaaaagtgccatgaggaaccatcggcaagagccatataacagtaggggtgagcaacggtcggtttggtcggttttttacacaaaaaaaatccaaaattcggttttcagtttttatggttctaatccgaaaa

SEQ ID NO: 168706 - DNA, 732 bp, Cannabis sativa
ctccaagttaccacttccactaggcaggtgaaaattgcataatgccaagcaattgatcttaatagatgagaaatgctgtgaaagtatattcattttgtctaatacttttaatatttttgtaaaatataatattattattagtataatttaatatcaaattttacttgttttttttttgaatgaaaatcttacttgttttaatttaataaaaattataaaaaaaatattaattaattataaaatatcatctcatactggtgctaagcactttgatgttctatgacaatgcttttattagatacacactttattatattttttaaaaaaagttatttacagaaaaaccgctttatattttgatttcttacacttaatctcattatttatttagtggcaaaacctcttatatgtttatttatttattttttattttttgtaaatttgaagtattaatgggatatcactattaaataacaactatattatcactgtattagcttcgaagttttactttcacatatagacaagtgtacacattagtcattcaattgatatttaacggttgtatttaaccaacgcctcaaatttataaaaaaaaaaaatcaaagaaattttgtcaccaaaaaataaaataagaaattatgtgtataaaatgaaaacataaaaaagtttcgccatcaattacactttaaaaattaatttgttttaaggtgagatttttttttttttttt

SEQ ID NO: 168707 - DNA, 1092 bp, Cannabis sativa
cgtgaaggaaggctaaactcgcacaaaaattcaagctatgatttttctttaaaagaccaaagggtgtgaaacatcactgggcatgtgaaagaatttaaccagtccttctcttgcaggaaggagggttgaagacgtatagaacctccagtggtctttcacgcacaaaaaaactatgtgctcgtgagaatctgcttgaattttatgtggcagaatttttcttccttgaagaaaggttgaagttgcactagaattcaaactatgatttagcattagaagaccaaagggtgtgaaacatcgctgggtgtgtgccagactttaagtagtccttctcttccaggaaggaaggttgaggacgtatcgaaccttcagtgatatttcacgcacggaaaaactacgtgctcgacctatccacgctcctagaagcctcagagaatgtgttcaattcgtgcggatccacctagggcctatgaatccgagatttccaaaaaatcagcttcgggatatcgaggacagcttactcctcgaggggatctcagggcaccccgtagtccgaaaactggcatacttttgggagtaacccccaacttaatacacgagacaagaactcaggcttcttgcactataactgttactctagtagtgattccttaactagtttataatgtcttgagttgattttttcgatgtgacctcaagagttatagttacatcataatggcaaaaattcctgtcaagagccttaaccagaagtgatttgcattaactacacagtattctaccaactgtaccataaccaggcttgactagaaacctagcaaactttgatgatgctggaggaaaaatcacagtcgtcaccactgcggggtcttgcaatgttagtttttgatcaacttcacggctcaacgaaaaggcagtagatgtagttgatggtgacatatctagcaccgacattagcaccggcaccttgattgaatgttgaaggatcagtgtagtgatgaaatgcttatctttataagccgatgatatcaattagtcctccgtagcttacttttgttgggttttatgccctaaataaaactctattcaatgtaa

SEQ ID NO: 168708 - DNA, 1022 bp, Cannabis sativa
actagtgccgcggccacttccgccgccttcgtggtggtcggaggattatgcggccccccacaggcgcccacctgtgcataattaacgctgaaaatattaattaattataatttggtggtgcatgcgaaccgatcgatacatagatatatttttttttatatatatatatatatatgagatatatattgtaatttttgcttctttttgagatctatttgtttcatcaatctatatttggatttggagtgtatgggtgttttttttgttataatttgtttccagaacaaattagtatttatatataaattatataaatgtattagttttgagtttgaaatttttgaataattctatacatatatatattagggttttttttggttgaaaaaacatattagggtgtttatattaattagtacgtacgtatttaacactgcatgcggatatatactccatataatagtttctgtgttaattaatagatttattattattattattattattattattattagttgatatataatcgaaagtatatagctatgtatattcagcttttagctaggtattattcaacttttccctattaattagtgaattttagttgtaattaattaagattacttcgttagttattatgtgaatttttatataaatttttgtaaaaataaaaataaaatggatacaaattaagtgtgaaaattaaaaaaaaaaagtccattttaattaatatacgtataattatatcattttgacagaaaatattgcattaattaactattactttttgacgtattattcaatttgaatttggaagatttagcatgataaagtactaattaatgaaaaataaattagattattaatatataagtttgaaaagctatgattacatataattactttcccaactcaattaaattaaattacaattatatgcgtgcctacattataatatgatagcattgctattaggcaccagtggtgcctagtaccttctcgacatgtcgcgttacgat

SEQ ID NO: 168709 - DNA, 1242 bp, Cannabis sativa
cccgaaactaaacccaaaaaaatccactcactcacggctcccacaactcaaaaccgagcccaaaaaagtttcccaacctcacggccaaaaaccaaaccgaaaaaacatcaagtacaccaaacacacacaaatacaaatattcagaaaatatagagatttaagatgagaaatacaaacagaaatggtaaagatggagacaccaaatttgatctcagagttcactcaaaattaccggctacgtctctgtcaagccctcaaagcttgaatccattcatcaacaacaggttacaatctttcatttataactttatgatttctcactgattttctctcttctaatactaacaaatctctctctatttttctattacatgaacacaccaataacactcttggaggagctctctcaaactgatctcttgtgttctctgttgttgtctctattaaatgagaagaaaaatatatccttttatagactgtgatttctggacttagggcagagccctagagatattttctgtaattgtctttttagttgtaactgtttttatcttctttagtcttgatctttgttttgttgtaagttgtaagtgtgggtaaatctgtcattttggaaccctgtgaatagtattatgaaacttagggtatataaggaaatttgtaccaacatttttcatatttcttttcagtttttaaatattcatctatcaaaaacaagacttttcccaatgaatatttttgctgtaaaagttaagatttttcccagcacacgttaatgtgctagctagtaaaagtaaaacttttcccagagtatatttttgctgccaagttagactttttccagcatgttaattaatatgctgggaaaagttagacttgtgccaacgcacaatacttataatggcaaaagtataacttttaccagtgtatttacgcattggaaaagttagacttgtgccaacgcacaatacttataatgaaaaaattattaccaatgtgaatttttcaaattctttttccagtgcaaaaatatactgacaaaagtattatttcttgtaatgccattaaccatacactaaaatattttagtgagtcaagtcatcagccaaagagtttgccgaccagaataattgtgccctacaccataccctatcaaaacttaaagttaatattgtgggactgcatgcatgcaaaagtaatatatactttttttaaaagcttttttcagattttgtttttcaa

SEQ ID NO: 168710 - DNA, 941 bp, Cannabis sativa
aaatggcattaattagaataagcaaaacaagtcaattgaggaaagaggtgtacatattcttacctctaaatcttgcctttactttatttggaagacaaggaatagcagtctatggaaggaagaagttctcactatattatgctacaaaaaactgttttgtaactaaatgtgattttttgttttgtaaaatacaacttacttatttactcaaaaaaaaaaaaagatatatatgtatatagtgataatgatttatttttaaagtcataattttttaacttctaatcataaatcgtgttcttgtgactacaaagtttaaaaaaatgtatacatttatgtaaaatgcccttatatatgtaaaaaaagcatgaataaataatcctataatttaatctacacttaattaattagctctaattaataataaccaacatcaatgactttaccgatttatatcttattatctgaaaggaaaaaaatcataaatggaaaaagaaaaaaaaaggttttacacacatactgaaattttcacttttttattgcggggcggaattttttttcaaaaatactgtataaattttatattgtgtactgtgttaatttttacggttgttccacggttattttttagttgttccgctgttgttttaattgttctgtacgttttattattttatggttattttataaaaaaaaaatatttttgtaaaaaaaatccgtgtgacagtttaattataaatttttgctcaaaatctaatatttttgtaaaaacctcccaaaaaaaaatgcttcttggcccaatgtggcccaactcaaatgatcaggtatgaaaaagcccacctgttccaagctgaactatctagaggaaattacattctataccatttttatattgtcctattttatttttaccctcttttttaaagtctatcatttttacctct

SEQ ID NO: 168711 - DNA, 1120 bp, Cannabis sativa
aataataataataattaaggatatttgtaacaaaatcctttaatatttataattattacacatatgacttaaataaaaaagtaatagcaaaagtattttattttacgattttgttgcagtcatattatttttttttattattgtcaattaagctcgataagtactaactcagaaatacatactgtcatatttttttagcttatttaatatatagtttaataatatgttatcacgtgtttctaaattgacacttaatgatcaaaaaatagtacagctgtaataaaattcttttgccactatatttttttttattaagatcatatgtataacaattataaatgttatgagaattttgtcgcaaatatccctaataataataatagagtatataaaacatatatattctataaattgttatgattgagtaatttattagtttggtgctacaattagtcattgtattaaattattatagtgattgaattttagattaatggattgggaaggaaacatgtaaacatcacattccatattcatcatcaactactttttttttaacctcttaaccacccttttttttattataatttattttaagccattgggtcttaactatatataaatattgattaaaaaatagcaacaaaattgttaggaaaatgtatttatttaggaaaatataaaaggtagagggtttcttctattaaataagattatcattttcatttattttaagagcatatttaacaaatccatgaatcgcaatattaataacatatgaaaaactaaataataaaacatttagggtgattctacaatgcaccgtcttaaaaagaatatactgatgcattatctacttatttcggcatctagaaggattttttagtctattttttttttcatattcacgtacgttatagctatttaagatatcctacaaattttaaaaaattcagaataatttacaatacagaaaataatatgtttaaacagtttattttacacgcagataaaataaaatagtcacgcctgtaacacactgtttgaacgcagtttttggcgtgttaaattttttcgaattttacaaaatatcttaaataactataatatacatgaccat

SEQ ID NO: 168712 - DNA, 904 bp, Cannabis sativa
tcacttgtgtaatggtaaataccccagctagagtgggttttagctcttatttttgttcgcccttcttcaatagggggaaatatttcttaaggtgccccaccattccacactataaacatttcattctattgcattccctgggatgatgcttcttacaatgaggacactcaggataagaataagtatggcatccccctcttccttggtattcacggaacctcttactctgactcaagccacttggtgccaaaaaagttttttatttctaatcactgatggaatcaccaccctctctaccataaccaaaagtaggaagagtggtagtcccacaaacactaggagtccctcgcgaatcctacaaaaactcaactacaccttcagctcgaagagcatttcaaccatctcagcatatgtagttgtgtcatttgtagtaatgaccaagtcgtgtatgatcttggcattcaaacccgccaaatatttctctttcttactaaaatttgtgggtactataactgaagccggcttagcaagtcaatcgaacttagttgtatactctgtcactgacatagtctctccttgaaccatctcaatgaactcttttcttttagtactacaaactgcctcattatagtacttagcattaaacagctcccaaaattgttctcaggtcattgtaatgatgtccctagtgagggaaaccatttttcaccatacgagggcatcctcctagaattgaaatgtggcataggtcatttggtcattaccggtgacacccataaaatttaagaccctttcaataaccgttagcaactgtttggccttcataacattagggcctcccaaaaaagttgggggcacttgtttacgaaaccattcatcaaaggctccatgcggttactagcaa

SEQ ID NO: 168713 - DNA, 576 bp, Cannabis sativa
  modified_base (480)..(482): a, c, t, g, unknown or other
  modified_base (548)..(551): a, c, t, g, unknown or other
tcaccttaatggattttttgattgtgtatgtgtatgcatgcatgcatgcatgtgaacatatggaaacaaaatttccaaaaaaaaattcataaagaactacttactacatgcttttttgcaaagacaacatatatatatatatatatatatatatttgtcgtgaagaaatgagaaaaaagggagttacatgtagccaaagaaagtgaaagtaatatataggcctagtttgacaataatgcacatgtgtatgtttgccccaacccacaatcacaatcacacacatatatatataaaaatgctaaaaaagtatgatgattgaaaaaaaaattatatccgtattagtgtaattaaatattatattctatatataatttaatgtaataatttttatcaaatattattaaccattcacaagatactactttataacagtccatcacttaccctgatatcttactgctacttttagtgacaattttnnngtcacaacataatttttttgtgatcaaatatgttatattatttataataatataatatatagattnnnnatgtgtaataaactaataatatgta

SEQ ID NO: 168714 - DNA, 621 bp, Cannabis sativa
tgcatcagattcgctattaaatttcaaggtaatattttcaatctaatttgtacatcgatccgtttaattttaatccaattcaatctgcaataagatcagttattttaaatcgattatttttttaatactaatttatttaatcatattaaaagaaattttttaaagatacaccaaaattaaataaatattgaaataaaatttgtggtatagatcttccaaatataaaattctccaatagttgttttggttatagaaagttagatgacatccagaagggcattctcggaaggctaacttgtccatctagaaaaagtctcgtagaatgatagatgtcatccagaaagacgttcccaaatgtctatcatgtccactcagaaggagtctttaggaaaactagtcttcctccagaaaggagtttcagatggttagttgttctcttctggaagggagtcctgaatagtcgactctagttgacacctaaatttcccctccaagaagtcccttcaaggtttgctttagtctttcttccaggaagcgtatgttacttctcaaagctctttatcttatgctaacgtgaagatattgttacaaggagttcgttaagtcgtaactaacttaaca

SEQ ID NO: 168715 - DNA, 831 bp, Cannabis sativa
  modified_base (806)..(806): a, c, t, g, unknown or other
aatcttattcattgacccaaaatagggcatatatacatgacatagtttgttacaagattaaaaaaaataacaactcgagtaacaaaatcctaacaaccctctataataacctataactaattaactaacttaaccatatacttataatactccccctcaagatgaggtgtagagactaatgacactcatcttggacaaaaggaggttaaattgagctggaaaaagagctttagtcatgatatctgcaaagttgtgtcttgaggggacatgaatgagtttaaggcatttcttgttgacttgatcacagacaatgtggccgtcaatgtcgacatgtttggtacgctcatgaaattcaacatttttagatatgtggagagcagcttggttatcacagtagagggtggcaggagtcgagtgtgatatgccaaagtctttgagaatattgaatagccaaaggagttcacacgtagtattttccatagacctatatttgacttctgtagaggatttagagttagttgtttgcttcttggacttccaggagattagagaaggactaagaccagtgatggatcttctggtgtctggataggttccccaatcagcatatgagaaagcatgaagttggaaagggtgatttggtgttgacgcaaaggtgctgaagatgagaccttaagggtgccttttagatgtcgtaggatcctggtggcagctttcatgtgtggttgtcgtggatcactgaggaattggctgagacggttgactgaaaaggtgatgtcatgccatgtgtgttgggttttatgccntaaataaaacttcatttcaatgtaa

SEQ ID NO: 168716 - DNA, 698 bp, Cannabis sativa
  modified_base (650)..(673): a, c, t, g, unknown or other
ctctagagcatatttagccagttcatgggcatcttgattatcatgcctacgaacatgagagataataactctagggaaaaaggatgaaatatagtaaacatctgaaattaaatctaaaagattagataaattagcagatgtggtcgaggagccaaagaaactctcatagcatcagtttcaatatgagtaattgggatttgaagttggtatgcccaattgatgttgtggaaaagagctttgcttccatctcatcacttctgaagaaaccttgtatgaactttgataaggcaactataacttatccaaagtgatcacatactattgctccaacgctcagcacctttgtctcagtgttcaccgccacatcaacattcatctttaaatgaaaggggtcaggtggcttccatagaaccttctttgtctttctattgaaactggcagtagcagtaggttgttctgatgtacggacactagaagtggtgaattcagcaggatttagttggtgagtttttgctgcaatatagttctctaaatacgtgttagcataaggagcaatgttagatccatctcgacccttattttcgtggtagactttgttccttttagtccaaatagctcacatagtacatataatgtaaagaccgcttagnnnnnnnnnnnnnnnnnnnnnnnnttatgtttaattatgaaaattattt

SEQ ID NO: 168717 - DNA, 1271 bp, Cannabis sativa
atcgtacgtagacttgatattgaaaattgcaccaactatcaaacaaaattaaaaagttataataattaggttcgttattactattttctgaatgcaaaatatgttcgatcgtactacatactacattttatatatattcttaataagttacaagccaactacaaacacatatttctatatccatgactaggttgattaattagagcatttaccaaaaatcttctaacaaaaacataattatggggatgttttaaccattttgttttaccaactaggtagctagcctagttgaccaaaaagtaataggtcaaattgtattatatggtagctagcctagttgagcaccgatgctcctttatattttaattaaaaaaacaaaaaaaaaatgtaattggctaaaaatcaaaagtgtctcaagtgggttcattgcgcaactattttttttgttgaccaatcggaattgatgcccttaggagctatatacaataggcaccttaaccacaaaaggtgacagtttttagtggtatagctaaataaaaataaaacatcggtaactaatattaaattgccaattaatttaacagtgttacactcacttaagatatctctattattatagattgtaatcaagaagaaacttttcacatcaattcattttttggtatccaattatttataattgtgcgaatataattagacgagctcccgttgtaattgtaaacaattttctatatttgtcaaaccaatattttgtgatatatttgtattaatttttagtattatagttacaattacaaaatttaatgtttttattagaagtataaaaaattaataacattatcattaatattattattttcttattatgtaaaataataaaaaaatgattaaataattcatcattaataatataactaaatatattaatgaaataataattttcataaaattcaataataaagttatatatttatgatgatataaattttgtattatagtaaaatgtcatgtaaaatttagcacaatatttattatgtgttaaatttatatcactttttaaaatattataattagagcacattttttttttttaagtgagcaatatttaacattacaccacttatttccattttcaatgctcttgtaaaatatatcgaattagtttttaacaattaccttgaatattgaagaaattccaatgaacgtaatagagtaatatatagggttatttacaaaaatatgggaaaataaagataagttttgatatatat

SEQ ID NO: 168718 - DNA, 503 bp, Cannabis sativa
tgcaaatacctaaccacttaaggatgttctgccgcaaataactcttaaaataatgttgatataaaatataggaaccttccaactttaagctcaaattttttgaactggtttccaaccttttttcatctctatataaattaattaataaattataccaaaattatttttttaaatatataatattataataaataatttcttaaattcaaccgtatgtatatttcttctcagcaattttagaattttattttttgtgtataattatcttattttttcttttaaaaatttaatatttcaaatctaaatgttacatagctatgtaaaatcatttcaatgtatttattctatttgccaacctatattaaataataaacaaaataaaataaaatccctagcatatctataacctatgtaaaagtgagaatagctttttgggctttcactaattgaattacacaattagccctcactatatatttaattataaaaaatttaaactaagc

SEQ ID NO: 168719 - DNA, 582 bp, Cannabis sativa
cctcttgatgacatgcctcactttgcgtaacatatatttaatatttttaaaattatatgtattttaagaaataataattttatttaataatccgttcgagataaaaaaaatagtaaatacagttatagaaaaataattacaactatcattatttttttatgtgtattaaattaactaataaataaagaaataaatctataaatctcttttctgatttattcccttaatatgaattaagatgacaaaaatattattttgcaataaaaattaatagaaaaattatacacatgtctgaaaactgagattgcaaaaattatagaaagattgatgtaatttttttaaagtatttattaaattggcatttgtcaaaccaatcattttaatacactaaggcacattaatattatattaatttattaacaattaattaatacatattaatgttacatgttgaatttaacatcatgggtttcattttctgcaactcattgattatacatttttttttaattttataaaataaatttgtaattcactaaataataaacttcttaatgtatttatattttaaattaatcaatt

SEQ ID NO: 168720 - DNA, 527 bp, Cannabis sativa
tgtgttaacaaattgatactagttgaccattatgaattttatggggatctatatttttgtgcaaaaatagggtttttctttttaaaaatattattttatgaaaaaattgaagaaaaacttgaaaatatgagaaaatggtaaaaataaccagctacccttgtagtaactagaaaggtaatcagttgccatataatagtaaccatgtatcttatgttattttttccatatttttttttttacttttttctaaaattttcacataacataacactttttttattttttgagaaaaaaagtatatttttataaacctatactgtaaaaaccataaaaataaaaattcatctaaatttaaagaaattcataattagaagtaaactaaacaacatattcaattggactaaaacagttgttcaaaattctgctcgcattgtttaacatgcctaacatttatacatgatgagacattttattatgggttaatttcacaaatgcacaaaaacaataaaaatacagtttcacagaat

SEQ ID NO: 168721 - DNA, 513 bp, Cannabis sativa
  modified_base (471)..(471): a, c, t, g, unknown or other
ctattccaaacacccccttagtaataattcattaaagaacaaaaaaaatttaaatccatatgtgttattataatataaaatttttatatgaaaaatataaattgacactttatttataaaagtacatgtagaaggtgtgagtaataattttatttttaataaacttttgtttaccaaaatatcacttacaatccattcatttcagctcaaatatcaattttactctttttttcttgtttttcttttattttaaatttttaaattcagcattcagttttttattttaaaataactttccaatcattatcttttcaaaacacacgttcaaaacccacaaaaactacctcccacccataacttttgccatcttcttcttctaattgcctcctttatcatttttttatatctttcatttcgtatatatggctataatttgtgggttgtggctctacttctccatctccattgccnaaaaaaacttcaaaaataggtcataaatcagttgctaacaag

SEQ ID NO: 168722 - DNA, 505 bp, Cannabis sativa
gttaacagtgttgtatcgggttagttactccccaacgtggcctttttcaagttgatttattatctccatatatgttccttatttgtttgaaggtttatctcagttattgatgcttgaagaattcattggtcgacttaaagggttatcaatgtctcgtcatgctccagttgtttctcatttattttttttggatgatattctcttattttgccaagtggatgactggtcatggtgccataaagcgtgctttgaatatatatcacagagcttctggccaacaacttaatacagataaatcaattatgtccttctccccgaatacaacagaagtagcgaaacaatctttccaaagtatcttgggtatgcctatttgtgaatgccatgaaaattatttgggtcttccagcttattttgagggtgataacaaacaactattcagcaacattaaagatcgaatatggaagcttcttcattcatggactgacaaacttttctctattggtgg

SEQ ID NO: 168723 - DNA, 554 bp, Cannabis sativa
tttagagttaaaatcgatgttcgctagttcactcctctggaaacgattgatcattgggggtggatgatttggaaaataataatttctcaggcaaaaggcaatttggagtaggacgtcgaagactgggttcatttcaccactaaaactcctctttgtgtgtttgttctcgggaaaatttgaattcaaacaactgaaaatctgaaattgtgagataagtgttatatggtatctctcaagggtatttatacccaaggtggctatccacctgaagaggaatgaatgatccaagatcgtatcacaacaacaataaatagtaatatagacaacaatacacttgaaaaaaaaacaaaaaaactccaaaatagcattacaacaaatataaaatataatttctatgcttactttgaaaacaatataaaaataaccctgtgtagtgaacaaaataataagcgctttagaaatttttaaaaacacaacaacaacaacaaatagtaatataaacaacagtacacttgacaaaaaacacaaaaaatcccaaaataacattacaacaa

SEQ ID NO: 168724 - DNA, 984 bp, Cannabis sativa
tttttttttttgaaaaaaaaaaaaaaaaaaaaaaccttgtattattcaccataaggtctgtcctcacttggcaaaactcacttaatattttaataaataaataaaatacctaaaattttcttatggagaacaaaactttgttctatctcctagtcatctcatattaatgggcattgggcaaacaccctctatagcatatcaacataaataatgggttacaaaatacaatgtaaaatccatctaactttacttgggcattttgttttgggttacattagcaccccctatgagcttaacctcccccatctcccctatctgcttgtgtcaatctggggttgccttccttctttcgaggtaaggccgcctcttggtactggactcctcatagagtaacggtcgattcctctcaatttggcttccataccatggtttgttggactaaatggttcttgtggagttggttacaagtatctagttactaacttcagtttgccaccataaggtttactcattggctcgggattgctgactaaataagataattttgttagttagagtctcgtcgtcttgaccactatataaatgactcaattttattcattaaagatagacagagaaagaaagagagtcataaaacaatagtaagaagtgtatcaaatcttgtaaactctagtgtttgagagaaacatcttttgtaatctctcaagcttttgtggattgatcaaaaatagaaatgaagtgttgtgtttttgtatagttagagagaattgtcatggctccatttgttcactttaagaaaaatttacataataaactgaaaatttaaagaaaattacaaaaattcatcaatactaaaaaaaaaatatttttttcttttgaattttattatttataaaaatatctcttcaataaaaataataaatcatttttttgttgttttttatagtttatttatagttgttttatagttttcgtgaagttgat

SEQ ID NO: 168725 - DNA, 1711 bp, Cannabis sativa
  modified_base (673)..(673): a, c, t, g, unknown or other
  modified_base (802)..(802): a, c, t, g, unknown or other
aaaaaaaaaaaaaaacatgcaatataagtttatctattttagattaggataaaatacttttattctttaaaagaaaaataaattaagttgtggaattttactgatttggtagaagaatagaatgaccatattttctatagtttttataaaacagaaacgaatcatgaaacatgccataaaatctgctgttcaacatataatacttaaaatcaatattctcgtgctatcttcccaaataaatgaataaataatgtagaagtggaaccttgctttcttcgcctgtcttttttggactggctatactacatggtcaatgatttggttttaagttttttgtaggagcttcgtcaaattgatgtggaaattttacactattttactttaagacacattaaattatatacaaaattgatatataccaaaatttatggtgtgagattttgaatctacactagtcgagtgttaattttttttttattctaacctttattaatttatgggtaaatactattttagacttgtattttgtaaaagttaccgattggattctctatcttgttaaatgacaaaatagatcttatattttctaaaatagtaaaaataggactttgagcttaattttgacttttttttttaatataaccaacttgaagacaatttctaacacgaacanatacagaaaatgtaaacagttttatcataacacctttcgatcagattattattaaattttattttgacaaaaaatcagtacatggtcctatttgtatcactttgaaaaatacaaggtctattttgtcanttaacaaaacatagagtccaattgataacttttacaaaacacaaaataatatttacctttaatttattttaaaaattaatcttacatttcaatcttcaaattaaaatttattacgaaagtaataattaatttaaaatactaacatattaaaaaaaatacaaaacatcaataataaaattactaatatcaaacaaaataaaaataacataacactaaataaggtcgtgttaaatattatagatgccatgttctaatttttaaaattaggctcttataaaaaaaagtataatttataaaaaaaaaatatttttaaatattatcatatggttatatattttacaaaataccaaaaactccaattattttataaaacttgttattgattccaatccaacaaaaaaattaatagaaaaaagaatatgaaatgtttgaaaaaggtaataaataacaaaaattattttgtttaaaacagtaatagaattgaaaatagattttagaaattagaatgaaattgtccaataacaagttgttagccttgggttcattaaaaaaaattgaaaggcattaaagaaaaaaaatgtattggaccttttattttttggggggcctgtgcagtagcccaaagggacggccttgacactaaattatgaaactaaaagaacaacataaataaaaacaaacattaaataaaataataatttaataaatattaagtatcattctatttaagttttcttttaagaaaatgtgtaatgtttaattaatataagaaatattttattttattaagctatttaaaaaaattaaatttttaaataatataatatctattctatataaagtgtgcttatataactgaattcttggtttatgagaaattcatgggtgtgactttttatttatatttaa

SEQ ID NO: 168726 - DNA, 1304 bp, Cannabis sativa
tttagctatatatatgtttgaattggttaatgttaaatgattgtgtttgagttagacatgtaaggcagtttcccaaatactccagcctaaatctatgtatagactagacattttattaatccatgtctttcctactactattcttactataaattgttttcggaaaaaattgtaaatggtggcttttttttttttagatgttgtaagtgatgttttggtaaaccttttttatttttgtatttaggaaaaaaaagttagttttttgtttttttacatgattgtgtacattcatgtattggtgcaatctctcactgtttcggtatttaaaataattttttaatctaatttttgtatagtcatatacgttataattatttaagatatcccgtaaattttgagaaattcagaataatttataatgtagaatttaatattcaaaccgtctatttcacatgcatataaaataacaaaatcacgcgtttaatagactctttgaactctatttttagcgtgaaatttttttgaatttctcaaaattttatagactattttaaataactacaatatatgattataaaaaaaattaaactaatttttttttttaatactgaaaatacacttttttcattgtagaattttgtaaaactagttggaagttgaaaatattaagggtgtataggtcattttagaatgcacttaaaattttcgttaataactttgtttaaatgaaaacaaacggccaatagatttgcagttggtggtgtggctcttctaccaatatgaccaacttacttacacgtggaccaagaatcaaattacacgtggaccaagtggtggtgggcccaactaagcagatacttgtcatttgtcaataaccgcgcgtgctcacagactcgtcattagagtctgggcattcgtacctgaaatgtcagagtattggtcagcaaaatatagggaggcacaaatctgtgtagatgtgcgtgccctgccaaaatgtgccacgtgtacggttccatgcaaagacaagtgtcatcaccgacgctctcagctcttgtgaaagtcacgcgcaagaaacacgcgcggggattcaattgaaagaatctaacccatttcagggtcaggattcagattgattaaatataaaaactaaaaacaaaagtgcttgagaaaatgaggttttgtgtctcaacgaccgacacgtttaactctagttaaatatttttataataattattaaattaaaatataataattaatatttatatgatttaatacaaatttttttaaaaaatatcattaatcaa

SEQ ID NO: 168727 - DNA, 1021 bp, Cannabis sativa
tgaacacgcagatatcaaaagagataaccataattgtcttaaaaattaaatacaaagtgcgagtacatgtgtacctcttaaaagagtccaaataaaaacaaaaaataacggagcagggatattgagatcctctgcgactttcccagcaccatctgtgactttagcatctcctccaacctcggctttctcagggaaaaaggctcttgcctagaccttgggttttggtaggagacatagtgtggaaagtattggccatctcgaccgctctgcactaaaaactccgaagtggaagtttggcaacttggtcagggtgatgtagatatagtcggtgacgtcctaatcataaggtttttaatttttctctttcttaactttaaggtcgcgggtaagaatcatgatcttctcctccaatttcttgatagtctgctcctcaatctttttagccttctccactgcatgattgttagctttgccaagatccttgatctctttgtctttggtagctacatccaacttagccttcctcaagccttcttgaagagcgctgttttgcttcttcaaaagatcaaaatctttgaaacacgcaacaaatacccgtaaattattagtcatacactatgagacaagttcagctgagcaggacataagatcctcgacaggagtcccctaaacttttgcgacaaagtcatcgctcacgaatttctcttgtaggttcatgaagttgcaagctttggtcaggatccatcatgaccttttttctcttatcttgggtgaccttctgatgtttcttctataaatcaaccatcgtggtattaataacatcgctctttctcttattttgtggaggcatcacggcagagagagtcacaatgttaacttttgggttacgattaaaagtaggggctattggaatttattttaccaggatcttacatctactcacaagtatgatgatttaacaacctaaatatgaacttctaaaacaataaataaaacacataaaaagttaagaaaccttaca

SEQ ID NO: 168728 - DNA, 1024 bp, Cannabis sativa
cccccatttgagtgcttacagtctgggtcgatccttggtccatcttacttagttgtccaatgaatcccttaggtttgggcctttaggattgtggtcggctcaaattttttttatagtataaataaataatatttggggttataaataacactcacattgtttttgtattgagtatatattatgctttatttttatgtgttgaagaatatttgattgtctctagctacttgtaaaggtttaactaattgaaatactagtctgtttagaactacaagtttttctcaccaattcgttttctactcatcttttgagaaatatatagtctcatattgtggaagtaatatcatgctagcttgttgtctaggtgacatatagtaatattgatttgatcgatgttcttttgctcagtgtttgatgatctcctgtataccacttttgatgatttcatatctatactttaagtacttattgttttgtgttactcaggtaatcttgatattttctcttgataatgataatagaaatggtatagttgttatgatgggtttgttattagttgttgttgaattgtttgtgtttttgtatatagtgaatcgcaaatttgaattcttgtttggtttgttttcttgttttgtattgtattcactttttcatatagtgcttagttttgcattattttggtgtcttgtgaggaaaacagtttgcttagtgtgctcattgttctcaatgattaattataatgaaaaaaataaaataaaataatacatttatattatttcattccttccttgacccatgttgtgttattggagtaacaaaattgtgatgaacatgtatttttcaatctcttatgcaaagttttgtaagactaacagagtgagaaagcagggaagaagaaaagaatcacaaagagaatcttaattcaacaaaactcaactttatcactgatcgaagagatatatttatacaaagatattgaccaaataaaggagcaaataatagaaaactaagagcatgtttggta

SEQ ID NO: 168729 - DNA, 583 bp, Cannabis sativa
agtaaaatagtgttggaggaaatgtttttagatctaaccccaaaagacgttccttcatattctacaccagtagaggatgatcccgctccctctattgaactaatgaaagctgagacaactgaagatgagattaccactgaagttcccattcataaattcacaatacctcgttgtagtgggaggatttctaggaacccacttagttatggcttggatggcgcaagcaacttggtagttagtgaaactcgtgatgatgacgcgttgacctttaaacagtaaatggctagtacggaatggaaattttagttagcaaccatgaaccaagaaataaattccatgaggaaaataaagtcttagttgcaccagatgactttagggccatcaagtgtaaattaatatacaaaaagaaaagaagagttgatggacaatcaaaacttatctagttagacttatcaaattacattttaatttaatatgaaagcttttaattaaactgcactttttctaaactaatagattaactaagaattagtttgtaaaagcacacacgtagtatccctgtggatcagggcgttataggtaa

SEQ ID NO: 168730 - DNA, 1651 bp, Cannabis sativa
gcatttcagctcaatttctcagttctccggtgtactagagtaagtttgttcgggttatttggtattttttaataatttaatataaatatcgggttgtaaatattaaaattgtaacctgtctaataaaaaataaaaaaatataatccgtctaataatttttgtcgatttggttaagctgtttaaatcatattttttttttattattattattattagtttttggtgtaaatgtgtagtgtagatatttcatgattaaaattactatagtttaaattaatatcaaaaaataaatattaaaatattaaacaatattttttaaaaatagaattcatttgtaaattctaaatttcaattttaatattcaaatacaattaaaattattaactataaattttaaattaaatattataaaatacaaactttaaatgtaaaatattttcattattaaacgtaatttatatattatattatattatagataattttagtaaaaaatatgtaatttggtttattcatttaattaaggttatttgggcgggttagaataatattcaacctgcccaatatattcattgggcgatttaaatttttcgtaaagttattcgggttgtattttttgtcggtttattcaatttagtttgagcgatttattcaaattgagcggtttgtaaattttttaagaaccttacttctaattggatttaggagttcaatgacacttgtgtgtaattagagaaaaacattaagagttttcggcggctaaacctttcaaactatcgtttcatttgtacttaattttttagatcaaattttagaagtaaaaccttccaaactactcaatcttccaaattttacacgtgacatgtttacatgggtacgcctaatatttttatttcaaattttattttaaaattaaataaaattataaatataaaaaataaaatatttaaaaaataaaaaatattataaatttggaaataatttcttataatttttaaataataatatcatgtgtactaatataaacgtgacatgtgtataagagtatacaaataaacagtccgtgttggcagttaactatgaaaaatagatgacacctcaaatttgctatcaattcaatatataaataagatttgccctctatgacccttaaagagttttttctctgaacatttctctgttataaacattttccttgaactataaaaatcgttggaattactttcttgcggttgcattctactcgtttatttaaacaatttgttgatataacactaacataatattaacttagcctagtttaagagtccagataaaaaataaatacataaatagcaatttcatgatacattatgagcatttgtatgtccattcttagagtttttgtttatatgtttaatattaataaattaaattttaggtaattcaaggttattaaataagtccttatactaaaattgtacctatacctcatagccacataaacatattattttgaaaatgagcataatatagctaaagagagatatttgcaatggtttgtatagttcggagaaaagtttcgcaaccaaattgagtaaaaaaaaattattttgtacctttattatttcgctgcgtttgaagtttaccaatttttataacaagggatttg

SEQ ID NO: 168731 - DNA, 726 bp, Cannabis sativa
agactttcgcaaggcaactctttttatttttaattttcttatcgtagctttgctttgtctgaactctcaagtgtggacttggaaaagattacactactgtgcggtgataaaccctgcggtttcttcgattaaccaatagtatcgtgacacctcatcgttcattgaatttctgctaaataaattaatatttaattgctaaaagggaaagaattgcgtgctggatattttttaaaggcaaattgcgtatattttggaatagaaaattattgcatgattagcgttattagagggaatttgctttgagatatattaacatatttattagaaaaaatttataatcggttttagacattttaatttaataaattatataaaaaattactaacctattacaacgtatataaattaaaataaaatagattttgtatttttcaaacgttattaattgaattctatttttaaataataaaataaattctgtattttttaaaatgatacaaatatatcctgaattgattatcttaaaagttaaaacacaagagtaaagtaacaatctataataccaattgcatatttatataaatttaacgcaattaatgattttttactcttaatgtttaagggtgtacataaattgattaaatccaatgtctactaacatagaattgatcaaatctaacatataatagatattggatcgattggatgactgaaattaattggatc

SEQ ID NO: 168732 - DNA, 1127 bp, Cannabis sativa
taatataatagattagtcaaatattaatacttaacaataataatcaagattaattcattaataatataataaaatcatgatacttgtatcattaaatatatggtacaattataataagattatcaattaataacaatattattgaattgaattagtgtatataaatttattattatatatatataatttgtatataaaaaaagagaatatgtttcacatagttaaaaatgtatgattgtttgtaaataaatttttttgcacatataatgtaataaagtcttataatgtatatattgttgtaaatttttcttcatttaaggtgcctttaaaagtaaccgtgtaattacaagatagtaattacactttattttagggtaataattacacattgtagtaattacactctattttaaaatacaattgttagaatatgaggtggtagttacttataaattgataatgtcttgtttagctacatagatagtaataacataaaaataaataattttagcacttaatttttaaaatagaatgttttagtaattacaatgagtaactacacccaattcttatagatggcatgagaatcgcagactataattgagaccactcaattatctctaattacgcagttaaactgtaattgtgtggtcaaacaaacacacaagactataattaccttcaattatactcaattccaattccctctttctttctaaatgtatccataatatattaaaagtataatgcaaaataatcaattgtacgcattttaaaaagtaaacacgagtacaagtaaatatttgaatcctatttttgttgtagtaattctaaatttacaaaaaaaaaaaaatgattggaatgttagctataagaacgataaatacaatcatgcaaaaaaaaaaattcataatattttctagtaccaaaaatataaatgttcctacaaatgatgatgatgaaagaatcatccctacttatatataaagagagttatataaagtaatcgggtgtcacttgtgtccatataagtaaaaatatttatgttacgtgttatactgtaaattttttgtctaaaaatttgagatcagcttcctatgaaattgacacgtggatccaatccttaa

SEQ ID NO: 168733 - DNA, 678 bp, Cannabis sativa
cagtttaacggatatcttcatgacttaatttcattttgattatatattttttttaatgtaactcttcacgtgatcaaaattatttccctgtagtgaagttcatgtacatcttaacaaaaattaattttttgaaataactttttactaataatatttttagagcccgaatatatttctttttcaaaaaactaaataaataaataaaataacagcagcaatagtaaataataatttaatataatattgaacaattctttcaaaaaataataacaataatgattcaatataatgaaaaatatgtgtttagaaaagctttcctactcctaattataggatttgtagatttttgccacataaattattttacaaatatttcctgaactataacacacttgtagatttttgccctttctataaaaaaaaaaaaaacaatgatttgctgacatggcaattaaaaaattatttatgatacttttgattaattaataattttaaatttaaaaaaaataagtaaaaattattttaaaattaaaaaatattaaacaaacagtaactaataaattactagggcagcatcagttagtttagtgggttttctttagaggaaattacattgtatacccactttactttatttgttttgatttttacctctatttttattttctttaagatata

SEQ ID NO: 168734 - DNA, 584 bp, Cannabis sativa
taaacaaaacgacatgcgttttgcttggctgagtagtaatatatttattctttaataaaataaatacaaaaataatttgttaaaaaaaaaaactacaatatttgctgtaaaaataaataaataaataaataaataacttcaatatttcatttcaagttgggtaagcacaccctcattaagtagaatttgaactcgatttttttttttttggtaaattgagagttatttctttttattcattcattaaaaatagctgtaaaataaatttaattaaaatatatcctattttataattaaactgttttatatattcttataataaaatatattgtttacttaataaaatatgtcgtttattgtattttaggcacgttgtttacttaataaaatttgttgtttaacttattttaacataataatttttgtgtgtcttatttaaaaaattatttactttattttatgtaagttatttaggcacagggacagacgcagtaaagaaagtggctcccactaaaaaaaaaatagtgttaaaaaaaattaaatatcttttatttaattaaataattatacaacaaaatagtaaa

SEQ ID NO: 168735 - DNA, 1807 bp, Cannabis sativa
  modified_base (1747)..(1759): a, c, t, g, unknown or other
ataatatcataatattatatgtatattgtatatatgtcattttcatggcaaagtttgttattagtagctagtgattctctaagagcctcttagaagaattaattaaactgctttttaatgtttttctttagaaatgtagggtcaactttttttccttttcctattggccctaattcttatgtgctgtaattgaatacagagcaaattaccagacatatctaacaccatcacaacatattataatattataataaagtattatattttagtttaataattattataaaagaaaaataaaatattcaaacaatggcatctcatcataatttactacaaaaaaatattattattttagtcacaaaaaattacttgccattaaaaagtaatatacagtatttagatacaagttattattaattttgttttaattacaataaatgttgtggctaaaaatacatttagtgacaataaattataatttttataatttagttttagatatagaaaaataattatttatattaaattataatttttcattttttaatcacaaattttattgtgactaaaataattttttttataataagtcatatattaaatatcactaatactaaataataatattttgtttttttacttaattgaattaattggttatgttaagttataggaatctagctttttctacattaacccaaacatgagtcaaagcttcatttgccaaattataaatctctagtatgggacccccaacttacagttgtaattctattatatatacaacacacgcaacttggcataataatatatatacataatatataaatttattattaattaattttgctggtctaattttgattgcttttcataagttaattaataataagttgaacaaattttaatttggttgttagctgcaacgaatagggtattgaaatttcaacgcaagtaatattattattataggttttgaataaatgagaggaatgttcttcctcaattggttcagccaatttcttgtagagatgtaatattatatatatacatgcatgttttttgtagtattaattaatcaaatttcatacaaaaattccataatgttattattaattttttattttcatttgtttggatatataaatgccggggaatatttaaactttaaagcataataatccactatatagacaatgcttaattataataacactattattatgtatcaagttttttttattatggaataatccccctgtacaattgaagtttaataacatattacaaaattacttcttatacatactattacatgcatatatatatatatatatatatatatgattctatgttttttttaaagtattattagtttttgaaaaagaaaaaaaaaaacacaagattaatagctaatatataggagtctttacaaaaatgttaaattttgggcaaacatatttacaattttactgttacacgaattttttttttttttataaaaatagtgtccttttattaaacaacaaaacagaataattaaaacaatagtggaacaactaaaaaaaaaacatggaacaaccctaaaaacttaatattgtacacaatataaaacttacacgctatttttgaaaaaaaaatttgcctccctaaaaaaagtaaaaaagttaaaaatttcagtatgtggtgtaagaaccccaatatatattctcatttaagtaaggggggtaagttgaaaaataccacnnnnnnnnnnnnnttaatcaaatttacctctagttatatttaattgaaacatacctctttt

SEQ ID NO: 168736 - DNA, 1874 bp, Cannabis sativa
atactcggctggtgatcccataaaattagttggaaatttgccaacattaatgcccaagtcaactcctctaattgctccatccaatcccactgaatgtgctgcctgttgatttttttcattgattgtgtccacattgggagccacctgaaactgaaccgtgctcgacataatctccatcagaccgggcaccagagctttcacctcttgacattagaccttgcctgagccatttcaacccaattgtatgttgtctcattcccggcaccgctataagatccattttgtaaattttttgatcaaatgtagtggagtatcagaaagccttgaacaaaatttttgagagtgtccaaaaattccacatataaaacaaaacgttgaaagatcttcatacttaaaattaacaaaactctctccccctttcttttccaacttcattcttcgttttaatggcaaatccacacaaacagagactcttacacaaagataaccacgccatatgcccatgaaattattttcatctacttctatgaaggtgccaatataattactgatatctttgaccactttagcagacataaaaccagttgacaaaccatggagttgtatccagaactcaagtttattgagcactacaaaacatggtattcgtcaactttcaacctggcaaaaattaaaggaaccctatcaaaggtctaggggctaccttcaactaccctatcaatatcaacatgatgataaaattgaaatatataaagattatcatctagttctttcacaaacaaacctctccctggtctccaaaaagaggccatcttatgttgcattgccataaaatccaaggatctttctctaaggaatcttccaactagacaccaacgatcatcaaaattcgaaagttcctgtaaagaccgcttaactttaatttggaaattagcagagaattagggtttaattatgaaacttgcatattagtttggaattatttatttacgaagatttatttgaattcagaatgcatttcatatgttatatatagaatttcataattttgcatgttttgtgcccggcaacatgggaacgcggtgtttggctattagaatcgcatcttattatttctagtttagcggggaattatagttggacattgggaatgtcaagaatagccgcgattttagaattaactaaaatacccctaagtggccttttttgacttttagtgtgggaagggcaaaatgatcattttacctatttgagttttgttgtttagtaagaagtttttataaagtattaatctgattttatttgatgttataagttgatattttaataaaacaaaaactttttttttttattcatttatacaaaaactacaaattcatgaaaaaaaaaaagaactctctctctcactcgaaattcctagggttgctagtgttggtgatttcttcagtaattcttgtgattctcagctagttgttagtgatctcaagccaaggtaaagccttttaaacctctactcttgatttcttgaattttaagaaaatgctttatgcatgctttgtggattttgttactgtagttgttgttggtgtatgatttgtaattctaaagttatattctcgttaaatatattgaattgatctacttttggtggctgttagtaggtttgagcaagctttgagttttagaactcaagcttggctctttaatggtgtttttttgattctaagcttgtgtggttatgttattgttaggaatatgtcttttgggatataatctacacgtctggaaggtttggaatcgatttggttaggttttgtaattttttggggttttttggtgtaaatcggttaatcggttttacaggacctgtaaaa

SEQ ID NO: 168737 - DNA, 997 bp, Cannabis sativa
cattctcctaattatgacttgtgtgagaactcttaagttctcgttgatgttcaatggttctctacatggcttttttgaatcaaagcgaggtcttagacagggagatccaatgtctccacttttgtttgtacttgtcatggaatacctctctcgcatcttataaaagatcggggagagggaagactttatttttcatgaaagatgtggagatttgagactgaatcacttgagttttgcagatgatgtcctacttttttgtaatggagatttcaaaagtatatatcccatactccaaggactcaaactattttcacaaacttcaggtttgtttccaaatccatctaaaactgctttttatggcaacaatatgaatgattatgagatttagagagttcttgatattttgggcttcaagaaacatgatttacctttcaagtacctaggaattcctatatgtcctaagataatttcaacaactgaatgtggattattaattgaaaaaatggtggcaagaataagagttggagcaccaaaaatctgccatttattgcaagagtggttctcattaactctgtattagtggccattcattcatattagtgtcaaatcatgatcctacccaggaaagtagtgctagaaattgaaaccatttgtagaagttttttgtggaatggtaatcatgtagctacaggttctactgtagtggcttggaactttatttgtgatactaaaacagcaggtggattgtgtttcaggaacatctctgattggaatttggcagccatgttcaagtatgtttgggctattgcaaaaaaagaggacaacctatgggtaaagtgggtgcataatgtgtacataaaagaggaaagttggtggtcttataaggccatccctgcagccagctggtattggaggaagctggttagtataaaagagagagcaagataactttttgatgaggttcaaggggtgttcattggatcacatctaatgtttt

SEQ ID NO: 168738 - DNA, 626 bp, Cannabis sativa
tagccataatattagtttacattatgatattatgataatgtagctcaaatacaaaattaaatttggagaaggctaaaacctacgtgaattaattgtcgtcatatatatgattcattaaatcatgaataagagcaaatgtcctttcaaaaaacaggagcaaacgacttaatcaatgaatcggttaggcaaaaaattaaaaaaagtaaataatttttccattgcattgatgtacttctttaaaaaaattcttatcctccaagtcaattccagaagaatcactgttgcttgtctgtttacagattaaaatatggcataaatacaattagataaattattattatttttatgttttaaaaaaaagcaacgataaaatattgtttggccagaaaagatagacctcttaagtagtagtggcttcggagggagaatctaaaattctgagataacctgattgcgattggaactccgaccttcatctattatcttatttaatattttgactaaattaatctaaaaattttaagatactctttggtaacacttttgttttttaattttttaatcataaaataaaagtaaaatttttgtttttaaaaattttatttttgaaaaataaaaatgcgttc

SEQ ID NO: 168739 - DNA, 740 bp, Cannabis sativa
tgcaaaactatagagcggctcagaacaaaactcatgttgcagcagcctctgctgctcctggaacttcacaccagcctccccgatcacctgatgcaacttccccttggtgcccacctgctactgaaggtttcaaactcaataccgatgcagcagctgaagcttctacgaacactattggtgttggggctgtgcttcgggatgctacaggttcagtaaaagctgccctttcaatgccgattctagggaactttaagtcccatgaaatggaagccaaagctctatttcacagtctcaattgggctcttcaacaacagttaccaattacacatattgagaccgatgctcttatggtggtcaatgctttgaaagctcccttcaattcaaattctgaattttcagatttaattatagatgttcttagtcttttatcctttttcccaaatgtaattgtttctcatgtcaagcgttctgcaaacaatgcggcgcatggactagctaaatttgcattaggggtggatgaggcttgtacttggttggagattattcctccgcctatatactcggttattgtaaacgaatcttgattgtttaatgataactagtattttccctaaaaaaaaaacattctaattttgtaattataatacaaattttcaataaaagttgtcaaacactacaaaaaacggttacttttagtgacaattttttagtgacaacataatttttttatgactaaatgt

SEQ ID NO: 168740 - DNA, 836 bp, Cannabis sativa
tgagcaaactgagtttaagtttaaatttgaacccttaaaaatgttaggaatacatgaaacaattcgattttcataaactaaaagctctaaaaattgaaccgcaaaccattcaaaatcgaacggaaggcttgtccactccataaacacctcaaagttgagttcagagtcaaaatccaaagaatttaaacaagagggagaaagaagaagaagaagcatttcattgcaaatggggaaagaaatgaagacaaagtagttgtggagttgaatcaaatcatcattaggacactagaacataaatattatctcctaagcatattatcaatgcacagaacaaacttcctggtaacaatttgaaacaaataagggaagagtcaataccgataataacaatgcaatttcaagggctttaggatctttgaatgtaacaaatgccgtctttgattgcccatgttcactgtacaaaaagaaaaaacctcatcataaatttaaaaagatattacttttattttttatttttgaaaaagtcatcaacttcagatatctgcagaaagaacaaacaatctagaaaagaacaagaaactctagtaaaactacgaagccaccttgtcaacagataaataaacaaacaccaaagatcgaacgtaatagttttgtacaaccttaatcactaaaccaaaaggaaaaaacattgtaaaactacttaatatgcaaatgataaattactagaaaaactacgaagccaccttgttaccaaacgaataaataaacaccaaagagacaccagagtgctaccgtcaatatctgtgcccgaaaatacatgttggagtatttttttt

SEQ ID NO: 168741 - DNA, 960 bp, Cannabis sativa
aaatcattttatataattgtatatgtataaatacacagaatttttcgtttttggcatttgataaaaaaatatatggttttaaattcttgatatttttttttttatcttaatatatagcattatcacatttatattatattatatagaaattttgtccatgaaaacgatttcaaaaatcatgaagcttaaaatttattctaaaaaatacatttcctacccaaaaatgatttgagaaattaaagcatatcttttttacatattttcaatgcctaaatccatatgaatcttttaatattttcatttatatcattttggaattaaagacaagaaattcggtcatattgaaattataattttttggccgttttgaaacagatctatttgacccacttgtagaaaatagggtccaaatgacccattacaaaggaagaagacaactctgtatatcacgtcatttttaggagacaaaattttcaaggagactctgtacgacaagtcatttacacctaccgtgaaaaacgacatgtttttttttcggaatttatatgttgtttggtggaaaatagaattggaaaaatatgatttggtaactatttacatattttatttaggcatataattttaataatttttatactgtttaacatttaaagttatacaattacttatgcaattattatatttatttaccaaattaagttattattgtcttaattatttatttttaaaaaatatttcgttaattattaaattacggaattttacatttaatttattatcattttgtatttattttacaaatttattattagtacaattaattaagattttgtattatttatatgctagattaattcttgttgtataccgaaatggtacgttttacatttatcaactcgcaagcgcacgaatctttattgtagtattgagattgtgaagaacgaggtcgaacccatggga

SEQ ID NO: 168742 - DNA, 696 bp, Cannabis sativa
cccaaaatgattacatatatattcttttttgatgaatgaaaaaatatatgtttacattgttcttctgtttccaagctaaatatatagtattttatttgtagtgtttatttttttttaaaaaaaaattgatatttgtagtgtttcaaaagatacaaaagttttaataaagatatataattatttatatttatatggatataggacatacattttccttcaatatttctttgaaatccaacatattattattagttatctgattgaattgataggattcttttaatttggtcagcactagactttgaagacaatattcacgtgggactcttgttgacttattagtattttatcaattgtagaatcaaatctcttcagcttaattcttaaaagttttcatctctatctcaaatcctaatatagttagtggatatgtctttatcttcaagactcttcgatatgttttctctttcaaatttatctagtcacacacaaacatgataaatattgctacaaattgtatcgatgagttatagattgacgccattactatagcaactaccacaaatattgcatgaggcatgataaacttgaatacttgtacatgtctaacaaaaagcattttccattactagctagatagaccacacaccaaggcatatttatagatatttaattaatcatttattagtcttattg

SEQ ID NO: 168743 - DNA, 1321 bp, Cannabis sativa
  modified_base (1267)..(1270): a, c, t, g, unknown or other
ctctctctctctctctccttgtttggccaccatcaaagaaccaaaaaaacaagatttttcctttcaatttcaaaccagaaaactaaggattttagccagaatttctatagataaagagaaggatagatcaaggtaagcttctctccccttttctctttgaatttcaagaagaaaattttgatttttattgcttgattttgagtttaggttgttgtttggtttggttgtgtttagaattgttttctaaagttactttattgttgcttgagtgattctaagttggatttgaagcttcttgttgagaaagacctaagcttgagcatttaagctcaaacttaggtcattcatggcagatttgattccacggagtttttcttgcaatttatagttgtgttatgtttgttgtggattaattaggtggcctagagagtttggtgcagtttggggtaattttgaacatgtagtgaagtttttagagtttttgttgagaaacggttaaccggttctgtagaaccaattaattgtttctccagggaggaccctaggatctggtttactattttggaaatccagtttatcagttttagcagttttaggagcctagtttttcatattttatcaatatttagggtattgccacgctttatgtcaataggaaagcttctagttttaaatttaagtcctcaaaaagtgatttagcgtatcacttatcagttttacgtatgtgtgacttaagggcctgtaaatcgtcgagcagtagtttccactcaggttgatcgatacacctaaatttggaatcaatgtaagattagtataataatatcatatgtgattacatgtttagcatgcatgtttatgaattcatgttagataacatgtcacaaatgacggtattagtgtatatagagttacacttaatactgacgaatatatgtttggcatagtactgattgatgctatcacgtcggtacgattagaatacaaagtatagacttatattatggtcaatagtactattgtacgagcgttctagactcaatacgcgtgggacgcgggatagggctataattaaatgtatgggcacctatttataattcatgttatgttatattacaattatacttttcttattgagtctgtcgactcacagatattgattgtatgtgtaggtaaaggcaaggcaaaagctgaatagtaatgagctctagttaataaaaattgtatatatcaggacggttagacctaaatgttgggttttatgccctannnnaaactccatttcaatgtaatccgtattattcaatatcaataaagaaataga

SEQ ID NO: 168744 - DNA, 1081 bp, Cannabis sativa
aaacgataataaaaggtctattttctttttaatataatgactaatttattagtggaggactaacaatattgttaattttatttttaacatctttaattgaccaaaacattttataattatttcttttgataaaggagattcgaacttagaattttctctttgtgaagaaaaaagtgaaactattagactatgcctataaccacaaaatattttatatgattttctttctatttttactaatttatgaggctttctcattttgtgaagaaagtttgatgataaatattttttaaaaaatctcacattgtttaggaaccattttggatgttgtcctatatagtataaacaagtctatttgtttgatacaccatgatgtattgtattgtatagtattgtgttagattaaattgtattgtattagtattatttaatacaatactatgtttggtattggattgtactaataggttgtgtaaaattataaattcttcacaataaacttgaccccaaccctgaaattggcttaaaaacgaaccctgactaggactcagactctagaccttgaccccaaactcggatccagaccctggtcctagtcctagtctgggtccgggtccaggagccgagaatcgaatctaggttcgtggtccaggtcccagtttgtgtctaagtttaggtctgggttcgggtccaggattcagggtcaagtttgagttctggtttggggttcgagtttgggttcaggttcggggtccgggtacgtgtccaaattcaaggtcgggttggggtttggggtcaggatctaagggttgggttcgggtttgggtctggggtccaagtcagtgtctggggttcggggccaggtttgagttcaggtttgggagttagggtctagggttagggtgtgggtttggggtttggggtcgggtctggggtccgagtttgggtccaaagtttgggtctaggtctagggtccgggtccaacgtccaggtccggggtttggggtccaggtctgagttcgagtctgggttcggatttgggtctgggttcaaggtcaaggtctgggtcttgggtctgggt

SEQ ID NO: 168745 - DNA, 1194 bp, Cannabis sativa
ttttctggtgttattcagcccctagacctaacccccttctacttccctctcttttgtcttttgatttgcatcctcttcaaattggttttgattgatgttcaagcttggatttttaaggtgctaaagcttgactttcttgctagaggcttgaggtagtgttctattactttaattctaagttgttgttgctgaattgaagttgattaaacatgaaatttgtggtaaatgttcttgagatgcatgtgtgtagaagttagtgtgattttgatgtgctatgcttaattgtgttagaggattggagttgaatgctttgtgatgtgtttcggagagatttttgaggttaggttggtgctttaattctgtttttcagctgagaattttatgttgtgtttgagcttgaatttgtgggacttaactcaatgtttggagcctaacctttgtgttctttaatttgaactttgatggtctatattgttgaattttgatgtatggaatgtgtgtttctactctctgaataattattataaacctatttgatggtttgagagtttgattaggttttgggcatgaattggtgtgttttggcttgaattttcgagtaggaaaatggaggttttctgggtttggaactcaggggccgcggccctgcttttgggcgtcatggcccgcccctattttgtggcctgggattcgagcccaagtgtcgcggcacacccttcgtttttgggtagattcaaacgcgttattcgaatcctcataactttatgacgtttgggagttctatatatcattggaaagctcgttccgagctctatgtgaatatatgtgatttaaatgccaaatgttatattatgtgaaagtggagttagggattgactctatatttgaaaatcccagatattgtgactaggactaccgacacttggtcaagagcacccgaggatttggaatctacacgtttgcgggacatcaagtaagactgtagattgcacatagagttaagcgcggtggcgctcatgttttatattgtggttgtgattaattaagaacttggattagggttattaccctaaaatgagcagttatatggtccagggttattactctagtatttaaaagacgttgaatgttatgccatgttaaatatgttggaataaagaattatgcgtctaaggcataattaagttagactcg

SEQ ID NO: 168746 - DNA, 1222 bp, Cannabis sativa
  modified_base (1176)..(1182): a, c, t, g, unknown or other
tgttttaatgtgtgtattgtgggattattaatggtgggacaagcgaaagaggaggactttgggaggtttaaacggagggagcacaaagcacatggagacttgctaaggaacagttttgtctctataaactagtagacacaccgtgacagatattatttaagggcttaaaattattctggtattctaataattaccatatgtattttaaataatgaacattgattatatgacagaatttaataagcctttgggttttattattattgcttcgtacaggtcgttcaaatgttaggcaaaaggcaattatattgtgggaagtttcttcgatgtacatcttcaatttaaattgatcatcaaaatctcagagtcatcatctgatggctggcactatatacgcataaaacgcacctaggttgactgttggtgtcatattatcccacaatcattttattaattaggtgcacaaatatacatacgtatttagtcgacataaataattaattaatgccatttttgaatttgaaatgatttaatcatgcgagccacatttatgtgagatttcattcaaaaagttcataatgttttgatatgatacgcacacacctggcatgcatgctatgatttaatggtgctagctgctgctaatttcttggatctacagtactactactgcttttattttctaatatatttatacatgttgctagctacaaaatctacaaatgcattaccagctctgatattgtcacatgtatggtagtttgcgaagaaaaagacaaaagtcacttaattatattataaggtgcataatattttacgaaaaaataaattatgagaatgaacttgatatatgttgccaatcttttgttgcatgactgcatttaatgcactacataggcatctttttgaagtttgggcatggacagatcattagggaacaagacatacacatttatataagtgttatttgcgtcataacgtctataaatatttagtttattgcaattaatccccaattctaaaattttggtggtaaaactctctaaactcgtgttctgttagcagtttagtatttccatcaatttttagttgttaactgtcatggtagaatatctacgggtacacagtgtacacatgacacaattttattagcccacgtaaataaatatttaaaannnnnnnaaaaaaataaaaaaaattctttaaaaattaaaattaaaaa

SEQ ID NO: 168747 - DNA, 517 bp, Cannabis sativa
tgtatatgtatgtacaagcactatgtatttaatactatacacgtttcacttaattaatatatatatatggtctctcatttttatttcaaacattaattaatgtatttttcttcttacaaatcttcaaatttgaacgaataataaatgaacgatatatatttaacgatgcaaattaatagtactgaaccgcgatcagtaaattataatcatatcaagtgaaaaacaactttgatcaaataaatataacatctgaaataattatattaaaagtcaagggctagctagatatatgatccaattataggtcacccactttttgtggcactatatagcatgcagttggtattggtaattactatatatatattctttcacacacatatagatatatgggccagtttggcacagctgtgctgtggggatgtgctgtgggaaaaagcagctgtagcagaactgtggaaaaaagctgagctaatttttaaagtgctgtgagttgttaagattctattacaataat

SEQ ID NO: 168748 - DNA, 1110 bp, Cannabis sativa
aaataccgttgttatcttgtagttgttgaacatgatttgatctctttcgagcactagcagtggcatgaaagtatttgttatttttatcccccgagtgtagccaatattgctttgaacgttgcttccaatagagttcttgttgtgctaagatctcaaagtaattatttttttccacagcaaagttctcaacatcaaaatcgttcacagagttcttcaattcagcgagaagcttcttacttttgaacaatcgagctttgaagtttccagtcaggtggcggccccaattagccagctgagtgctacatatctcaagctttttcgttaaacattcagtctgatttgagtcccacacattagccacaatctgtttacaaaatggttctctattccaagcattttcgtaccgaaaaggagcataacgagcagtaccagtaggcatttcaggaagtaaataaatgggagagtgatcagaagatgagaaatcaagattagtgagtgatacctcattgtacacgtccaaccagctttgagtgaccatagctctgtcgagacgaatttcaaccgcccgagaagagcctctacttcgttcccaggtatatggataacctttgagatcaagatcaataagctgacagtcacgaacagcatcttgaaaaccagagattagagacgatggataaggccggcctcccttcttgtcttcgttacccagaatattattgaaatctccaataatacaccaaggtaaattagattcatttctcatatcacgcagcaaattccatgtttgatacctgaatgtgcgatttggctctccatatatccctgttaggcgccatgggttcataccaggaaggtgaataatcatgtcaatatggttatttgaaaacttgagtaattgggcttcagaagagacatgccaaagcatagctaaaccaccttttctaccaataacatcaattgaaaaacacccttgaaagcccaatttattcttgacattctcaataacatctcttttacataaagtttcactaagaaaaacaaacttgggtttcttttggacacatatgtcaattaagaattgttgggcccgtgggttcccaagcccac

SEQ ID NO: 168749 - DNA, 2330 bp, Cannabis sativa
aacatgacctgtcaaatcctggctagagcatgacctatcaaatcttagcaagaacatgacctactagatcctagtaggagcatggctggctagacctcatcctgcaggcattgtatggtcggccagcctgtatcctacaccctcatgacttgccaggcacataggtaggtgccaacaactctaaccaaacctttgcttgtaggacacttaggggtcatcattggcagatcccatattgtaggcaagatcagtaaagttagagagtactatgctcagatactccgtcacaagcccaaaagtgacattttgacaagtgaagaatgagactctaatcaaccaaagcttggagagcccacgatctctttcttagaaggagatgctgcccaagtcagtttcctgcacaacgaccccctggtcgttactacacaaatcgagaatatgactatggcaagatgcatggtggacagcggagcctcctctaacattcttttcaaatgaacatatggaaaggtggggctccaactcgttaatttgacaccttgcagtcaagtgatgtatggcttctttggccaaggcatcacatcaattaggtatctcaaattgccccttactgttggagaaaatccaaccatcagaactttgatggtacagtttgtcgtaatcgatgttctcttggctttcaatgccatgataggcaaatcaaccctatgcgacctgaaggcagaaacatccatctaccacatctgcttgatacttccaacaaggtatggggtaggatatttgagaggagaccaacaatctacccgtcactgttacaacttagccttgaccaaagccaagaaagtggagatgcatccgccagattaggagcatacaagcttcatgaaaaacttaagcctttactactataaatttgtgcattcaggttgaggaatgcatgggccacatatcagaggcttctgaacaaaatgttgaaagatcttattagtcgcaacatagaagtgtatgtggacgacatgcttgtcaagtccaaaagagttgggggcatgtggcagacctagacaaatgcttcaaaatcctccacggctacaatatgaagctcaacctccttaaatgttctttcaaagcaaacccagacaagatccaagcccttttggacatgaagtcacccataaccatcaacaaagtacaacgccaaacaggacgcattgttgcactaagcagatttttgttcaagtctacataaaaatgtgtatccttcatcaacattctcagagctaacaaaaaattcgagtggacaaaggaatgtgaaactacaatctaggagttaaagaaacgattggctcaaccacatgtgttgcctaaacccctagaaaatgaagagctaggcgtgtacctagcaatcgtagaatatgctatgagtgatgtcctcacaagagaagaaggcggtgtacaacaccctggaaactacatcaggaggagactaatcaacactgaaaatcagtacccactcatggagaagttgacctatagcttattcttggttactagaaagctaaggtcatacttctaggcacaccctctaaaggtgtacaccaatcaaccattgcggcaggctatacagaagcctgaagcattaggccaactgctcaagtgaaccactaagactcgggcaatataaggtcgcctgtcaaccaagcatgaatagcaaaggccaagctctaaccagcttcattgctaatcataaaagtatatctccccaaatctctcaaggttcgggagaaaagcaagagccaaagaagaagcgagaggaagagcaagacaacttaacccaagaggtgcattgaccacctgctcgatgcaagcatggcctctagggcacctggggggcgatggatgcacgaggaaccaaggtcagttttaaagcttctaataatgaggcttaacatgatgctctgaatattggcctcaggctagcacacgaagtgggagctgaccaccttgacatgcaccacaactctcaactagtcgtaggttatgtcctaagtgaatatacagctcaatacaagaagatgatgacctacttgagcttatatcaagactcattaagttagctcaacggctatactaaaaggaaagtccacaaagatgatacaatagccgacacactcgttcgactaaccagttgcaccttgacaaccaaggaaaacttggtacctgctctattatacaaagaactaagcctccctttttcaaaagaaataaacttgctagacaactaacatggatacacctacagcagcatgttggaattatatttatccaggatc

SEQ ID NO: 168750 - DNA, 864 bp, Cannabis sativa
tatttacaatttatacgctaagattcagattatattttcataaaaaaaaaattagttatgtggcgaattattagtttaggaggaataaaaatatgcacaatgataaggttattgttctagaaattgttgtttttggggttgtaatttttttttgctaactatcagagattagacatgtctaaaaatatttctcatttgagtgtgggagcttgccatcctcatctaatgcctcccctagttctgcttgggtgccacctgttaggaaaaatgtgaagatcaatgttgatactgtatttgatgtttctaatagaagatgtagtttggatatagtggttcgtgactccatatgtgaagttatggtctctgctgtttggcacattttgtgtactttttcttttaaaatagcgtaaatttcagctttaaaacatgcaaccatccaataccgcttattgggatttcaaaatgtggtttttcgaatctgattgtttgagtgtggttttgaagtttaataaccaagtttctttggcttcttcttggagtttagtcttagtggattttagacataatttttttggttttcactatgcaaatcttttttttttgctctaaaactattaatactgttgctcactctttggttaaatatgcttgacggaagttattaacaacgtgtggtggtctgtgtatctttcttatatccatgaactccttttacatcaaaaagaattaatacaatcaaccaacctcccctccaccttttctttaaactttttacttgaaaagtgatctttggggtttttctctctctctctcaaaaaaaaataaaaataataataatagataaataaataaattagtgtgtaa

SEQ ID NO: 168751 - DNA, 599 bp, Cannabis sativa
caaaaactgcattttttaattccttaattgtgtaagcagcagtaagaatctgaatgtgttgttcagttacacatgctccttttctgactaaattggtattcacaggcagtctgttcaccatcttagatcccaacaactcttggtagaattctaagaaagcttttgtgatgctctccgaatcttcatgcctaattccattcgcatctgctatagataggatattattgtaatgccttctctctctgatgctcgaatgaaataatgttgagttttcatcaccctctttgagccaatgtaatctagacttctgttgcaaaaaggaacaataatatttatgaattttaacaaattgttctcttacttcttattcttgaacttgcagctgcacattcaaaggctgctggtgtagtagactttgcacattctcgagatcttgccgtgcctttttctctgttgcttgaatgtccgaataatgttctttattcagttctttaaagaatactttcagagctttaagttttgacacaacttaaaacatctttgttcctgccatcttttgttcccaaatcctcttaacttccatatgataacttggatga

SEQ ID NO: 168752 - DNA, 981 bp, Cannabis sativa
tgaatttttcaaatatatctgcatatatatatacataatattcacatatatatactaagttaattttacgtgcaatgcatacataattaatatttagagtagcattttcattctcaatttgcatacaatttttttaaaaataaatattcaagaatattatgtgtgtgtgtatatatatatatatataaattttatagtgtaccttctatctttttttgtattacatccataagaattttttaatccattttattatttcatggtttgtgtgtgtatgctataatcagtggcggagggaacaacagtttttagtgacggtaaatttttttagtacaaataataaaaactataatttgaactgagaagaatataaattttagtataggataaaataaaaatatgtatgaattttataaaattgaaaaacgtaaattttatgaggacaaaagtaaaaatatataaagatataaataaaaaacttaatattagtatataaaaaaatatgtatataaaaaattaattaataaaaaaatgagagggggggagggggtaggggcaaatgacgagaacacatctttcctttgactccttatttaagatatcctttaaaatttaaagaaattaaaaaaaaaaattaacacattgatcgagaacaatttattgtatgtgtatatctcatttattttgtatgcatgtataatagaaatatttgaacactatacttttatgaatttttcaaaatattgcaagttatatatcttaaataactataatatacacgatcataaaaaaaatgaaactaaatttttttatggatatataatataagcgcttacccgaagaaattctaaatccatgttgtcgtagaagtctaaaccgtaaagaaacatggtgtaaatcttcatcatcaatattggttttgttgtaaatgcattgaagcttattttctatttcagattcaaaatgataagacaatcccaa

SEQ ID NO: 168753 - DNA, 626 bp, Cannabis sativa
tattatcgaaaaatttaactatctatacttaaaattcataatcaatttgtaacaaaatttagtaacaattcttattaattattctaagacattattacaaaatcaataatttataggccaaattgacaatttattcttaaataaattcattggtcatgactatataactttgataacttttttttttaaaaaaagatggtaagtctacaattaataattaaagtactaattttttatgtactgtttgaagtgttcttttccagctcagatgtctatttttatgtctctttggtctctttctttactttaatagataagcaaagaacaattgataatcacttataataatattattttgaaccttttctttttattatataaaatagaaattaaaattgtgttattccaatcaaattattactattttgctcttagtgtatttaattaagtacaaattcaattcacaaaaatatggattgaattggtaattactttagattataatttattttgctcttagtataaattttagaatagtaactaattgtgatacttttttaatataactagtggagtctcacgtgcttcgcacgtgtagctcatttaggcacaattattttaaaaaa

SEQ ID NO: 168754 - DNA, 705 bp, Cannabis sativa
taaaaataaaaaaaaattacaaaatcaagcaaatctctttctctccctctttggtgtgtttgacaagaagaaccagcaatttctcctcaaatcagaccaattcttgagggtttgagttgttgtaactcaagtgtgtggtgaggtaagcttcccccttctctgttcctttgaatttcaagttttaaggttaattttcatgcaaaaatctgagttagggttgatgtattaattgtttaggtttgtttctattttttggtgttagaaatatgttgtatgagtagtttttagctgttttggttgcctgtggttaagattagacaaggtttgagcttttgagctcaaactttattctttaatggtagatttgatttcaagagcttatatctattttattgcttggattatgttctttgtgacttaattaggtggtctggagagtttgatacaattcgagataaaattgagttgttaatgaagtttttagagtttttttacaggaaaccggttaaccggttcaggtagccctatagaactggttaaccgttcccttaggtagaatcctagaaaccggttatccattttatgaatcttatttaccagttctagtagttttggagccctagtttgtcgtgttttaacgatattttaggatattgccacactatccatcaataggaaaacttctagtttttattttaagtcccc

SEQ ID NO: 168755 - DNA, 793 bp, Cannabis sativa
tatatatattagagaaattatcccacgtggggacataaattcaaatacattattatatgacttgttctctcattatagccaatgatgtacctttcatggctgttgacatagtcagagttattagattagacccacatttgaaacatttttcttgtcattttctctttgcttttctagtttaaatcttcatttaatgcaggagtttcgttttattttatataaaaaaggaaaatatgtatatatataatttaattaggtagaatatatatttatataaaatatgatatttatatgtatataatattaatcttagtgtaatggttaagttagattggctagagatgaaattcaaatctcaccaatcacattttttttttgcctcttattttacaaaaactatatatatatataatatcctcttcacttgaaattttactatttgtgtgtagtatctttatcagtgtcatattattattagtgtaattaagtatcgggctctatatatggctctatatatttaaaaaaaatagcttttaaaaaatatgactaattaatcagaagataccacttataaaaaatgttggataccacttatatccagggccggccctaaaacaaagtgggtcataggcaaaaaaaaaatttttgggcccttatgttagaaaaaatatggtatttttcaaaattagtaaaaaaatttgtataattttagaaaaggaaaaaaaaatttgggcccctgggctgggtgggccctaggcacaggcctagctcgcctatgcccagggccgggcct

SEQ ID NO: 168756 - DNA, 878 bp, Cannabis sativa
gcagaataggtggagtagggtgcataccttttgaaagactactgttacattgctcgttggcattgataaagcttatgaagtcttgttgagcatcttctcgtctctagatttcccgtaatgagcttcgaggagacagtggtggttgaaaaagatcctcctgatcctgaatcgattccaatctccttctcccttacatctctccgatttcatcttcttcactttcagtcagttcaagcggctctatatcagctatatcttccattgtactgacttgcgattcactcagactaggtttggattccttcttcctcgattttttggtctcagatttcaattttcccccctttttgaccttgttttcgccatagctttaacaaaagctgcaagagcagaaaacgagggaaaataactataaataacaagattgactggccagcaactgtaattgctattcattgaactatgaggattaattccatctgcagaaagaccaaggcaaagatttctaggatccgaaaataattttcgatacatatcgtcaattttcttccaagatggagaatccgctggatgacgcaattttccatccttaattctctcttcgtcatgccgtacaagactctttgaatgttctggattgtgaaataattgcttaaacctagggatgggggaatataccacaacaattttgcaggagtgccaattttaagctccttcccattatcattcaacttccaacgagagtacttacacacagggcaattactagcctcagcaaactcattcctaaacaaaatgcaattatttgggcatgcatgtatcttttcttactccatgcccagtgatcgcaataccttcttcgcctcataagtactact

SEQ ID NO: 168757 - DNA, 785 bp, Cannabis sativa
cataatttgtcggcacctacaaactaacttgtataaaaatgtacatatacatatatatacacatacttaaaataaaattcttttaacatttataattatattacacatataattttgataaaaaaaaataacaataaaaatattttatcttataattttattataatcgtatttttttctagctattaaatgtcaattcaaaaacacataacgacatattattgaattatgtattgaataaactaaaaaaatatgtcgctacatgattttaagctcacacttaaagagtttaattggtacctaataactaaaatataatacgattgcaacaaaattataaaataatgtacttttactatcacttttttaaataggatcatatatgtaacaattacaaatattaaacagatttcgcttcaaatatcattatattatatcacaaatacagtatacatatatatttatgaattttttttttaaaaattccaaaatacattaacacagaaattttttatttttactctttgaattttttatttataaaactatcttttcagtcaaataaaaaattattttttaatttatttatagttgtattatagttgttatgatatttttttttttatatatatatagtttaattatagttgatttatattacttgtcttgagttcatttctctttgtttttagttatttttaatttttgttgaactaggtatatttttataattttaaaaatttataaatacatttttataattaaaaattttataaatatatttt

SEQ ID NO: 168758 - DNA, 1566 bp, Cannabis sativa
ttctactcaattaatgacttctgtatttggtttagttattgatgattgtagaactttattatcctctctttctgatgtttatttacgttttgttagacgatcagcaaatcgtgccgcccactatgttgctaggcatgcacgatcgctaactggtcgtagcattctggggtcttctatccccgtgatcttcagattattttgtattcagaatgctaaattaatgaagttgcaatttcattgtcaaaaaaaaaaaaaatctaaatcacttacagaattggcgttatggtgagatatgtatagcagagttgttgttaccctcttaaagtctattattggtaactttgcatcacatgaaatagaagtaaaagtgatttttcataatttgaaatgggatatccaaacttgcagttgccaatcgcacaaatagaggcagatgtcttgatgatttcaaatgctttgagagctcatttgtatgtaatttcttcttttaaaaatttaattgtaaatatttgtaatcttatatcttcttgttgttgttcatgtgaagcatacaactaatatggttgtgtaaatatgtaaatatcctgatattgtatatgatttacatcaagttattataacaaagtattttctttgaaaaaaaaaataaatttgtagaagctcctgctttattgttttggtaggataaaaatgggtttaatgtgttttatttttagacattaaaattttattgtctatttttttagggcattattatatgctacattatcatatagcataaacacatgatagcatattaaattttatttattaaatttaaatatatatttgatttattaaatttattaatatgtatttctttattcttttatgtaaatatttttcagtaataagtttgaatttatattttttatgatgtatgatttaaggactattatagctgttttcagatcttaaaaatgtgttaataaaattatttgaaattcaggatgaaatttgagattaatattgagatttgtaaaggataatagtggtgactataagagatacggtgatgacaacatgtaagatattgtgataacaatcggtgagatatgctgatgacaatgggtaagataaagtcaaggttggtcctgaaatttagtagacataggaaaaaaatatttttgaacccttatttagagtaaaatattatatttttcaaaattagtaaaaaaaaaatatgtacttttaaaagaggacaaaatttttttggccccaatgctaggtgggccctaggcacaggcctaacccatctatgctcagggtcgagcatggatgaggtgataataacgggagatacaatgatgataacaactttaaataattgaaatatatatataaaaaatacattataaaaaagaatgtttgtttaaataatgataatactttaatttttttctccctccactctatttatttattttttaaaaaatgtaatttaaaactctattatacgttaatgactcgtttggaacgtcgtattaggtagtattgtattgtattgtattgaattggattatatat

SEQ ID NO: 168759 - DNA, 787 bp, Cannabis sativa
agtttttaattacaaacatgccctatgagtagggatgcacgtttcgtccttgggaatagtcttcttgagggtgtttcccatctaaatggaaacgaggcggaaacgaggattattttggagataattacattaaaaaactattttttataaaaaaaaaaattacattaatttttttatattttttacggggttttataaaagtaacacgaaaaataacaaattaataaaagtacaacataaaaatatatcaaaatgtcatatttttaacaaataaaatcatgaaaatcgtaaaattgtttaaaaattcatataatcgtattttttgtaatttttgtgtatttgtgaaataatctcattattttttatccctgaatgttaaaaggaacgatgccggggatgacactccctaccctgacggggaccatttaatattttataattttatatttttttagtatattagtatcttttttataaaatttaacttgtgttttagataataattagtatattgaataataattaaagtgtaatatttaatttttatgctgtttaatatttttatatatttaaatttttgttataaattttatttttatattaggggtgtctacgcaccgttctcgtctttattaggggattctccgcctatctccgatagaaaataatagagaatagggatgagaggagcactctctactaattttccatcccatgtacatccctacctttgacgctcattaggaaagtgttttttttttctccctaaattattattattattatt

SEQ ID NO: 168760 - DNA, 2250 bp, Cannabis sativa
atattatgaagaaagtgcagtaggtttttctctgcaaatgaaataaactgatttatttcaattggtcactgactcactggtgctatgttcttctgagtttcccactctcactttcaaatcatatatttttttttattaatttctttgcaatccactttaaagatcacaaagtttggattggactaacattaaaccaaattatatgttgttctatttagtatacaacattatttactgggtacttgtatagttgtatagagaaatgttaaaaggtatttatggtgcttagtatttttgtgaggaataatattattttaaagggtgtttggtatgaggtttagacttgagattagaatataaaatttaaattaaatttcaatgacaagtagtttgtatttttaagtaggtcttactttttaaattaaaatgttaataatgttaattgcttcaatatggattcacattttctctaagttactccctctaactctatttttttttaactcaaactcacataacaaacacccattaggtggggtttgattggaatgaatgaaaacatagttagaataagaatgatattctaatactttaaaataaaatcaaataaaggaatagaataaaagttgtttcctccaactaaatgctactttagtgtaattcaatattagatcctatttattttaaattaataaaattataaagaatcgctaattaattatagaacgacatcttatagtagtgctaaataaaaacaaggactgtcccttatcataccttatatggtatgtaaaagactaattggagaatcgaacccagcactcaagcttccccatatttacatacttcatacttacaacttttactgtaactttttttatgatatttattaaattaaaatacatatgttatattaattttttgtgtatatatattttaattttttgggagtttccaaaatggtgaggcctaagccccggctgccccactctttggccgatcctgtatatgaggagctcttaatatatataaacaattccacatcttttatatcaatatgtattttattcatattattatatatgaaatgttagtcttgtaaaatatagttcatctaataaaaaatatgctctaacactaaattaaagtaattttaacaattaaataagcactacactgacaagaaattcagttaccagagtaactgtttttaaacacataaactaaactagttttttgttttgaaacaaaactagtttttaataacaatcaaacgagtcttagaacaatcactaatgtatcagacatataaactaaattagtttttaataatataaacctcatgtatcattttttaactttttatttttatttttacagtttgagttactccgataatttctatgtagattgttatgtggattaaggttgcaatttaaattgctccgttagagcatctccaatggtaaaaaaattaagggatgcttgctgaggtggatagatgaagtggtaaaatattgagatgttatatcattagagggaaaagaatatcattctaggaaatatgtgtgaatgctatacagtagcattgatgctatcattatttttttaataaaaaattattgttgctaaaaaattaaataataatgtgcgagatcataattatgatatttttgaagagtgttatactattagagtaattttagaagttagagtacgaaaaataatgtggaagagagataaaataaaatattatatttttagatgatgagaagatttttagatgctcttaattgctatgtgggttgctatatgaatttttataaaaataaaaaaaatgctttagaatataaaaaataaaaaattcattttttaaaattacctattcttaccaaaaaaaattcaaaaacaaactttctaacgtaaaaatacacaaccactcctcaagcggccatataaagaaaattggagtgtgtatttggggtgatggggtctaatcccagcaatataactcaacatgtaatttaaagatgcttcttttttgatagggttgtgcataaatcatcaaatttaatgataaccgaccgatccaatgacaacataccgtcaaatattgaatatctaattgtgatcagatcagattggatgctattttttaaatattcaattggatcgaattggatgttggatggggtgtccaaaaatccaatacattcaacatccaatcaaattaattagtatttttattta

SEQ ID NO: 168761 - DNA, 500 bp, Cannabis sativa
agagagagagagagaagattgaaatcggggaagaagaacctttttaattagggtcaagttttaccagcgagaaaactcgctggtaaaggttttaaaaaataaaataaaatgaaacatatcgtttcatttaaagtgaaaacttttgtcgacgagcttaattgcaccgacaaaactgtttttccacctacttttacgtgcatgtcctcaccgagcgagaattgacctgctaactttttaggacttttgctggcgcataactccatcaataaaagttaaatctattgtcaaagattcgcgactttcggctcttgggtatcctctcttttgcggcaaagttaggtagatttgcttgcataagtctcttttaccagcgagttaattttctggtaaaagtgtgacgttttgggaataaaagtaggaatggcaaatggggcgggtctgccccgccccgcttctgacccgccccgccccgacaagcttttgccccgccccgccccgcc

SEQ ID NO: 168762 - DNA, 998 bp, Cannabis sativa
  modified_base (957)..(963): a, c, t, g, unknown or other
aaagtcactctctctccttctctctctctttcttggccaaactggaacccaaagaaaaaccaaaaaacttcagaccaaactcaatcattccaatagaattttcaacaagaatttggaagggaattgtttagaaagaccaaggtaaaccctagttctcttctctatttgtttttcaaggttaaagcttttttttgtatgaatttttaagtttctgtttctgctagggtttgaggttgatagaatctgttcttgagctgattttaggtttgtttgtggtgattttatctgttggttgtagttgtggtttgagttgagcaagtttgagttttagagctcaaagcttgctcaacaatatagtaaattttgattcagggatttgatgatgttgtttttgattggattatgtttattatgcctttattaggtgttctgaaaggtttgttaaaatttggggtaaaattaaaggagaaaacttgaggtttgtgttttcagctatgaaatagtctaccatttgtgattcatttgaggattcgagtaaccagttggggtgatttttgggaactcctattttcatgtttccttgatatttaaggtatttctacgctatttatcgagagccaaacttctagtttggagcttaagtccccaaaagtgttttagcgaggcacttcctaattttatgtgattgtgacataaggcctttaatcgttaagcaacaatttttacttaggttgaccgacacacctgattggagagttcagataagattagtataacacatgcacatatgcacatgtttagcgtacatatatatgttttctaattagatgacatatcactaagagcgatattgatgcacattgtgtttcaccttgtttaccgagtttttcggcatccgaataattctagagcttaagaaagtaatgaatgtgtaaatatgcaataatgaacaaatgnnnnnnnacgtggttcatgcgttaactatctttagtccacga

SEQ ID NO: 168763 - DNA, 840 bp, Cannabis sativa
atcaacaagctcgtacggtatatataacatattattatatatcattttttatttatttgcaatcttgtttgcatattctttgacttattgggtttctataaatgtatgaaagaaaataaaataaataattatttggaatattattatatatagtgggaccatacatggaaattgatttattggtttagagtgggatcgatcgtcactgtgtaacttaatttcgttgttaaaaaaaaaataaaaaataaattaggaagtgtaatttggaaagcgaaagacattaatagttgagcttgttaatttagttgataatgatttcaccaagaaattaagctgcaaagtggttttcaaataatataattgaataataatggtgctttagtggtctagtggtacaccctctaatttttaattatattttaattatatagttatagttgtttaacacattcaaaaaattctgttgaaactatctagtgttgtacgtatataaattaaaaaaaaaaaaatcaaacgtgctaacaaaaaattttaatttttggcgtattaaaattttcatcaataaaactggttagacttgtttgactggtgtgagtgtccttataatttcatgataaaggagaaattgctaaccatttataaaacatcactctcttgtgggaatcttaaaagtaaaatgttaaaggtgaatttggtatatagtatttggatatattttgcatcaacgatctgttagattatgaataattagttatatggaggaagagatagcgaaaatgcaattttttgctattatgaaatgtttatgcagtaagggttgatcaactgagtattcaaagt

SEQ ID NO: 168764 - DNA, 792 bp, Cannabis sativa
tcattagagataataatggcagcttgttggaggcataatcgatgcaaaaatcaggtgctccgcatcctgaagttgtagaaggtatcaatctcaaagaagctctaagttggttaaagcaacagtcgtgtaggaaggtggtgctcgaaactgattatttggtattggttcaagcaatttgtcatcgcttgactgctggcagtgcaccaatgctctctaactttgggaggattgttgaggattctaagagttgatgtagactcttcctttagtttctttgtgttttgtaaaataatctgccaataaggtagctcattgtttagcaaggtcatcttattttatctctaatcgtatgttttataggagttatgttccaatattaatgatgcttattacatagaaaatataaattgacatttttttaaaaaaaatacctccataaggtaaagacaatatttatactttttatgtgattttaattaccaaaataccacttacactatcatcacttacacaatcagacgatggttgtaaggtggttgctgcgtgattgcgcggtggttgcatcagacaaagatttcaattagacgatggttgcagggtggttgctaggtggttggccgaatgttgcatcatacgaaggtttcaatcagacgaaagtttctgggtggttactgggtaattggcggacagttgtatcagacgaaggtttcaatcagatgaaataactattagcaaaatgtttaggcaactgtaatgcaactgttgtgaaacattaaaaatcagatagtgttt

SEQ ID NO: 168765 - DNA, 740 bp, Cannabis sativa
ttgtttaaatttaaagtattttttttgttttattaattggacaggtaaatttatttttaaaaaatatgtttattcaagtttctttttattttttaaaatgagaatcaaaatttcaaaaataaaaataattcatgtttgactcataattgtatcaactaaatgagaactttaaatctattaaaagaaagtgaatgagagctctaaatggtgtagaaatactataaaggatgtttagtatgaggagtttaaaataatttaatttattggaatattttagcgatgaatataattgtctgtaaacataaaactgtatttattatgaatgagaatatttagttagtgttatacttaatttttagagcaataaattattagctcgagttatataacatgtatcgtatatttgtctattaaataataactaagagtcgatgtgtacgtttaggtagtcaactcgtacttcgtgcaccaacttgaggccagtgattgggacttcatattcaacctcattgttagagaccttgaagtcaaatttgattgccctatgcagttgttgcccctaggtttaatgagggcaatgcctgcaatgaatagttgattagtgcaatttccatcaacatgtaattttcatgtcgattcttcaggtttctgttgctgctcttgctcttgcttcttctttggctcttgcttttctcccaaatcttgagagatttcaagagatatgcttgtacattcagcca

SEQ ID NO: 168766 - DNA, 999 bp, Cannabis sativa
  modified_base (966)..(971): a, c, t, g, unknown or other
cgtatgcattgcaagtttggtttcttgagtgttgtccatacgtcattgggaaacttcctttgtattcaagcattgtcattcctaggcttcttaactggccaaaaattccaaagcttaaagtatctcagttgaaaatggacaatgtcaactacatcatcttcactcgacctttaaaggaggtatatgtgtgttgttttacttttatttttttgttgtttaagtgttattttttatttttttataaattgtatgtttattcactattattccttttttgttacagttataacttgaaaatatttctccaacttctgttgagagatctagttagaatttgattgattattttttgggtgacacgactccttcctttattaaggttaaaggtaaaggcaatcgtgaagtcacttctaaatctatatgcccagtgcttttgtgaaaggttatcatgttggtctattctcatctacggctcatgatcatatcactcgtattgagtacgaggatttgaagaaagatgtgtcccttgttcttagccagcagcagattattatgtctgcttttgctgatttgaacagaaagatggatattcttctcaaggtatttttttttgtttctttttttaatgtagttgatgtgtagtttttgtatagttttttcatattgtgtacgtttatattcaaatttccattattttttctagtcttcccgtgctgcttctagccatcaatcgatccaaacagatgatgtggtttcctcttcaaaaaatgacgacgatgttgttggtgatttcaaaaatgaggatgatgaagaattcgattctaggaagatgatcagcctgaagataatgatgttaaagatgaagatgatgttgatgataatggcgatgatagctctggggacggtggtccagatgatgatgaggatggtggtggtggagatgattgtgttgggctttgtgccctnnnnnnaactctatttcaatgtaatcttttctat

SEQ ID NO: 168767 - DNA, 925 bp, Cannabis sativa
ccccacaaacaatccacggacgtcaatgaaggacgttccaggcgtcctctttagtagcaaatgtgaaatgcagaatgccattgtcatcttccttccaactccaacccttgaaggaggaccaagctttctttaacgtacccgcaattgttattctaccgagtttgcctttgcatataactttacccaacagaactttccccagtggttcctgggtatctatttctcttgggtccaacctataagttagatcgtccgttatgacttgaatggtttcctcgaaaaggtgactaagactgttctctgccatcgtgaaagaggcagtgaaaaacgaagaagctgttaaaaatagttgttgttgtccaaagttaccaacagtaaacttcggtaatcttcctatgaagaaaagctcctagagagcatcgtatattgttagctattcctggtttctcttcttcgtctgcttcccctgctcttggggtcttttttttctaatgtttcttttcttttgattcactgttatttgtgtttttagctactgtttggcttgttgttggttgtgtattgttccctgttggactggttccctttagttaatgaattgggtgctttgcaccatccttccaccaaaaaaaagagtaatttcttaaaatattatcctaaatataatgtttgttacttataaaaaaatatgtataatattttttaaagtaaacatttttatttttatttttattttgagaaaaccttcctatagagcaaaaaataaaaatatatattaggtaatacattaaaaatattttaaaatgttatattcttatcttaaataaaaaaaaaggttttttttatttttacacttcaaaacaatttttttgtattttttacgaaattccacatagaaatccttaaagcaactaacggagcaacc

SEQ ID NO: 168768 - DNA, 841 bp, Cannabis sativa
  modified_base (472)..(478): a, c, t, g, unknown or other
  modified_base (682)..(693): a, c, t, g, unknown or other
aactgagctatccccgcaacttatgaagtagtgaattaaaataatatactaccattatacaatattaccatatttcaaattaatgttttttcaagtgacacttttttataataaaaatgctttcattcatcaaaaaggatccccaaatatagcattcactacgggtgttttgggtgcccgcagtatgagttttggctattttttaagttaaattgtacatgtgatttttacaatttcttaaatcgcgaacactgcaagattttaaaattacaaaaatatggtatagtatggatgatgcagcgtgaataatttatactattattaaataaattagagatatattaaaatttaccaatacaataaaatacacacattcttaaagtttcaacaatactccaatttataatagagatagagcaatttgcgacataaatacttaaatttaactcccagttgtaaataaatacttaannnnnnnttttggcgataataatacctaaattataaatttggaactttacctatttaaataaattgtcacatggcaaatcctgattggtccaagtcattaaatttttattattaaaaaaaattagtttaaatataccagtaagaaaatgacgtagatataatgtcttaacatttaacggttaagtgcctacagagttttagaaatataacnnnnnnnnnnnnactgccaaaaattaaacttaggtatttatttgcaactgagagttaaatttaggtatttatgccgcaaattactcataggtaggggtgttcatcaaactgctcaaaccgcccgcaccgcaccacaccgcaaaaaagatgcggtttgaaa

SEQ ID NO: 168769 - DNA, 683 bp, Cannabis sativa
  modified_base (566)..(599): a, c, t, g, unknown or other
  modified_base (647)..(647): a, c, t, g, unknown or other
aatttaagcatgatcttctttctgttacctccttacttgagtctgacatgtttattcacattctatttgtgtaccaaaaaccgatcttggcgacatggacattaatgtttgacatgtggcaagaaagaaaacatcccagagttgaatagtcccgagtcatagcaatcaacctagaggggtccctagccctatgcacaggttaacttcgagaactctggaatggatttgaatcacgccaagctgttttcaattcaccatcttttagtattcttaatcaacaattccaaaagaatcaagtccaaggcatggaaactgaaaatatatgactacaccccaaaaatcaactcggtgcctagggttttcacctagtgcccaagttgacttcccaactagggtttcagttttaggattcatcttagtgaaaatggttcaaactttatactttgacatgaataagacctgtcacaaacatatttgaggcaccaaaattagaatcagagcacttttatttttgatcacttgaggcagcaagcgccccgagcactgttgagttttatgccctaaannnnnnnnnnnnnnnnnnnnnnnnnnnnnnnnnntaataaagatcagaaataatatttaatgttgtatggttcacatgattnatttcatgattatatatatacataatgtatgaattc

SEQ ID NO: 168770 - DNA, 1001 bp, Cannabis sativa
gaagctgatattgagacacatcaacacctcttgtaccttcgttagtcaaattagagcttaagtttcttcttggttgggccatttttaatggcctttgtctctggttgagtggtgggcctggtgtgttaatttccagactggttcggtcaactcaattactaattcaaccatctcaggcactatatattttgtttggtgcaatagtaacaaatgtgtgtttttgagcttatttgtaattcagccaagatgattagttcagctatcaaattaataatcaaagctaagagacaagatctttaatattgtaacagccatgtaactgttgttggtttttgttttgggggttgcagttttaagcagctgcctttgctttgtaatttgttttcaatagaaagtactcaaaataaaatatatgattttttttttcattattattcatccaaaaatatgacaacatcatctcaatgttgttaaggctttagttagtacaccaaaagatgctcttctctcaccctaagaacacttctataactactacagatttcttctatgtgcaacttctaatcatggggagatcctatccttcaaattcaactttttccgggtttggccgaagctgaggtttcttctttctttaccttgtttaaacgaaaagctatttacattcaaaaaccacattataattcttgtgggaataactttcacttgaccataggctttccctgtgtctttgtaaattgaacgtcgccattaagaactgaaccaatgaacatctctacttcctctgtagtcatctcacccttgaatactgcaaacttcccctttcggggtttgtatgctagtaagagcttatctgatgatttaaatcctgatttgtcgagcgcagttaagaatgatgattgtttagaggcatctaataggctgtaggaaacagaatccctcgagccaagggcggaactgggtcgccttaatagcgttttctgggaaacctgagaacaaaa

SEQ ID NO: 168771 - DNA, 942 bp, Cannabis sativa
aagggtactttatgaagtactagggtttgtgtggttacgatgttatgaaatggatcaagcgtgttattatgtgatgagttgtaagtgaatacattttgctatagtgtgactgaatgaatgttatattgcttatagaattagtcactttccttgcaaaacctcagtaactcacgggaagtaagagtatgtgttcataggaatgtaagattggagtgttttatgaagcattgagaatttatggctatgtattgattaaatattcatttagtataatgacaaagatgttgtggttttcttatattgcataacatatatgcaattgtgtaaatgttaaaattatatagatgtgtatgatggactgcgtgaatcaccaatatatatgttatattgagatctgaatatctacgtttacaatgcttttgatttaattacttttcttgctgagtctttgtaactcacgggtgcttcatggtgcaggtaggaaagttagctatgttcagccatgaatcagaggtctcccggcaatgtacatatcgactgtggtgtcttagcttccgggaagcaagatcaacatcttttctttatgtgtgaaagtgaaagtgtaactttacttttgtaatatcagttttgcaatttgttataaggatatttttataaacagggaatccccatattttagtggtactttataaagaaattttattccaatttaatcaaaaagtttttaattaaaccacacttttcataaactaacagattagttagaaataagtttataagagcacacacacatggcgtccgtgagagtcagggtgatacaaaaaccatggtatatctatattagttatattaaaatctttatatatatattttatttgtggtatataatttagttgtatagtatattatatatatttatatatctatatgtatgttaacgta

SEQ ID NO: 168772 - DNA, 745 bp, Cannabis sativa
tatttggagtgtcaaatagcttcccttgccataggttgtcccagtgttgttttctcttgttgggaggcaaatcatcttgctcatagtttgaccatgtacacactcaattgtgttgttagtgcctgttggaatgggaatgagagtattcctagtgctaattctgctctcagggtgatagacttgcctattcttgtgtagtctctttagttgtaatgaagattgtattttttagaagaaaaataaataaaaaattgctccctgtatgtgaaagggtgcttttacaattaatgtacttaagaaaatagtgtactgatgtatcacttactggtatttaaaaagatatattcttttatagtcacgtatattataattatttaaggtattttttaaaaaaattgagaaattaaaaataatttacaatataaaagatacttttcatacattttatttaacatttgtataaaataaaaaaaaacgtgcaacagtcaacttgaactatatttttaaagtattaaattttttcgaatttcttaaaattatataatgtattttaaataactacaaatataagaatataacaaaaattgaacaaaaaagaattctagataccaaaaacaaataaagaatagtgtagaattttctttttcttttttttttttatgaaatagtaaaatataaagtcaaactctattgtttgtctgccacttcaaaaagactagacgaactaattgtgctttaaaatcat

SEQ ID NO: 168773 - DNA, 856 bp, Cannabis sativa
tatcaggatctggctctaataggtttgaatagtcaggagcacaaaattaatgagaactactcgacatgcaaatgatagatttctagagctctaggtcttaattctagcagtcatcttctggaccaaatctgttgagattctcttggcataaatcggtataccaaaatatctaaatggtgtatcatgcatgctagaactagacatatccaagactctattaatctcactttcttgcatcctgctgcaataaatggctatttttgttacatttggttgtaaactagatgtaatagaaaagagcttcagtctctgcaacatgaagtagatactcttaaaatcacttttacaaaataacaatacatcatcaccaaagatattgagatggttaagtttcagatcaccacatccttcatggaaattaaattctcttttctccccaaccgtcttcctcattatgcttagatactccatccccagaataaaaagtaagggggacatgggatccccttgtctcatcccctttttacttcaaaacatccatgcatagatccattgaacataagagagaaccttggagttgtaacacatttcaagatgaggttaatgaatttagttggaaagttaaaagcatgcagctagcaactcttctaaaaaacctcattccaaggtatcatacactttttgcaagtcaagttttatcatgcaattaggctttgttgatttccttccctaattcctaattaaatcttagcatatcattatattatgaacaatatatttgtaacgtccccgcttcaagcttccattgggtccttacacccacggactcatggttcttatacacgagtacgccact

SEQ ID NO: 168774 - DNA, 640 bp, Cannabis sativa
atagaggttctactgtatatcaagtgagaaaaaaataataataaagtaacagtaatattggttcaaattaaaaattaataaatttttttaattattaatattattttatttttaaaaaataaatatataattaaatattattataatatgtataaagttttaattgtatacaagcagtcctatagtaagagtatacaccttatatcataataaccataggatttaaaatcaatggtcaagaaaagttccctaccggtaggaaacttttactaggccctaccataatcttgccctatatatatatattgataggtaacctttgtaaacttaaataaaaaaagtttgtcggtttgtcgttttctttctagtcttttccatttccatgagacgtgcatctaatatatggaatggacaggaaatgaaacggtcatcatatatatggtcctacccaaccaataattacaagagcaggttaattagtctcatgcataagttttcatttttcttattgttttgtttatacatattttaaagtaaggtgttcacaaagtatccgatccaatctaatccgcacgatctaatccaattcaatctgtaaaatgtggatatccgcacttgtgcggattggatgttatttgac

SEQ ID NO: 168775 - DNA, 744 bp, Cannabis sativa
  modified_base (658)..(678): a, c, t, g, unknown or other
gaaattatatagataatgagtttaaaaaaatcctgttgttgttgtttgcaatcttggttttgtgtgtttgaattcttactggtgtgaatgtgattcttaatgctttctttatgatttctttatgctttcttgattaatcttcactgcagattgtgccttgtttgactctgataccactgtaggattttattccctatataccctacacacagcaatagagtaatcagaaaactaaggccaaattggaccttttacctcagtcaaagtaattattgactcccacaaataaagccacaaacgacaacccctttatcaagactacaggtcgtttatgattaaacactagaaaccctaaaacacattacacacacatatataaatcctttttcattcaacacacacacggctacaaacttagaaccctagacgatctccttctccattcttctctgaagaaaacagagacaacaaccctagaaaatcaatccaagcccagatttgattaaaccccaggccgtggtgctctctcttcgtggttcttctctgaagaacacaaagaacaacccttttacaaacccagaaaataaaacctagcaaccctctctctaaatcgattctataccaagaaaaaaccaagcagaaaatagtataaacacannnnnnnnnnnnnnnnnnnnnaatggagagaacacaccaaaattttatagaggttcccctaaattgtgcgggtacgtcctcttcgag

SEQ ID NO: 168776 - DNA, 1522 bp, Cannabis sativa
agaaaatctcttttatttcaaagaaatttttgttgttcgtgacttcaatcgctaggaaagtgcctatgttgtatgtaaagaccgcttaattttagtatgagaattagtagataattagggtttaatttagaattaaatttttaattatgatttatgaatttatggagatatatttgaattctaggtgtgttatttatgttatatatgaaattttatgttattcatatattatgctcggtaacagtcgaacgcgacgtatggtagatagagtcacattttcttttggtatggtattttagaaatagcgggaaaatttaaataggcattgagaatatcgagaatattggtgattttagatttgaccaaaatgcccttaggtggcaaggttgcttcttggtaaagcaagggaaaaaatagtcttttgccttgggtggacttttgtcttttagtgacttaaaagattaaattaggtttatgaaatctgattttttatgttatattgtattaataaaacaattaagttattttattttattttaatcaaaattagaatttagatacaaaacactctcactcttcaagcttctctctctcgaaccttcttggaaccagcaaaaaaatcaagcttgattacttaattctcggtgttctagaagaatttgtaggattcagtccaaggtaaactcccatgctcccttctcttaaatttcttaattttcaagctaggttctaggcatgatttttggagttagggttctgtagttttaaaagatggttgattatgctttcagaggttgttttgaggttatttgagctggtttagaactaatttgagtgttgttactttgtttgagcaaagtttggactttagagctcaaacttttctcactcatggtgatttttaattatggggtttttattcagttcttttgtatggtttatgttccttgagacgtgaataggtactctggaaggtttggtttgatttggggtcgaattgggttgcttagaagagtttttgtagttcctgtactgaaccagttgactggttcagtttggacctataggaaccggtttacctgttcatcccctggtaaatcccacagaactagttttttggttgggaaccagcatgccggttggggcattttagggcaccctagattttcttatttttacgatatttagagtattgtcatgttatgcatcgataggaaaacttttagttttgattttaagtccccaaaaagttatttagcatgtcactcaccggttttacgaatattgtgacttaggggtctgtaaatcgtcgagcagcagttcaacttaggttgattggcacacctgaattcagaaacgaggtaagattagtataatgatatgcatatgtgatcacatgtttagtgtgcatgtttaaaaatcctgttagattacattgatagcggtatcaatatacgtagagttgtattgaataccgataaatgtatgtttggctcaagtactgattggtgctatcacatcg

SEQ ID NO: 168777 - DNA, 616 bp, Cannabis sativa
taaattgttctataaaatttatatgctatattaatgggcataaattaaaaacataaaaaggtaattttaagggtgtgaaaaatgtaagaatttctctatcagagaagtaattttgttgagctgcaaatctttgagaattgatattggcgaaaaactttgaggaaaggtggcctttggtatgtgaaaccttatctcaatttacggccttccaaagctccaaaagcaaaactatgtagaatagtatataaaatatatatgctatatcaattgtcatataataataataataataatgataaaagatgcggaaaatagtaaaaaaaatttcagttgcaaatttgtaagattggccaaaaactttctagtatggcctttggtatgtgaaagctttatatcaatttatggccttccaaacctccaaaagcaaaactatgtaagaacagtttataaaatctatatagtagggagacaaattaaaaaagataaaataaataaagaatgcggaaaatggtaataattttggcattgcttgcaatattaactgaacatttaaatccaataactcctccaaaaacacataataataattggtagatctctctctcttttttttttt

SEQ ID NO: 168778 - DNA, 574 bp, Cannabis sativa
tctctcttctgagactatgtttctatcttcttttgagattttctgaaacactttgctcctcaagacccccttttttctgagatcgttgtcgacgacatcatttgataaccctccaccatcttctgctaccgctcaagctcgggaaaagtctcaatccaacactcttcatcttctgtacatgttcccctttcatctcttttgcattttttcttctatttatacattgttggatttcaattttcttctcaaacatgatttcaacttctcatttgggttatattatatgtgtttttgctagtaataattaggggtgagcaaaaaatccaagaaactgaccaaaccgagtacaccgaccgtccgaacaccgaaaaaatcgacactgaaaaaactgcctcggttaaaattgccttaacatggtcggttttagtgtcaatggcaaaccgaccgattaaaccgagaactgatcgagcatatatattatatataatatatattatttttgtacatatttaatgtacaattttattaaactagttttacttatatcttttttatttaaagtctcaattattca

SEQ ID NO: 168779 - DNA, 602 bp, Cannabis sativa
tgcatgcaaaagccatgtcgtggcacctgggaccaactctcaggtccagaaaggaggcgggccgcggcatgctaaagaccatgccatggcacctgggttccaaacccagaaaccagcatgcaaaccttcgaaaattcagctcaaaacacaaccaaacccatccaaaacttaaccaaaactcccaaatcaacaaacacacctttaatcatcaatcaaggagttaaaaacaacatttcatgcataaaaatccagtaataaaccccaaaattcagatttcttaacaagcatgaaatcaagctctaaattaacaaaattcaagttcttgaactagagcttcaaaaccaacaactctaataatttctagcagcaaaataccaaatatggcatgaattctaacctagaaaaatactcaacaatctcatccaataatcaacaatctaatccacaacaacatcttacaattcacacccaaattcatcaaaattaactccaattttctaaacatgcaaactcaagaacaccatcactttatcatacttttgaaccatagaaaatcagcaagaaaactcaattaaaagctgtaaaaactacctcaaggtttt

SEQ ID NO: 168780 - DNA, 683 bp, Cannabis sativa
ccgatattaaaataattctataccgtaaagaaaaaacatgactctctactggcccaacgtctctttccactgcttccaaatacattatagatcaacgagaaaatcatacaaaatagcataattaattatatcgactcaaataaattttcacagtatacataatataaataatattttaaatcctataatttaaccctaattatttaataatccatattatcaatcttaggcggtctttacgcttacgtaccgaaccaccagactaacaccagaacactcaaaaaataactattttttcagtaagaacgtaagtatttaaaatttcaatcctgaaacaataacatacaaaattattaaaacaactgtaaaactacaaaataaaataacaaaataaaatcacaaaaaaaactatacatcaataattcttttgtcagtggggactaccataacatcacaaaagagaaccttcaccttgaaaatttttccttaccctaaatacattaaaaaaaataattcagaacaaccaaaaataactgttaaaaaatataaaaattaagtatataatactaaacaccgaataacacatacaaaaatccaaaacatatatttaacaaaatcagggagtaatgaacaaaatcccaaattgatatctgagattgaacatgcacaaaaaaaaaaaaaaa

SEQ ID NO: 168781 - DNA, 1079 bp, Cannabis sativa
  modified_base (807)..(815): a, c, t, g, unknown or other
  modified_base (914)..(921): a, c, t, g, unknown or other
  modified_base (975)..(978): a, c, t, g, unknown or other
tttttgcccctgaactatgacctatgtatatagtccctaaactgttcacagcattgtaaattggtcattttgtcaagttttgtcacacgtggcaaacaaaatgatgacataactgtttagcaagttgttacgttagttccatgtcaacgccacatgtgtaattaatttgaaaagaataattttaatttttttaaatttagttttacttaattttcctaataaccaattgatttttagttttaaaaaacataattttaatttttttttaatgttaaattatacacatggtgttgatatggcaattggctaagcatctatatctttattttgtttgtcatgtatgacaaaacttgaccgaagtaccaatttacaatacaatgaatactgaatcgttcaagaaccatttataataggctgaaaaatttagggggggacaataatgcataggctaaagttcggaaggcaaaaattctaaatgtaatgtaattcaaaataaaaataaaagataagacattgactttaaaacaaacaaacattctacttaaaaagtcttttattacacaataaattaagaaaaattgctagtcaactttgtaagtatagattaacgttaatatacaataattaaaaaactatggatagtttagaaactatatattgttgggctttgtgccctaaataaaacactatttcaatgtaatcttttctattcaactatcaataaagaaacaaatttattttcattacttaatcagtatgatttttggttcatgtgatcatttacatgtttatttgatttataaattnnnnnnnnnccttatcacattgatattcttgttaattgtgtcgtcaacatagtggaaagtaattaagattatgtgattaaatatattcctatgatttatcagtacacnnnnnnnnactgatatgataatctacaatgtagttaattgcacattggataagtgttatgtnnnntccagggcattggttaaagtaagcttgagttggatgcatggagtatgcatcggaagggactaatattgaacttggattagatatgataaacttactgtaat

SEQ ID NO: 168782 - DNA, 1305 bp, Cannabis sativa
  modified_base (91)..(93): a, c, t, g, unknown or other
  modified_base (1244)..(1278): a, c, t, g, unknown or other
tcctactttgtatttttaagggtgttatatcagatcacacctatatcgatttgaataatattaacccttggtattaatacaactaaaaggnnngtaggtcattacccgctatcaaagggctctactataacaaataatctgtgtgttctttttttttttttttttcattctgcttgtgtaacatgtggcaagcatcagatcttacgaccccgctgtcagttaatcacttttcaaggtcaacaatttagtgctttcattgagagcgtggatatcgtatctgatcaaatgccatgtttaatagagaagaaccccaatcgcaccatctacatcttcgggtctccctcaagatccaaagactatagatccaaatgctcaggttttagccacagctggaatcccgttgaacactgaagatatggaaaatctcgtcaccacaataggcgccacacgcgttgccactacagccggccaaactgatacaaacatctcgatggatctgaatagcaggcccttgtctctgagggaatacccaccattggtgcctcccattgaagggaggactaatgggcgacagccccgacgaacaacgaccggctcttatctccgatattatgttggagagacaggaccaagagttggcgagcctgtgattggggagccccatgtggacttaggagaggatctcgagttagccagactcagagaagctgtaggccaagctagcctaaccaaagaaccacgtgctgctaattgtgatgtattcgctcaatagagatgcaaattcctgagatggatggatgactaggagtacatccttcgatctcatcaagtagaattggattgccgcaacagagaggctagtaatttgataaggcgattcaactagagaaccgatagtaggggccaagatctcactagatatccacttcaaggatgacttattggtagatcagggagggcctatcaaaaaactgacaaacttggttcctcaagaacaaggaaagatctccccttgccagaaggaggacaaaccttgccttaaggtctaacaacgacaacaaccagatctcgacaaccagtggcatgaggggccgtccagggatctctagctcaacagtaacccccaccattcaacctttggccggttaaccacttgtaggagttcccttggccggccacaggggagcacttcctccccaaggggagcgaggtgcccagagatcaatctgttgggttttatgccnnnnnnnnnnnnnnnnnnnnnnnnnnnnnnnnnnnttattaataaagatcagaataacattt

SEQ ID NO: 168783 - DNA, 1145 bp, Cannabis sativa
gtaaaataatttccaacaatcctcacctatcttagtccttagagtattattggactaccatcgggcacccatcgggcctaatcaagctatcatccttaaccttaaatctaataatcagatcgggctagtatcgggccccatcagactagacgataaaaatgcagattaactagaacaaaccagacaacaaccatttaaacacaaaacaacataaaaatagcaacaatccacatatcaatctctaaaacaacaatctaaactaaatataagaaccaaaaataaaaataaaaaaatcacttacccattgatttttgttaaaaattgttgggtgcctcaaaaattgagtctcacacagaagtctctaacttccagcactttgtagtagctgggagaggttaatttacaactaaaaataaaattgtagtttcaattgttagagacgaggagagaaacggaggttgatattagcttcataatttacataatttattccgtaatatacacactagtcttgcatatttgcaatccattgagatgaattggccactagtttcgtaatttacgtaattcattccttaatcaaacagtccattataaaatttgacaatttgaaacttcaagcttggtatgtcaactataaaccaattttctagaaactgtaatgcaacaattataatttttgctaggcatctaatataaaaccttaaattaactaattacacccctatgtgatacaaataaacttaccacaattaagttttttctgtacgcgtcgtgtattgtaaattttgagccctgtcttttatatataataatattgtagtagcataattattatttaagagatttacaacataatagtaactatgaataaaaaatgtgtttaggcattgttaagtaaaaatttatcaatattttttttggcactaattaaaaaccacttgtacgttaatgatatattgtggagaagaaactattagaactctgtaaactaacgttaaatcaagaaatttaatatatgaaaaaatctaactatattataaatgtttttttagagagtcttgtgttggattttctatatgaaatactttaaaatatcaagtggcattcgttatagttacagttgttaggttttatgccctaaa

SEQ ID NO: 168784 - DNA, 812 bp, Cannabis sativa
gcttgagaatgttatagagtggaacttaaaaataaaagagctagtcatccactaatggtaattctggctgaagaaatcgagaaggaaatagaagatttggatccttgattcaagatgataacaaccaactcaagccaattgaagagttagaaacggtgattttagacccagacaatcccataaagtgtgtttataatgggaaaagtttgggaaaagaactaacatagcaattaagcacttttctgaaggccaatcaagatcactttagttggagccactcagacatggtcgggataaaccagaatgtgatttgccgtcacctcaatattgaccctaattatccagcaaaacgtcagaagcaacggccatttgatcccgagagaaaaaatgcgctaaaaaaagaggttgataaatcgttaaccaataactttatatgagaagccttctatccatcatggatctctaatccagtcctcgttccaaaaccaaatggcagaaggagaacttgtatagatctctcagatttgaataaggcatgtcctaaggattgctttacactaccaatgattaaccaattggtagatgcaatagtagagcacgaattgatgactttcaaggatgcgcattctggatataacaagattaaaatgtacatcccagaccaggaacatacaagcttcgtggcaaatatgaggctctactgttacaaagtaatgccatttggattgaaaaatgctagagcaacataccaacatcttgtaaatggtatgtttgaaaaccagattggacgaaactgttggatatattttacc

SEQ ID NO: 168785 - DNA, 1710 bp, Cannabis sativa
gggggtctccctgacggatgcctctggtaggtttgactgttcccacaacttgttgattaagggagaaggaaaaggtagcagtggagaaacaagccagaattaggtcgatgaaacgcttgggaaataaaaatcggtccataattttgcgaatgaagacccattcaacccgatcaaaggctttggccatatctagctttaaggccatccatcccaaccgaccagttttacgatgagtgagtgaatgcatgacctgttgaccgatgataatgttgtcagaaattaaacgggaaggaagaaaagcactttgtgtgggagaaatgatacaactgagaatgggtttaagacgattaaccgaaacccttgaaatgattttgtaaacagtggagcagagactgatgggtcgatagtcagttatctgttcaggattttgccgcttgggaataagaacaatgagcgtctggttgatggccgataaatctgcatccccattcaggaaattgagagcagcaatggtaacgtcatgacccaacaagtgccaattcttttgaaagaaactgccactaaagccatcgaagcctggagctttatcatgagcgagttggaatgtagcagttttaatttcaagggccataaaagtggcctgaagaaggtcaatttcagcaggggtaaggcgctcagaaatgcctaatagaacatattcaatgatgtcattgtctggaaattgactttgaaaaaggttagtgaaatattgttcaatagttgtcaaaatggaggtcgtatcagtagcccaggaaccgtccagtcgttggagggaaagaattttattggtggttcgtctcatggaagccatacggttgaagtatctggtatttttatcaccaagtttgagccatgtgactcgagagcattgctgccagtaaacttcctctttttgtaataagccactcaactcttcttcaagcttcctaccctgctctaagtgatcattcgtaggttggggtaaggagttgataattttgagctgcgattggacattacggatttgagtagcaagcggggggcccagagattgcttccaatgtttgagtcgaaaggagcaatttgttagtctttccttaagaccaattaaaggattggagtgagcattcgaattggtctgtgcccaagcatcgcgcaagcaatcctcaaatccaggttcggacatccaaagcttataaaaaatgaagcggggggtatggttacgatgatcgctcatatattgcaaggtgagaataagagggcgatggtcagaaccaaaaaagtcgccatgatttagacagcaatcaggaaagatggcatcctaatcatcattagataggcaccattccagccgttcctgagtgtgatttggttgcttttggcgattagtccaagtgaagagattacctagcggagtgagagggtgaagttcatgattgtctatgaaagattgaaattgcgtggatggagcacgagacatattacccccaattttgttagaaagagacaggtaatcattaaaatcacccataatgagccacggctggagccgagcgttagaaacgagtcggtctattaaaggccaggtgtgcaatttattttgagcatgtggtgcaccgtaaaaagcagtaaaagtaaaatcggtaaagttaggaaatttaagataacagtgaaaatgacttatattatagg

SEQ ID NO: 168786 - DNA, 1728 bp, Cannabis sativa
aattgtcactacaagaatgtagtgaaattatttatagcgaaatatactcaccgtaaaaaatatttattattttcatgggtgaacatcaaatagcaagagtttagaaatactatatattattatcgctctttgtgcgggtatacttctattcatcaatttacaattcttttcaagttatttcacagtaatattataattattttgtggaagttgtgaatacaataaagcgatttttgttattattttataaaaaataaagttaatttatgatatattgacggttaaatcttgagattttttataaattatgttttatttttgaactatatcatatcatttataaatttagttattctaataaaagtagcttgtagtacacttatttaggtacagaccttaaattcttaaatttttctaataaacatgaatatatatatagtcttaaaaaagttaaaactcacgtgtgagtcattaattataagtctgaaaattatggacattaatataaatgtacatcaattaagtatatacaaacgtatacatatcaaaaattgacattataataccagttgaatatttcttgatcaatatatgattatgatcatgatcatggtagaagcacacaattatttattatttcaatattcacaaatttttactttaaatactaatttttatgatggtttcacaattttatccacgatgtacaataatagtttataatttttttttcttacttttttattaggatttttattttttttactttaattagtttatttaatgcaatatattttgttttttagtaaatatctagaatttgtatttagtaaataactaatcatttgttgaaaataaaaaaagtcattataaaattatctattagttattttttaaatctttcttttttaaaaaaacaaaaagttttttttaattattatttaaatcttttattattttattatttttgggggatcattttatttatttatttattactgtataacttttgtaacatttttttttcaatttatattgcttccttattttttttagtcgatgtaaattcttacttttttatttttttatgtatattattaatttaaaaattaaatgtggcatccttgatgtattaattattttgtaattatggctattgactataatattgatatagatttaaattttagatatttaattttgatacaaaatatcctgttaattaaattttaataaaaatatttatttatctacattattttatttttccattttcccctcttctcttttttttttaactttcaactcatttttctatttttaatattttttttattacgttgacttacctcacttaaattaaagcacatttttaaattaataacaataattaattaacaaaatatctaaatttaacaataatattaattaatttattataaatattattattgtaaataataattatgcaattacaatgcataatagagacataacagtttcaaatgtaaaatgagatataattattataaataatgatactattacagtacattatgaagacaacagtgttgataacaattttgaatgcagtgactactataaataaaatacggtgatgacaataactagagactatatataaaatataaatgagataaagtaataacgactttaaatatagttgttgaccgaggttttcggcaaccaataaaataataagagatt

SEQ ID NO: 168787 - DNA, 877 bp, Cannabis sativa
aaattaaaaaagaataataaagacgtaagtatacaaaatattaattttctaaacaacataaacttaatgattttttttaacgttataagtacttaatattaataaaaatataatttttgtttaattttatcagtataaattctgttagtgtcttaaacatatgacacatgtaagaatcatatttaatatcattaggttttaacaaaaatatgtgatatcacttacttttaaatttaagatattaatgaagtcaataatgacaaaattatgccgccaaaaaaattaataaatttattataccgtttataaattcaaaattttaagcatttaggctatacaaactccaatttagtaaaattttattagcaaaatgctccaaccaaatggcaaaaggcatgctatttatgtgtctatagtgttgcatgattttctttaactttttactaattaaataaccattttatataaaaaaaaataaaaaataaataattaaataatctatttataattaaaacttatgaataaaatattatactaatatactattttaagtgtattttagtattatggttgaaatatgaagaaaaaaaaatactaaaaaatatcaatagtgtctaacactctctttaatcttatattgctattaaccatgaaattaagtatcaaattatatacataatttaatataataatttgtgttaaaactgttattttttttttgttgggattcaacaataaaatttgagtatgctatatacccaatcaacaatgatagtaagggctatatatattataggagcatagtatatatatagggatatgattttgttccgtgatgtactttcacggaatgtattccgtggtacattagatgggt

SEQ ID NO: 168788 - DNA, 816 bp, Cannabis sativa
ttttttttttgtattttcacgaaaatgcacctaacaatctacataacaactaacagaacaacctaaatcgtaactaatccacatagcaacccacataaaaattactagagtaactcaaactgtaaattttaaaaaatatattaaaaaataatatatatgagataatttcccttaatttatatatttctagtcaaaacattaaataagtattaatttgtatatttctagtcaaaacactaaataaataataaattttacattaggttttataattgttaataaataatatttggtaatcttcaaaaacactaggagatccttacaccaaaatatggatttcctaacatttaaaaatgtcattatttcttatagttttaatcacatttgttattttagttacatttcttacaagtgtaagatataccagtgtaaaactacaaatgtcactatatttcttttcgtatcatttgaaaaattgtcactaaacattttccattattattaaattatatattatatattatattttatttattaaaaaaaatgtcactaacggataattgaggaaatataattttttttttcattggaatgtaaatttgtaaatattcttgtaaaataaaaccgtataaatattattgaacaatttaacattacaacaaaatttatacagtgtatacacctagtaaaaaaatatataatattgtatttacaaaataattgaggtttgagacattgaaataactagaagttacaacttttcttcttgtctattttcttctaggctaattagtaatttttccccttgaactttga

SEQ ID NO: 168789 - DNA, 1080 bp, Cannabis sativa
tctggatccaaatctgaaccacgaaccaaacccgaactgagacccaaaccccagaccgaaacttggacctcgacccgaacccgaacttgaattgggactcaaaccctaggttcaagttcgagatctaagttcagggtctggatttcggggcttgggttcgaggtccgcgtctgggtccaaggtctaaggttgagtctggggccagttttggttctaggtcctgggtattcggggttggggctagggtttggggtcttgattcgggtcaggggtcgggggtctgaggtctgggttcgggtcaaggtccaagttgaagttccagttagggtctgggttcagggtcgagatcggggtcaggtctgtgtttggtatcaaggtctggggtccgggatccggggtctagctaggtccatggttatagtatgggtccaggtccgagcgctggggtcgaggtcggggttgaccctagaccctcacgactcacattgtattaaaatgtgtggtggtaataattgatgtaatataatgttttatccaaacataatgtcattagttatttagtacaatacgatctttatatgaccttccgaacaagcttttataaaatttgatttgtaattttttattttattttatttttggaaaaaattccatcctaacattaaatcattgcaaaatccatatctattacattttaatttttttttaaaaacaataattatggggaccttaataattatataaaattttttaggtatctcattgcaataaaaaagtttaatttagtgaaaaaagtcttaatgttttgccttaaggttatgggttcgattcatggtcttttattttaattttaatagagaacacggttgccactacattagctgaataatttgttttgcattattattgattaagttgggaaatttacaccctatatattttttccattttatttcttttgtactgttacacgacaaatgtaactttttttactgtgtaactgttttttttttaattttaagtctaattaatttaacttaataatatatatatatatgtgtttatatatatataaaaaaa

SEQ ID NO: 168790 - DNA, 1064 bp, Cannabis sativa
acctggtttataccctggctggcccgatccgtcaacaattttctctcatacttctggtctatagtgaccaagaagtaaactgcatcttcctagcagaatcccttgatgaaagggaaaaataagggaccaagccaactcaaagcagcatgtttgctcataaagagttaccaagcccttcaacaaatagatcaaggaaagaaattcttcgtaagagacttagtgctttaaagaataccccttgacaacaaaggtcctacagcaagcaggttcagacccaactgaaatggtctgcaccaatttacaagataacaataagggtgcataaaagcctggcgagtacaacgagaacttagagttggctattctaccaaaatactagaataaagaacatctcagtaaaatctctcactagccaacttgtatattagttcctctaacgtttcaccaagaagggacccataaaagagccagtacccattgtcctctagcgatggcttctcatcactcttcagtgatggcgtttgtatggtaaacactacagaggcagccaaatataaaagagctactacccattacttttcagcatggcctcccatcactcttcagtgatggtcattgcacggtacgccccgcaggggtagccacacatgactttaaaagcagacactaaactgtaagcttttgttacacgtaagaccaactgtgtctaaaccacttgctaacaaagataatttcttaaagttattctttgccagttccacatgcgtacacccggtaccaccccaagaaaattcccagacaaggtctatgaaacttggggaattgaaagtgaccaaaagaccgtaagtttgggtgcttacttggggggcacctacatcgtacaatgcatcaaactagtacgaagaacttatgtcgagaaattttaacacttagaataagctactaaacctacctttaagtcaagtgtagacatactctggcttgacataaagaaaagtaaatctgaatacttacatgtcaaggccataagaaaatagccaggacgatcatatgtccatagtaaa

SEQ ID NO: 168791 - DNA, 1089 bp, Cannabis sativa
ccctctactttgtggcttccaaaatcagaggaaaccccagtgtttttctccatttgcaagcctcttcgtagttggaattaataaaggagttcaacccctagctccttcaaacttctaaaggtaagacctagtacttaaattgttaatattttctaggttttgattggttttcagtagttgcttttagtaggacctattgaagaagtttatggaggttataaataagcttcttaaggttatttagggctgtttagaagtggtttgaagtgttttgggtggtgatatcaaaaattatgcaagtttgagttcaaagaatttaaacttgatttggttgtgataacttgaattctgttgcgaattgggttaagatttcttcatgaaaaatgttaattatgatctttataaattctctgaaaattttggtaaggtttggctcaggattggaagccaactaatcctgagaagttttggcttcgatagttgactcagacctcgtcgaatttcaaattacttcaatctgtaccaaatcttttaagtcgaagaagtcttaaagtttctaattcgtcaaatttataactatcactatagagttaatcaattcaaagtaaactacaaggacaataatacttataccgggtaggaatattcacttcccaattctttaactgataataatcaaattaaagatcaaccttaagaaagatagtctttccctgaaattgatcaattagatcacctatccttaataaaagatgcttcccttgatagaccatttattcaccctttgattaaccaataccactctcactgatttgtcctttcttttaacaaataatctgatgtaccccaaaacaactacacgatctggtgtaccataagtcaagcatatctacaactaaattctcaattcacttaatttttatcaatactattcaatacaggtcttaggaactaactctgtctccaacataactttaatcttaaatcacttttttgctttattagtaaccttggtaattaagaccacttagccataaataaaacaatcaacaacatattaaagtttaaaaaattttaatcaatggttgc

SEQ ID NO: 168792 - DNA, 1289 bp, Cannabis sativa
agtacttctcatcgaaaaaagatgaacttgatttgtggtattttttatcacaactcggtatgggttgaaaaaccttcttgtatagcctcaattttttagtagtattttgggtttctctttacttcttatcaaccttcattagatactatgaatcatgtgttgaattatgttcaacctcgggttactaacgatttgaataatattttgatgaggccctttacttaagtcgatgtgagaaaggtcatatttcagatgcatcctagtaaaagtccacgcaaagatggcatgggtgctgatttttataaaaatatttaggatgttgtgagttcggatgtgtgttgtacctgccttggtttcattaatgattctggttcggcagtgtctattaatgagactatcatcacgctgattcccaaggttaaatcaccaactttgactagtgattttaggcctattagtctatgtaatgtgctatacaagattattgctaagatgattactaataggctacgtgaagttttgaatgatattatgtctgaagaacaaagtgcctttattcttgagaaacttatttctgacaatgttatgattgggtttgagtgtcttaatgctatcaaaagacataagaatggccaaaaaagatttttgacgtacacagcagatagggctaaggcttatggccgtgttgattgggcttttcttcggggtatgatggagaagttgggatttcatttaggtggatttgtttgattatgaggtgtgtttcaactctgatcaatgaaattaacatgaatggtgatgtgattggcaattttgtcccttttagggggcttaggcaaggagatcctccatctcccttcctattcattatctgtgttaaggggttgacttccattatcaaacaagaaatcgagtttcataatattttgggattgtcttgtgggcgacgtggtcctataatctctcacttactatttgctgatgatagtttcttctttttaaaagccaatttagaaagttgctctcatttcaagctcattctctagtagtatgaagcatcatcgggaaaactagtgaatcttaataagtttgcagttttcttctctccttgcatgcctggtgatctttgtgcatctttcttcattacacattttttttactctaatgagaattgatgtatattaagtaatcactatctatatatttatataattctgttgttaagtacaatgatgtggcagtttaatattttaggattctaattttcaaaatttgtggttttttctaat

SEQ ID NO: 168793 - DNA, 681 bp, Cannabis sativa
gttaggacgagtgattgtgaggtatatcaatttcccaatgaggcatctgtattgttttgggtcttggatgagctcaccagattcattgctgagttttaagtttggctccattagtgttgaagctggttttgagccaagatagctcgtgtcctggagtaattgcatggtgaaaggtctttgtgttacagatatacctttgctgcagcgagcaatctcgagaccgagaaagaaatgtaaggggccaaggtctttaagtttgaactttgagtcaagtgtggcaatgaattgttggagaatagttgtgttattagttgccacaatgatgtcatcgacatatataagtagagcaaggaatgtttgttgagtgatcttggtaaacaaggaatgatcatttttagattgagaaaatccttgtgagattagtgttgagcttaatttggcatactattgttgggatgcttgtttcaagccatataagctctttgttaatttgcaaactgcatttggaggtaatactcctttgggagtgtaaccttgggaatgtttcatataaacatcctcatttagatcgccatggagaaaagcattgtctatgtccatgtggtgtaggtgtcagttatttatggcagcaagggcaaagaggagtttaagggtgttgaacttagctacaggagcataggt

SEQ ID NO: 168794 - DNA, 532 bp, Cannabis sativa
cggccctgccctaggggcatgtttaatggggtagttgtcaaattatactgtcactgctaattttttttgtggatttaaaatattaagtaagtttatcgtataaacgtggcttgcattgaagatggcctaattgacattttttatttgggaattaaagattgaagagagttaatacataggactcatatatagtagaactttatctatgttagaatttagaatgaatgttattaaggtatacgagattctatctcaaaactaattagcaagaaatttgtagatattgaaaagaccctaatagaaccgattacaagagactcattagagtttagaatttggaattaaagtaactaaggtgcatgagattttattttaaaaccaattgacaaagagaaggagtagaccatttattttatatatgtagtattttatttacaagcattagcaatgtgtgactaactttaatacaaagaataacctctaatttattataaaaaaaaatcaaatttcaatttaaatcaattataaataa

SEQ ID NO: 168795 - DNA, 1222 bp, Cannabis sativa
taaaataatttccaacaattaagaatagagtttggtaaaaggttcgtggttggaagggatctatgttttcgatggctggtaaggaggctcttattaaagccattcttcaagcaatgccaacatatactatgagttgtttccagttgcccaagagtactataaagagtttgcatagtatggcggctcggttttggtggggatcttcagcccggcaaaagaaggtccattggtgtaagtggaattatatgtgtaagccgaaagagaaaggtggtttggggtttcgggacttgggcttgtttaatcaggctcttttggcgaaacaagtttggcggtgtttgcggtgcccatcacttcttagtagtagggttctaaaggcttgttaatatcccgataaggatgtgttggatgctaaatgtggtagtaattcttcttttatgtggcgtagtatgatgtgggggaaaaagcttcttttaaagggatatcgttggcgaattggggatgggaatggggttcgggtcttggaagatccatggttgcctcgaccggttaccttccgtgtttatgataagccagagtttccgcaacagttatatgtggtggacttgaaattggcggatggggggtgggatgaaggctttataaaggcacattttaatgaggaggacgctgatttgattttaaatttgccaagtggttcgtggggagtataagacaaagtgatgtggcattacactaaaaatggtgaatatacggttcgaagtgggtatcggttggctcatgatatgcgggaggcgtcccatcaatccaatgacaaggagaaggaacggtggtggtaagctttatggaaagcaaatgtgccgccaaaaatcaagcattttgtttggaaagtatgtcataaatagcttccaacgaattatactttgtcgaaatggggcatttaggtggcgcctacgtgtcctcggtgtaaagggggtggcttgagaatggggctcatgtgttgtgagattgttcttggagtaaggaggtgtggaagaaatgtggtttctgggatcatgtggttaagctaagatcaagtgatgtgttgttagttatccaatagcttcataaggtttgttctccttccacctttgagtttattcttgttgtttcctggcacttgtggtcgatcaggaataagtatgttcatgggggttatctgttggaagttattttaccaggaact

SEQ ID NO: 168796 - DNA, 1126 bp, Cannabis sativa
cagcatactgatttggtggacactcaggaacgtgtatacttggctataagatagaacattcactaccgaaggccacctcctttattccgagatagttcatggagagatcccaacaaaagattcaagtataataatgatatcaggcatacaactaatgaatgcaaaaatttaaaagatgaaattgagagcctaatatggctaggatacttgtatgtgtggataagaatatgtttaccacatatgagagagaggcaagatgaagttcaagcacctcccagagctcaagctctagatgtgccggctcctccgagagcactcccaccaaatcaaggggtaccacctggataccaatatctcccccaattgacttgatctcaaaacattctatttttccaaattgttacagctccattaaaaaagtttcttgggcttgaaaaaaaatggcttaagcccttttttcatcatgctagatattacattcttggctttcagttgaaacattacaaggtccatcccttgggcccaagtcaaacggcccaccaggaggcacaacaacctttaaactgggcccatcattaaccattcccacataaacctccaaagaaaattctttgtttttagtagcaacttcattcatggaacgtgggtcaaccatgtttgaattattcaaattaatagagggaaagtcagaacctcctttctccatctcagttgacatcacagtggctttattacccgaagaaggaggtaaggacaccagcatgcaactggggattttgggtaaccacactgcccgtttccccttacccgatgaaggacgtggcccaggagtggtctttttcagcatcctcgagacactggcattaactttgttcttggctggagcaccaccattgacgttaccgttaccaaccagtcgacgaggagaagatgtaacaagcctccccatcgactttcccacctccgaaacatatccagggaccaccgacccaacaccttcaataggttttccaacaaagcagtcaacgtatgaggagcctgttgggattttatgcccgaaataaaatccattacaatacaatctgatttgttatcaatagaagattagaaatcatttatgtttaca

SEQ ID NO: 168797 - DNA, 1058 bp, Cannabis sativa
ggttgttgggttggagagaagtgcgaaacaacatatttaactcaaacttaggtatttgtgccgtaaatttttctttgagaaatgaaagagataaaaactcaaatgatctatctctcagatagtggaaattagatgctcaatttattacacgtctcaaaagatttaattaccgataaataagttcagtttagcttgtaaagttaatcgatttaaagaagctcaatgaagtgtccttgactagttgaagtacagatgcactaagaaagcaatttaatacttggagtatgagatgtaaataagtgatgtgaataaaaaatatattttaatggtatgttaaattgtgatgtaaatatcatatgtatgtagcataataaaacgtaatttaaatttgagttataatatagtatgatataaaatatgcgtcacaataaatgttttatttttatattttgtattggataatgcttcagtaaaggtattaaaagtgactatgttgagttttttttttaatgtgttattgttttatcttatgtccatatttaatattattttttttattataattatttgtcaaaaatactatcattcttctcatcatttctctctttttctctccccctctttaaaagttactcattaaaggaccagaaaatgtaactaaaactaagggttttgatatatattttcttttaaaagaaaaataaaagttgagactcaaaagttttttaatagccaagtcaaagaacaatgcaaaagtttttttggtggatatgatttgagaggagagagatgtacaaaaactttttttgtattattttttgactttgccatattagagaatttttgagtttcaatttctggtgtatttttttttaaaaaaaaatattaaagcccttagttttggttgttgggtcctaatttgaggagcaacttttaaaaacttttaaagagagagagagagggagggagaagaaaaagagagaagtgacgagaagaatgataatatttttgacaaataattataataataaaaaaatctttttttttaaaaaaattat

SEQ ID NO: 168798 - DNA, 1005 bp, Cannabis sativa
actacaacatgatgatttgactgttggtcgataggaagctttcccatcctgtggtgtacaactgctgaaagaaatttcgtgagaaagaggaaacatgttgctcaaaggtttcaccttgaaaagttgttgtctagacaagtcgttggacaaaaagggggctttagagccacgtagacgtactaccatggcctgacgaaggggacaagatctgatttggtgttagaagatatgtaaccgtcgccttgagctctagataagaaatagccaaataagttccaggatcatcaggtcacatccttcccagattgtactaacctgccaccccttcgggatggtcgtggcttcaagggactgtgatccttcttagtagcggatgaatagcaggagtcctgaagtcctttccttccttgccgatatgaagaacctttgacttagtcttggaatatagcctctttggtgatgctaataagcggaagatacgtattaattgtaaatagttcgatgtgacaccttttcatgattgccactaacaggcatctaggaatacaaataacactttcttagtttaggtacatatatttaatttattgttttggcatattttataaaaatgcaatgataagattttgttttttttctttaattgacacaatgtgtagtagtagatatggacatattaattatatatacccattatattatataccccattttgaaatcataagattttattatttctattattaatgtaattatttatttaactttgaaaaaatatattattattttaagtgtcattaactcaaaaagaaaatgagaaaaaaaattaaaagtataaagttttaacaataaattctatgattataaattctatggtaacaataatttaagttgtcaaaactaagtaaacaaaatcgtaatacaaaaatatattgagaatttgatattattttgcatattgcaattaggtcattattttgttattttttgttgctttgtagttat

SEQ ID NO: 168799 - DNA, 664 bp, Cannabis sativa
  modified_base (541)..(542): a, c, t, g, unknown or other
atatacttcatgttcaaacgtacatcttcatatttacaataatattaaataaattaattaataaaacatcttcatctccataaataagactgatgcatgaacgtttagttttacattaactgaaaattccttaatagtacatacatgcatcatcattttgtgtatgatcataggatttgaagtttggacgtcttttactcatatataaatatataaatatgtatttaattctagtttagtgataattgttgcctttaagtaattagtatttaatttgatttagtatgttaaaattaatattcgaataatttagaaaaatttatataatacaccaaaaatttaaaaaaaaaatacaaaattacataaacacgaaaataaaaatttatttttactctttgaacttttttatttataaaaatacctcttcagtaaaaataataaactatttatttttttttgctttataatttatttatagttgtattcactgcaaaataaaaaattacctttagtgacaaccttttagtcacaacataaattnnttgtgactaaatgtgacttttggtcacaacaaaaaacaaaaagttacttgtgactaaaacatataatttagatatacaagttgtcactaattagttttttttttaataaatttagcaacttt

SEQ ID NO: 168800 - DNA, 948 bp, Cannabis sativa
cgagtcttggttttgagcaacctgctttatagtgcttatacgagccaactgaaattcattaaaataattacaagcagattgaaatacatcttctggcatagatctttttttattatggaaaacattattcctgtaattccaaattgcccagacaaaacaaaacagcatagcaatctgatgagtatcaaaaacctcaaaagcagtaacaaaaaataaatatccacagagctatttttatgacaagtataaaaactataaaattttgaatgtttccaggctttcctagcatacttacagtccaagatggcatgtttcactgtctccgtagcctgatggcaaatcaggcagataggggagggaataatgtgacgaaaaacagggagggagcaacaggaatggactgggacaacactctccagatcaaatgtttcactttaggagggacatttgaagaccagattttagtccaaaaacgtttactgctatcaaaagaagagagaagccatactacgatccttcagggcaagatggtaagcactcttaacactcaaaattcccgagggatcttgtccccaaatcaagccatccaaaccccatgatccagatattggtacattgaggatattagctatcattgaggaatcaaaatgttgattaagcttattcagatgccaatcaaccgaaggtgataggaaataagaaagagtagaatcaggaggagggagagaagcgttgaacttataacgaagcccaggaatccagtgatcctcaatcgtgtttatcttcgatccatcacccattttccaaattaaccctttcttcatcaagtcacgcccccaaagaatactacgctgggaataagatggattaaagccaggagcagcatcaaggattgaagaatgaggaaaatacctagctttcagagtttgactaagcaaagagttagga

SEQ ID NO: 168801 - DNA, 584 bp, Cannabis sativa
  modified_base (524)..(552): a, c, t, g, unknown or other
ttataagattgtctctaaagtcttagctaataggctaaaagatgttctgaatggcattatctctcaaaaccaaagtgctttcattcagaatagggttattttttataatgtttttattgctaatgagattgttaatgctattaatcataggaaatcaggtaagtctggctgggttgctcttaagttagatatggagaaggcttttgatcgcgttgaatggggtttcgtgaaggctattatgcagcacctccattttcctgatagattcattaatcttattcttaactgcatttcttctgtttcttttcaacttcttattaatggctccctcactaataaattttcttcctctagaggccttaggtagggagatccattatctccctatctttttctgcttgtttctgaagctttatctgctgtcattaggctacaggaacatcataagcttttccaaggtatttctatctgtcgctcagctcctgtcatttcgcaccttctttttgctgatgatagcctccttnnnnnnnnnnnnnnnnnnnnnnnnnnnnntgctattaaaaatgctcttgatctgtatcaca

SEQ ID NO: 168802 - DNA, 774 bp, Cannabis sativa
atgagcccaattaagaccaaccaggggcggagccagaatgagaagttagggagggccgaactatattataaatttaggtgataaaatatttcaaaaacactttattaactttataattaaaatttctttcaaaaaaaaaatcttcataattaaaattaatacgcagaacctctttcttacatatctagaaagttattgataaagaatactaatttttttttttttgacgatttctcattttcaatatacaatactggcaaacaactacttaaatattcacttttatcttgttggcaagtgtagtttttactatattcatatctaaaaaagatcattttttggtaattctagaagtgtaagaataagagttatcactttatacataattaaatatttgaagtggcacggaaaaaaaattaaagtgatatcttgtaaagcaaatcaatattattaaagttttttttttaaaaaaatcaatattattaaaaaagaaataatgctttaaagaaaaaaaaaaagaaacaaatagattttcataaaataaataaataaataaaagaaagtaaagacttatggacaaaaaaaaagttaacatttataaattttaatttaacttttcaaaggagtctcatacaataattaccaaaacaaaccaatttacatatataaatataagcacatatatatattctagaaatttttatatgaaaaatcctttttacacactttattacataattaccatcacacgcctattactacatttctacttac

SEQ ID NO: 168803 - DNA, 892 bp, Cannabis sativa
aaagaaaatatgtagcaaaaacataatcaaccactacaagtagctagctaggtagctgcattctcctattttagggtcatttttcattcaaaaatactaagggcacctttagagatattttaatattaaatttcacatatttttatttaataaataatataagaaactaaataaaaatactctttttttttatttttaaacactcatagattaattatatttatttttgttgtatataatacatagcagttataataaacattttacttatttttaaaatagttgtataaataattttataatattaaaaataaaatttaaaataattagttaaataataagaaaaataagtgcatgtataactaattattttgaattatattttctacatgttgacttgttagaaatttttaaaaataaacataagatctactataattataatgaatgctattctattaaataaaattgtaataactttcctctataattaccaaaaacaaaaactaccgaaagtaaaaagacaaaaaagtaatgtgagtgatttttcatttcggtttttctatataaaccaaagtaaaaagtgctctttaatttaactagtaccttttcaaaaggtattttactttcttgggtttacttcaatcctaatcaaaaattgacgttgaaagtgtcctaaaattctaagtaaaaaggttctacctttcatgtagcggtataattaacacaatgtttttcttaaaaaaaaagttaatttctaccatgcatttcttatttattttcgcaataggatttaaacagtttattgcacgtgtaattcttttattttataagcgtgtgaaatagattatttaaactatatttttggtgtattaaattttttttatttttt

SEQ ID NO: 168804 - DNA, 618 bp, Cannabis sativa
tggtaaaataaattccaacaccgaagcccagtggcacatggagaatgtgcataaacttcacgaatctcaacaaggcttgcctgaaggactgtttcccacttctgcgaattgattagaaggtggaagccatgtccggatatgaattgttaagctttatggatatgtactccaactataatcaaatcaaaatgcacgtggcagaccaagagcatacatgtttccaaattgatgaagggcttactgctaagtagtaattccatttggattgaagaatgtaagtgcaacttaccaaaagctggttaataagattttcatcttaaatcagatgaaccatttgcacttaataacgaactatttaagatagataaacctaaaaaccaaaaaaagcaaaagatcgataatgaagacgaaacatatctatggcccttacatcttgatcatataggctatgatagacttcacaggttaaccaaaggtggtccattgaaaaatgtcaccttaggcgaattactagtttgtgaattttgccgagaaggcaaaatgacaaaatgttctttctctgcaaagggagagcgtgctaaagaaccactaggtatagtgcattcagatctttgtgga

SEQ ID NO: 168805 - DNA, 1159 bp, Cannabis sativa
  modified_base (1087)..(1088): a, c, t, g, unknown or other
ttttttttttttttgaataattctcccttaatatttatatttacagttatttagtcattttatgaggttctatctcattattttgtttaaatattgtaaattattattttttttatctactgaactttaacaactatcaaatcatactcctcgaaataaaaataataaatattctaacattttttttggtaaatcttaaaatattattttagatccttaaaaaaattagttttaatgattaaaaaaataaaaaagaaatcaaaattttacaactacttaaacgatataaaaattaattatttttattgtaaaatctatttaaatataaaaaagtatattcaaagtttaattttttgtaaaaattaaatttaaaaggaacaagtttgagtttatttttttctcaaaaatctagatttgtttaagtaagtattatttttttagtttaattactattttttaaaagaaaaattttatattgttctttattttttaaaatatgagtttgtaaatataaataaactttattttttcttctcgaaattttagtttatttaaattatttattggatttttaataatttttgttttattttttaagatatgtgtttataaataaaataaaattttaaaatattttttaggaataatttagggtgtttaagtgaagttaatattttttttattaatttaatacttttattaggtattttaattttttttaagaatttagaaaattataattttttaaattattgttgtttaataaaattgggcaaaaaaatttattggtcaaaattcagaggtagaaatattaattttaaaagtaaaataaataaaacctcataagaggtataattatgtaactgttatattttagggaaaaaatttaacaaagcgtatattttatgatgcatgattaggtattgtggaaaatttagggagcaaaaatgttaattattttttattttttgttaacaatttttttttataaacgaaaatgtattatatatataatgtgaaatagtttagatttataaaattatcttccccaagaatgtatactaataaatagagcattgctattagnnaccagtagtgcctagcaccttctcgacatgtcgtgttgcgattggctagtaatactccctaaaagctatta

SEQ ID NO: 168806 - DNA, 2045 bp, Cannabis sativa
tgttgtagtgagtacaccttcatttctttaaataactcttgtaaccaagccaattctgaggcaagctgagcgagggctctgtgcacagatttagtactcgattgagcaacaacagattgcttcttggatgaccacgaaatgagagaatcccccatgtagacacaataacctgtaatggattttctgtcatcggggcaacaagcccagtcagcattagaaaacccaaccaggttgagctgagtgcctggtgagatgtgaatgtcatgatacatggtgcctttcatgtatctgagaactctcttagtagcattccagtgagcagttgttggagctttgagaaactggctcaatttatttactgcaaaagagatatctggtttggtgtgactcagatattgtaaagctccaattatgcttctataagctgtaggtgagttgagtggttctccatcagacaaggatagggtttttcggcaaccataggtgtaggactaggcttcagattggttaactcaactttttgcagcaactctactatgtacttcccttgagaaaaatatatccctgtgctatctttaaacactttaaagtcgaggaaatagttgagtggtccaagatctttgagtgaaaatatcttgttcagcttggtaataaacaaggttagctcccttgaactgttccctgtgatgattatatcatcaacatagatcaacaacatgataacataatgtggtttcttcaaaatgaagaaagatgtgtcagcttttgagctctcaaattgcgactgcagcagggtatttttgaattgataaaaccaggcccttcgggcttgttttaggccatagattgccttgttcaacttgcacacatgagtaggatgttgtgaggactcaaaaccaggaggctgcatcatgtaaacatcctcctcaagagtgccaatgagaaagacattatttatgtctagttgtctgatttcccagtcctttgtaacgggaagagtgagaacaactctcactattggagctttgacaactgggctaaaggtttcactgaagtcaacaccttgtccttggtgaaaacctttagcaaccagcttggatttaagcctttgaagagagccatcagcattgagtttaatcttgtgaacccatttacagcctactatattgtagaggggaggataaggcaccagaatctaagtcttttttatcttgagagcccatatttcatcttgcatagctttgttccacccttggtgttacaaggcagcttcaacagtcacttgttcatgatttgacaggtcaaatttttcttatccaaggtacaccttgcgcttgaagatctgtgatcttgctcttgttaccataggatgaacaattggaggagcttgttgttcagttcgtgcagggtcaagtgactgagatgaagcactccctggactcacaggttcattagttggttcgaaatgaaaattgttactgacctgagtgtatgtagatgacagagatggtgattctgagttgagttcttctgagttgtcttcagcttgagttccatgaggattgagagttgtgttttgagccattgaaggcagagtaaaccaggagtgaggagtgtttagtgtcagggtattttctagtttgtaattgtttagaaagccatgttcaaaaggaaattcatcctcattgaatgtaacatgcctggagatataaattctcccatgaggacttaggcatttatagcctttgaagatttcactatatcctagattgacacattttatagaatggaattggaatttgtgttgctggtatggtaattaaacttggagtcatcatcctataaggaccttccaatctctagtgttaatctcaaatcccccatacaaaagttgaaggctttgctttaatggaaattgacttgaaacatgtactttcaagttgttggttcaagaaatctcacttttaccagcacagttcgctactgcactggtaaaagttttaccagcgcattttacaaactacgctggcaaagaggtcaaagtt

SEQ ID NO: 168807 - DNA, 1682 bp, Cannabis sativa
tcaccctttgctcccctttcttccgaaggagctcctatctccctctctcactttttgctccccgaaattccaagagacctccccgctccctctctcaccctttgatccccactcccatcactctccacatgcgccaagggatctccccgctcccttggtctctcttcaagctcatttgttacttctttctcctaacacttagccaaaataccaagagttactccctcttccaacacttagccaaattacctaattttgtcccaatgatctctagatgtatatatgttaaatcaaaatataaattgtatgaaagaaataaatacctcttaaagcctatcagggtattcttgattcttgtatcctttcgggttgattatatactaacaccgtagtcttttaaatcgattcaccacacacaaggaataatgtgggctactaggataaagtgtatatgaagtgtttgtataaatctcaacacatgagcaagaacaatttcttatgtgatagatagaaaaatgtttttggtaagaaccctttttaggctttcagaaaagatacgtacaaaatctgtctctcaaactttgttatatggtatatttaaataaactcaataaaaattttgtttaattaattatttaaattaaaatctatttattaaatcatatttaattatttgaataaataatataaccgaattgagttatagatatttacatctaataaccgattgagagaatctttcaactacttgagagaacgtctcaactactttttaaatttaaatatttatctattaaattaattaacccaaaaagacaaaaccaataagactcccatagcatgggtgcatgcactgtgtctggagacagtgcatgtggcaccttctttgtctcttttaagacaatgtgccttttgtcctgaaaactttgtctcgataacttttatctgttttcctatgtaattaatttgaaaaataaattatttattacaaaaataaataattactattttgctaattcaaaatagatttttttgaacttccatgtacaatatttatcccacccattgaaagtgtttcacggtggcgattcggggactatggacatataattctaagctccaataaacaagatttatttattgaatcttatcaatcagataattttatttattaattccatgattactctactataaatatggaattgaacttgttatccaaatttctacacagggtgacgtggcatctatctgggtgacacgtgaaacatattccataacttggatgggcaatcccacttataaagagtcgtgtagggagaattgatacttgaaatcataaaatagaagttgggacattcgagcagagcatgcaaagaatctgcctagcttccatcaagtaggtgactcgcatacaccgaccaaggggtgcgagttaaacaatttcagagatatatccaatatatccccaagcttgcaagtcactgaacctatccctaaattcacgagatagattcgtagaattgaagaagaaaggaatcctacctagtttcctactctgcttattgtaattatataaagtaaacaatttttctattttattccttattaattttgggaaactaatttgatgtaattaatccctataaatagtggactcatctcactatagagggaaacaa

SEQ ID NO: 168808 - DNA, 791 bp, Cannabis sativa
cactctggcatcagacgcaattgatacactctgatcattaacttgaatcgtcccactcttgcaccttggagaaggatcaaccaacgtagcatcagcacttgggggcttaccattagcctcacctccttgctccttagtaaacccaaacgacccttcattggaacgcaaactattaatgagcaatttagatttcttgttaggatctatatagccttcactactgttagagaattcgagatgattgacaccactttcctcagcaaaaacatccttgattctagacttatccactcccaccaaacaactcaaaccatcactttcatcaacaaagggatcaatttttgtagtatcatgcaaggtcttctttcttttggcccctgaacattggcccaaaggggtaggtttccttccaaagagagagggccttggaattccacgtggcccaataagcctgggcttcttaagcttgtttgaagggcctgacttagaaccaataaggcccacttcctcacggttagccccaaacttaattgggcctagtttttccttgaagagatttgccacatgaatcacatgtttagaagggaagtgggtcatttccacgtagtcattgtatgccacgttgaactcattatcccccttctgagagacgactccctccatgcccacctgttccactctggttcgtccaacagggcccactgccacatcatcacccccagggttttggagatttccaggaaatttctcttgggacggattcgccgcctcttcaggaataacggcagggg

SEQ ID NO: 168809 - DNA, 768 bp, Cannabis sativa
aattaaaatttgaaatttttaagacatgtgtgtttaattatagagtggatttatgcatattcacccatcttcataatggttgatttaattggataattgggttaattaggaagtagtcttttgtgaccaatgttagatatttataaataaaatatgaaacatatgtaaatggtgtataaagtacggaattaatcaagcatatatgtattatgaataaatgattaaaacacttctagttattgattatttgagcttcaattccacataaattttggatctgtaaaagaaaaggaaattaattattggtgtggtaatcgggcttccagcctctctctactctctttgaatgattttactgtatttcataaaatgagtagtgagagaccctatatttatatatagaaataggtgagacattccatcaaaatctatgccacaattagttgtcagattattttaacaattaattcaaaaaattaaattgagaaatcaaatatttagtaaattgtaatctgactatatatatagaatatcaaccaattaaatgtgatcaaattcaatgaatataaaatattcattgtattgtatacacgtataaaatcattcattgatttaatatataaaatattcaaataaccaatgcaatcctctaatcgcctgattagtcatcatttactacaaaagattttacttttagtcataataaaacttgtgattaaagtaaaaaatttgtgactaattattaatcatcattcatatattgtgact

SEQ ID NO: 168810 - DNA, 2145 bp, Cannabis sativa
  modified_base (1043)..(1051): a, c, t, g, unknown or other
tttaatgaaaaatgttaattttactaaccaacaaattcagtcaccaaacacggtaacaaatcagtaagaatagacttcaaattgaaggtacgatctagatacaaattagagactctagtaaagttatgagtcactacattagcagatcggttaataaaaataactttaacgttacataattcagcaagcaaagttttacagctttgaatgacttgaccaaacaaatatatcatgggaatttgcacaaccccaagacagttactctccacagttacatgttgccactggttgcacttgatccaagttaaaacttccttgacacttattgcttcagccaaaactggttcaaccgtactcgaagtataagtgattcgaccctcaatgagccaacccttctcatctcgtgcaaccacacccgtacgaaaagaacgtcctccatcgaacaaagcaacgtctacattaactttaatgttgttatcaagtggtggggactaatgctctgcaccatcatttgtctcagaacatgatgagccaaggacagttttttgagcattattccattgactaaggtagtttttagcaaacacaacaatgttatctgcttgggccgtcttacctttccaaacaactttatttcttgcactccaaatggcccaatacacgactgcaataagatattttttatctgcaataacctgactaaaagtcgaagtgcaccagtccatgaaggaggaaaccggtgcactaatagtcaatgaagaaggaggtatgtaatactttttctgattaaaaaaaatgtttatttcttatgatatgagaggaagaacatcattcggcttgatgagttagctatatatactattttatactaaacaaaattatttttagtgacaatataatttttttgtggctaaatatatagtttttagtcacaacaaaaatttatttatgactaaaatgtaacatttagatacaagttgtcattaatttagttttagtcacaatatttgtgactaataacacatttagtcacaacaaattgnnnnnnnnntgactaatacttttagccacaaattttttagtcacaacgtaggaatgataatttatgattagtcacaacttttttgcttttagttacaaattttgttgtgactaaaagtaaatttttctctagtgttaattatactaaaaattgtttaggattaaaaatgtcaattttaatcacataacatatatatgaatttgatcacctttgttcataagtaatgttcttgatctatttaattttagtagttttacagaaacaattgcattcactatgcatatctgagggaataattaatatcaatatgtaataatatgtatatatatatagacaatcacaagttgggattaatgttctatgacaatcactagctatactatacatagtagtagtctagggaggtccccattaaaagagacttcaaataatgcacttctttcatttcttatttaacaagaaaacaaaacaatatactaattattagtatattgatttcagaatggaagatgataaattaccacagtggcaaactttgtggtaaaaaatttgtatatcttttcaacaattagacatgtctttgtacaattttggctctgaattattattattgctccaaaaatatctccctacatatgatacaaatatcaagtttattatgtagcactaaatataatagaaatatcatcttcatgaatccataatgtccacaaaatttatccttatgctaatttgcgttagttactaaacactacaatagaaaaaaaaaattaattagttttgtacgtggaaattataaattttatgggattttatattattcgtacaaaaatattttttttttcaaaaaaaattattgtatgaaaaaaattataaaaatatgaaggaaaaaaaacccgtatttttatttttttttttctaaaattttatcataaaataacttttttgaaaaagttatgttttttcaaacttataccattctacattttacattgatattaggaataattacaagacattattttttgtaaaatatttacatttttacgttcaaagaattttttttatatttttacggttttccaaaaaataacacgaaaata

SEQ ID NO: 168811 - DNA, 570 bp, Cannabis sativa
tagctaaactttaaagtttctctatttagaggtaaaaaatgggtcacaaattaaagattcaaatcacgagtattattatgttctatttggtaaaatataaagttcaaactgtcatttaataagatgaaaaacaaattaataatttttataaaatatagagtctagaataatatttaatctatcttttaatatccttaattctttgttaaatatttaacaaaaattatatttttaatatgaaaatatttttttaccattcaatattgactaatgaaactaaaagcatctccaatagatgttttataatagctaaggactaaaaaaaatagctaaaaagttaaaatatttcatctccaacaaatactctaaattcttagttaaaatccaccatcccaaattctcaaaaatctttaggtaaatatagttaaactttaaagcttctctatttatttattttaataatttcttttatatttaattgtctttatttctctcattagcatttgtttattaaatttattatttgtttatttaaatgaggtgaaagaaaatatagagagattttgataa

SEQ ID NO: 168812 - DNA, 541 bp, Cannabis sativa
ggaatatttatgatcagattagggatatcataatggagtatattcaacccgaagcaagtatcattctgaatgtgttatcagccaccgttgactttcccacgtgtgagtcaattaggttatctcaaagcgtcgataaaatgggtgagaggactcttgccgtggtgaccaagtcagataagtcaccagaagggcttttggaaaaggttacttctaatgatgttaatattggattagggtttgtttgtgtgaagaatagagttggtcaagaatcttatgaagaagctcgtttagaggaagctaagctttttgggacacattccttgctttctaagatagacaaatcgattgtgggaattcctgttttgtctcaaaaactcatgcaaattcaagctagaagtatatctcgaaacttacctgaaatagtgaaaaaaatcaatgataagctgagtcagaactttgttgagtttaaggctcttcctagggctttgacttctgtgggtgaagccatgagtgcttttatgaagatcattggtggagtcaa

SEQ ID NO: 168813 - DNA, 1293 bp, Cannabis sativa
gagagagagagagagaggaagaaaaagatgaatcggatacaactctgagagggacgcctctcttaaaggagtattgatttttgtagcattgaaaatgtactttaagtgcaacggatgcaatgtaaggggtcgagcgccacctaagggccacaagctcccttaataaatcttaaatcttaaaaaatattgaacgcaacgtaagggccacaaagctcccttatatccgataagtaactaagaggttgagactgcttaaaaagtctatactctgtccataatgaggttacaccaaaaagaggttgagaaagcctaagtggcaaaaaactccctaaaaaatgatagctcacacaagaagtcgagaaagctcaagtggcaaaaagctccctaaagacgtttctcattccttatgtcgcacgatcgcaagacatccccgacgtaagagcaaatggacccgaccctagactcaattaattgtgcctcaaaagtgacagaaaagttttgtggggtcttgaatttgcgagctttgtgagctatgagttcaaaatccaagtcacctgatgaaaaagcaacagtgattgaaggtaaaaatattagcttcgctaggggaatattaactagacaaggcggttctaaccaagctgcttctcgcaagaaactcgcttaccctcaataacctcttgtaaaaattgttaagattttttgccctaaataaaatacattttaatataatcttatttgctatcaatagaatattagaagttatttaagtttacatatgatttttatgtttatggtttaatatacaatttctgataaatccaaaacatatagttcttcacaaattacagtgatgtcatcacagtagaaagtaattgtgattatatgtttcaaagtttagtcccatgatttattagtgcattgaatttacactgacatgataatcagtgataaaatttacttatacttggataagtggtatgtccgtattggtaaaatatactagtatcggatctatggagtatacatcagactggatcgatattgaacttggataagatatcataaacttattgttatatatttctaagtcaatgtcacttagttgatcttagatcaatagatcttaatcttgagattattaggttctggcttaactgtattatttgtgttctttgatatgttagttaaatatgaccaaatggatcggctcaatacttacatcttgggaacagagtgggagcgctaatcatagatatgaaatctatagctactataatgacatagaagtgaaat

SEQ ID NO: 168814 - DNA, 916 bp, Cannabis sativa
ttttcagcatgaagggggtcatcattaaccatgcatatggtgtgtagagatttatactcgtatgattattgaatgtacgttatttcttaattaattaagtatatattatttaacaagggctcatttgctagctttgtttaattaaaaattaatataggttgataatatttatatatagctaaaaggtacatataattgcctaagctcttttaggctttatgaggtgcttaaatgaacattttctaaccaacttttgtggagtactgtcagccagctttgatagttgataaatatagtttgggttccactgtgtgtcttcttctattaagtttgcattctatataggaatgattagacgtacagtctcttttttcaaatatatttgagaggttttcatttttcaacttcagtttttttttttttctaacggaaatacacatagaaattcacatagcaacataataaaataacctaaatcacaattaaaatctatctagcaactgacactcaagcaacctaaaaaaaaaattaaaaaataatatgagctaatttctcttttatattttgtagaataaatgtaatttggtatctctatttttaaaagttaccaattagactctttgttttgttaatatataattcatacttaatataaaataatactcttaattagattctttgtttcgttaatgtacaattcatacttactataaaataatatcttaagttaatttttttaattaacataaaatttaataataacttaactttaaaggtgttgattaagttattttttggcaactgttcatattcatacttggctttatgttaatactatattaaaaataaaattaccaaaattgaactcaaagtattattttgtataatattatacaaaataatactttgagttcaa

SEQ ID NO: 168815 - DNA, 641 bp, Cannabis sativa
cacatcttctgaaagttctttttcagaagaaaatgactcagttttggactcggagttgtcaaaagagcatccatgggttcttcttcagcagtacttgtggaggccgagggaggactcatcttaagcttcttggctgtaggaattggtctgtcatggcaccttttggtgcgaagttccttttcaagcgaagcttgttgggcacgggttcgagaagaagggccctttgaagttgatgctgcagaagaaatcctaattgcagcaggaggagatgtagtgccttgagaaggaggttccttatcagttgaagaggaagacttcaaatcgaaagatttggggaatcgaatgggtctcactgattttcaagccacggttttgggagcccttttttgggaacagaagaggtagctttcttgacagccacattctttgagtcacaccgaggaggtgatgaatcccctggacttgaaacagtagggctgttcgcggtgcgggtgtgcagtttttgactattttttcaaaccaacccgcacctgcggtttttccaatttcccaaaccgcacccgtacagcgaaattaaaaacctgtaaaaactgcaccgcaaaaaatagtgtggtgcagtgcagtttttgtggtttatgcgg

SEQ ID NO: 168816 - DNA, 816 bp, Cannabis sativa
ggaagctctcccatcccagaagctttcccatcccgaatgctttttcctaggccgcaagggcacaaaattcccaacttttaggccctcaaaactagctcccaacctaaccaaaaactaccaaactttccaaaatatcaatttgggataatttaaacataacccataactcaaaagcatctaaaacaacatgcaatgaaattcaccatgaatgagcaaagcttgagttctcaaaccccaaaattcctcaaattcgctacaactgctattacttccaaaaataagctataaacaactaaaatcatgctttaaaatagtctctaacacaattcaacctcaaataaaactaaacctccaaattcctaaaaatcacaaaagagaaccaagcttaaaacttcaaaaataacaaagaataaagtatctagggcttacctttgatcttggattaaggttctcctcaatccttggttaaaatggcttgaaaatgaaagcataaccttagttttttctgggttcttctatttccttaatgaactagatcataccaccagaataaaataaaactgaggagtttctactaactccactacaagacaaaaatctcaataaaagggtaaattctaatttttccccttacttcgtacttaagtaacttataggtctaggggtaaagtggttcaaagctataatcccgtctaacccttgcactccaaaatcaatatatcaatatccccctagataaaaagttctaaactcacccatgtgactctaccaatcatctgtcaaattttccaccgttactgagcaaaaatcataaaa

SEQ ID NO: 168817 - DNA, 1269 bp, Cannabis sativa
gataaagccccaggtttggatgggattaatgctatgttttacccaaaaaaaattgtctacttttagtcctgatttatgtaatgctcttctatctattcttaacaatcaaactgatgtttattctattaatgaaactgtaattgttgttatccctaagaaaaagaatgcttctaaaattcgagactttaggccaataagtttgtgttctactatttataaaattgtttccaaagttttagctaatagacttaagaatgtgcttaatgatatcatttctccaaatcaaagtgcttttattaaaaatgtggtcatttttgataatgtcttcattgctaatgagatggttaatgctattactcataggaagttaggtaaagttggttgggcagctcttaagttagacatggaaaatgcttttgatcgagttgagtggggttttgttaaggctattatgcagcacctttgtttccctgttaggtttgttaatctcattcttagttgtttttcttctgtttctttccgtctcctaattaatggctccctcactgaaaaattctcttcctctaggggcattaggcagggaaaccccctgtccccctacatttttcttcttgtctcggaagctttatctgttgttattagactgcaggagcatgataattctttctaaggaatttctatatgtcgttctgctccccctatttctcatcttcttttcgcagacaatagtcttctgttttctactaccactgctcgatcttgtcttgctatcaaggctgctcttgatttgtaccatcaagctacgggtcaacttgtcaatttttctaagtcctctgttctcttttcccctaacacttgtaattcggaggctgagttttctcgtcgtactttaggtcttgataataagccttttatcagtaaatatttaggcattcctcagttttttggtcgttccaaaaaagaacattttaatttctttttgcagaaagctagctctaaattgagtaattggactaacagactgttttcaagagctggtaaggaagttcttcttaaagttgttatccaacttattccctcatatgcaatgtcttgtttcagggtccctgtttctgtctgtaaaagaattgaacgtcttatggcccaattttggtggggttcttctggaaatcaagggaaagttcattggaactcttgggataaactctgtcaatcaaaatttttggggggaatgggttttaggtcttttgtgtgtcataatcaggcctt

SEQ ID NO: 168818 - DNA, 591 bp, Cannabis sativa
  modified_base (393)..(400): a, c, t, g, unknown or other
gctaactattgccaaggtgttatctcgtacttgtattgggcgcaactaatactatatgtttagcaatgctcaaatatataattaatgaacataacaattatcattaattaatgaataattatgttagagcatctctaatggagagttataaatgtagtgtattgttattttttttagaacattttgttaaaatttaacttcaatagtgatgtaaattatatgtgccaaatttggtccaagttaaaaattatattaataaattttgcacaaaagatagtatgagccaaattttaacaccacaataaatactaactttttaattaccttttttctacttattaatactattcattgactttgaataagatatatatttataagatattaaaatannnnnnnnaaaattaattattttgtatattttgaatgagcattaatagtaatattaacttttatagctaatttacaccttgtacatcagagcacaaatacaaaaaaaaaaaagaaaaaaaaaaccccaatatatataaatttatggttgttataaatattattaattatgtggatgtccaaatcttttatttattacca

SEQ ID NO: 168819 - DNA, 888 bp, Cannabis sativa
cccatcaagtactttaccactccttagtgtgataacattgcattgctcttttgggttgacaactatatcactagggaaattattatttttctacaaagcactcacaatattggctaattgtcccacttctacctctatgttcttcatggaagtagtaatattagacaagtgagtctccatgttatctaacctagttttattcttgttgaatctcttgttggtctctatcatgaaagtacccagaatgtcttctaaggacctcttctcttcttgctattgtgcattaaacccaggagggagttgcaagacatttttactgtaaccataagaaaagttctcatggtttctcaaccccgaatggtagttaggcattggagcacctcggtagttattgttataaggtttattggccatgtattgtgcttgttctatactcatatcaggcccttgtaatgtagatgcaacatcgacattctctacaattgatgtattcttctaataagcagctaaggcatccacttaattagataaagtagaaatttgggctgatatatttgtcataggatccacttcatgcaaaccagcaacctgtcttggagtatttcatccattaggccaattatagctattagtggccatctcttctagcatatcaatgacttcaattgcaggcttagacaatactgctataattatattaattatttccctaaaatttttattttgattttaaagtttagttagagtatatctaggctagatttatttatttatttaattttttttttgttggctttcgttcttttacctttttcttttttataaccttttctttttataattttgaataaacaagaaaaatgcctattaaaaaaaaaaaaaaaaata

SEQ ID NO: 168820 - DNA, 889 bp, Cannabis sativa
ggagctgttatccgtgacaatgtaggcaatgtgaaagcaaccctttcaaaacgagtagttggcaatttcgctgcccacgaaatggaggccttggcaatgtttcatagcttaaattgggcacttcaactcaatttgccaattactcatgtggaaatggatgctctacgtgtctccaatgctttatgcaaacttccatttgaattttcttctttccaagatttaatttcagatgtttgtagtcttctttccttttttcctaatgtaaatgtaactcatgtcaaatgaacagctaatatggttgtccatggtttagctaaatttgctttagaagtggatgaagcttgcttttggtcggattgtattcctccgcctataaactttgttgttgtaaatgatttctcatcttaatttataacaacaatctttattctaaaataaaataactaatattattttattatttattttttgagattagatagccattaaaaaaatttcttatcaattctattattattaaaactaaaaaacaaattgctcttgcaattttattttatttaatgataattcatgtctcctaaatcttttttcttttctttccaactctaccagcaatatagcaagaaatacaatatccaaacctctattagcaaacaagacattttgacaaaaactaaggaaagatgaaaaaggtatactccaaaacaaaggacaacatcgaaatagcactgaacaaagcctttgttctacttggaggctgctgctgcttcttcttcttctgatgaagtagttgttgtggttgttgttggccttggataatgtttagcaggcctaaacatttccaaatcaattttgggacccaatgttaacaccttaacttcgtagtact

SEQ ID NO: 168821 - DNA, 1325 bp, Cannabis sativa
tctctctctcactctctctctcacgccacacactgtagtgtagtgtgtgagttttgaatactttcctatctcatcatagtatctcatgggttgagaatatactgcgattacaaatttatactcatccaaattaaatctaatacccactttattcttgagtattgaggctgacttggaagattgtggtgtgaactcttcaacaagttcttggattggatgttcgatgaattaatatgaaaagatagagaggaaatcctgataggctacaagaggtatttttctctttttatgtagtttagatttaatctgtataggtatatattacgttgcgattcttggaattatggttcatatttgttaaatttttattagcactatttttaggttgattttagtgtatttttaaataaattttacacttgttttgtgtaattctacgcttttggtagctgttattttacaggtttaaaatagaaaaaaaaagagagaaatattgaaaaaagtatgagaaaatggccaaacaaattaactctcggggaaagagcacttagaaattaattcgagaaaaaaattcagaagtttcgatgcaattggaactcttgaggcaaagaaaataaaatatttagaggagcgcctcaacactaaaaacccatgccagggcattgaagtgttgaagcttgttttaccataatctagatttaataacatgtatgttgattataagactattatcttacaacctaaatatgaattttctaaaacaataaaacaaacacatataagttatggaaaatcttacattagtggcagtagaatataatgtctccttccgtttagatctctaacccttgatcctttctgtcgcagagtatgatcaagatttgaacttggatcttcttcagttgatggaattctacacaatcttccacaaatacctgagtattgacttaaattgtgtgggcaactcctcaattcactataaggtttcaaaaattttagaggaagaagaagaggaaggattcgaaaattgaatagaggctctcttttattttctaatttgtctgacaaagtagtctgaaaatatatgttaagaaaataagagcatcttattctatttataggatttcatcaagggttaggtttagaattatatggaattaaaaaagataaaacattggcttttaattgaaccctatggccaaaccctaagtgggccctggagggtttcaattttaccattttatttaagaacttatcttttctttcacaaatgtcatattttaattctaactctataaatatcaaatctatctatttaataatta

SEQ ID NO: 168822 - DNA, 743 bp, Cannabis sativa
cggttcgaagtggtctgggcaatatgtttgacggcaagctaacgccgtttcccggggctgaagaaggaagtgttgactttgaagtttgtctttcgccgactacaattaaattacttaattgttaagattgaggcacatgctgcttacaacaccataaaagtgtggtgctataattatttattaattaagtaaaataagtgagaggtaatgttaaatttaaatttcaccagtagtaaagttttagtaaagtttaaatgtgaggtgatttgtcttcatgtctatgtctatgtaaaaacatttagcggcaacatgtgcacacataaatataacacacatttatgtgaaaatagtgtccacatatcattactaaaaagcatctccattaaatatttaatgatgaaaaactaaaatgtattttatttaacaaaaaaaaatgtggtgatgtaaatttagaacataataaattttgtatcaagtttaacacaatatttattatgatgtaaaatttacaccacaataaatgatatacatttataccatttgtattattttattagtataattaactataatattgtaaagcattatattaattaagatttttacatcttaaattttaacatctatccaatcacgcttcctaaacatttctagacgttaaaaattccccatgaactattgagattgttagatttaagaacttttatctaatttcattcaattttattatttcattgattgtt

SEQ ID NO: 168823 - DNA, 1393 bp, Cannabis sativa
ttttattttttttgaacgagaatgtaattctatactttgattttagaataaattaaactatttttttttaaaaaaataaagaccgattaaatataaaatatattttaataatagagaattataacataaatttaagaaaaatttacatagacatagaccaaaaataaaaaaaattacaaaaatacaaccacacgaaacttttttcatttttactctttgaacttttttatttacattttatttacaaaaatttatttacaaaaatatctctaaaaatatctctttaacaaaaacaataaactattttttttttggttattttatagtttatttatagttatattacagttgttataatgttgtttttttagttatttttagttgttttatagttcatttatagctggtttatagttgtcgtaaggttgatttctcgttgtttttagttattttcttactttttaatgagcaaggagtatttttgtaattttacaactttaaaaatatatttttataaataaaaactttaggccttaaaaattgtaaataaatatatataaaaaagataattttaaaaaatttcctaaatttaacataataaaaatttgaatcacaaaattaaataataagtttttgtaaaaaattataaatagatcatatataatatataataatattggaaatttctgtagtagacccccttaaagggtcgttttagtagacccatatttgttttgacatccaaattttttttagtctatttcttttcatgatcgtatatgttgtagcgatttaggatcacttgtaaatttttagaaaattatgaataatttaaaatatcaaaaataaggtttaaacaattacttaacatgtgtataagataaaatagtcatgcgtacaataaaatatgtaaattttgttttcaacattataaatcactcagaattttttgaaaaatagacagataattctaaataactataatatgcacgatcataaataaaatgaactagaaagttctcttgggtgctaaaacagatagggaatctaccgaaatactttttaaggagggtgtactatgacaattaaataaataatgagccatgctttaatataataaaaaaaataaaaataatgaaataaatgtattttaataataaagaaatatgtatgtgaagtaatattttaacttaactattttattaatttaatacaaataatacttttttaaatttggggaattaccctaaatacttttttcttaacttttttttttttctttcaaatttcagtttgggtttttaaagtagttgcagcgctagttgcaatagaaatttctatacgattttttattgcagtttatgttgcagcgctagttgcaataggaatttct

SEQ ID NO: 168824 - DNA, 845 bp, Cannabis sativa
atctaatccaatttaatttgcaaatgtacagattaaatcagttattttagattaattatattttaatattaaattatttaatatttattaattttttatatataattaacgataaaataaaataaattagtgttgttttattttttattggctattagagtttacagcataaagttctttgttaaaattgttatttgaatagttatgcattacaagtcaaaaccttttttaagtgattatatcatttgtagtttttcaaatgtttttgagatttagaatgattcttgactctaatatccctaattaatatgccaaatatgttctaaaaaaaatataccaaaaatatttctaactagttaagaataccatcattaaatgaaatttatatttaaaatttaattcaattaaaaaaatggaaaacgatttcaaattactttaattaatgaccaaaaaagaaatactccactattagtggaaatattttaataaaatcgcactatttaataaaatgtagtatcatgaataatgagtataattaaaaagttggcattaattggttaataatttattaataataaataataaagttatgaggtaaaatatttataaatataaatctataaatatatatataaatagggaaatgttaaaggacaccagtggtgactagcactttctatgtgttaatatttttattggtccaactaagtatcgggtgcaatataatttaatataagggaaacttacaaaaatactggaatttgagttaacttttacaaaaatactgtcatacggaatttttttcaaaaatactgtgtttttataaaacacaaagcagtataact

SEQ ID NO: 168825 - DNA, 1445 bp, Cannabis sativa
tcaagacttctttcaataaccattcagcataaaaaattaaggcttcaacaatatatattttaactaacttaatcattaacaaatatagcactggatgggaagaattgacttttggagacgaaggttacaaaagaaactaaccctgtttcaaaatcaagagatacctcttaaagaacacgattaactcacaaataaatatataatcatatgaaatgaatgacgcaaatggcaaagtccaaagaaacgaagagctcactttggggatttctcgatgaaatccataagaacctgagacactcagaattaaaacttacatacatacatttctaaacttatgcagttgggcctacgaaggctggcctgagtagaaaggagacaccaaagtaaagatggagcccatagagagtcgatctagaggttcctggggccggtgaacccggtggtggaattcgattacgtcgtcggcgaggagaggcagttccgttccatcggcgtgggtgtgagagagagaaatagatggaaattgtttgttttaggttttctctaacttgtcttctcaaatcatgcgctgtctgacgggtgggtacgtgggcgggtccaacccgtacccactacaaaaaaaaagttattaatttattattattattttagtaaaaatcttattagattttatattttgtaagagctattaattagattatttattttgttaattgacaaatgaatttttttattttttaaaatagtatcttgaactaattttttttgtaaaataaaacttagttatatcaataaaaatttataaaataaaagtgttatgaaaaaatttgttacgttttcttacatttattcatgctacaaattatcttcaagttagttatatcaataaaaaattattgaaattgagctcaaaatcctatttgtactatttaaaaaaaaatataaatccatattgttatttaacaaaacaaatagttcaatcagtaatttttgcaaaactaaaatctaaaataatattaatccttattattgattattttttatataaaaaaaattacactaaatataatttttatccaattaatagcaactaaataatttttatttatttattgtttttttcaaaaaaaaaaaaatatttatttgtttattttatgtatagaattgtgatttttagtgacagttttatttttaaatttttttaatcacaaaaataaaaatactattttattttgaaaattaactttttttttaattttaacaaaggccaccaatactttggtagtgttgaattttgggaaaattacacataccactgacttttttcttttttttacttttatactgttaggcggtataatttatatttatattgtatagtttataacttttatacgttgggcttcaagatgtattttcttgtcactttaaaatgtgtttttttt

SEQ ID NO: 168826 - DNA, 603 bp, Cannabis sativa
  modified_base (543)..(548): a, c, t, g, unknown or other
aaaaatagtaaattaattatatatatgtaacatcttttactatatagtactatatatatacttctagctagtggttgtagtgccagctctaagggtagacgagctaaatctgcggttcgagttcccgaatgctcaaatctcgaaatggtaaaaaaagaaaattattaatatatagataaatattaagtaataaaaaaatataacaaatattatttaagtgtagtagtaaaaatttttactttaagttaagaggtcagagatcaattttcaatctttatttttttattttttcttttaaatatccactgtgtagttattcactaaaattattattttaataaaaattaaactatatatataggggtttcaaaatttaatttcaccttaaactttatatatgttagaaccggcctgtatcaaaccaaaatatatgatatatatataatattaggtgttgttgattatctcatctttatattccactgagatggatattcttctcaaattatacaccatgcgactcgtttggaacgccgtattagnnnnnnttgtattgtattatattaaattaattattgtattttatgcaatatttttatgtaa

SEQ ID NO: 168827 - DNA, 992 bp, Cannabis sativa
atgataagtaggatggaaaccaaataaaggctaaattgcttggatatcgaggaatgaagaaaactaaacgaagttattctaggataattacatatgtcaaacccagaagttcatttttatttttttggtcttggagaccataaagcaaatgttttagtcattttctttgatcaatcggaggaaaaaaaagttccatttctgaaaagacaataaaaaagtaacagaccactaaaaaaccaaattaaacttggccaaagtaattacacaattaattcagtcaaacctccgtttcttttcttatttccttcattttctcaccaaccaaacaacaaagcgctacacatacatacatacaaacgtaaaaattacctgaggaacaagcatgataccaatagttacaccagccataacgtcgatctgaaaatactcgcgccatttgtaggtcctaatccaacgggagcaaggtagaaagagatcaagccaatcgatccaggtcatgcgctgaagcttggaggtccatttgaggaaaagagaagcaggtgtagaaacggagggcaagaggaagaggacgtcgtagaagggtgctgcaaggggataatcttgagggggcgggtggtggtccgcatggttgaatcttcttctacgagttcattcaagcttggtgatgcgtacgttatctccatgcgcctccacccaagagctgaatcatatcactcccgcccgaaaaaccaaaagccaaaaaataaaaaaataaaaaataaataaaaaaagattaaattagtggcgcagaaatcaccagccctcgctctctctattcagttcctcattaaacaaaagctgattgtgttttttattcttttggcttttattcttttccttgttttttatattttatttaattcaggaattagtgacacaaaaaaaataaataaataaataaataaatactattttgtactctgtttttgcaaaagttatagattggaccctgt

SEQ ID NO: 168828 - DNA, 1178 bp, Cannabis sativa
ttaacatgcctaattagttagggtatgttactcctacacaaaataaaagataaataaaaaccaagcctacattgtaggagacttggagggatcttcttcttctttagcctcggcctcttcttcctccttcctggtcttcttgcgaaaagcaagaatttcctcctcatcttcctccatgaaactcgtgtccatgtcagatttgccatcaaggctcgataaagggtacgaaggccaactttgttgcatcgttctttggtttcggcctctttcccctcaagtacccctttgagcttcttgcattcatcggttttggcctttgtctccttctcggcatcttcaaggctcttcttcatcctctcagcttctttggtgaggcgcgtaatttccagttgagcatcgttccatttcttgaccacgacctcacgttggcttagtgtgttttggaccttgctctccaaatattttttcttttccaagcctcgccgttgggcgacaaaagagatgaatgaagcctagagcttcgcaaagaaagatgtataaaaagccaggaggaaggagaagtgaaataaaagacgtaagcagattacggcaaacaaacttaccaagagggtatgagacaaacccctcgtaagcattctttccaaatctccatcacggggaaggagatctttgaactagcgccagcaagcagctcaaaattcttgggtgaactctgagccagtctttcttgccttcgcaaatagtgtttcaatggcttggctcaaagaggcgaaggtgtgaggttctttgtggagaggctcgttggtatttgcggtgacccgaggaggaatttgatcttgagtttcagtcttaaggatctcgaggttaacgggctgacaggctttcttctttttattagtggtggttttccttgaccttttaggaggctgcacctcgatatctaaagcagcatccgaattggtcactctcttcttttctttcctctgcataacatcctcaaaatgtatctctgcgagacaagataaaagtgttagcatgaattaaagacaagtaaaaggggagttttgggcataatattcctcctaaggaatttaccatagtcactagaagacgaggttgttggaaattattttaccagaatctagatttactacaaagtatgtttgattaacatccta

SEQ ID NO: 168829 - DNA, 735 bp, Cannabis sativa
caggatcatccaaccattaggatctgactagaacgggaaaagttcaaagtagttttagacttcaacaaaataaggattcaaagtggggacactacggtacttcatgatatgaaggttgtaggccacaaatccagaagaaggacattgatcattcgtagggaaatgacatttaatccccctccctaggcaatacatgtccataatacgaacaagctctgccttagtcacttccaaaatgattgagtcagctacaatgactacttcttcctcatctcatcgtggatccatcctagtaaagcattacaagagcaagaatacatgattgtgttgatatactcgtaagtgtacataaaaaataaaaacaaaaaaaaaaagagatgaaagggaaaatacacttgagaatggccctgccaagaatcaaactcaccaactcatctagtgaaagcgttgaagatttaatattttactactaggccaaatgatgaaatgtgtttgaaaattttaataccatggggtcctatttatagggataaatttctcaaagtacgggcttgtgttacacaaaaaatgctcgtaagtccctacacttaccaaaagtcaataaaacattttccctaagaagtgaagctacttgtcatcgacgatatcaaaatagaatatatatctcaagaccacttctaaagaagtgctctttaactaggtggcaatgttgatattagaaattaacaccacgaa

SEQ ID NO: 168830 - DNA, 1088 bp, Cannabis sativa
agagagcttcagacttatgttttaagggaaaaagccaagtgtaacggctgtgatcatccacaaagtggatttagaacctgaatttgtgtgggaattaacaggagttggcccccacagatccgtatgaatgagatctaatattcttggggcagggctggtttaatttttaaagggcaaacaatgggatttcccatattggcaagcatcacaaaactctagtttttcattcataaaaggccttacatcagtagcttctaagacttgactcaacacggcatgagaagggtgaccaagccttctatgccacaaacttaagacagactcactaacactaagtttattggactctaaagttacagtagcaacacccgtaaaagaggcagacttagaaattagagactggacatttgagttgtattgctgtgagatgagggatgtgttgagtttgtagagaccgtctttaagagctccatggagaaccactctccctatctcccgatccatcacacaataaacaaggggaaagaattcaatagatacatcattatcagcagtaagttgagagacactaattatgtttttggtaatgtttggaacatggagtaaatttttaagaactaaaggtgaatgggaaatagttttaagttgacttgagccaatgtgagatatagtcagcttattaccatcaccaacagtaatcttctccttaccaccatacacagtcttattgctctgtccatcataagtggtcaagtgattgcttgccccactatccacatacaacctatcatcatttaaaacctgtggagtagcaccaagtgcattgagctgtttatcttgattcaggtctcctggtggttgatgtcccatgtaactctcgttgtatctattgtagcaaattgcagctgagtggccatacttgccatagacttggcaaataggcttgggccctccaaaccgacccccacgacccctgccgcgttttccactctttccacgggaacctgtgacagtcagtagtcttgtgatctgtaaggggaaacaccgggtaagctgtgcaatcccacatcgtctggggaaggtcaagt

SEQ ID NO: 168831 - DNA, 900 bp, Cannabis sativa
attacccttttatactataccctacaatctttgtctacagtgttatgatgctaaactttaaagatacaaaattctattccatggaagtatccacatctacatcaaaattatatcaataaaagtagagcaaaaattcatcaaaaagaaaaattgactgtagataagaaaacaataccgtgcctgcaagcaaagggaagagatatatcctgagcttcagctgtgtgcaatatatattggtcctgcaaattttaatcatgttacacctaaattgttcaaaattttgatgtaaatttaatgtcactgaatgattattttatcaattttctcatgaaccaaacagaattttaatcaaattaacctaaaagaaacactaaaatactgccacatttcatgattcgatatgttattatttttctcgagaagcaaacgcaaaaatgtaatatttaaaaatcaatgggtgtacctcagggacggtgaactggtgaacaacacctctctgtctgtcgtggacagtgaccttgtgagatggaattgttggggaaggaagtgaggcggtgagtccagctgccgtttggagttgggaggtggtggttttgcggcgttgttttgagggattgaaaggatgaaggagtgtggagatttgagggggggttagtgggggttttgggtagaggcaagtggtggctgaattgtagggaatggtaagctccattagaggcttcatcttcgttgttgttgttgtatatgtttaattgttacttagtattatctgctactgctactattccacaagaggataacggggagagagggagtgggctataattcactgctacccattttatttgatgaaaattacatgaaatatgggatttcataacaaagttagaaaaatatggc

SEQ ID NO: 168832 - DNA, 1595 bp, Cannabis sativa
acaattagcggcggactatccgccgttaatggtattataataccccattagatccatttcccccattttccccttcttctcttcaaaactcaaattctcttttccccccatttctccaccacccataaccaccaccccgacccccttgacgcaccacaaccccgacccccacacaacggagcactcgacggtaccagtcatttttcttcatttttggtaagttttgattttttattttacatttgagattatatagtttttaagtttaaaattgatatatataatgcgttttatatacaaatctatatattttaggttttaaatatttttacactgatttataaattatatataattttctgcataaatcaatatatatatatatatatctgtgtatatatttgggtatttatttttaaatatctgtgtaaaatatatatatattaattggtgtatatataataatataataatataaatatagaataattagtatatatatctgtgtttatttaaatatatatattttggtttgggtacaaatctatatatatatctatttataaatctatttatatagataattttagggtttatatatttaggcatttattttttttttttatttgtgcataaaaaaattttaatttgtgtatatatatgttttattgatatatatatatgtattataaatgtataaatagtctaaatatatataagattgtatatttttttatttatatatatatgtatatataaaatatatagtatatattaatgtatatgtattgtatatagtgatatatattgtattgtattattttgtagcatttttaattaatttatgtaattgataatatattatacttgttatttttcagattgaacaaaaagatttttagcactttggagaaggtgtacacaaaagttcttttgtgaaatgtatgtttttaataatgtgtatttgtttgttttatagtagattttatttaaattaaataagtttgttggttatgttgaagatgtaatattatcttaaaaaaaaattgaataatgaaaaaaatttaaaaagtaaggttagtaatttgttatatatgtgtagtaaaaatttataattagaagatgtaatatattagtttatagttaaatatgtaaaatgaatttttaaataataatatttgttttcataaaataaataatttatatttatataattttaaaaagtatagtaattttttagtttttgaatagattaatgaataacttaaatattaaaaattaaaaagattaattagaagaatttatttatttttttaatttaaataaaaattgcaattaaatgaataaaacttttatttaagttgttaaaaaatagttgttattgtatttttaaggtggtataaaaaattaagaataataaataaataagaaaatggtaacttttaatgaatttgttttataaagataaatttgtaagtttaggaattaagtatatagttagtttaaattttaattaataatataaatttttaaaataataataattcatttaaaaaataattattttatatttatttaaatttagaaaataattt

SEQ ID NO: 168833 - DNA, 780 bp, Cannabis sativa
  modified_base (612)..(612): a, c, t, g, unknown or other
tatggtaaagaatacaaaatttatttctcaaaattataaattaacatcaatcttgaaatgaaaacaaaactcacattaaagcaaatcaaattcaaagataaagagaaaaaatagagtaacattatagaattaggtagaaaatatccttacatgaatagtcagattgagaaggagagatgtatcctacaggtgatttgcaatgggattgagtgagagggatagatggagagacaaaagagatacttactctattggactatatataattagcaatgtatctatagtcagttactttttatttagtagatcactattataataataaatgttttattataataaatgcttgtaatttttaaacggtgaagagggggaaggaaaagtcaatttgtcatttatttctgttacattttttttattattattatcattaactgaaaaaattatatcaaataaaagaaaacaacttattaaaaagaaatgttacatttttttattattatatcattaaaaagatataaattttcaattgtcatattataataataaaatattataagaatgagagttataaaaagaaaagtgactaattttctcaataataataataanaataataataataataaaatgtgttataaatgatgtgagttatgagaataaatatgtacataataataatgaaataggagttataagaatgaatagacattcataaataaaaatatagataaaaatagataaatcttagaaaaaccataaaatagaaaaatgacaata

SEQ ID NO: 168834 - DNA, 650 bp, Cannabis sativa
atttttacaattatttccaaaattttaagataacatttaaaattgtttgtaatttttatttgtactgaattgggatctttggtagtgctagtttactttctagttttactgataccttccgaatttatgttcatagtcataaattagtagtgcattcactcaagatggacattaaactattttaaataattctccatcattttttcttggtgtattcattcttattatttttttaatgaaagttatgttcattattaaaaaaaacatttaagaagaaaataattcactaaagtaaaattgtatatatatcaaaatttaaatggcaaaatttgttatgtgtcttttcaaatgtatgtcttcaacatgtaatgtgaaaaaataataccgtaatacatgagtgagtatgatatacactacaaataaaaaacgaaaattttaatttaattgggagaaattcttctttgtttaataactaatatatatcatttgactctcaataataaaattgtttattatattaaaaaaatcaatcaaaagactttttgtaaatagaaaaaacatgttaaattgtttttttccaaaaaaaaaatcagttccctccaaaaaaaaaaaaaagaaatattaaatttttttaatacaactatgaaaat

SEQ ID NO: 168835 - DNA, 746 bp, Cannabis sativa
  modified_base (697)..(697): a, c, t, g, unknown or other
atatgttgctatacactccattttaactaaaatttatatagaatgttcttatttagttataattttttttgaattaattcttattatttatttttattattatagcatcgattttattttaattataattaatttgagttattttgtattatttatttttattcattatattaaaaaattagttatatttcaactataatcggtttgagttatttatttttattcattatgttatacaatcggttctatttttagttaaatctgagacatctatttctggtgatttttccagttatttttctggcaactctgactttttcggtgactgtaactttttctgacattttctttggtgaaaataattttttcgacgactttcttgataccggtgctagtgattttttcggcgaaacttattattgtttacaaaaattatatttttactttttttacaaaaatatgacataaaaaacccatataaatatatatataaaaaaaatctataactccatggtattatactattatttatttatgccataaaaaaaataaattatactatatttttctatatttatagaaaaaccccttaaaaaatagtgatgaatttaaaatatataatagggtaaatactaatttggaccatctgttttacaaaagttaccaattggaccctgtgttttgttaaatgataaantggaccctgtattttctaaaatagaacaaataggaccctgaattgattt

SEQ ID NO: 168836 - DNA, 521 bp, Cannabis sativa
tttttaaaaaaaaaaatatgaataatctacaatattaataagttacttcaaaataacaattgcatgcgcattctcttgccatccttgcttcgtcctcaaatacaaaacactgctagcttcgttctcctgaggcgcttatcgaagttaatactaatgcctctcttgatcttgtgagggattattgtgaattgggtatagtagcttgagatttttaaggagtggtcttgatttctactctttggaagttgaagggaagcttttgttgggtccgcccctttgttgtgggcttagaccatttaagggcttaaagcccattttgtttgaatcaattaaaagaaaaagaaaaaaaaaagagagagaggggagaaatagtggtatcgtgagcagccaagggaaaagaaagaaaaggagtaaaaaagaagagaaaaaaaagctagagagagaaaggggttttgccattttactttgaatatcaagtggtcaattctcatccattttagctcaaattttgggtggtgaat

SEQ ID NO: 168837 - DNA, 1031 bp, Cannabis sativa
  modified_base (1001)..(1001): a, c, t, g, unknown or other
gcaaactgaacaacatcatccacagtctgattcttttgatcccaaaccaactcattcctagccttccatatagcccaacacaatgtccccacctgagcaactttccaatcatcaacccttgccattagatcttgcagccaatctttaaaagaatcccacacccgacccccaccatctaatgccattctcgaccaacacccaacaacgaaatcacaattaagaagacaatgcgatatagtttcgctggacactaagcaaaaaggacaactataatccaagggcaccttcctatcaaagagtctcttccttgtaggaagacaatttgaagcagccctccaaagaacatccttgacagtaggcgtcacttttaaactccaaaggtccttccaaaactttgattcactatctctcaccccagagctagactctcggttaacaagcaatgataggctgtcttaaccgagtaaacaccatgcctctctttgaaccagtaccacgaatcacgagcatctccagcagcaagaggaattcctaagataacctctgcatctccttcattaaacacgtcacgaaccacctcttcatcccactctcgacacccaactttgaataaactattaaccctatgatcgttgtacatagataaatcagaggtaggagttggaaactcttctcttggaagccacaggtccgacacaaatcggatagaaagaccatccccaatccacattcttaacccagcttttaacacactttgagcctccaccaaacttctccatataaaacttggattggagcctagttcagcagtcaaaaattccccatgcgcatagtatctcactttaaacacctggcgcaccaaagaattgggattaataatcaatctccatccttgcttacaaagcatagcaatattaaaatctcgaagactcctaaatcccattccaccgtcaaacttttgcttcactagtcgggaccaactcatccaactaattcctttnttttggttccaagaagatttccaccaaaat

SEQ ID NO: 168838 - DNA, 737 bp, Cannabis sativa
tcacagactccaatacagtgcaaactctataatggtattataatgagtcaaatttaatacaaagtataacacaagttaaatttaacaagtcattttttagttattatattctaaaatttggatgataaaaaaatattttattttgtatattatcaataaatattaaatgacaaaatattgatttaagtcaaatttatcacataatttacatcattcattgcattctggtcttcaaataaactattttaaaaataagagatagttgcaaactcaaatgaaaggtaaattagaggctgctgtcagcatgttgaagtgttgaacataaaatgttaggtatgatgagttcaagtaaatgagaaaatgaactagataggatctcaaaaaagaaaaaaagaagaggaaactattttagccaaataatcccctaaattaagataattgtatatgagttttattacaattacactttatataattatagttaagaagagagattatggtacaccttcaatttatttttgcatttaggaaagtaaatttaaaaaattactttccaccggtataagaataaatagataaattaaaaatttgtcgtgtacaaaaattagaggtgtacaacatctaatccaattcaattgaaccatctaatccaatccaattataaaaaattggatatccaattacaattggattggattggatgctaaaaattaaattctaattggattggatcggtt

SEQ ID NO: 168839 - DNA, 898 bp, Cannabis sativa
gcataaatttctgaaatattcactttgatctagataagtctcctaatctcaaaaaattgcattaataatccctaagctcgaaattcttgttagtccgtaggtatccaatttcacagctttatttgtaattcttaaaattgtcatgtgtcaaaaaatatattggtccacatcataaaagtttatttaaaaatcatttaaataaaaaattattaaatacttgaatatttttttttattttcttttattaatgattaaaaatattgtatatattcaaaaatttcaaatttctacgattcaccacctacccttctcggtggtagaggctttacatactgacaatcttccccttttaagaaattttattttataaattttcagctcatttggtaggccatataagggtggcattgtattaaataacaaataacattatatttggataaaatattgtattgtattaattatcatgactttacattttaatacaatatgaatcgtattatttaatacatactaaataatttgcattagcttgtattatgatatttacaaagggtctgaggtcaaccctggcaccagacctcggacctaaactttggacccaaactcaggacctagagccggattggacctcagaattggacccgaacctagacccaactcgaatctcgagctgaacccgagaccgagaccccagacccagttcggaccctaacccctacccaaacccgagaatcggactcaaaccctaactcagacctaaacccaaaccccaatctgaaactcgaagttggaccctgacccaaacccaaacctagaccctagaccccgagtccgactggggtttgaagtataggtgcaaagtttgaggtcgggtctaggtctaggtttgggtcct

SEQ ID NO: 168840 - DNA, 894 bp, Cannabis sativa
gtttctccctatttatagaattcttcaaaatggcaattattttcttttaatcttatcaagacaaccatttatgaaaggtgaaattactagtcttatgtaatgtaataactgctaaaaactgtctgtggttcctatttaaatggttttattcctgaggtgattatgtttcgtctcaaatgaattgtcggaaagtacttcaggccttcgcgtctttagattattaatacaagcttataaaatctttcacgagagcttatcgagattgtgatcttctactcttcagagattcgattcttagacttcttaattatgagatcagcacaaagttatactgtatgtcttctgatactagctattctcctcactctgttcattatatactattgctatcccgaacatgaatctgtgtgtttttctttttaattcattagttttactagtcttagtcataacgtcgacttttccttttataactaaggatagacttcattaattatcatatctagtattttctaagctaatatttgttggcgttattcttctttacaatgcgagctaatttattatccagttttaggacacgtgtcctattcatatttttgctcaaattataaatattagaattttttaagaaaaaaatatttaaaataaattataatttaatttcttattttttattttgttttaaaaattattttatatttatttttatttttttttattaagaaaccacattactttacaatttcttataaattacacttttatttttataaataataaaaatataattaaaaatattacaaattattttcagcccatataaatttatactatgaaaaaaaataatgaaaagtatataaaaaataaaaattttatataacataatttttt

SEQ ID NO: 168841 - DNA, 561 bp, Cannabis sativa
attaccttctcttttcccatacgtcttcttttgttatcaagaataagaagcaaatcatcctcattcaatgcagattcatcttcccttattatgtggctttgacccttcccattattctgcccattaaccacccctccaccttttactatctcactttgattctttcctaaaattatgggattatgatcaccatcctgattaccacaatcaatttccataattttaggcaatgaagatgcataagctccggccccagaatttccagagacaccactcaacccggcggctccaccatcgtcatgtcctgtgcgtagccactgtgctccaatcagataattctttttcttcatctgcgccctcatgaaaatcccatatggctttttcaattgatcaatcggttggtcaaaccgtttaggacaaaatctttcggagtgacctatgattccacacacaaagcaaaatgttggaaggtgttcatatttgaaattcgcccatatccattcaccattttctttgcaaagcttcattctccgttttaatggcttattgacatcaattgtt

SEQ ID NO: 168842 - DNA, 881 bp, Cannabis sativa
gattggaacatggaacgtgatatttggtgctccttgaatgagactttggccaggaaagcaatttattggaagtaacgggctacaatatctttgcttaaggaaggtgatatgtgttcgaaattctttttcctctcggctcctattaaaggaagaagaaatgccattgacattattttggattagaacaatgtctagatttctagtcgtgagttaattgggcgtgaattcataattttcttctcaaatatatttatgaggcctggtgatggacaagagattacttgtcgtcagttgtttcaagagaggatctctcaagtggatcatgacgagattatccagactcctttgcatgatgaaattaggaacaccctcattgatatgagcaatcataaggcgccgaggctggacgggatgtcagtgcaatttttcaagcattattgggagtatgttggtgatgatttttgtgaaacagtttctgatttctttgtgaatggcaaaatgcataagggcataaacgctaagaatattgttctcattccaaaaacccagaacccaaagagaccaagtcactttaggtctatatccctttgtaacgtgttgtataaggttatatccaaaattgtggccaataggattaaacctatattacccagcctcatttgtcctactcaaactgcttttgtcccgagtaggaatatttaggataacaatgtcattgcacaagaaatcatccactcgtttaattggaaacgaggcaaagagggggttttttgtagtaaaaattgatcttgttaaagcctatgatagattaagctggagatttattgatcatgttcttgttgggttttatgccctaaataatataatcagatttacttatt

SEQ ID NO: 168843 - DNA, 955 bp, Cannabis sativa
acaacgtttccattgctgatatgctgggttgggtgcacctgtaaccagattttgggatgggggaataccagcaaagagaatattgtcgagttcatggccgattacggttggaacaacctgagatttccaagcaagaaagttggtacggtcaagtttgatggtgagggaagcggtaagagaattggaaaaggggttccatggtggtggagtattatttgcagtagcaggggttgggttatcggtttgaacatcggaagcgatagcattatcaggagaagccattaaagacggtggtcaagggcatctgataccatgaagaagctcaaaggcagagaagaaagtaaattaatgcagagcgtagaaacagagtatttgccaaaaagagcttaaccaaaatggttagcttatgatcttatttatatagcacaaagatacaaagcaagaaagagtaacaaactcttttaacagattaatgcaagaaacaactatcctaacagaataaacagaacaactaactactttgaacattaacgcacatgttctggtttacagtcttgcatcacatcaagaaccaattatggaagatcctacctctctccttgagaggcacttcataaataatagtaataaattaaaacaaaagcgttacatttacatttaaaaattagactgtgctatgtttttttttataaattattatattgactgtttgtttatttaaattgttatttataattcgtttttgttgatatatattttcaataagtggaggaagactcaaactcaatggactccaaatgccatcctgagttaaatgaatctcaataattatcatgtctattgacatcacttctttaaatgtttttgtgtattaaattcatgggtaattatgattttttctcccaaaactttgacatataccaaatcattgctggaaattattttatcaggatct

SEQ ID NO: 168844 - DNA, 693 bp, Cannabis sativa
ttggatcccgacgttgtgtacgagtctaggtcccaatatgggttaagatttgagtcttagtccaggtcccaatctgagtcctggtccctattcgagtccgggtcgggttctggtcttggtttgggtccaggttcaggccctaagtttgggtctaggtttgagtctatatttgtgtccgagtttgggtcatgggtttcgatctcggtatgggtatgtgtttgggctcgtgtccaatatagggtttagggtttagggtttgggtttagtgtttagggatttagcatttagggtttaggggtaagtgtaaagagtttaggatttagggtttagggtttaagggtccgcttcaggttctagttccaatttcgtatcacagggtacgatttaaggtttcggtgtgggtttgggtccaagtccttgtctaggtccaggtctgtgtttctgttcaagtttgagtcttggtcccaaatcaaaacaccaaccacatgttgagtctagttcaaattctgatacgggttcgggttctagtcagggtctgggtccatgtccattcccaaatttagacatcgactatgggtggggtttaagcctcgattcgtgggtcttggtttgggtctcaggtctaggtttgggtctaggtttaggtcttgggtcctgagtcatgggtctgagtccctgattcaggtcagggcc

SEQ ID NO: 168845 - DNA, 1287 bp, Cannabis sativa
tgatgagaaaaaaattaataatttctttatcaatttttctatacattttaaattttatttctatttctattcccattcttattttattcttatatttttatttctctcaactaaatgctacctaaaaggttcctaatgatagaaaagtcattcaagatgttcaaaatacaatttgtgttagactttctcatttatattcatttcatttaccagaaaaattatatttaatgtgagtgtgtttcttttttctcctaaattagtagttattattttttaccaattaaattgttatttataacaaaaagtaacacaagagacacatttctacaattgtattagattaggggcattttaaacaggtcgaggtcgcagatcatagggaacatcatttagtagtgtcataaattcataggtaaatatattatattattattgtatttttaatttaaaatatgtaatttggcacttaatatttgtatatttatgtgtttttagctttttcttataagagtaaccattgtaggttaaagaaaagaacaccgagaggtaaagagaagagatttcttctatttaaaaaagcctactgtctattctaagggcatgctaaactaatttatgagtcacaacattaacgttacaactgacataagaaagagatacctctgaaaagctaaacgataaaactttaatatcagaaagtaaatccctaaatgtgtgtctgtcccaccaataaatctacaaataaagagaaaaaatattagtatctataaacccattaactaattagttagttagtacgattatgttagttagtagttaattcagtttgttgtaaatttgttagacattttcttgcatcttggtcttgtacttagcactataaataaagaggttgaagctaaccattttggttaagctttctttggcattatttctttccttctctttactcttttcttctgttttccggtatgtaccagtttgttaagttgccattgcaaagctttgagaaaaaatatccaatgttacaattattttatacctgttactactacttccgataactcataaatatggtcacgtggagagggtccaaatgcattacattttttttttattttaaaacttaatatttttaatatcagaaaccatggttcactcaattatggtaatttaagaataagttttagagcaactgatgtgtaagttttggaggagagcttcatcgaagaataaatcgggtatacattggatgaagtgggaccgaatgtgtgaagcaaaggatca

SEQ ID NO: 168846 - DNA, 1156 bp, Cannabis sativa
aaaagaatattctgttaaattgattgaagttttgaagactctttgttgagctttaaatgttaggaaggaggcctgtatagaaatgaggttagagaaagaagtagagggtcataaaaagaaaaatagtagaaatcgaactaaccaactggaagagatcaacacctcgccaagaggtcaatgtaatttccattgttgatcaggttccagtcatcctattggcatgttttaaagtgtactagttttgtgtagcatagtgcgagcaagcctaggaaacctcaatgcctgcatattttggtaggggtaggaaggttccaataacaccatctctggatgggtcacagagaattggacttgatgaatagaccttaagggtttcccatttgtgctcgtagatgtaggcacagaagtggaaccacttggagcatccaattctttctctatgatgattctagatgaggtagcttttttcctattagccccttctttctcttgggagcttcaggttgtgtctcggaagtaacttccttaaggacactcctcttcttgcctcacttgacaatgatgctaggactgtagatgagatcttccaaattatccaattctacaatggtagaataaaggaaattaaaatctgcaaaaaaaaaaaaaaaagagtaaacttaaagtggcgagattaaaactcccacctaaatgatcaccaaaaggactaggcaaggaaggattgctattataattattaaactccctagaactagtgatcataaagagatcataagataaagtgaaaatatatcccaatcctgactagcagccctattggtgtgaataccatattatttagcaattccataatacgagctattacaagttagttggacataaaacttggggggccaactattgaacttataggctatcaaattgatgtcattccaaatatagaaattatattggctatctttaaatttcacttagggagtatgctcggtcctaaggatggtagtagaccatccataaaaacaagaagtattacctcagggactcctttcttaaacctcagtgacttcccaagtggttacatttttaagataatggatgtaaagcccgcttagttaatttggaaattatcagttaattgtgattaattatgaaatta

SEQ ID NO: 168847 - DNA, 671 bp, Cannabis sativa
cactttttttacaagttaacaaacctagaaagaacctttgagcaaagtataaacaagtaaagtgataacgagtcaacttgaccttgacgaaggcctctcgtagggaaatatgattttataaaaaaccactcttaagtagcacctgaaattgactgggagatacaaaaatgaatcaactctcgaaactgatcatcaaaccaaagacccagaacaccttatcaatgaacctcactcaaaataatcatatgctttagacatatcacacttaatccctacaaaactttccttgtttatgttgaagctcataaacaatctcttaagcagcaattgaattttcagcaatccaacaccctttgacaaagacaactagtaagaagagatcaacttcgcctaaagaggtctaattccatcaactataagtttagaaataaccttatagctactcttacaaagcaattcgggcgataatcgttgaagcacctaacctaagcttttttcaaaatgagctctaagaaagtctgattgatatccttgacaaatttccctgaacaaaaaaactatgtttgatgcatatttatatcccttatgttaaccccttcccaataaataacaaaatcaataatctaatttttacttatattttcatgtgtaactaatatatatatatatat

SEQ ID NO: 168848 - DNA, 614 bp, Cannabis sativa
agattactaaactttatgaggggtatagtaccatcatttacctttttgactcttaattatatgtattttatacatttgttttcatccttaatattcttttttaaaaaaaatagagtgaaccaattaacccatttgtttttttttaattttgttatatacgaactcaattcacctcaataatttaaaaaaatgttaaagaccatctacaatgttcagcactattatgaggataccatatcgctactgatgtaattaaatatcaaattctacatgttattgtactaacttcaatccactttagtgatcacttgctcaacttgtaatatgttggtttatgaaaacatttttgctaataaaatagctaatctacaaattattgtcttttgggtaaaaaaaaatctaaatttataattatagcccaaatagaataataatatgaccatgagaaaaaaaaagaaattaatatgataacaaatgtggccataaaattaaaaaaaaaaatagtaggtgtgtctcaatatttgtgacagtcagtagtcccgtgatccgtaaggagaaacaccgagtaagttgtgcaattccacaccgcttggagaaggtcatgtgtgatgatt

SEQ ID NO: 168849 - DNA, 554 bp, Cannabis sativa
ttaaaattttcaccaacagtacaaatcaaactaattcgtctaattattttacatgaacttgttttcttgatacaatattgatatatgagaacaatctttatacacaatattttttttattgttatctataaataataacctttgaaaagcaaaaaaaaatgataacaaaacaataaattactttttaaaaaattgaacaaaatgataagcccatatataatttatactcaaacttgacaccaacttatatccaaaacaattttaatcaatctttttatttaagatagattctacctaaataatttgccacatagatatattttaaatttatgtgtgatttatgtatttacatatcattacttgtacaaaatataaaccaaaccaatttattcatacttggattggcttgatttggtttaaacatttaattagtttaatttttactatctgaactatgacatttgtaaaattttgttcttgaatttttctctattgcaaacatcctcgagttatgcaaatctttacaaatatatgagttacatgtataattgtag

SEQ ID NO: 168850 - DNA, 1188 bp, Cannabis sativa
  modified_base (1135)..(1142): a, c, t, g, unknown or other
ctccttcaccggcttctcgagggatagtgttttggaggtattgtgttcgagccacacgatcccaggtcttatcctcctttggaacaggaacctgctgccaaaaagaatacttgggaaacttataatcacaagtatattccttgtcagtaagaaggcccaccgatctcagattggcctcattcaagaggaattcgcatgacctaaggccatggggaagagtcaacaggcgcctgtgctgactaaccatctcaggagtagggacaggtcttttcgagagggctgtaaagaaaacacacacaaaacaatggtaagacaactaaaaatgaaaagacaaagattggttcaactgagcatgaggaaagtaatcacttacaaattctgcggaaggtggttgtaccgattggggaaagaccggttgtccaaaagaagtcgtccttgaaagacaccttgtttggcaggtccacaatgattttaggctcagtagagtgagcaccaagataataaaagccccctgcgacattcttcctcgctggaacagccttaaccgagtagagatactcgatttctaccgatgcaaggcaatcccactttagaatttcatacaagaccttcgaactagcgagaattttttaagaaataggagtcaacttgaagggggcaaccccaaggtggtttatgtaatccttgaagtaattccgaagagggagtgtggcccccgtactgatatgctcaaggctccaggcgcccatgccagtcgagccactggtactggtctcaccactagcccctagggtatcgcctgagagacgcgcaagggggtaaccactaaactcactctctcgcattgtcctaacttgacatgctcgtcgaagtttgattccgcaggtcttcagtatatcacctatgtagcctgagatagatcgcaccttcgattctattaactcggcttcaaaggtgactctgggatcttggggagtctttgatgtgcgtggcttgggagacattatttcaaagtccaagttacctggttcaaaataaatcgtgactttgggtaaaaacaaaggattttccaaaggaataaaggacacactgggagcttcaggccaggccgctgttggattttgtgccctaaatnnnnnnnntttcaatataattagatttacttactaataaagatcagaaataaca

SEQ ID NO: 168851 - DNA, 623 bp, Cannabis sativa
aaaataatttccaacaatttctgggtgctatccttcaataagttcaaccaaatagatcgtcatgaccctaaaatgatgaaccatgaggctaaggataccatgtagacatcacaggctcaacttggatgccagctcgagtccaacaatagtattggcgtccaagttgacattccatgcgtcgtcttgtatcagttttagatcgcaacaacttcccatgtgcaatctagttagtaatttcataaggatacatgagagacatgccccaaccaagtttcaaactttggatatatgtctacaagaacttgcacatgggcatcgtggaattctaatgattcctaggttgacatataggcaatctaggctacacggtggttagggttcaggtttttgagaacttctttggacccaaattcatccaacaaggaacaacaccaaggactgagattcatcaatgacatcctgaaggagcccacgtgaaactatgggcacccaagttgacatttcagctcaggcactgattttatttcgtcgagtaacacttgtgctaatttgatggtgttagaaataatagagagattacaatggaagaataaaataagatgaataaaagactaagacaatta

SEQ ID NO: 168852 - DNA, 847 bp, Cannabis sativa
tttctatattaatgacgcgtatttgttttttctttttgagatgattttaattagaatatgatttattgaaaaaaatgtgttgaaaaaataaaagacacacgtattgtttgaataacatgaagaaatcaatcaatttttttttttttgaaaggaaagaaatcaatcaattttaattaaccttttattattttacaaaatcaatttaacttttttttttaacataaatcaatttaacttttattattcgcgtcaaaaaaaaaaaaatttaacttttattattgtccaatggctcttttctgtcaaatattttgtttattaacacgaaagaaaagagtacggtaattattgttgattgtatgtatgtatgtatatatatattttattgattaattattgttgaaaggaaatttggattaaaatttattttttgtttgctttatatatttccgtatgcacatgtgtgtgttagtgaagatattttcaaattttttgatctagagataataacaaaaaactaccactaaaatatgttaatcgcacttaacaaaaaaaaaaatatgttaatcgcgtttagcaaaaaaagaatctgttaatggccaccgctactaagatataatatgtattttatttatttacttatttgtacatattaatcttaatgaaaaaaattatattagggttatatgtatatgaaaggctggcaagggtattatgctattgttgctcctgattttacccaaaatacgtggaccagccggacgatgacacgtggatgggaaggggttagcatttaaataaaacagccaagtctccttaaagcgcgggattaccttaggcatgcctcccg

SEQ ID NO: 168853 - DNA, 1075 bp, Cannabis sativa
tctttgcacctcaataactctgctatctcttaatgtatacagcgaagccaagtaatgccgtgtgggaccagtgacggacccatttgtattaacgtggggctatagtttccactaataaaaaatattacttttttaaaattaaatgtaatttttttatttaataattatagactaaaatagtaaaaaaattctcataaaattaaataaatttaataaaattgattataatataagtataaataatttttaatgataaataatctcgcagaaaataaaaattttgaagctataatttgcttgttcttgtcttaagtagcaaggtgcagttacacatgcatatatatgtcataaaattctaataatgataataaaaaagttttatttttttcgttcattcttattgaaatggaaaagtactatttgtttagtctatcaaaattgactatttcattttgctttggaaacaagaaaatctggcacaccgaattggaactaggatatttatcaaaataagaattggaactaggatatgggaatggaataaagagaaaatatctaggatattgggaatggaataaagagaaaatatactattttgataagtatttttcaaaaattattaattagaatttttattttgttcaatataaaataaaccttgtattttttaaaattatataaataggactttaaaaaactattttttaatcaaataaaaattaataataatctgatgtagagatgttatgacaagactagttatattttctgtatctgtttgtgttaaaaattgtcttaaagtttgttatattaaaaaataaaattattaaaaattaaactcaaaatcttatttttaccaaaaaaatatagggtctattttttcatttaataacagatagtccaattaataatttttgtaaaatacaaggtctaaaatagtatttatcctggaataaatcatctctcttagaaaaaacaaattgaggtaagttttggtactatcttggcatatatataagagagcattttagtgaattaagactacatgtaaaatttggcaaattaagactataag

SEQ ID NO: 168854 - DNA, 800 bp, Cannabis sativa
atacaatattgtgagggttagatacatctctatctcacctattatcttttcatttgttgttttgtgaaactaaaatgaagacaattataaataattataacacttcactatacatatacttcttctatatattaattattatagtgcatatgacttgatttgtctctatctactttctttgaaatattttttgtcatgaactcatcatattggcatataaatatatatgtttttttttcactataaatatatagtgacttaattttccactctatgctactttgatcgagttcttcatcacatgttgacacatgaatttgagacatttggtctttttaatggagaaagatatatatgattatatatagagaaatggaaatgattatacttatggtgagatttggaggtaatgaaatggaatagaatgaaaaagaaataatttttattctattcacttttttttgttgcattttaaagtattggaatgatattctaatgaaatgttctttctactattttgttggaatattgactattttattttttttaaaaaaaaaaaaatagactattttaatgtaacaagaaaaaaaaaattaataatcttgtttatcaatttttttttatgtattttaaattttattccatatattaatagtatgatacttcatatattggacagccacagtgccttaagagaaacactgaagggcacccgtggtgcctagtaacctcttatgtgtcaatattgctattagtttaattaagtatcgggtaccatattttctcaaaaaaaaaaaaaa

SEQ ID NO: 168855 - DNA, 656 bp, Cannabis sativa
aaatggaatagctcaagatatatggaacacaagagtaataaattaatagtcttaatagataaaatttattttattattaatttttaatcaacataggaatgacaaatactcaaacttctaagattgaaaaactatacaccaaatggaatagctcaagatatatgaaacacaagagtaattagatggtgttaatatagataaaaattattttaaatgttattattattttgaatatttgttacaaaattataataattattatattaaatataatataatagaaattaccaactgccaaacatgataatagaaatttacatgagttgacatccaaacacattttttattttaaaatacaatgtcattaataattacacaatcttccaaatacaccgttagagatacaattcaaagaaacaaaaatttcaagataaaacgagtaacattactagggatgcatatttttcctatagggatgggctccgcagatactcacccctaatgggacaggaatttttcgtctaaatggcgaatggggcgaggatgggatcaaattttatctccgaatgttagacagggcaagagcggggatgacactccccgcctcgatggggacccgtttaatttattaattatctttttattaatattttata

SEQ ID NO: 168856 - DNA, 1069 bp, Cannabis sativa
atgtattattaatgctttaaaataagttatgataaatattcaatgaatgcatgatgcaatatgatgttgtaatgtcattcaaaaggattgtgtgaatcaaggtttcagtaaatgccagtgccaccttatattacaagttaaaatttgtgacaatattgatgttgctatatatttaatatttatatagctatatatacagggctaggattagaatatttccaaggttaaaaaaataaaaaagagatagatttagattcaattcaattgattgatttaaacagtgtctcatatattaataaataataagttttttaaaaaataaaataaaatatatattttaatggaagaggaaggaatatgagattaaaggataaaagagagtaaaaaggtcagagaatatagacatgtatttatcgatgcaggcaaatgcagatcatgccatttcatttcatttcatgtcttttatgtcatatatatatatactttattattaatttattacttttattattatataaaataatgcatacaatgattatatgtatatctagtaattcaattacatgattaatttacataaaaatataaatcttaccccaaaaaagtactttgaagaatattcctatggtaaaggattttgtactacaagtttactttacttttatcactttttttcccctaattttagattgtaggttatattagttcatgttaagtagtaataataataataataataataaaatgaggttagttcatgttaaattattttgagttttatttacaatttgatacaattcctaaaaaaaaaaaaattatcgataaatttttaaaaacaaaataagtttttgtgattaaatgcgacttttacaacaaatattatttgcgactaaaatttaatatttagatacaagttattactaatataattttaatcacaataaatattatgactaaaaatacatatcgttatgataaattgtgaattttgtaattaatacatttaataatagactttttagtcacaacataaaaattataatttataattagttataatttttttact

SEQ ID NO: 168857 - DNA, 1021 bp, Cannabis sativa
tttcaccctatcttttcatttgggcatgcagcaaaagtgttgtcttgattggaggaggcttaaaacaatgggataataaaaggaataaaactgagtagaattaatggggagagctaatattgaggaagccaaggagcactgggagtatcttgatagattttttttataattaatattaattatgtgagactctccctttagttagatcccataaaaaacatgttaatttcaatcttattttggagaaccttgtttctaaacttcaagggtggaaggtgaaaaccctttcaaaggtaaggcgggctactttgattaagcctatcgattttgctcttctagtttactcaatgcagaccacaaaacttacccagagactcactaacaaggtagatggcatagttagagatttttagagggaatgtgaaaaaggtaataaaggtaataaagattccaattcgatgcttcgaatgacgaggtagaatacgaagttttcctggtaggattacgaatcacaaaaaccttaaaagccaagcaaattcaatgtttcagcgattcacagctggtcataaatcaagtattgggtgaatgccaaacaaaaggcacaaatatggccaagtatctataaaaagtttggaagaagttggaaatgtttgattattttaaaattaaacaagttccaagagaactgaactctaatgttgatgccttagcaaaattgacatcacagtttgacttagattaattgaatctagttccagtattgaaggtgttaagtgagccaagcatctacgaaactgatagaaagatgtagaaatgatagatacgagccccatgtggatgatccatattgttaaatacttgctaaataacttctaacaaacaaaattgagacacgtcaactcttagatacaatcctgagatcagagccggctttaaccttgtgcaagctgtgcaattgcacagggcccaaccttgcacagggcccaactaaataaaagctaaaatatttatcatttttaaa

SEQ ID NO: 168858 - DNA, 937 bp, Cannabis sativa
cttgcaacagctgcgcggcttgacattgagaatttcttacagaagaaggtttatcttgaggtaccactttctccatgttacgtataagagtttacttgaagatgtcattaatgtaatgccattaaaatgaattttgattacacaggttgaagtgaaagtgaaagaaaattggaggcaagatgaagggttgttgaagtattatggctatggagggcaaattaaagcattatgataatgagaagagttgatcaacagcaacaacaacaagagctacctcatcttttttgatattgtaatttgtaagttaatttggtcatgttactctcatgtataattatactagatagctttagatttttcatcgttggaaactttactagtgaattttgtagttttgacttgtttcacattccatttttggcttaaagtcgaaatggttcttgtaattagtagtgttgggccttgactttcttttttgttcaactttattaaggccccattagaactctaaaagagagaaagcccatttatgaagtggatctagtttcaatgtataatgggcttggtatggcccaggaagttcattttagtggttgaagtgctaacatgcgcaggaggagtagaggccctggcccacaacatgggatgctccttggaggttgtacctttctagacatacggccaatgcccacattccaatactaataacctccgcaattctagcatttaattcttccatcttaactctttgttttttttattttctttttattttttttttttactttttttaattttgaaacaaaagaataatttaattaaaaggtacaaagccaaatggctaattagtaatttttccccccgaatttcgacatgtactaaatcgtgttccctgaacttttttggccgttagaaattccccccgaactattgagat

SEQ ID NO: 168859 - DNA, 923 bp, Cannabis sativa
ttttatatgaatatgtgtatatgttatatatacatgttattttaggttcgtgcactaccaacactaatacgatataggtactaagtgcattggtacattctttgatatctaatgagtacagtacgatgttaccaacactagtacggataggtacggagtgtatatggtataacacttaggggtactcaaggtacgggaaaaaccctaccaacactcgtacagtagcggtacgtagtgcatgtggtataatggtcgtaccttagtaaagaacgttcttacttatttgataagccttgtggataggtgtatgggcggctagatgcaagtcggtgttatattttatgttatgtgcttttcttattgagtctattgactcacaaatattatctccgtgtgtaggtaaaggaaaggcgaaggctgagcaagagtgagttttgagctcgagtgatgagtgtacatgtcgagacgacgtgacctggagtgctcggtctcaggacgactcgggctgtattttgtagtcgctctgcgacatgtttgtaaagtattttgataaagattataaaagtttaaacacgggatcccagtttatgtaaatatatttttatgtttataaagtttaataatttaaatcaaatttaatttggcacaattttcgaagaaaatttttgattagcaaaagtagcacgttaattagaaaatcaatgtagcacgtctgtatcaggacattatagataatatatggagatattttaaaagtgataacaataatcttacgagatacattatcactaaaataattgtggatcgtatatgcatgagcaggagacatattcatgtcgtactctttacccattagtttaggttttgtctcactaagtttttctggcaaggtttttaactaggcaacttgcaaataattatga

SEQ ID NO: 168860 - DNA, 624 bp, Cannabis sativa
caaaatatgaaatttccctatataaaaccatgtatatgaaattaatctcttcatctgaagaattaagctagttggctgagcaatcaaaaaaataaattagaacatatatcaatgcatatataaagatatatgtattaaaggaaaaaaaaagttaaaaataaacaaagcttaaaggctcttggttaggctttggccacgtcccatagaatcacaatgcaattacttgtgcatgcattggttagggaagacataagctgtcgtaatagtttattatattatatatatatatatatctttgattttctcattctttttaaattaataaaaataatagttaatatcattttagactttgtattaggttctttattttataaaataataaatttaatcttatatttttcaaaatagtataaaaaaattatctgaacttacattttaatttttttttaatataatcacattgaagattatttttaacataaatagatgtaaaaaaaatatacttaattttattataataactttagattgagttattatcaatttttattttgacacatattgtggacaatgtcccacatggaataaatggtagagaattgagccatatataagaacatg

SEQ ID NO: 168861 - DNA, 562 bp, Cannabis sativa
  modified_base (441)..(466): a, c, t, g, unknown or other
  modified_base (519)..(529): a, c, t, g, unknown or other
ttttttggccttggctttttcttttttggcacccagctttttttgaagatcattagtcgacagacttccgccactctcttcggatacctgatgtacttctttaacctcttcgtcatggttactcgactcacttagagggggtgttttcttttgaggttttagcttctgggttccaaaattttccttgtctttctgtatggctctgcctctagaattggcttggtctccagacactaaagtatggtttccgttcctctttcgtggaggttggtcagctactttagacttcttatgtcgctacgtggaaggaatcttttttggctcctctatagtgattcctttgcctttatctttgtgaacacctaatgtcctaggttcctttggatatgcattcttgggtacactcgttgttggaggagctactgttgggttttgtgcccnnnnnnnnnnnnnnnnnnnnnnnnnnagatttacttattaataaagatgagaaataacatcttatgttgcatggttcannnnnnnnnnntcatgattatatatatatataatatatgaattc

SEQ ID NO: 168862 - DNA, 728 bp, Cannabis sativa
aaactgcacaatatttataccttttcaacttctaaattaattccactaccactactgtttactgtcccattttaatttgcacaatacactcttatttaaaatttgtttaattccaactattttctttaactatattccagttgacctcatcaataaaataataagaacttaaaattatatttaaagatattgatagaaaaatgtttaaaatataaatttcacaacctttgatctccaaaaggattattgtttttttatccaaaaaaaaaaatctctttacaatgagttcaagggccttatttatagtgagctattgacactttacaacttgactggatctcaaaaccacaaagtgttaagtcattttcacatctaataacatcgtatatctcaggtggcctaatgtgtctaacatcttttttttttttttgaagaaaaagcgtttattgattaaaataagagttagacctcatggtcattacaaaagataatatctggaatagtagacacatcgaccataccagttacatagtagacacatccaccttaagatgtgtctaacatcttaagttatactaaaattacctattttatttgtaccttagatgaaataaattttatctccattatccatactcattgtgctatcgttatcttgcgctgcaattccttgcttagatgaccctaatcttgatctcttctactcacttctatatttgtgaggttat

SEQ ID NO: 168863 - DNA, 1238 bp, Cannabis sativa
gcttcatggtttcgagggtcattagcattaatgacttgccctttctacttcttcttcaatcccagccgttagatctcccatcttttggccttacctagacggagtaatgtacagatggagtttctcaatgccactcttaagatgtgtcaccaagatagaagctgagcattttatgatagaagtgcatgaaggattctgtagcaatcatgctaggggcaaaacctatccaaaaagatactctgataggggtacttttggacaacaatgatcgaggatttgatggactcagtcaaaaaaatgtgacaagttccagatattcttgaagatccatagagctccacccaatgagcttacgatgatgcagtctccttggcccttagttgtatgggggatacacctgattggtcaactcccaaagggaaaaggaggggtatagtatgtcgtagtttttgtagactactttaccaagtggtcaggcaacagtaacttccaaaaaagtcctcgactttgttgtcaagagcaacatatgtcagtttggacttccacaaaagattgtgtcagaaaacggaaagtagcttgacagtgacatgtttacttatttttgaaatagacacgacatcataaaaagcttctatggcatggcccatcctcaagcaaatggacaagtagaagctatatacaagacccttaaggaaactttgaagaagctccttgaagaggaaaaaggtaattggctagaattgctcctagaggtcctttggtctcacaagaccactaagaagacaaccaccaggaaaactccatctgctttagcttacgactatgaagtgatgttgcctatagagcttgtgctgcaatctcataggaggacaacctatgaccaagataccaacaacatcttgctggaaaaatcccttgaagaagtagaaaaaagaagagaataagccaacctaaagttgtaggcctacaagtgaaaggttgcaagacactttaacaagcaagttaaggaaaggaaattcttcataggagacctagtgctctaaagagtgtttctgaacaccaaagatctagaaacacaattgtttggacccaagtgggaaggcctctaccaagttacaaagatatcaagtaagggagcctacaatctgggaaggtacaacgagaacatagagctggttctcctaccaagatattggaaagagctgttgggttttgtgccttaaataaaattcatttca

SEQ ID NO: 168864 - DNA, 937 bp, Cannabis sativa
gtaccaaacgggccctcagaatattacacatgttagattaatttaataattatttggattttttttttaaaaaaaattatgaaataaataaaaggagcttctcaaataataataataataaataaacaaataaataaataaaacgagaaaagtgaaatttgccctattccttctcctcccacaccaaaccagtctctgaaactgaaatttggaatagtgaagagtgaagagtgagttatacaatatacaatatgagacttctcacgcataatatgctatcctccaacatcaagggtgtcaccaatggcttccctctacggatccaagtccagaaggtcgtcgagagagaggttgaactcaaccccgattttctcaaatccatgttctccaagatcgactggaaagccctagtcgacgcctctcgctcaatcggctacactgagctccccgacgaggttgatccttccatgctcgactccgatgaattccttcgccgtttccaccacgcgctcctccaacttcacatcgaagaaggcgcgctcttctgcccggagactggtcgccggttcccggtcatcaaggggatccccaatatgcttctcaacgaggatgaggtttgattggttagtttcactgggaatggtttttaagtgttttccatattcatatacagagtagtaggaagtactctttttataattatcaattttggttgaatatgtctcaaaatcctaattccatgcatatgtgtttagctctgtgttttgctttttaattcaatacccttgccttgaaacttatttaacaaaaaaggaaaaggaaagaaaaaaacttgaacttattttaataattgcaatgttacttgaataatcttagttagtacaaattagttactggcaatggtatttcaaattgagacaaggagaattagaaacct

SEQ ID NO: 168865 - DNA, 581 bp, Cannabis sativa
ggatgtaatgaagatagttatataattttgcttgtttatttcaccaggtaattacattggtgattatgtaatgagaaatttcaattaagggtgtttataaaactgctcacattgcataaactgctattgcactgtataaaaaatacagaacgaaattatttgtggtacggttgcagtttacatttttttaaattgcgtagtgggatttacgattttgaatttaataattgcggttcaaattgtatcgcactatacattacaaagttatcaatttttacattatgattttgtttttttttcatataaaaacaaatatacgtaatatatatgtatattatatctttagagacaattcaaaataataacttaatgaatagtatatatataatgatgttaaaatttaataagatttttttttgtattgttaaaattttattagattgtttttttttatatttttattatagtatttgataacgatgataatgtaaaccgcttaaatcgtactgcaccacactgtattttcgtggtgtgatttttgtagttttaagatcttacggtacggttacagtttgagaaat

SEQ ID NO: 168866 - DNA, 1196 bp, Cannabis sativa
aaatgtatataaatttaaactgtaaaaaaataaagaattaaaaatatataaaaaaaaataaaaaatttatataacctttttttttttctatatatatatttatgattataatgaaataaaatataatgttatcattattataatagaattttaacaagtcacaaaattttaaaatatataattaccaaacactcaattcagtttttttttacagttttgctacaactgttttttctcataatacaactacaactgtttttccttacagcatagttgtgccaaattggctctaaacctaaaataatgaaagaaactttgatggatgaagcataactttgtgcaatgcaagaagaattgcatcaattcattccaaataaggtgcggaccttgattttgaggctaccatttatcaatatcataggaataaagtagatttttaaaaataaaagtgataaatttggcaccatcattcgaaacaaggcaagattagttgctcaagaatacactcaagttgaaggtatttattttgatgaaacatttgctcatgtggcaagattggaatccatgaggttacttctttccatcgattgtatccttgattttcaattgtatcaaatgggtgttaaatctgcctacttgaatggtttttaaaagaagaagtgtatgttgaacaatccaaaaaatttgaagatcttcacttttcatcatgtatataagttagacaagaatttatatggcttgaaataaccactttgtacttggtatgagtatttaattgagtttttgttttctcatgattaaagaagaggaaaaagtcatatttttgttattttcaaaacttaataaaaattttgttgtttttgttaaaggtctacaaatgagtttttttttcaagagtttctttttctaatgagaaagtctgtatttttataattttgaaattttaaaattgtatttttaaaaaaataaatttataaaactgcaaataataaatttaaattttaaaattataaataaaaatgaaaaaaaatatatttgagaaaaatttccattaaaaaattataaactattatatattaaaatatgaagtataatttatctcggtacgaaaaaaaatctacctaagctttcaatacttatttattaggggtgtatgtcggtcggtttggtcggtttacgttacattttattcaacc

SEQ ID NO: 168867 - DNA, 1053 bp, Cannabis sativa
ttgtgtttatcattgtgttcttggacgagttttcttcaacatatatattacatcatttttatgttactattagtttgtaatattaagcaaattatgcgaagtgttaatctagtcctaattaatttattttaatgatcaaattttagttacatgaaatcagtttacaacgcaactgataaatccttaggggaagaatatgattgcattgtggttagaggtggcactgcaggataccctttggcagtaactctatcagaaaagtactcaatccttgtcatcaaaagggaaacgtccctaaagctttgctatataatattaattaaaaatattgaaaagaaaattaacatattgaagaataacgaatacaaacaatcataatcatgataaaaggtatgggctccaagacttttgattacttgcttagaatttatgaaatattcaaactagtatgaaccatatggaaatctgtcctagagcaggagatatggtggagtggtgtggtaagcttttaaatgattattgtgatgaaaatagtagcatgcaagaggcatgatatgaatgaaagggaagggaggagatggagtaggcctatcgtgggttttcataagattaatgtagatgctggtttaaaaataaaagaaggttgtgttgcaataagttgtgttgttaggggaaacaataggaaagtgacttacacagcttctaaagtattgcaacaagagggtttcacaatacaaagagttttttcgaaacttcacagtggaatttgactgtttatgagcggttcaacttcttcaagagaaagaggatagttgttgagatattgacgcgctactccaacaaattagaagtccttttcacattctttttgtttgtggtttagattgtatttttagagaagccaatcaagtggctcacattttagtcaatcaagctttgttctccaatatattattgttagaatattagctgtatattaggtgtaaaagaattagggtaacttgtatttagtagtttcctattttgttggtagtttcctatttcctagtctcc

SEQ ID NO: 168868 - DNA, 602 bp, Cannabis sativa
ttttttttttttttttttgttttcaacacaatattcaaaactaaatctaattataatattcaagcccctgcaattataattatttttttaaccaattatacaaatatgttattgttagatttttttttttttaaaaaaaaatggttatttatgtttgggttttaaaaaaattatttattattttcatttaaaaaacgtgtatcatatatctaaagttattaatctcattttttattatatttaattttcataataataactaattaaaataatatatgcatataaatcaattttatatattataataattattattgatatttattttaaaatctataatataattgttttaataatattctacatatataaccatacctattattttattctaatctttctttaagagcattaggatatttcttatttttagctcatgtgaaatcatctcctgaataaggtagtttatttaaaaacatctatctagtgtgtttcgaaattccttcatctgcaactcattccttaaaggaccaccatttttatgttcattagaaaaaatctcatttagatcaccagtcaacaaccaaggatctagtggagag

SEQ ID NO: 168869 - DNA, 635 bp, Cannabis sativa
ttgttgaagatgaaagaaaaaaaacctgttgagcaaaaatcaacaaccacatgttgatcatcatcctggtctgtatgttccctcaccttcacttttgggtacactgtaataaaaaagattataaaagaaacccatcaatgaaagaaccattccagaacaattgaacaaacccttatacccaaaattccatctttttaatttctacaacataaaaattaattcttttttttaaaaaagaaataacaaacccacttttttttcttccttcactttctgtttctgatgcttgttcagctggtgttgattgagttttgggtgatgaaacgaagaccaatttgaagaagaagaagaaaacaatagggattaaaaagggaaaaacaaagattggatttttttttgatgggttttgttttctggggatgatgtggtgtgattagatgaaaagaagaacgtgttaaaagattcaatttttaaagagcatagtgattatgacaccgttgactggttaatggtgagagtgtttgggcccgccttaccttcctttttggcagctcctggtttttgactcagtttcagatgcctcttttccaaagttaaaactgtcaactcctccactctcactctctctctctctc

SEQ ID NO: 168870 - DNA, 577 bp, Cannabis sativa
ttggatatgtcaaaggcttatgactgggtggagtggaatttccttactaccatgatggaagggcttgggtatgatgaggaatggataaacaaaatcatgagatgtgtgactagtgtttctttctcggttctaattaatggggaaaagataggaaattttaagccttctcggggtcttcgtcagggtgactccctatcttttccttatttgctcggaaggtttatcttgtctaattcaagcggctgagagggctggcactatcaatggggttcggtttggtagagatggagttaaagtgtctcatctattctttgcggatgatagcttcatgttccttgatggaaatatcgacgaatgtgatactatgtcccacattctgcatcactactctcggctttcggggcaacaaatcaatcttgataaatctgaagtgagcatgggcagccgtatttctcctcaattgggtcaaagcctagctagtcgtttgggggttaaacttttcacacatcacacgaaatacttggggctgcctagtttcatcggtagaaggaaaaaagaggtgtttgaggtaattaaa

SEQ ID NO: 168871 - DNA, 1239 bp, Cannabis sativa
gctcttccaaaaacatctccacctactaccttttctcactctcttttggtctgaatcggtgaacacaattacttaccatggagacaccaagtctttgctgcaatcaaataggtgcacgattatagaatttccttgatccaaatctcactcctcctcaatttctcactgaagttgattgtcgaatgaatcgtttaagttctgagtatgaggattggaaacaacaagatagtgttcttgtttcatggttactgtcttccacgtctgagaagatcttgacgagaatggtgggttgtgacacagctgcacagatctggagcactttttatgagaattatacaactctcaatcgagctaacataggtcaatacagaactctgcttcgcaatgtcaagatgcaggggtcattaggttattatcttctgaagatcaagaggttggtggatcttcttgcttcgattggtcatcacatcaatcatgttgaacccattgaagctatcttcaatggcttgagaagcgactacaatgtcttcattatttctatcaattctcgaactaatgagtattttgtggctgaaatcaaagatctcctaatggcacaggaggttcgattggaaaaagccacgtgagaacttgacattgctaaaacagaggccaatcttactcatacaaaaccatttactagaggaagaggtacattctcttcaccttattattctcacactaacatttttagtgctcctcccctgtctagaggtccaggatctcaatctggccatgtctcagctcagcatcctccaccaggattccctactctgtctcatcgtcgtggttctccatctatttgacgaaatatgcctaattctagaagtggatccacacatggttgaggacaacattcagcatggggtcagaaagtctaatgctaactttgccataaacttcgttaagaaatgaatgaaaaaatgaggtttgtgagtgggttggtatgaatgagtgaagagagaacacaagtgagttagcctagagatattcttttaatatttcataatattagggcccgcttgacacattttttgaaaaaagttaaaagctgttttttaaaaaatctgtgacaaaatggtgtttggtaagtaattaaaaaaagacttattaaaaaatttatggaaaagctacagctaaaagctaaagctggtacaacccaacttttaaaaaaaaactattttgattaaaagactctat

SEQ ID NO: 168872 - DNA, 528 bp, Cannabis sativa
atatatatatatataaatattgtggcttgaccactttgaagcaagtgtcttataaatggtgaatattttttggacggttagtattagtccaccatcacattattgcttcacacaaacatatctgtaacactataacactatattatataaaggtgagtcagtgagttaaaaaaatttagtgatcaagttatttttcctttattatatatatatatatatatatatcagtataggtacatcccagagtcacataattctcgttaaaatttataggttaattataaagactacagtgtgataaaattctttttagagataaagttttattgcctttcatattgttatttaaatgtaatttcataattttttaaactattatgtcctaataaaacaacataaaaatattaatataatatatagttatgtttaatttgatataatgatgattgtaatagaatattaaatataggaaaattttacaatgcacctctttaaaatggatatattgatgcatccttatctgtttta

SEQ ID NO: 168873 - DNA, 531 bp, Cannabis sativa
taaatttaaaattttcttagataccaaaacagatagtggtgcattgatacaccttcctataaggagtatactattgaatttttcatcctatttaggttagaaaaatcaataaaactaggatacaaaaattgtatgtaatctagaacacatacatacttaattgatccaaattaattactacaatttgatagtgcaatacaatcaattaaatcttttttttttctagatctataaatcaaaatcagttttatttatctgattatcaaaaggtatacaattgtgatgacacaatatgtatttagggaggagatttagttacataattatagttggactgaccctgctcatcaaaagtttcaattaattaaaaaaattcatatttctgcttcactttacacatagatgttatgcttcaactagactttacacatatagatgttaagcttattaactattaatacactaaaaaattatctaatcaactcatattttattaaaaccaataaaaattaggggcttttttatttttac

SEQ ID NO: 168874 - DNA, 882 bp, Cannabis sativa
agaaaaggaaaaaccttgtagtagatcagctggagaaatgggcacggcgttcatggctggggatcaccaaaggaagttaagaacaaagaaatcacaaaattattaaatatgaatttccaatggtcattgctcaccagagagaaaatagatagcactagggtccctattcctattaatttatcttttaggtgcccaaattaatttctccagcatatacggaatagatagcaccagggtccctattcctattaatttatcttttaggtacccaaattaatttatcttgtcaatggagcttggctcgagttatttcctaaagctatcctttgttcctctcagactagcaccgcggatcatagacctttatgtctactctctgaagggcaggaggtcaagtttaagagatgtttcaagtttgaagagaactggacgagggatgatagaagcaatttggtggttgccaatgcttggggctccgttgatcatccttgggccccttctagaatcttcaagaaacttggtgcgactcgagtggccctactgcattggaatagaactcaatttggtaagttagattgggccattaaggagctggagactaagcttgacaatatacagaagctacctgttggtgtccgagattggaacatggaatgtgatattcgccgttccctaaatgaaaatttggccaggaaagcaatttattggaaacaacgggctagaatctcctgcctgaaggatgtgataaatgctctaaatttttttttctctcggctgcaataagaggaagaagaaatgccattgaaagtattttgagcaaggataacgcctgggttaatgatagagaattaattggtcttgaattcttagactttttcaaga

SEQ ID NO: 168875 - DNA, 797 bp, Cannabis sativa
tatatatatgtaaggataagattaaaaactttcagccaagaaaaagcagcgattaaaatctcccagacaaaaaaaaagagatgaagatagatagaatagttgagagaggatagtgttttgacattttcgagagttccaaatgagttaaacatgtctgtttttgcagtgcaaatatatataatatatttatataactatggtggcttgttattcttttggtatatgctccaaatctttatcctcaaccctggccaaaggtgaagtaccttataactaatcttttagaatcaaaatctttgtgtctcattagattatcgaccaatgatttcatgatatatacataatggtaaaacatagctagccaacctcgaaattcttgatccctcctcctttattttctttattctaatacattttatttactttaagcttgtagctaggaaaaaaaacttatgaaatagcttaaactacacatctcaaagtatctttcatatataaatatagagtaattttatggtggtgacatcatttttgtatctataagaagtaatgtttatattttttactcgtggaacaataattataactcaatattttttttacagatgattcaaactgatctttgagcctttcgacattacctaaaaaaattgaatttaaatattatgttcatattcttattttcttgatgactatacactgtttttttttttggtcattagtcactcttttcatatatatatatatatatatatatatatatcaagtttaataattttgtgaaaaagtagtttggg

SEQ ID NO: 168876 - DNA, 1414 bp, Cannabis sativa
taaaaagaaacacaaatttaaagtcttttatgacattcctcataaccttttcccatatttgtaagtatttttttttaaaaaaatgccatatttagtgtaattaaatttttatgccatatatctcaaaacttatctttattttcccatatttttgtaaatagcccttagaaaattatcactaaaagtacaaaattaaaattatcataattaccataattttaaacaatcaagctattattaatgataagattactatatcaaaaacaacaatcggaagtaaaacaggtgcaaatagagtctataaaaccagaaacaataaattcagattataaagaaatcaacatcaagatatgtactggttcaagtctgatagatcgatgtgatctacgactctactccagctctggaacaccaccaaaatccttcattattgattgagcaagaatagttataatacgatcgagataagattctctgttgagttctcactaagtgtttcaactctctcacttacacccaagaatcttctccagttacagaagattcttcttacaaaatccaaacccaatatttttgttttctttgcaccactctctctacctctcaattttttctctctcaaaatctcaatctcaatagaactgagtatatataggcttaggatcaagatcctaaagtcggtggctacaaggaacgaggttgttaagttagttaaatatatataactaacttaaccaactcctcttcgagcgaagtctccacgtcagcttaagtattagagcctctagaaacttatatgagcttttgggctcacaggccaaagacactcgctaatgatgcttctagataggattgggtccactaaagtcgactatctggaactaccattctaggagggacaactagccaactctaactccattccagagtgaggctagcatttctagagacttgacctggagtggacatgatagtcatccgataactgccttcctgactcaactttcattcaacaagactccttccaagatggacaagttagttgtccgggtacaacatctgggagacagctaactttcaagaaatcttattggagaatgttatcccaattttggcactctgacgtggcatcacatactggtgacatgtggaatcgacctcacgtatctgcccgaaaaagatatgccaaacagagcaccacacatatatgcacagatgaagctttcctggccgggcagtgggcggtccgaacagcgtgccaacacttagcaacttcaacacttgcatcgtgaatcacagaggaattccctataattctgagatcatatcacagagatatggcaagctgtccagatcccttaatcagggtattctgtatttaatgtgtaatcttaccaagtatagacattgtaaa

SEQ ID NO: 168877 - DNA, 681 bp, Cannabis sativa
tatggaatttcatgtgtaatttgtttggtaaataattaagtttaatttcgattgcaagcagtaataacacttaatttatatttttagaattttcattcaaacattaagtttaataattatgtactataaattttttatttaatactaaattttaaaatttggcccccatcaatgaagtcctagctccgctattagttaaatgtcaaatcaatgtcacgtgacagtttttaattgtcaacgacatttaattttattttttatttgaaaattaatttaaatataccaataaatgatacatgtataatgacttactaacgatcaagtatgtacgaaagtttcagaaatataatttaagtattattactgttaaaattcaaatttaattatttatctgcaaccaaaaattaaatttagatatttacgctacaatttttttttttttaaaaaaataagattaattatgtcctacttttcatttttgtcatgagtttcatctcactcccttatataaatgctacatattattatgagttgttttgtacaatagaagtcaacctaagatagaagttcagaggtttctttttcagttttttgaatctagtgatggagcaaaattttggattaagccccaggagaatacaatcaaggtagctgttgatgccactattttttgtgatcaag

SEQ ID NO: 168878 - DNA, 966 bp, Cannabis sativa
agcagaaaacataagaagtagattgtggatcaattgctacagttaatcaatattaaactcacccaaaaacaactatcgggcttgatttcttcgagaaggggtttaacaatggcgtaaaaacgtgcgcttgtactgagaacaagccctggattcggtctctccaaaataaggtatcccccagtcatcaaaaccttgccaggagcagaaacaaccctgcacccaaagaaatatatatatattttcttttaatgatttgaatctaaattaaattaagaaggcaaatggaggagacaaaaaagcttacaccgccattgagggaactgcaaatctgagaagcaaaaatggtgaaacggagaagagagttttagagttttattatgattgtttgtatgaggtaacagattgggagagtgagtaggtaatgaagaagacaatgaacagcacagtctcttagattacttaaaatgttgtcagttgtccagttttgacattgggagatttttgacccttccaagttccagcaaccaactccaccattgaccctacaagtacaaataaaatataagagaaatttgcggcaaccccctctctttccattgttactactggtattcattaaactgtcactgtaccatatcacaccgtacaacaaatacactttgaaattttttgcggtacaattgtaatttgcatttcgccaaaccacacaatacagtgtaatttacagttttaaatttaataatcgcagttcaaaccacactgcattatatattataaaaatattaatttttatattatgatttcccattttcatatacgaaaaactcttagactatgtttggtagaaagaagggaaagttggatagatggagagttgatgaaggatagagaatataaaggagggagaggagagtaataatctttgggaattttacaaaaatactgcttttggaccaaaactttaca

SEQ ID NO: 168879 - DNA, 543 bp, Cannabis sativa
atacaatatatagctatatatatagttatatattcatcctcagcaagtctttttgagctaactcaagtaattaggtgtgtgagtgaaggctgttcaaatctcgttaattgtatttgttagagagtctggtattgacaacgtgtacaaactaaatactatacctaattatacatgaattaattctctcatttctcaattggttttgaaattatggaccttattacaattctaattaatagtatcaaaacattgattaacaaacaaagagatataaataagtgggataaaacaatgcgacgtagaaatacttaatgtatattgagaatatttatcatttcactaatttccatggaagtttaagcttttcttacgtacgcgcgtgtcaacaaccaagtaattaactcatagctaattagctattgagctagctaaaacaaaccacaaatatacatttttaaagcacacgtatatacatatccatacaatgtatatatatatatatatattaatataaatttaaggctaactaagggtcacaaaaaa

SEQ ID NO: 168880 - DNA, 1441 bp, Cannabis sativa
ctttcatttgggtcaactcaatctctctctctctctacaagtttgaagtttaacaggtacgtttttattttacattattaagttgaaaccaagatgtgagagcaaatatgactaataatgtatctctgcactaaaattgatgaactaaggttaccctgtttttcatgtcatctaaaaattgtagtcaaaatcccatatgaggatttgcttaagtaatctagctatggattaaacttttttcttatctcaaaacttgaaggacaatgcacttgattttagtttattatatcactcttatgaataagaaatatttatgtattttgtagctataggttgagaagtttatggaagaatagaagccgctaatgaaggttttaaaattctcccattttagttatgtggctttttttttatatattgcatacactattttgtgtggtcctatttacttttaatgatatcttattaagataatggtttcaaaacctcattctcagttgatttccattctcaaacaaattttttggtgaaattggctgaatataaatatgaatctggatatgctaagatgggttcttttaagagaagctcaaggttgggtttttttttctttttttttacaatttagttgtttcaggttaggttgcttttgaattacttcaaactaataagctatgattttttttattcttaattcactaaaagacacttaggtcctatcttttaacttttccattgcaatttgagtggagttctttcacatttttgaggaattcgtctatatatacatgtgcttcaacttttttcaaatagtacaaacttattatctatttatattataatgttgattttttttttctattgtctattttttttttcatttatttactttatatattattaattttttattttaaaaaaataattataatattaacaattacatttctttttttttttaattcatattttaataattaattgaataaaaatatgcaacttctttccaccaggagagttaccttatttcccattcgttcgagcctcatttcttcccattaccctgcactccaatgtcaagggttggggagtctagcaacttcttcttgttgtcttttaagccctttactcatgtgatagcttcttctagcttgataaagccatatgatctatcaagaaagtcattcatggtatcgactaacttgagatgaaggtcgaaccacagagggctcatctccttaagtccggctgcaagtgccattacccttgtgtccttgctaagtatttttgtcttagtgggtacctcaaagaactattgaatatggtctttgaggggctcatcttcctgctgtttgatgtctaccaaatcattgggctcgatttggcactattgggaaggagcaaattggttgccaaaaacatccactagatctttccatga

SEQ ID NO: 168881 - DNA, 978 bp, Cannabis sativa
  modified_base (946)..(947): a, c, t, g, unknown or other
ttcttaaacgctaatataattgacaatgtatattgaataaatttctttttgacgattttattatgagatcgtgagaattaggttggattaaaataatgtttagttatgtaggttggattattatgttttagattatgttttttatatatactttttttttttgaatgaaatcaactggtagctaaaatagattggacgaatctaatacaatccaatagaaaatcagtttatgcatctaatggttgaaactgatccaatccaatacatccattcaattgaatcagatgactcaattcgattcgattggatgacaaaatttaatatccaataaattattgaatcaaaagggttgggtccaaatctattggatgtgatccaataaacacctctatcaactaggcttatataattaagtcctcaatatatattgtcttatcacaagtatataccttttgataatcaaataaaataaaaatttaaaaatctagaaaaaaagacttaattacatcgatcggtatgtaaacctaattattattgtattctgcattatatataaatttgtatcctgatttatataattttctaacattaaagcaccaattacataactctcacactaaaatttacatgatcaaacacacatttgatttgtttataactttcattcactttggttttcttgaataaaattaagctagggagagtttcatctaaactgaaaagagattcatctgagttttagtgagtattgagtgtttgcgtttatttataggcgttggtggtagttagtccgagagagaaaaaactaaccaaccaactaacttagttagtagttacccaaaatagaagtggtcgggttttgctctcaagtggattctggtcgggtcgttgtatgaagaatggccgcctgtttgccttgattgcatgcagagccgatgatttttcnntcgtcacggcacatcgatgtcctctctcttt

SEQ ID NO: 168882 - DNA, 868 bp, Cannabis sativa
aaaaaaaaaaaaaaaaagtagcattaatattaggaaacgtttccaataccatatataccatattaatatgtggaccccaatattaatttataccaatagtaatgtgtcactttttataatatttggcattataaaaaaagatatgagcattgttattagtcaccagcagtgtttagcacattctcgatatgtcacgttctaattgactagcgatactccttaaaaattgttatattaaattatataggactcaatatttagttggattaatagcgatattcacacataggagggtgctagacaccactgatgtcctttagcatttctcaaaagaaatatcttatctactttcggtgagagagagagagaggagaggtctagagtcggcatgaagagaggggaagtcgggggtggggatcatgtctcctgcataaataagtttgtgtcatggcggccggtctcatattttgaaagatccacaataatataggtcgtgtcatattagtccataaaaaatataggccatacccatttttgataaatgtgtatctattttttttgtaggggtcaaactcgaatttcattttttactatttatttttacaattaattttttttttgaggaagaacttgtgcttcattagaataaaccagaaaatacaaagccaacaagttaaagggatggcaaagaaccattccaaactaactcattaatatctaatcctaatcctaattttgcaacccaataagccaattgattagaatccatatacacatgctcaactttaaatttaagactgaaagataacaagttcttaatacccactaaaatatcatccagaggactagcattccaattacaagaatt

SEQ ID NO: 168883 - DNA, 699 bp, Cannabis sativa
attatttaggtccctatatcttattataattataaaaaatgcaaatctcaatacaaagagaatcccagctgaagtcgaacgacaattattttatttattcattaaaaaaagagcaaaaataagaatttagagacaacagattttaattttctcatgttagtacacttaaaaacgacaccgtattaatcaaaacacatagatggtgctgtaaatatgtgttgcggtgtcgcaaatataaatcgtgtcgtactgtgttataaaacaacacaggtcctattgtgctatgccataaaatatacaaactgtattgtatcatgctataaaaaaatacgagctgtgtgcgtcgtgctcaaattactttacttggactaatctattttcttatacgagctcaaagtcatactctactttttaaattttatttttacaattaaatagataattactaaaattatgtttcaataatttaattatttgtatataatataagtaaatttttaaaattattaaaatgtgaatatttactaataaatatttaaactattattattattattaaatataaggtttttagcaaattatgcttttagaatagatttttcgtgcttgcgtgttatttctttcgaatttatttacggtcgaccttaaaattaagtggacttaaaaaaataaaaattattgaaccttcaaattaaaata

SEQ ID NO: 168884 - DNA, 817 bp, Cannabis sativa
tatcattagaaaatggagttctgaacttctgaaacattaatttagccactactcagtaatttgaaagtaaaaattgaagttttagtcttagtgtagtaatttcctgtctgaattacatagcttgcagtgatatgatttttttgtgagaatctaatgattagaattacagattatgtcaattattaggatgactaccatatgttgatgttagtataacaactttatttttttttggaataataataataataatgtggatttagtaatatacattacttttttgttgttgctattttggaaattaatacatttataaatattgaagaaagatggctttagcatcaattagactttattatttttcaaaattcgtacatgacgtactgatccgacctatatttattcatacttttcaaaatatagattgtatcatgtcctaccaacattttaaagggtaggtctggcacaattcataaatctagtattttcgtgctgtgttcagatttatgtcgtatattttgctcgtactggcctgtttttcttaaataagtcaactcgtttacataatttttttataactattaaactacatatttattttataaattcagttatatttatataatttttcaataatattttataaattatcatataaaaaaaattataagcattattagaatttaaatatttacttataaatatttaaatttttatatcactctagataaattaatttataattttaatttaacatgttgtatgaattttaattataaaattataatattcaattttagttttattattattttaa

SEQ ID NO: 168885 - DNA, 1188 bp, Cannabis sativa
tccttcttcatcgtgggccagaagtaaccttgacagaaaatctttttggacaaccttggtttggaaatatggtctccacaataccctccgtgaacctcgtgaatagtatcacttattttggttctgaacagtatagctttccatctagtatcacgtatcagggcgcctaatactagaccttctaggctatagccttgtcagccaaaagttctcctgaactcagatattggtagatggagcctatccaggaattggaatgatcaacgtgccatctagtatttggtgttcttgtcaccagcttgaagccaattagcacaagacctttgtttccaaaaaaacactttctttaattagaagtttatcaagagaagattggagttggtttgcagcattcacatcattcaaagaaatgggggattgggagtaaattttatcaatgttctattgtaatgtctttacactattcttgattgtttttctcctttggttctcaaaatgaaatcgtggggtacttttcttgaaaggaggattaccatcatgaataagtttgatgtttttaaataactttacatgatcatgtgaaaaaatttgactaaacaattatttcggatactaaaacagatagagatatatctgtacatcttttttatgggggagcattatagaattttccaaaaatatatattataaaaactatgagtaagtttataatacataaggtgattctagagacctcttatctgttttgtcatacaaaaagagctttttagtcatttttttcattagtgtttacgttatagttatggatgactactcgtaaattattaaaaaatttgactagcttacagtgttaaatataagatttatctattttattgcacgtgcaactattttttttttcttttatgcttaataaataaatgcttaaaccaaattttacgtaaagtaaattatttagaattttctaaattttcgtacatataattttaaaaaactacaacctacaccgtcttaattaatttttttttttctaaatgttaaaacagttaacagtttactacataaatttcaaaaccatataccactactctacaaaaaaacccctttagaggcagtttttaagccctttcagcgtcaggttttgcgaaattcgctaccgatgctcatcagggcgacgctaaagggttt

SEQ ID NO: 168886 - DNA, 579 bp, Cannabis sativa
ttgaggtggaagttacttataaacaaaattttggttcaagcgaggaggcggctgctggctgcaagcatgcccccgctgtcattatgaggtgccttttgtggaattgtcgcggacttcgtagacccgcgacggagagaatcctaaggggtttaattcgagagagtaacgctgacattatttttctctcggagactaaggtggataaagatactatggtgggtgtgatgaatagactgggatttgtaaattcctgttgcatactagcaaatggcattactggaggcttttgtgcggcttggagaacagattttagatgcgatattacgaaagtttttgaagcaggtttctgtgtcaaggtgcaacttcatgggggtctgcctccttggtacctcttttgtgtctatggtactccatatcacaccttgaaaaaaccttactgggaatggcttacaaacaagatttcttgctgcaatgacccgtgggtgattataggtgacctcaatataacaccctaattagcataggcatgttagtgtgattttaaacgtattgtgcagctcgttgctagtcaatgaggtt

SEQ ID NO: 168887 - DNA, 944 bp, Cannabis sativa
tttttttttttttttttgtcatagacactagtgtaaattataagctcccctattctcccaccctaaaaataaaaataataacagtaaacaaaagatgggtctattgtttatggaataatattaattatactgtgagtaaaacctctcagcccaatcatcatctcttccaatatcatgaccatgtttcctcctcttactcaatctcaaatgataccaccaccaaatcccaaaagtcaacaaaaaagaagctacaacacagggaaactttaaattcgatataacaagcacaggaaaactttaaatttgatcacctacgaaacacaaccctgagaagttaaagtcattaaattacacaaattttagaagatggctaagtatttttaggaaaagagtggagatttctagtaaaatcagtcatgtaagtgttgtcttcatccattaaatagagggatagaacttatgtaacaacaactacactgctctaaattgaatgtcacaaaaaaataaaatagaaaaagaatattgggtataactacattgaaaactacttcattttacaatgttatatacttgtttgttgttcttctgtaagcacattcagcagtatccaaaactagttttaagacttcatcatgtaatatatatatatatacatatttcttaatgaacatttagaactctccttatattgtagtgttaatctctttcctccaccaatagttaatggagtgtatttcctaaagaaccatgtaagaaataatttcaagtgttccctggctcgaaagttatactgcttaccgttgctggaaaagctgatatgtgtttttcgtgttggatgatgatgatgctttcatcatagttattatgtgtttttcgtgttgggttagtctttagctttataactcataattatactttttattattttgataaaacttattatt

SEQ ID NO: 168888 - DNA, 971 bp, Cannabis sativa
attcggatctagactaggggcttggaccgcgcctctagttgatgtcaggatttgggacccatccccggaccaagaccaagactccaaccctgacctagacctgaactaggacccggacgcggatcccaaccccaacctggactcgagacatgaacatgggcccgaacttagacgcaaacttggaccttggacccgagacctgaacaagaaccagaccaggacacttgacaaggatccagatcttagactcagacgaggacgcaaacccgaaccaggaccgaaacctggaccctgacccagagtcgggacctaaaactggaacctaaacaagaacatccagaccacgaccatcgaacaagactaggaatgtgaccaggtgctggacccacacctagaatcgaactcgatcttagccccagacccaaaccgagaccggaacttggggcccggacacggtcgtttaccaagactgggatcgagattcggacccagaccttaatctgggacccgatcccaaacacaaactcaaacctagatagggatccagatacaaacctggactcggacccagacccacaccaggatcgaaattcgggacataaatccgaaccgagatcctaaaccagacccaaacctagacccacacccgagacccgaactcggaccaggacccgaacctagacctacaccgggacccaaaccggaacccaaacccagaccaaaactcagacaaggactcagaccccgaccctgacctagatccaaacccgaacccagaaatagaatccaagtgtgggtatgtgtctgagtctaagtcttggtctgataacaattttggatctgggtccaggtcgtggtcctattcctgggtccctatctattcttgttttggttccagtttcaagtcacggggtacgggttccggttgagttttggtccgagtctgggtttgggtcctgatttgggtctgg

SEQ ID NO: 168889 - DNA, 505 bp, Cannabis sativa
actaaaaattaccttgtaaaactacctagaaacaaataaaattattaaatattgggctttaaaaatctaagttacatatatatgtcatttcaaataccataaaaatacttaaaaataaacaaatatcatataaattagtcaaacttaaaagtgacatatttaagtaaacaacttttaaaatctcacattgtgtgtaaatttctcttttataaactataagatttgatagctatgagaaatcccacaaataaacttgtattttattctaatatttttcactttaactcttatgccaatttgacatatacataaacaaattatatactataacactaactaattactctcaatctatcattatttagctattaatattttatgataaggtaacttcgatatatattttctctctttaacatataaaaaaaaggttaattagtaatattttttcttgaactttgacatgtactaaatcgtgccccttgaacttttttggtcgttaaaa

SEQ ID NO: 168890 - DNA, 1009 bp, Cannabis sativa
  modified_base (947)..(970): a, c, t, g, unknown or other
aattataaataaagtataaaacaattaaaaatatcataaaaataacattataacaactataaataaacttaaaaataacaacaaaaaaatagtttattatttttagtaaagaaatatttttgtaaacaaataaaaaatttaaaaagtaaaaataattttgtttcatcaacgtatttttgtatatattttttttttaattttttattcattaggtatattttctttaaaaaaatatatttggtacaatctacttgtaacaacagtttgatcaaattgcttaaaattttggaatataagtaactataatatatattattatagcaaatctaatcaatagactattataaatatgatgtatatatttttagcctatattcataaagttatcataaatttgacacaaaatataatatgaactaaattttacaccataataaatattatttttttatttactctttttttattaattaatacaattaataaatttttatatctttatttatacatttaatataggttttatatacacttccaataaaaatttaatgttttattggttttgttttgtacatttttatgaaaataaaatttattttgtctctggtacattagagtataattataaaatttgagccaaacataatattgattcatttttttgaattaaatttagcacaaaatttataaaaactaaaatattcttattaaaaaaagttgaaattataactgaatatcaaaaacatgaatggagtgtatcactaactcattcataaatagaggtataccataaaaagtaaaaacacctcataacttataaccattggcatggtggacggacctaagagaaaaagaggaagatgaaaacaagttgttttacaatttagtccctttttgcatagtttttatactaatttctttatatattagtgttggaatttattttnnnnnnnnnnnnnnnnnnnnnnnnagtatgttgattaacaccctatatatgaactttctaaaa

SEQ ID NO: 168891 - DNA, 813 bp, Cannabis sativa
  modified_base (743)..(753): a, c, t, g, unknown or other
ctaacaaatttgattttatattgtttcaaagattcaaacacttcagatttaactatctagatatgtataatcttgagttgatagactaagtaagaaaaatatataacataaacatataatcaggcgcttgtacacctacttgcacgttcttaaataaaatatgattgttgttggagaaatttggacaacaccaaattatgtgtaaacagtaaataaaatgaataaaaaaatgaataagaaactgtgaacattcatttagagtagcgagtactcaacggaagctaccaaaacaatagaacaactaagaaatataaagaacacaagggatatagtggttcagtcagatcacggtgtgcttagttcactgttgcaaataatgtttacttagtttatttgatttggattacttttttatatagaaagcaagtgtccttttagttttacataactgataggttatagaaccgttttacaataaataatagtattaaattagaataaacataaaagaataaatgaagaaaaatttaattcattttaataataagtgcagcaacgtatacgacttattaagtgtgagtttactgttcaatattttcgcacaagctcgcatgctttaggtgtattctacattcaaaaaacagctaatgaatctaccactagaatatctgcaatctattggagtcgctttgttggacatctcgtgtaggggtgttcacaaagtatccgatccaatccaatcnnnnnnnnnnnatccaatccaatccgcaaaatgcagatatccgcacttgtgcggattggattggattgaaa

SEQ ID NO: 168892 - DNA, 680 bp, Cannabis sativa
atatataaaccctaaattacaccacaactaaatatcacaaaaaaatctctctaagaaaatatcacaataaaattaaattatttaataaatatcacaataaaattaattgaaatcaagatactactaccagtaacgaaaacacatattgaatgtggtttacaaataaaaattcttcaacaacttgtcaaaaattaatcgtagtacatctacgaacacattagcaactataaaataaacaaatttcagcaaaaaaaaaaaaataacaataaaatacacactaagatatataattttgtaataattttttcttttgaatgatataattttgtaataattaacatgttatatattaaaaaaaactcactaagaacacaatgacaaacacaaaacagagtatagaaatgagcacaaaaatgaagagcaaatgctatagcaatcaaaatgaattaaacaattacaaaaacagtaaaatggagatggattttacgtgattcaaataggaataacagcttgttattctggctactccacgaccaaaaacttgcctttgggcattaatctttattgattgagaatgaatcatgagaagttgcaacaagagctgttaagagcagttcgtagtatcttgagtgaagctttgcttcaattatagagggacacacttctctctctctctctct

SEQ ID NO: 168893 - DNA, 1722 bp, Cannabis sativa
ttacacggggtaggatacaaaataagaaatattctaaaaatttcctacaaataaacatagaaaaggaaaaactgacaacaaatggacaaactaacaaaatgaaaaatagagaaaaggaaaatctgacagcaaatggacaaactgataaacatagaaaatgacaaaccaacaaacaaacaattagataaaaatcctaaaaactttatgactatcatgaatttttttcacttattgctatcttacacaactaagagatatggaatctctttgttctacttattagcagttgataattagctcgtggtcaatattgtagtctgagttataattggggtcctcctaaaatgggtgccaacctgatggttcatcatcttcatcacttccagttggtggacatgcatcatatttagaataaacaatctcccactctagtccattgtactgaaaaagatagggatcctagttgatttcttggtccgtgtatgggtcttgttaatccctaaaaatgcttgtcttacggagtaggacccctacagtgttttttttctttgaatagtgatgaatttttcttctttgctttagggtcttggacctgattgtgactattttttagaaatttggaattttttctagagcctttgctatgcattgtgaataatcagagggaaacattgcccataaggcatcatcttatatttttagtcaaattctggtttttctcaaaaataaccttttggagatctttgtactctgaactttctctaaaaggtgcttcttgggagtcgtatagttcaaagctgggattgcaaactattttcttattctcgtctaattttgcattaagactaataaggaagacagtgtagcaatccatcatgttggctacatgtgttcctaatggataaacaaagacgtgcctattattgcgaaccttttcccattcatcccaaagtatttttgttactcctctagaggagcataccaagacaaaatttccatttggatttcgtaggctggtttatttttttcttgttcgaggaaagactgtatagatgtgtgaagagccatagtttaaacttcaacaacaatcgtacaaatgcatgttaggtaccaaaaaagatgagctatgaattttggagtgaaaagtgcagtccgaaaggggaccaaattagcaaaaggatactttgggcgaattagaaactcatgttgaaaataaggtccaagtttagggagaaattagttgtgagtataaacaaccttgtgagaggccttttcttttgctgactttttaaatttggaaaggatgagctttgcatctcaaggaaatgagcagggaaatgagaaattcttttgtgatgatgataatgccattatatatatgtatgtaatggtaagggaagagttgtggttgactaaggggatagttttgagtggatgtgaatagaccatatttaatagatgtaggtttagatagaaggtcggccaaaatatttttccaggaaggtgttttatttcaaaagagtaatgatcaaaccatgttgccagtctcaaaagttgagcattggttgtcttgttctttctcaggtttatcattctttttgatgcaacaatatcagtttctactaagaaatgatggcctatgaggtggaactcaaattttgtgtgttgtcgagtgaatttcgcaacaccaaaatgtattacttaattaatataaaaagagaa

SEQ ID NO: 168894 - DNA, 724 bp, Cannabis sativa
tgtgttacccgaagaagtaccaggatcattaccgtttataccacttgcctgagatgccaataagttcagcagttgctgatattgagtcgaggaaagctgggggagaacggcatggctttcattcgaattggagctattttcttcaccagtttgcacctggtttgctgcagcatccttggatttgttttgtctattaaaacctggtggatatccatggattttatagcatttttcgatggtatgtccatggatgttgcagtgagtacaaaaggggcgattccttttgggaggatgggattttcctggttgattttcttccttttgattcccccttctatctccttgaaaggcaaacgccatggctgagttgttgctgttgccatttgaagcagtgcctctttggtgctcttcttgagtaacaagatgaaacacacgatttacttcgggcaaaggatccatgagcagaatactacctctaacttgagaataagagtccgacaatcccatcaagaatgacatgatatattccatatggtagtggtcttgaagtcttttgactcctccacaagtgcaaccattacaagtgcaagaaggcctgtaattggttagttcttcccatatggttttaagtctagtaaaatatatgcttatggtctgattttcttgctttagattcattagatccttcctcaaattgtatatatgagggccatttttctgatga

SEQ ID NO: 168895 - DNA, 969 bp, Cannabis sativa
ataagttaacaattaagaatatgtatctgttgccagaatggatgatttgaccaattagcttcatgggaagtctgtactttcaaagatttacttgtgacctagttatcatcaactcaaaatttgagtagaagatatttcaaaaaattgcattttggaccaagtatagccattctgagtttttggtaatgtcataaggattgataaaagctctagcggcccctacgaatctcatgaatagagtattcaatgatttccttgtgtactctcagatagaagaggagtaggggcaacatctctaaatggtattacaacgactcaggaatcacaagtggtatccaaatttttttaaaagtgtgaattctagctatcggaggtgtcttctctaggacacatcgacgaaatatgaatagcgttacccaagacatgatttagagcttgctgcaatggtccttgctctaaaaatatggcgacattatttgggggaaaatgtgagatttgcataattgacaataaccttaagtatttcttcactcgaaaagatttaatatgaggaagaggaaatgagtgaaattatccaagaattatgattgcgagattccgtatcatctcaggaaagccaatgtagtggcgaaggctttgtgcagaaaagatcccaaacaagttcttaacactttagtgataactcctcaactagcctcagaaatggttaaagccgaaattaaagttctggtaggaaagttacacaacttgacactttaatcagatttgttgtaaaggatcagaaagacataattaaaggatcttgatctaattaaaatttaggatgtgatactggcctgttggcctaaggactttttggatcttgaatatcaaaatgttactttaaagctcgagtttgtgttccagatgatggtgatcttaagaagcaaatccttgatgaagctcacactacaccttatttgttgcacc

SEQ ID NO: 168896 - DNA, 1230 bp, Cannabis sativa
tttaatgtatcgagtaaatgaaaaagtaaatccttgtttaaaataattcaaagatttaactttttctttacaatgtttcgttttcatgaattaacaatgcttgtaacatacactaatagatgagagaaaattttaagaatagatttatgtaatatatataatactgcattaaaaaataattaaaaaaattaaatattagagtaaattctttttagttataggtttgggagtgtatagttgcttatagtggcatgctaccccttggcacacccataaagggttattttgtaacatgagaatgcattgatgcttaattattagtcaagtattacacttagcactttattaggaagggaagccaccttagtggtagtgattgaacttttgtaattagttttgtttgtagtttcattcatatgcaagctaatattatatatatatatatatatttgagatctcttgaaatcatactaagctctttaaaggtagtgacttgataacttataaaacaccttatcaccagtatgatagaagttaattgtatattcttttgttctatcaaagtcatatactaataaaacgatgtttatctatacttctttatatataaacttatatggtctaagtgttatctgtttgttgcttattgcgccattgtgtatcatttgcctattgtttacttgtgagttgtagaatattgatcttcgaaatgactaactttgaatttactcatacttcatggctatactcaatatgtgaggatatgtatcgtgcctaattattgaattatttatctacaagcgcatttaggttttgccaacgaatgtcgcacgtcccaactacttagttaggtcgtgacactcatcaaagtattcaagcaagcatgtggctctcgcaaattgtaataaggtacatatgttatgagaggcttagtggatgtttggcatcataactaaaaaactattttttatttttaaaaacagaaaactattttttgaaaacaatttggcttgtttggcattgttttttgaaaacagtttcagaaaacaaaattacagaaaataagaattttgaaaacaacaaaatgttgttttctgtttaaaaaccaattcaattttggtcaatattgtttttaaaaaacactaaggctgcgtttagaaagccacaatgtaattagatttgtgtgtaattggaggtaattacacaatttggcatgtttgtctgaccatg

SEQ ID NO: 168897 - DNA, 557 bp, Cannabis sativa
  modified_base (501)..(502): a, c, t, g, unknown or other
aaacattgccaaacatgcacttaagagttgagaatatgatctcatgaagaggggaggtctatatatatagtatatatatatatataagcaacattaataatcggtcacattatattttataatattaattattcaaaaaaagttcaagggtcacattggaacaagaactcttgccacattgttatgttaccaatcaatatcttcatttaatacaagaagaagaaaaagaaaatgaaaagtcactactgcgtgattggttgattaattattgataaatgcataatttatgtatatattggtaatacattattttattagaggtacatccattaaaaaaaaaaaaagagttcatctacaactattatttttggtatattagagtatctccaattgttaaattttagagaatgcttgcttatatggattatttatactaaaaaaataactaccttaagtgacaaatttttagtcacaacaaaaaattttgtgactaaatgtganntttagtcacaacaaaaaattttgtaactaaatgtgacttttagtcacgataaaaa

SEQ ID NO: 168898 - DNA, 1623 bp, Cannabis sativa
cataaaataataatattttattttgttaccatttatgtaaaagaaatatattttttcattaataattaaatattgaaaagtaaccagcctaaaataactgattccacttttgtagattggattaaattggatttgagctattgtgcggattagattagatttgagctattgtgcaaattagattggatccaaaatatgacattcgcacttagtacggattggatgcactatgagcaaaatagtgcagattggattggatgaatacccctatataagaggtcgtgaaatctgtacaagtcaatctcgaagttgtgcacaagacgactttacgaacccatgacaagcattatgagattcttgtgatgccatttggcctcactaatactccaacaaacttttgaggccttgatgaatgaggtatttcgtcctcatttgcgtaaatttgtaatggtattttttgatgatattttggtgtatagtgcagcttggatgaccatgttcaccatctgtctatcgtgctccaacttttatccgaacaacaactttatgataatctcataaagtgttcgtttgctcagaaaaactagattatttgggtcacataatttcaggggaaaagagtggcaatgaaccattctaaatacaagctatgttagattggattgaacccaagaatggcaaggaacttcaaggattttttggactctggctattactgtaagttgtaaaatggtatagtgaaatggcttggccattaacatagcagttgaagaatgaaaattttggctggaacaatgtcaccattgttgcttttaaggcactcgagcatgcttcaacaatggtggatacagatgcttcaagatttgacaatggatttcatagaagggttgcctcaatcacatggtatggatactattttggtggtagttgacaagttgagcaaatacgcccatttcattctattgaatcatcttttcacagttagaatggttgctgatgtatttttaaagtagtgtgactccatggagtttcgagttccatcatttccgacagagataaggtattcaagagccacttttggcttcaagttacaaggcacaaaactccaccatagcaacgcttatttcccacaaacagatggacaatccgaagtagttaacctttgcctggagacttacttaaggtgttatactatcaaccctgatcgtggatgtgcttgcttgcttgggtcgagtattggtacaacaatctttccatacagcaacccaccatacgcctttttggatcttgcatggacgtgaacttccttctcttattcgatacaagcagggttcgaccccgatctcgttaattaaggaaatgctagaagatagggatgcacagctagatgatctcaagatgcatctctccaggctcaacaaaaaatgaaacattttgcagacaagaagaggatgagcagttttttgtgggcgatccagtatttgttaagctcaagccatattgacagatatctctagtttcaaggcggagtgagaagctttctcctcgttatcatggtccaattcgaagtgccttcacaggttgatgaggttgcttataagttgaatcttccagccacatctt

SEQ ID NO: 168899 - DNA, 679 bp, Cannabis sativa
gtgatgtttggtttagtagaatgtaaaaataatggtaatggtaatagtaataataattccaattagtagaacatgtccaagatgtaataattcagatgaaacaatttttcacgcgttggtgggctattcatgctctcaggcttgctggacctatgttgcacctaatataagttattggaatgagaatagtttcttcgattggctgctggttttatttaacaatggtaaggatgatgtgttggaaaaagttgcaatgattagttgggcaatatgaaaggcacgaaatgagtttctttggcagaaaaagacttactcgacaacaacttgtgttcattcagcaagaacaattcttgatcaatttaaatttgctcaattgataaaaggtttatccctttcttcatttattgatggaggaaagaaaacagagtaatggacttcaccagttgttataatgagatcaaggttaatgttgatgggataatcttttaacaaaaggaacattttggttgggtgttgtagctcgcgacttttttggtagaattattgaagcttatatgacaagtgttgttggaaaagtacaacatgttggaaatattttaccaagatcttagatttactaacaagtatgttatttaacaccctaaatatgaacttctaaaatgattataaataaacacat

SEQ ID NO: 168900 - DNA, 575 bp, Cannabis sativa
acatgagccaaaggtgatggcttgagctggtaaaggattataactgtgaaattctttatcatcctgggaaggccaatgctgtagccgatgcctgggtaggataggtcaaaaccaaataaatgtaatgaaacaaatctccaaaaagctagcagatgagatgacctgagctaagattgagtttattgtggggcaatgactaacattactatgaaatctactctactagaacaaattaaagaagtgcaattgcaagtttcggacttaatgaaatcctgagataggatttcggctgggaagactagtgactttacaatagatagtattggaatattacggtttatgaaccgtgtctgtgtgcctatggatgatgttattcagagggaaattctgaatgtgactcatatgacttcttattctattcatccggggacaacaaagatgtaccaagaccttaaggccatgttttggtggccttgaatgaagaatgatatagctgaatacggtactaagtgtttaacttgttagcaagtgaaagctgaagaccaaaggcctgcaggtttgctgcagccactgaa

SEQ ID NO: 168901 - DNA, 630 bp, Cannabis sativa
attccttcaaagaaaaagttacaaggaattctaattccccctaaataataagatttacataaagagattaacctcaattcacatagtgttaattttaggaatttttacactaggtatcatatttagctatttttttacaaaatttcattgacatatttataattttgaaatctagggtttgtattgaagtaattgggtaattactagtaattattttattttaaaatacaaaagtggtagattgtatatgaatttttattttcatgtttagcaaatgaattaataattatacggtttattaatgttaattaactaaaaatggtaatattttgtaataatatactcataataattaaagagtgtaatttaaacatctcacttactttaaattacataattattgtgtaattatttaattagaaaaatacataaacttcataattactttaaattacactcaattttatttatgtaataactttttatacgcgcatacaataagttactttaaattaaatacgattatgtgataattataatatcaaaatatttaaacaaacccatatttacactattttttttttaaaggaaaagttgtatttgattttaactaaatttcaataacttatt

SEQ ID NO: 168902 - DNA, 1331 bp, Cannabis sativa
gtgctgcaaactcttaaacctgtcattcctctttctattcatgactgtagtcattataaaaaattattaacttaaactaaagttaggttgatacgcttgttcattggttccaatagcagagccagtacttacatcctgtggggtaaggcgaaataataagcacacacaaatagatttcatttgttcttagtcttaagtatcgtatgtctaggagtaaacttttgttaatacatgtccataattttgttgaggtcgagataaaattgaataaaacatttatctctgaatctgatttggggtgtaaggcctaattttcacggggacatgacaactgtataaatcttgtattttggagcagtggtagaaatttttaatgtttatgggagcaaagtctaaatgcaaattaacatataaaagtttgagtcggagccactgacccgcttgatcctcattcggctctgccattgattgtttctgcaaatcttgtcctatttttcgattccattgtttatctccttttacattgatcaataaagtagatacaatttgaaaatggttttcatgagtttggtaacagctcagctgcattatgcttttgccaaaattagcaatatgataggtattaatttttattattactggcatatttttcttagtttaatgacttgtggtgtgctgactttgtgcagaacttatgcgaagacgagagagttcagtatgtgcctccgaaacgcgtgtgaatggctaggctaggctagtcaagcattttgatatttgtgatgtttgtacgtagttacagtgaggtagaaactttttgtgggaaacaattttggttgtggaaactcactgttcagttgcttaaaatgtttcagtgaaatccccattaataggttaattatagtattccgttgtactttggatatgaaaagatcactatgaccactcccaacaacttccctacttttttctctaaaatacatcatcaaaactctactttttctattttacctcacacatttatattaagagttctttcataaatataaatatcaaaaaatttagtagtttgtttttatagacataaataaataatacaaaaaaatatgagattaaaaaataattaaaatttaaaatatgagaaaaaataaataaatttgataaaatttgtaataataagtttagttggaaagttgttggtgttggaaaaattattatcgttgaaaaaatcactggaaaaatcattagaaaagttaccggaaaagtcatcaaaaaagtcattgttgttggaaaagtcactgttgtcagaaaagtcactagaagtagatgtctca

SEQ ID NO: 168903 - DNA, 1662 bp, Cannabis sativa
  modified_base (1583)..(1593): a, c, t, g, unknown or other
taaaaaaaaaaagaaaaattgttgggtctattttggtatgtataaaaatgggacttttctaaagcctataaaaacacaatatttatgagtgttagcttgtcgttttgaagtcttaaatttactacaaaaatattgatacaaacactactcgtgagaagaaaaatgaaatacaaacacgaatacgactcgtatatattttttgtcgtgttaaacttgtaaaatcttgtatcgtgttagcttgttatatgctaaattgttaattttagtgttatcatgttatcttcgtgtcattttgaaccttaaatttatgtttaatgatgatttttatttttcaaattttgacaagaatcaaagtatgccctcttaatttttctttccaaactttgacataaatcaaatcatacttcctttattttttaggttgttaaaaattctttatgaactattgaaattactaactagattcaaggaattctgtcaaattccgttcaattttacgaatgcctaacaatgatcatccatgtactaaatttgttcacgagacttaaactttcaaccacattaggagttcgttattaaaattgaacaaaagtctgtaaacttaataatttcaatagttctaaaaaaattttaacgatctaaaaaatttatgagcacaatttgatacatatcagagaaaaaaacataattaacctaatatatcatagttaacaattaatatatatttaaattttacattcttgtattaagttttcatgatgggaattgctttgttttatattatgttaatgaacatttgtaaattatgtgtgtctagtaacatttcttataatagtcaagcctatctttccaacttccacattaatttatttatttttttcatttatataagtagtttacgtatgtaaacaaatatctaagaagattaattttataataaacaatacttagtttaatcatatttaaacatattttattttatcttaataaatcaaagtacaagaaaacctatctctcattattgttatttatattatgaagtgaagtagttatctttgtcatatatttaaacataaaacaacttatcgacaaaatacatacaaaagttaggtttgtaaattctatatataaataatttaataattttttttttttttttttttgtatctttcttcattttttaaaataaaaattaattaaagctgtattgaagaaaccaaagatatgtaattgtatatgttaggatatagaaaatgaagacaattatgactcatatttttcttggtaataaccaaaattgttgactaattttattataacaaaaaacctaaaataacactagtcaataaaagttttgaataatattgtaaaaaccaatctatatacattctctttcatgtttttttttttgttttttttaaataattagtgttattataaattaaaatcatttacaacaacaaagaaaacaagataataaatttctccaatccaacaaatgtcatcatccaaccctaaagcaaatttagttgtacaacttgattagtagttctttttgttgaaaattattttaccaggatctnnnnnnnnnnnacaagtatgttgattaacaccttaaatatgaacttctaaaacgattaaaaaataaacacatataaagta

SEQ ID NO: 168904 - DNA, 795 bp, Cannabis sativa
tattagcaatttattagtaatggtgtgaggtgtatagaacgtataaatatataattacacagagaacgctagatatggaatgagaaaataaaactttagtttatttcgaaaatttatcttgtttagaagatgacccgttaactatcattttggtactttcgtgatttgagtaattttaaccatgaaagataagctatagttgaaatcttcaaaatcatggagtctcttttcacaaaaagtgtaaatggattttcacaatttgagaaataaactctggttgtagaataaattcaaatattttcaatcactaatctatataatggtaatgaaaagtgattaatgaaacatatattagtacataattgtcaaatcaacatttaatttaggggtgatctccgaatttttaatttttttcaaaccaaatcaataatactagtttttaaaaaaacaaaactgaattagattaattaagctcaaactaaaccaaaacaatccacttattgcatatttacttaaagggaatgggaataaataatatagtattgattcccatacaactaaattttggaaaggaagaaccacacaaattagggagaaaacaagagaaaggttctcccccatttttatagagaatgcctttccttacttaatttattttaattttaatttttgttaattaaaaatgagaaagagaaatatattgcttaaaaatctataaatagaaataattacatgttctaataatgacaattttgtcaaattaaagcattctgattacctttcttagttatgtaa

SEQ ID NO: 168905 - DNA, 778 bp, Cannabis sativa
ccttcttgctttcagagcttgcaggaagcgcacttgtacgcttttctcttgcatgtcttgtcttttgattctttctccaataatattctcgtaaatatgtattaaaatctcaccttacacttacaacccacaaaacacacacacacacgcgtgcgcgcgcgcatgcatgcatgactctcttgcgagccccccacatgggcttgcatgtgagcccccaacgtacacacacaacacacacatgcacacaatacacacacacacctgcatgcatgcacggatcgcatgcgagcccccaatgcacacacaatacacacacttgcatgcatgcacaacttgcatgcgagtcccctacacgggctcgcacgcaagcccccaacgcacacacatgcatgcaacacacacacacacctgcatatatgcacgggtcgcatgcaagccctccacatgggctcgcacgcgagccctcaacgcacacatacaacatacacatgcatgcaaaacacacacacacccgcatgcgtgcacgactcgcatgcaagcctcacacatgggctcgcatgttagcccccaacacacataaacacacacatgcatgcaacacacacacttgcattcatgcacgatgtctcgcatgtgggcccctcacatgagctcgcacgcgagccctcaatgcacacacacaacacaatgcatgcactcacagtcacacatgcatccgcgacttcacttatttaagtcgttgctttttttttttttgttcttttgtttgttaatcacc

SEQ ID NO: 168906 - DNA, 539 bp, Cannabis sativa
  modified_base (456)..(469): a, c, t, g, unknown or other
tgaataatataatatattgattaatatttatatgtaaataaattaatatgtgtgtgtataattttaaaaaaaatgtgtgcatgaaaatttatatttagttttcgtcacttttattatgtcttttttggtaatattaattagttgtgaaaatatttttaatttatcgtaatttttttttttttgagaataaaatatatgaatacatgtcacaccagttaagaatatctcaatttatccgtttctcattcttagatatttttatattacgtggaatgtcataagtcaatttcatttgagctaggagtagaactgacaatttagagtcagaattaatgtgtaaaatattctatgatttacctagaaaacttggtccgtcattttcattcactaattgggttaaggcataacctattactggaacttcctcttcgtccaacatgataccatccaaaaacnnnnnnnnnnnnnntttaaagtccaaattttttgcaagtaaatcaattaccatggctctgtggccagttgttggaaattatttt

SEQ ID NO: 168907 - DNA, 552 bp, Cannabis sativa
  modified_base (457)..(467): a, c, t, g, unknown or other
gacatggaacatatcagagtgaaattcagtgattaccacggggtagtgacctgcccaatgaccaggcatttgctcaaaaaaaccgagtttgtaaattggtctggaagatataacacgggcaatcagggaaaaaggagatttgtttagtgtgtttgttgtagtagcagtgggtagggatacaatattcctttcttcctctgtaagggagagggtggagtggagggaatccgagaacggatccatatcttggcagggaggagtaaatgggatacaccagtggaacaagaggggagtacacgacggtgggaactgaggaggagtatggcggagaggggaggagagaagaggcgggagcagttggaagcaaggaaaattcaaactaaggagaagataggtagggaaaacagttaaaaatcaaaaaagacagttgggaataaaaggataaataccattttgnnnnnnnnnnnttgcaaaagttacagattggaccctgtattttgttaaatgacaaaatagacactgtattttctaaaatagtaaaaataagaccct

SEQ ID NO: 168908 - DNA, 744 bp, Cannabis sativa
ttaataacattcacattaattttagttttcagtctattttattagatatctattccttataagctactgttgatggtagttattgcagtcccattccgcgatcaacgaatggtgttgcccatacacgggcaacctttgttacgagtttaggagattgtgtttggacagatgcttgtcttcgattttcgagttcttctgtaacagtggatttttcttaatgaattttgcatttcttttaaaaaaaaaaaaaaaaaaaacaaataatacgttcaatagtgaaccgatatagctaaagatggaaagtaaggtttgagattgaaagatcaagttcaaacctagtcactgtgttttatacatttaagctacagtgtgattgtgtcataataaatttttagaaatttttgtaaaaaagtgataatttatgcatgggatcattcacatagaatataatatactttgcttgttgccattttaattgagttagttttgtgccttgattaacataaactaatataaagcctttttttaggggagactagagcccattcagtgggttacctcgaatgtcataatggctcaagggacaatcaaggaggacgaagcaagtcctacatctcctcctcctcaagcttagattctacatcagaactctcagtccttgagtccatctctagctcagcttcaacaaggggctgaacggtctccccctccattctaacttgaccccttatggccaccatggcc

SEQ ID NO: 168909 - DNA, 556 bp, Cannabis sativa
aaaaaaaaaaaaaaaagataatacgcactaagagattttaggtggcacatgcatgcattgcatgagattcactactacctactatactaatatacatatatgttttgtcgatattattttagcttttaatttttaaaaataaaaacataataaatgttgtaagaatgcggcctataaattagcttagattgcaatttctactcaaaatgagttacatggtagaacaattttttaacctctattttcattaatgtgtacttttttttaatcaaaatcttttgtgaaaaaaaaaaatcgacatgtggagaagtaattttgatagatttatgaaaataaatagttattattatatatatatatatatattcaaatttagttaatttactaaattaatgtaaatctttttacatatacctacaactacaaggtaaatgtataatagatgatgaagaaaaaagtcattacaatatatatatatatatatatatatattagaagaaagttacgtgcaagacacgtatatttagttttatgttatgtgttctataatttaatt

SEQ ID NO: 168910 - DNA, 1711 bp, Cannabis sativa
  modified_base (1597)..(1633): a, c, t, g, unknown or other
agggactgttttgctcaaggggagagttaaaaacgacctatacacattgtctcatcgatcttttgtcacaccagaagtcaatattcactgtcatcttgctacatctgcacataggccttcaatagcatctgctcttagctctagatcagaaaaagaatcagattgtaataataatatagctgctacatcagctatcaccccttgtaatgacttttctatcaataaagaaagtaatttttcatgtttcaatctccctgttcaggcctttactttacaaaattctaatgtaaatttgtgacatatgaaactcgggcaccctgcctcaagaatccttgccaagattctccaccagttacatataccaccaaatttgaaagccttacaattttgtgaggcatgcaaacaaggaaagagtcataggttaccttactctctctctgagtctagagcatcccaaccattagaatcggtacacatggacttatggggtccctctcacataccatccaaagaagggtataggtattatatccatttcctagatgactatagtaggtatacatggatctttcctcttaccgtaaagtatcaatcctatcctacttttcttcagtttaaaactcttgctgaaaaacaatttaattttccaattaaaagtgtccaatctgattggggaggtgaatatcggtccttggccaaatttctacaccaacatggggttcactttcaacacccttgcccacatgatcatgaacaaaatgggcgtgctgaaagaaagcatcgccacatcactgaaactgggttgacattacttgctcaagctaaacttgacttgtcttactggtggaatgcttttaagacaactacttatgtgattaattggctgcctacctttgtcataggagacatatctccatttgagtgcttatttcataaagcacctgactacacattactcaaaccgtttggctgtgcatgctttccttatctcagaccatataatgctcataagttgaatttcaggttgataagtgcatttttcttggctactctctggttcacaagggatatctatgttaacataaaagtggcagactctatgttgctcgaaatgttgaatttaatgaggaggaattttctagacttccatctaccatttcacatcaggtacatccttctcataattcatctatgcctactgcaacatttacaacacctatactacctactaattcgatttacacatctgctgaggtacaaaatacaccaaattctggtgtgccacaagaaccagctgctgttatcggtgtgcctgcaacatctgtaactcacaacatgaacccaccagttgctccttctactttgcctactgtaccaccctcacatcagcccccaccagaaattaatgcctcgaattgcattccctccatgccttaacatcccatacatcccacaccacctaccacaaatgaaccagcctcaaacactgccccaaatcccaacaacaccagtaacactcactccatgcaaaaacgatccaagtctggaataaccaagccaaaagattatcatgccactattggaaattattttaccnnnnnnnnnnnnnnnnnnnnnnnnnnnnnnnnnnnnnccctaaatatgaactttctaaagtttaggaaaccttacattgggtgcagcggaatgatatgactccttccgttcagat

SEQ ID NO: 168911 - DNA, 864 bp, Cannabis sativa
tggtaaaataatatccaacaaaacacacatttcaatactactacataatggctgcacaagaaaattgcaatttcaatcataaccagaactcctctaaccacaaccataaagttggtaaaaattagcctatttcaggaccccaaaaagaaaaatctcaaagcactaaaccttctaataccaactcgatcaaatccaacaattaccataaacaactataacaacaatcaacactgccagccaggactgaccatagaatctgaaaaatactaaatcaatttcttttcgatacatttattcgaattcgcacttcgcagcgtaaaaagtatttatggatagaaagagatggtaccgagtgaaggatttggaggatgaagatgagaggagacgagctcgtaacagtgcaagagtctgcgagattatggactgttgaagtcgcgaaagcaccatttttatttgttggggttttagacgaagaaaaaagaagaaaggaaggtttattcgtcagctatggttttctgtttatttttttcttcaatcgtccttggccaactagatcttgttgtagactagactaacactgtcgtcgatccctgattggaggtttggtcttccacgaatctcgtcgtatattagtggaaggttttgtacaacacgaatgtggctgaggtggaactagtggttggtttgggtctcaggcgaaagtgaaagagaacgagaacgagagagacagagggaattgttgttcaaaactgaaaaactataaaataaaaaatagagtaaatggcggcaaaacccccaatactttcgttttagtttcattaaacccccacaacccaaatttctgcgggtaaatccccaaaacca

SEQ ID NO: 168912 - DNA, 628 bp, Cannabis sativa
  modified_base (575)..(582): a, c, t, g, unknown or other
tggaaaaccatcgacatcggcggccaccgtaggacagttcgtgcctatcacacctgctgtggtatctgaaggtatcatacaattgaccaaggcccagtatacgaccttacaaaagaaaatgtaggctttgcatgctgaagtcaatggaagggtcaagacccgatgtcctccatgagtaccacacacacgttcgaataaccccaggtgacaaacacgaagcgatgaactaataatggctctcgcagagaacacatgactggacaagagggaatcgactcaaaccagcctacgcagagggaacaagtcgtacaaaactctaaccgtgacgttcaataagaggaggatccgagcgttgcaaccctaaaagaagggcccaactgcgtaatgaggtaaatgatgctaaatcttattcttcatcctcacaaagttgtacttctagtgtctatacaaagtctggctctatagagacaccgtgaggaggcagataccaagttcatagaggtgatcttggtgatcacctcaacgtagttttcagggtagggtctcaaatgccccatgttgggttttatgccctnnnnnnnnctcatttcaatataatcatatttgcttattaatatagatcagaaat

SEQ ID NO: 168913 - DNA, 606 bp, Cannabis sativa
ttccacggccaatattcgaagatctgttggccagatttgcagatggaacagtaggatttttttgtgttccattcagattttgaaagcactcgactttgctgtcaaaactgagcaaaagttcctgcaattcctgccatgaagtgctagtacgagcctcaatttgtaagactatgggaagataattagcatctaaaccagataatacgttagcaatcaagtgattctcaggataagggtctcttgcaagtgtaagactatcagaccaagccttcttttgtcttagatattcaaccatgttcatgttaccttttccttactgtttggatggttgttcgagtgtcattcatcttagattttgagtgagctccatagatattctccagggctttccacagagaggcagaggtggtgcatcccatgacttcggtagctattgactcagtcatggagctatataatcagcccatcaagagttggtcactgacaacccagtgttcataatcggggttgatttgaacacccagcttgtctccttcttcaccagtagcaacggttacagagtgttggaaattattttaccaggatcttagatctactcacagatcg

SEQ ID NO: 168914 - DNA, 792 bp, Cannabis sativa
acaatgcatccgagaagtccaaacaatccgtgtgtattcgaaccacctcaccaagatggttcctagctaccaccgctaagcacatactttctgatcccacccttacatcacaattcaattttatccagtcctgaggtggcggcctccaagtccccctcaaagatggtgtagggcaaggtaagaaagtagcatgaagctctacataagaatttttaacctggtcaatacatttcaaaacatccgaatgagagttattatgtatatattcttttcccacttatttggtatttattttacttttcttttattaccttacttccttcaaaaacaaaaaaataaactcttacatatattttttatttcttagatcaatttcatttattaggtgctttatttattaaaccactctataagtccctaaattaaaatatttaaatcaattacctaattacttccaaaggaaaaataaaatcaattatcttacctagctaatagatccacacgaatgttttatttattttgaaacaaattatctatattttttatctattatttatctatataattgttcaaatttaaatttgacgatagttccttttattctaaaaaaaaaaatttgaagatagttacactctataaaataaataaacaattttttttttattaagcaaatagtgaaagttgttgttgttacagattcacttatttacccttaagttgaataacaccactcatagggtttgacaaatatacccttacatcagatacaacaaatatcaagactaaagaaca

SEQ ID NO: 168915 - DNA, 1345 bp, Cannabis sativa
atcagagccttttccaccattgactgcaaatgttgctgttaatggtgctggtaatggctccacaaatcctcaggcccctctgtcgaattccaacccttctgctaacccaggaaacagaactcgagacccagaaaacaatcgcagtccagtctatttcagtcatacgctatctgtgaagctcaatgaccataacttcctcctttggaagcaacaagttcttgctgccattaaaggacatcagctgcagaagttcatccaagatttagctcctccacctcagtacttgtctgatgcagatcaagctgctcaaagattcaatccagaattcttgaattgggagattcaagatcaacttcttgtgtcgtggctgctgtcttccatgaatgaaagccttctcatcagaatggttggctgcaatacatcaagacagatctggtgcgccctggagaaacattatacacttcaagtatcgtcaaaaatcctggagtttcgaacgaaacttcagaatctgaagaaaggttcatcgtctctagatgaatatttgctcaaagtcaaacaacatgtggatttgcttgcctcagtcggtgaatctctatcttcccgtgatcatatcgctgctatcttcaaaggcttgcctaccgagtatgacacctttatcatctcatccaatactcgcattgaagagtataccgtagctgaaatcgaagccttgttgctagcttcagaatcaagaatcgaaaagactgacaaggaagtggatctaagtgctaatatggccactgtggatacagcttcaagatctgagaacctaccacaactcgaagccaacttagctcaattcaacagaaattttagaagttccggcacttcaagaggtcagtaccatccatcttaccataattttccttctccctactcaaatttcttccatcctaatcgaaactatcatcctggtaatttttctcgaggaacacctatgccgtttaatgctggaagaggctcagcaatgagtaacagaggaggaaaaatggctcacactcagaacaggcctcagtgtcagctctgccataagcttgggcacacggtcattgattgcttctatcgctttgacaagagtttcactggtatggtatcacccactgatgctccctcggtgcaggctaatgtagctcagacctacactgctgatgatggctcatggtatccagattctggtgcaactagccactgcacaccagacttgcaaaatctcacaacagctgctgattacaatggctcggatcaactatatgttggcaatggtacaggtctgtcgattaaaccctctggccacagtcaaattatg

SEQ ID NO: 168916 - DNA, 641 bp, Cannabis sativa
ccaaccttgacaatgtatggttcagcacctttcttaaggggaaaaaaacaaaactgtctcaaggccctcaccataccctcggtgttagactaatatggagactgtgggtttcataacaatcccctctcccactcattattttaaattgtgtttatctttattaaaatctcttttgaaaaattgatattagcctttaaccaagttgtaatacattaattaaattactataacatagacctgaaaaataatttaattaataccatattacatagtgatttttgaaaataccatattttgaaaaatattagctaattatgtgactaacttttaaagcaagtcacttggtgtgtattactaggttattaaactatttaatacaacctagcattttatataatcgatttttctaaattaaatgcacataaaatatataggacaatcctaaataattatgtttctaatatgagatgcatgattatcaaaagtaaactctatgggattttatattgacaattaaatgtgcatgtactaataattatcaaataattaattaaacatgagattgtttcaaaagtcattgctaataggcttaaagtggttatgccttctattatattggatactcaaagtgcgtttcttca

SEQ ID NO: 168917 - DNA, 694 bp, Cannabis sativa
ctctttggtggggttgggaactaacatcatctccttccaattaacccatcaataatatgttataattggcattttggcaacatattttagaaaccatttctaaaaactaaaaagatcttacttgtttcgatcagtgatctttgtttctacaatggccttcttgtgaatttgcatagatactataaaatattggatgaatttgtatctaagttgtgggattaccaatgtctgttttgccttttcttcttgctcgtaaatttttatatttatttttataaatatataaaaatggcaaaaattttaggttttactttttatttattttttacatttataaggatttttttttacaaaatacgacgtgttgtttttctcttgtttttaaaaattcgttgttttgacgttgctcaccgaaaaaatagtgtgattcttttttttacaacaaacgaagtattgtttttctattgttttagaacaatattattttgaaattgctgatacgggaaaataacatttttctcaataaaaaaagtgaaaatctgtaacagaaaatctataagaaaaaagtaaatataaaaaaggtatgtaaaaatgtaactaaaaatattaaaaaatagagtagtttgcggcgaaacccccttatgttttgatttttatacacttaacccccttatctttatttttggtggcaaaa

SEQ ID NO: 168918 - DNA, 1129 bp, Cannabis sativa
ttaaattatattttagtaacatttatagatatatatttcataaattaataaattgtcatagaatagtttattatatttactaaataattttatttatttaatattctacatagtatacagagattgtatatatttatatccaacactggttaagattgctattcaagataaataaaaaagaactataattcaaatttttaaaagtcatgaccacgtgccttaataaagataatcagttgatatgaaaacatatcttaatagtatatctattttattttatatatttttatttttatatttttttaaaatatactcacttttataaataatatactaattatattctttgagttaatgtaaattatatactaaacttaagtagagtgtgataatatatatatatatatattaatggacaacctactcataaaaactaatacatttcaataaaatataataggatagtttttttattaatagatacaaaaaaaaaatattttttcaacttattccaaaaaaaatttacgtgagcaaattaattaaacatctttaattatgactcacgtcatttatgtaattcaattacaaaaattgtattctcatgtaaattatcttatattattaagtacattctaaaattatatatatattttttatctttatgtgaattgacaaaaataaataattttaaaattaatttttattctaaaattatttatttctaataagtacacccgacatattaaaattcatttcttaaataatgaaacaataatattgaaattctatttatagatgaattattcaacacaaaggtaaatttatacatttatacaattatatacaaaaatttaaaattttataattgatgttatattatatacagtaatcggttgtacatagctttgatttcaatcttatatatacaactgtatataagtttttattaaataaataaaaattaaaatatataatcatttttattttttttttattcatcacttgattttttttatatttatatcttcctcttggggaattctatttgcaccccttaaacttataaatacactccattattaaaaaaaaaatataaacttaaatcatttttaaaaattactcttaatat

SEQ ID NO: 168919 - DNA, 1378 bp, Cannabis sativa
  modified_base (1041)..(1041): a, c, t, g, unknown or other
cgccgccactcgcccgagtcgggatcgtaccactcagcactagtgtcgaagttaccttgactctcggttcggtacccgcttacaacccagaaccttgaaccgattaccagtccctcgcactcgtctcgctcctgactcatgtgagtcaactcggtccactcatcgttcctcacatcataaacccgcgccgtactcaacgcgtttttgttctcatcgtggccgccggagacgaatatcttaccgtcgatttcaccggcggcgaagaacgatcgggattccggcatgtcctttccttgcctccactcccgagttgtgaattcgtagacgaacacgtctctaaccggttcgtaactcgccgggtcccaaccacccatcaccacgagttttccctccgagctcgacacttggcagaacaacggtaagccacgtgggtatttgggaacaggatcgacccagtcccactcgccactcactgggtcgaatatggacacgccgtaagaaggtggaggcgtctgtttgaggcctttcggttcgggtcgacccgggagtaactggaccaaacaggccactttacgtgtatgaccggcgagcttcctgtgatggtaaaaatgtgggctttggaagagttttctccatgatcggcaaactcgagcggaaactcggtgagttgagtagtgaaaacgagtcaagcactcgagtgcaagatcgtcaggaagttgagggattaattgggtaaactcagtcatacatatattctagaaggtttctatttgagaatggaagttgtttttaaattgaacacttcaatggtttttataggatatttgggtataaaaaaaaaaaaaagcaacattatttaaatattttaaacggattaaatgccacgcgacacacactgtttcgacagtactttacacttggatttatatttatttatttatttttatatatctaattatttttattaatttaacgaaatgtatttcaaatataaaatcatatattattaaatttaactaaattagttttataaatatatanatattaatattatttatttaaattaatttaaatatataaatattaatataatattttaatattagaagtatttttaattttaatattcttaaattttatacttttttaatttaaaaagataaataattttcttttaatttataaaattttaaaatacatataataaaaattaaaaatataattaaatacgagaaagctattagaaacaaaatgataaataatacaaagaggagtgactgtgacaaagtgaacatccaattacaattgacacatttaaagggttaatttcacaaatgcacaaaaataacaaaaatatagttttacggaattttaaata

SEQ ID NO: 168920 - DNA, 927 bp, Cannabis sativa
tatattatcacattcacacaatgtcccacaaaaccgagagattaataaaaatgatccccacaaacacgcacatatatattaattcattttaacaatatgatgttacatgtcttacatgtatatttatagtctctttcaggtcctcagagaagtatgaacaagaaagaaggaaatgattaatacagctactgaattacatgtaactcatcatattgctaagattgtttaatatatatgtatggtcaatccaaatgttacattacattttattagtgcatttgttcaaacacactttttttttttaattacacatactgttttagcgtataagagaaatggcaaaattttgtaaagttataattgttgtatacatttggatggaccaagaatccaaaaagaaggaaaattgggattatgaacttgggccccctttttctctttgaacaaatgaacttgggcttttttggttgttcttttcccctaatttttgaggggaccttgtgtgactaaaattgtaaaccagtttcatttttttttgaaatggttgtaaaaccagttaggatgaaataaaaataaagaaaaaattacataataaaccaaatttttttaaaaaattataaaaatatatcaacatgataatttttatattttttcgctttgaaattttttatttacaaaaatatctctttagtaaaaacgataattttttttttgttttatagtttatttatagttttattataattgacatgagatttttttttttgttttataatatatttatagttgatttatagttagaggtgtgtataaattgatcaaatctaatgagaactgaccgattcaattataaccgatcgccaaatattgaatgtccaattatgatcggatcggatttgatgttatttttgaatatccaattggatc

SEQ ID NO: 168921 - DNA, 543 bp, Cannabis sativa
atagatgaaaaatattatagcataccaccttacattcttttgtgtttttctttacataaatactttgtgtgattttgtaatagaataaatataaattttattcacgtattttaaaaaaattacctatcgttttctctatttattagttaaattataatttaaatatatgtcttacaaaataaaatataacgattaatttaaatatagtactaaattagaaatatataataaaattactaatattttgttaattttttataatataatataatggccttataaaaacatataattgatattgaaataatatattcactattattattaaaatatattcacaaacttgtttttttaattttaaataattgacaaagtttgaaaaatgtgaaaatatatattgttatattttaagtatataattgctcaattaatatattaagtatttatttagatgagtatatatctattctatataaatgtgcctatataacagaattcttggtttatgataaatttatgggtaactttttatttatattaaaa

SEQ ID NO: 168922 - DNA, 659 bp, Cannabis sativa
gagtttgtgagagtaagtcgacccgcatacgacagtagtttgaatttccatccttctagccttttcaacatactagccttcaacacattatagtcatcacgcttccttcttttaaacacgaacgagttgccaagatgtctttcttctccgcggacttcctcaacttggagagcttgaagaacctcgactcttctatcccctttaatgtttttggatatcaagacactagaatttgccttactacacacttgcccagaccacttctcataagtctctaagcaattgaccagagctctagcttcaataacattggccctacagaataatatagtgtcatcggcaaacatcaaatgggatattagaggagcctttgtcgcaattttgataccatgaactgccttagtcctctcggcttttaggagaatttttgataaaatttcctgtcctagaaggaagaggaacagagataaaggatccccctgcctcaacccccgttgagggtaaaacttctttagagggcttccattcaagagcaccgaatacgaaactgtgcttatgcaggacatgatcaattgagtaatatataatgagtaatttgcggcataaatacttaagtttaattcccagttgcaaataaatacataagtttaatttttggc

SEQ ID NO: 168923 - DNA, 669 bp, Cannabis sativa
atagaattaagtgaattaattaattaattattactacctgtatcttgaaaccaattgaaaaaggaaaatggccatttcgagctttgcaaagtcagctcccacacaaagcctggcaccgccaccaaaggccatgaaagtcttggatcctacgtgtaaatcttttccctgtgtgtgttattttccaacaaatattaatttttattaattaatttgaacaaattttagtgtataaaaaaggaattaattatattattatataggtaacctgccatcgccagggattaaatttaagagggtcatcataaatatcgccactcaaatgagccactgatggaacaaccataactaaccaatttgccggaattgtatatcctgtaaattaactttctgatcaatatcactctcaaccaatttaatacaaacattataatcttttatgtaacttataattaattgttacacatttataaattaattgaaaataatataaaacagtactcaagcgccaccaaaatttatgcatgctgtttaataagtacatgcaaatgacaatataatttttcatttcctctttaatttatttaaggaataatttttcagaaatttattgacgacttgccttttatctgaacatcattcacaacctttctaaagattcctggcacaata

SEQ ID NO: 168924 - DNA, 1523 bp, Cannabis sativa
agttagtgaacttaacaatactttgtctcgatctaaccacatcatggaagagcttaaagcctctgaatcaattctagatgatttattagaacaagaagagttatattggcaacaacgctcacatgtagattggatgaatttgggagatagaaacacaaagttctttcatgcaaaagcctaagcaagacaatccaacaacataatcaaattcctcatcaacgattcaggccaaaaagctcattcatgttcagacctggtcactgtcattgaaggttattttcagaatattttcaaggcttttagtacagatgatgcagccttgttctctgtccttgaagcaataccagcaatggtaactcctaaaatgaatcatgaccttaccaaaccttttactaaagctgatattgaagtagcactgaaaagtatgagtcttgataaaagcccaggaatcgacggtttgtcagtaatgttctaccaacaaaattgggatttagtgggtgatttagtttccaaagttgtgttgggggttctcaatgaaggagttgatcctcccaaattaaaccgtaccattgttaccttgatcccaaaaactaaaaagccatagaatatgaaagactactgtcccatcagcctttgaaacgtagtatcaaagctcattaccaaggttctagttacaagatttaaggtggttcttccgcatgtcattttagaaacacaaagtgcattcttaccaaactgtctaatcacggataatattttagtggcatttgaacttgtccatgccataaaaaccatgactacgggtagaaagggaattgtttcactcaagttggacatgagtaaggcctttgatcgagtagaatggcgctttattgaagaagttatgaggaaaatgggatttgcggagaagttacaggatccctgaccccaactcgtggcttgcgccaaggatgtgctttgtctccatacctgtttctcatctgctctgaaggcctatcaagattgttgcaatatgaagtacaagatggacgattgacaggttttaagctcactagacatgcttcaccaatttcccacttgctatttgcagacgatagtctcctattctgtcatgccaataaaagttcatgtcttgcaatatagcgagtcctagacatttatcatcgtgcttcaggccaacttcttaaccatgataaatcggtaatgtctttctctcccaacaccactttggcggctcaggtctttttccacagacatctttctatgcccatttgtgaatgccatgaaaaatatttgggactcccatcatacactggcagagataaacaatagcttttcagtgacataaaagagaaaatatggcgtctaatgcacaactggaacaaaaagatttttttggctggggtcgggaagtgcttctcaaagctgttgttcaagctattcctacatatgttatgagctgtttttggcttccagtatctatttgcaaccaactagaatctatgatggctaacttttggtgg

SEQ ID NO: 168925 - DNA, 1046 bp, Cannabis sativa
  modified_base (1013)..(1021): a, c, t, g, unknown or other
aagatgaagaatttgctcaattgtggttacttaagaaatgtcaaatgcttcatttcctccccttaccagctagctactaacccaggcgaaggttacaacgcttggtcgggcattcatatcaatcagggtgtgatgttacccttgctcccatacttcaaaaggattatggactattgtcatataagttcgacccaattcgccccaagggcctcaagtatttatctgctctgttcatcctctatgccacgcaaggatgggatgagccgtccccgcatgacaccaattggctctttgatctgaagtcaagtctgaagcagaacatgtcaggatacttctacttttccagatcgagaagaaatggttgacgggcaccacaaccatcgaggtgactaagatagagggctttgtggacgaatactactttgtcaaaggaatgggaactgtccacactagcttccagcaggtgccgtcctactgccgccctccgttcacactggagctcatgaagagggcactgaagattcttcaactccctcttgctgcacgaaacatctcctcttgaccaccgaggccaattttgtcaagtataaacttttttcggctgattttgtaccaaaggctgtgaaaacaacaaaagatgtcgtgctcggacatgaaactctgagcaagaagaggaaatagaaggctcatccaagcagccaagtacttgttgagcaatctatcaggatcaaggaagaacctgagagagttgctcggccaaccgccctagtggcaggaaagggaaaagctgtcatgatggagtaggagcaagaagactcctcagatgatgagcctccatctcttcttatttgggagaatgctcatgcctacgtgcatggtattttaactcatatttagtttttatctgtattggcttatatcgtacttgtctttaaccctcttattttgttcatgtacaaccatgtctcaaaaggtgttcctgttggaacttattttaccatgatcttagatcnnnnnnnnngtatgttgtttaacaacctaaatat

SEQ ID NO: 168926 - DNA, 713 bp, Cannabis sativa
tcgagcaaccaatcttgctttgtgagtgttcacggatccatctgcattatactttattcgaaagagccatctattagtgataatggtcatatccggggtaggtggaacaagtttccacgttttcttgtttttgagtgctgtgaactcattgttcatggctttattccatttaggatgagacaagccttctttgacagtagtaggttctctttctgtccttatgtttgccaagtatactctcggtttatgcctttcttggatctagtaaccattgggtggttattttgggtactgggaggttgtggcaaagctgatggttgaggatgtggagaggaggcagtatgaggttcaggtatagcagtatgttggtttggagataaagtttgtgaggttgctggtgtatgagactcagatgagtgattgtgactaaattcttattgatgtatgggatcatgcaacggatgtgagacacttaaggatggattttgagtgtagttggtaggtggaaaaacatgtgtttgaggtataggataggcagtatagttgatagatggggtcgaattgggattattctgagaattagatttaggaaataattcttgataatgaaattcagcttcgttaaattgaacacttctagccacatatatcctaccactagggtgaagacacctataacctttttgtgtcatgctatagccaatgaataagca

SEQ ID NO: 168927 - DNA, 1709 bp, Cannabis sativa
aaaaaaaaaaaaaaccatgtaaatcaattgaaaaagatattactctatgtagaaaggcatgggttgaccaaattgttgtctgatgaaggtagttgttttccacttaatattttcacagcttaaattatcggcttctttcttcccttttaatattttttaccttattttagtaaatttttattgttattccttcacaatgttttcatataattttggaatttttacataaagtagttaaagttgcacttttttttttcttttttacattttttatatttttttaagaatttttacttgtacttttttaagaaaaataatattatttatatgttatttttattactaataatgtgaaaataactgaaaaccaactatttgtctttttgtaaaccttttgttagtttttggtgtttatgaaaatattgctaaatttttttatatattttaatcttgaaatttgatttttcttggtttttgttgaatctatgagtctaaggcctgaattttaccaagattgctctatgatccaaagtaaaatagtcgagatgatttgtaataattggttggaaaattgatgtccaatgatcattgacaaaacaccaatcaagttgttcttttattgtgtgaattaaatatttgctttttgcccaagtaaaaagatcccaaatatatggttataaaatgaaaagtgatcaagaacagttcgaaaaagtttcatttgagcattattccttaaaagtcctctttgtttgtcttggttggataagatcttgttgaaatctctaatggctaatcatagtagcagtggagagagattttttaaacgtttcgaaagagtccaagtatgcattatttgctgtgtttgtggtgcgtcgtaaaaagtagtaaagtgctaacttttttttgatttaagcgtttatatactacaaccatattttacttgggactcgaacccaggacctccaagacacacacacccacctatggccacttgagttagcctcaagtggttcagtaaaatgctaacttaatcccacattaaaagtcatgtaacaatcaaaaatatttgcattaaatatgaaacgagttacatcgacatcatccttccataacaacataagacctctacttaaacctactcgagagacttcaaattcgttattaaaatataaattttggcaaaaatgaaaaaatatattactactaagtttagtctccatttaaaatgaaacatgaggagagtgctctttgacaagcaaccaaagatgacggaaagcactcgggttgcccaaactctgagcatttcaactaatgatttttatagttgagcgcgagactgaagacaagccaccacaaatttgtcttaagagccagccaaatcaatgtcatcatcggagacggtcagttggtattcaactttagtaaataaatttgaattgaatgttgatgtatttgtacctcgacaaaaaaaagtcactttcaaaatttatttaaataatttttttaattacccatacctagaactcgaacccaaacatggaccccgacacgaactcggaccttaaaccccgacccaaacttagactcgaatcccgactcagaccttgacctagacccgagacccaaccactttctctaaactcaatttcttattgggcaaataccattttggactaggggtgtacgtcggtcggtttatggtatatttt

SEQ ID NO: 168928 - DNA, 1743 bp, Cannabis sativa
atttatttaattaaaataaaacaaagtttgatgttaaaaaatgctaattaaaaggaatatttcccaacagtttatcatcatgttgagaataataagtattatccactattgtaaattgttggctatatttagtattgccaacggttctctactgttgggattcactattttttaaaagaatttcacttagtattgcccacggttctccaccgttggcaataattatttcaacggtttttataattgacccttttattaaccgttgtgaataatccattttgtaatagtgaaagttgtgaataattataaatcattattgttatattgtgagtaaaagatccatgactaaaagtattagtcacaaaaaaatataattttttgtgactaaatgtatttttaattaactacaatatttgttatgactaaaattgaattagtgaaaacttgtatttaaatattatattttaatcacatgtatttttttattataattaattaagtcacatttaattacaaaaagtttattttatgactaaaatattatcactaaaaataattatgttttattaataatcctatacaataattaacatataatatgatcatgactttaatttcctcttttgaagaaatgaaaaagatatcatcaatcaattattaagaaatttcatagataaataaggaccatatatatatattatgtttgtcgcttaatataaagttgataaagccaatcaagacgttttccactttaccatgtgaaacaataaattagacacgtactacttctatcttctatcttctatcaatctattattataaaaatataataatggaaataattattgaaatttgattttctctctttattgttaaaattatttatatatgtgaaatattatacaagtcatctctgttgagtcaacacacaagaaaaggaaaaagctagctaatttcgtaagttaaggccgattgatttattataaatagaatagtagccacaagctaagaatgcaaaccgaaacattagtcttataagttataatatctgttgtgtgatttgtgagaattatatgatgagtattttatttgtagtggggtttatgtttatgctcttgtttcccacaactgcaaatgtggtgaattcatatgagagtagtaatacacctcaatgcatacccaaagagagagaggctctcttaaagtttaagaccactttaaatgattctcaaggtgatctctcctcctggtccaataatagcaccactcaaaactgttgtgaatggagacacatcagttgtgacgaccaaaccaaccatgttgtttatgttgaagttggtggaatttacacgcttggtggcgagattgactcttcgttggccgaactgcatcatttgaacacattgaatctctatgggatgaacattagtcatattccaaagtttatcggctctttcaaagagcttagttttcttaatctttatgacaatccaataagtggaattattcctccacaacttggaaatctcacccaattggaatctcttcatcttgaaagcacttctcaaatgatcattgacaaccctgaatggctctcccaacttacttctttaaagaaactctggttatctaattgccgacttctcaaggtacctgatcatacttcatcgtcatctctttcccattcaaactattctttcacttctcttcaatatcttgaaatctctcaaagttttatacatc

SEQ ID NO: 168929 - DNA, 854 bp, Cannabis sativa
  modified_base (415)..(436): a, c, t, g, unknown or other
tctaaatatattctctgaatacattttttttataatagagtgagattttttttttttttaaaaaaaaagctctaaatgtagaaaattccctatttttttttactaaatcttttaatattatttcaataaaaaagtactattattttttcattttttttaaaaaaattaatttatatttgacaaattaaaattataaaataggattttttttttattatttatatactactcatggtaaaatattaatataataatactataacttaatattacatatctatatgtataatatctaccttatttataaaataataatgatgtaagaaagattaaagagttgatgaactatgaaactttcctatttgatatatagttaatttgacaaatttttatgcataataataataataataannnnnnnnnnnnnnnnnnnnnnaataataataataatttatttatttatggtgtatcatttttattgtaaaattatatacaaaaatatatattattaacaaaatatagtaatctcatatccatttatatgtgatttttcagttaaaaaataaccaaaaattcaaactttgcatcatagaaattaaccattcactagaaaaaataagaaaaaaaaaaagacacatcaatgataaataaaacagtctaaaatctttccgttctttataataagcaaaaccgcctaaaattatccattctctttttctaaaataaacagaacaatttaaaaatagaaatttttacatgaaaaatcctttttacacactttattacaaaattaccctcacacgcctattactacatttctacttacaaagttatttttattacacatttaccac

SEQ ID NO: 168930 - DNA, 568 bp, Cannabis sativa
ttggagcccttctatatttggttggtatatatgtcttatttgtaaggctgttccctaaattatctaagaagttggtttttaaatgttatattttggtgaattaatcccaagactgtgggcctcgctatgcctgtatatgccatgctgccaagctttctaaccgcttgtgctggaaaattgatggcctggtctgtgacttctagtgggtttcgaaaaaggtaactatggaattcacttgaaggcttgggacaaaatgtgcttgtctaaatcctagggaggtctaggttttttaggaaaacaaaagagatgaaccaggcctttttggctaaatggggctggaaactcattacaggttgtcaatctttatgttgtaaaattcttgaagccaagtattatagaggccaaaatatcctcaagtgcagagctaaagtttctgattcttggttttggaaaagtttggtgaaagcaactgagatccttaggagtggagcctgcaaagtggttactgatggtaaagatacgacgatctaggaggacccttggatcacgcatagtcaagggttctacc

SEQ ID NO: 168931 - DNA, 604 bp, Cannabis sativa
ggaacagaaagcttacccactacaaatttcgatagagatgaaggtgggaagtttggatcattgacatagcgcaaaaatcccgagaagaatagtgcttatgggtttggccacctagagagaaggaggagctttttctagagaaaatttctagtgagtgaaagtaaaagttaaaaatgagaagtgaaaaaaggatttccccctaaaagtcacttatgtagtacttgtgggccccttttcctcacttagctcacctacacatcataaaggcaactaaagcagttatttctctactgccatgagatcagacagtccagataaagtgttttaaagcgcatcaattttatttagaaaaggctacaatagtctcaacaacatcaatatagctgggaaagtccctatatgtacagacgtccacatagggacttggggggcaaatgttatcccaatttttatcctcatgacgtggcatgcttacatgaagtaaatcagtgcaacgtggcagtacagcttaccaaaaggaaggccaagttagccctgaacaaatgaagagcccattactcaaataggcatcaagtgacagaccagctccctcttaagagctggc

SEQ ID NO: 168932 - DNA, 1091 bp, Cannabis sativa
ccgctaataatggcagtattagcgacgaaccccaaattttgtcgctaatagtccgtttttattttttaagaaaaaaaattataagcggtggattcccgccactaatttgatatatcttgtagtgtaaatggtagctaaaatggatagatggatctaatctaatccaatagaaaaccagttaatgcatccaatagttagaattgatccaatccaatacattcattggatccaatcgaatcgtatgactcaatttgattggattgaatcagataataaaattcaatatccaataaataattagattggatcgattgggtccaaatccattggatgtgatccaatgaacacccctacacgctacatcagatactctaaactcctcttttttaaagcttctttaaaatttactattcatgctctacatttatagaattcattattcacgctacgattctatatatataagtgctctaactaaaaatacgctacatctaatactctaaactcattctctattttaaagcttcttcaaaatttactattcacgctctacatttgtagaatacaatttgttaattcagatttttgttaacaataaatgtagccttgtaaataaaaagtaactatttacaattaataaatatagataaaacatcaagagcttttacgtggctttgtagttaaaatctacttacttcatgagtcagtattatttctgagtatttctttataatgtgtcttcattataagatattctctctggatattcacttaatctcatagggtttttctttcccaaaaatgatccatcccttttctcctaggtttcgtccatatttataagagttctaggaatgacaattattctcttttgattttatttaagtaaccgttcatgaaactggacaatcctcacgtttcatatttacaacatgtggttaatgaaataactgctgataactgctttttgttcttatccggaagtagtttgtcgtgttagactataatatagtatatgaaataagcatatatataaacgatatgtaatgcagaaataaaatataaacatatcgtaaacatatgcaatgaaa

SEQ ID NO: 168933 - DNA, 772 bp, Cannabis sativa
tttctttaaatctgaatggcttaccttacttatgaatgttagagctcttatataaatatataatgtacgtatagaatagaagattgaaacttatttaattcatgtgatagtagacaatattatatgtgtgttattattacaaataatagtgttaaattattgataatattgaccaaaatggcatataataatgttaagataaatgttgcaggtattatcttattcagtaaggatgacaaaaagatttatttattaagattgtcggagttttaatttcacttattatttctcatgcaaaatatttaaatacttattggatttcgaatcaaatccatccagcactgttcaatttcatttcagataagatttggttcgatggagtttcaaatacatatgataatattatcgttactatataaaattaatgaatgttgttattggtcactagtagtgtctaatactttctagatgtgttgtcttacagttggttagcgatactccataaaaattattatattaaattatataagaccggatacttaattccaccaataacaatattaatacataagaggattataagcaccaataatacttttagcatttctcatataataattgagcctatactgttagcaaatttaaagtgttatttatttttttacaattaactactaacattagctacttctgtgtatatttttgtacacaggctcggccctgggcataggcgggctaggcctgtgcctagggcccaccaagcccaggggcc

SEQ ID NO: 168934 - DNA, 991 bp, Cannabis sativa
gggtagggaattgttagcaaaaggtttaaggttgaaagtgggttctggcctttctattgcttgtggtacagattcatggattccaggccatgataacttcaaggctttttgttatcttggtccatcttcaaatcatgtctcggattacattacaccagatagagagtggaatattgacctcttgcaagctgatttttcaccaccagatgttgatcgtattcttactatccccttatcttacaatgctgttcaagataggtggatttggcatcatgatgtatcaggagattactcagtaagtacaggataccattttgcaagctctttggaagaaagagaaatctctactggttctaatacacagaatacatggtggaagaccttttggagttataatttgcctgctaaagtcaaaatttttggatggagagtgatacaatcttcaatacctgttgctaaatctctgtttcataagaaagttctaacttcagcaacctgttctttgtgtcaaactgcatgggaaacaataggtcatgctttgttttcgtgctgtcatgctaaagaggtctggaagttgtctggtttctgtttcaactttcaaagtgctcatcgaatgcaggatggggattatttgatgtatctatcctctctgcatactaaattggaaatggaaagaattctgtgtgtcatgtggtttatatggtctgatcgaaacaactttattcatggtaaaaagactaaaggcccaattaatttactgtcacaatctgatgcctatttgcagcaattccagctatcaaaccaggctgcattacagcatactggtgtgcataccagttctgtgatttcggctagttcaccaaatattggttttcataccaattcacaagctgctgttgttaagtggcatgctcccccagagaacaaaatcaaaatgaatgttgatgcggcaattgattcttcgaggagtaaaattggtattggtgttatt

SEQ ID NO: 168935 - DNA, 589 bp, Cannabis sativa
agagcgtgcaaataagagcatggtactttaatatcaagtcacacgtactttaatataataacgtttataaaatatcgctaaccactaaggcgacaccttttagtagaactacatactactgatgcctaataacgttacaacaaattattattttgtaactaatactttcaatcacaaatcttttaatcacagcataagaataataatttataattaatcacaagttttgttatgactaaaagtaaaaaaaaattatagtgatttttctattattactcttctaattctattatagtgaaccaaacactacctcgttataatatcagaaagcataaaaagagaaatcatcgtctttctctttctttctctctctctcccgcacctcggttcccgtaccctgaatttcgaacctatagatatggtgatttgtaattaattacaagttttattgtaactaaaagcaaaagaaattacaatgatttttccattactcttctaattctattacagtgaaccgaacacgatctctttatagtatcagaaagcataaaaagagaaggcatcatctttctctttctcttttccgcac

SEQ ID NO: 168936 - DNA, 679 bp, Cannabis sativa
tatagaccatctgtaaatttataaatgcttttggtttttgtgtgtgctgaacaatcagagtacatacatgcaatgatgagaatctgtcaccataaataagagatgaaatgatattttaactgataatttaccagttggataacaaaaatagcaggggaaaattgataatgtttagagcaacttttgtgctttgttctggctcaaatctataactcgcataacctatcttctacttcacatatctctcaagtatatatataaaaatattttacaagaagttccaaacagtttgaatttatgttttatatttgtattacaattaatcaactaactattaaattatatatatttatatatatataaattcaaataagaaaatatgtatacttattaaaatttaaacatttagcattgtttatatttatatataattaatatataaacattttattaatacaattatcattttttgtgcttatgtgtgagatggtgccagttaaaaagtacaacacagttttcaagcactaatcatattataatgcaaatacaccaagctgtaattcttgccaaatattgtggcactttgatttttttttacggtaaatactattttggaccctatattttgcaaaagttactaattgaactctttattttgttaaggctaattaggattttt

SEQ ID NO: 168937 - DNA, 1043 bp, Cannabis sativa
ttgcaggcaatgatttgtttcccgtccattgataggccttcccattaatgccggtgtcagagagaggtactcaaacatttcagccgtcctttctcctcttcacacctgttcatctcatccgttggatcacataatttgaattgctacaaattctcaccgtacgatggtgtctgatcacagctgccttgcaccccttctggtctataaaagccagcacctttcctttgctgggttactttcaccaccttgcgatttttaacccatcaacacattcgaaaaattccagacaaatccgactacctcctgttgttgtcaaacaaaatcatatcaccggacgtcgtcaacttcttgcttatcacctttgtgtaagtctttgttcatattttttctgccttttctgcatgttagggcaagataagaatggtgatattgtcatttggttgcgcttaatttctgtgatacggtggttatggcgactgtcatggtgacgcttccccaagggggggacgtttgatgaccactgtcgtaggttgttttatttgcatgcttacagtcatttttcttcgaggctagaaaatgatcttctgtttgtttgccatcgagtatttgaagcgacttccatactcctcttttcttcttcttttctcttaatttttgttttttggatgttttgcatccgatgtttgcctaggagaatatctggattacctatctttggcaggcatttggaaggggcctctttccagcggttaggggacccccattcccctcttctatcttagggttttgtttgtgggctaactactggatttccttttttagataagtgcagttctccacgaccttcacgatcattgtttcttcggattcgaccaagaaatcttagaacttcaccaagtccacgccatgtctacacccacttcaactggagcaaaatcttcaaataaggggccaaagaaactggccactttggaagaagtaatgaagggcccagtggtctataagaagttcacatgtcattccaatggctgggagggagatga

SEQ ID NO: 168938 - DNA, 1179 bp, Cannabis sativa
actactgcatgagaagcaagaaataatattatttatttgataatcaaaatagtagcaaacttgattgtagcgagcaacacagtgcaatataagatataattttttttatcccaaaatatataaaaatgataacagaaaaagatatcataaattaaaattaacacactcattattatgatcgatgacgagatactcctttagtctcacaagaagcgccgccatatatatttattgatgtcattcatatatgaagacatgatcaccatgaatgatcaatagtcaaggcagcatcggaacatggtgtacctctccatcaaacgaccgcactcagagcaagccacggtgtcaggcattgcaccagtggctggcaaaataaggctggtgcagtggtgtggtgcgtccacatggagcttctgaaggtactcatctagagcaggcacaaaaccaatcactgtctctctcatcttccactgtccatgctcggtcaaacccctaaacatgtgctccccattacccttaaccattccctcaaaacctctgctgatggcagcccagccttggctgctggacccgtagctcagcatggcaatgatcccttgcatcacacggtcatgcttgacagtttcagcagtggttagttgccctttggagtgccacatgctctccaatcgcatccagaagtaccatatgaggttccaatccaaggttctgctcaagttctctttctgaataatctcaatgatgttccttgttgctttctcatgaggtttgctcttccccacgtaaagcaactccaattgaatccctgattctcgggccacatccttagcaatccttgtgaatttcctgatccagtcaatgtcttctcctccatacaagcaaacatgcttttgttcttggatctataaaaatcaataaacaaaaacatatgtaattagtcattgttatgtgaaccatgcattatagcatgattagagacttacccattcggcagcattggggtcaaggccatcaataatcaatggcatggtccaggcattatcctcccacaacaatttttctttgttggcagtaaaaggataagctaggcttccccaaatacacatcatatgaatggcattgtggtgcacaactctgccttgagtgtcgatcaccacaagcataggcttcttgacaaag

SEQ ID NO: 168939 - DNA, 848 bp, Cannabis sativa
attagccgccaaaaattctaatttaattaaccaataagcaatgtttagtagcactcttgttgtccattaattagttttgaaaacttgatgatgattagggtcatccaatattgtctagctagtcacaatttccatcatcatcatcgttgcacttgaataatacatgtaaattgccaactatatattatatatcgtttattaaaaaaagaataatatgatatgtccacacaaattatacacaaaattgatatgtgaatacttatataacaaatcacttttaattagaggaattcatctccaaaaaaaaaaaatcttttgctcaataaaaagtttcttctccatttcttcagttttaataattatggagaccacgtgccaattacaaaggtctaaaacttcatccaatcttaatttgataatcattttgcacttcaaaagttctcatcccattgagaatggtaccgccacatcaagttagcctcccaaaaggtcaagcataatccctctcaattacgagctattaataagattctaactcttggccctaacaaaaaaaagatatgagtaaaaacattccttccactacaccacaattcgtctcaaataaagattattggtttagcttattgttactctaaaaaaaaagtagaaaaaagcactaattctaggttaaatgtaccaagaagaaacaagggtatataattagcaataaaattcatgtatatatactaatatcattattaattattgagagtcatgatcttaccctttaaaaaggacaattgaagaaaggcaccaccaaaatttgaagcattagttgtgggagaataatataatatatatatata

SEQ ID NO: 168940 - DNA, 867 bp, Cannabis sativa
attaaagagatagggtcagcggtaaggcgaacatacccaacacctagagatgatatcttgactttcagagtcagatgactagagtttttcgaaccaaaacttgtcgttcttcattcttgctgaatctgcgacattttatggattgagggaagctgctaacacacgatggtttaaactaaaaaaatccaaatgatgaacatgtggtaagtcaaacaaagtctcccaatgttgattaacaaaacaccagtctaatcattccttaacagtatccaaacttgatctacttttaacccaggtcaaagcatcaacctcataaggttgttcctataagagacaatggtcaaaaactaacctgatggcatctatttgtgactcattttggagagagccactatacttgttatcattgaacaagatttccttaaaatctccaatggctagccacgaaaagagaggcacaacatctttaaaatgtttcaaaagaatccaagaaattgccccgattagtgttaacccaaaaacttaccctagtgacatagacatcaatatttgatacatggcaagaaagaaatcattttggagttgagtagtcttgagtcataatgggtgtctagatctcgccaagttgttttcaactcactatcttttagtattctttactatgaagacatgaagcatccaagtcgaaggttcaggagctgaaaatacacgaaacaacaccatgtaaatcaacttgggctagggtttcacctagtgcccaggttggtaaccccactaaggtttcatttttcgagatcgtcttagtgaaaatgggtcaaaatttttattgggacatgaattagacatgtcacaaacatatttgaggca

SEQ ID NO: 168941 - DNA, 549 bp, Cannabis sativa
tataagtaaagcccattagtctaaataggcaaagcccaataggaacacgggtggggtatagaatatcccgcccataaatgcatacatgttttaatatatttcctaattatttttaaacattttttaataataaaagaaaaagaaaggaagcttattgagttgagccggagtggtcggtattatataattatataattctttaataatactaaacaatattatttgactattacataatttgtcttgaatttcgaaaaatttgcacaatcatgtagctgaaaaacacatatttttattttattatattatattacgtttacttaatagaaaagcaatttttatcttttttttactttattttaaaattaaacttaaatttggcattgaattttatttattagttgtaactaaaatactcaaaattaattctagatgtatgtttttgtctattacaattagaaatagtattatgaaaggggtattttaccggtagaatggaaaaattaattaaaataaaaattattattattattattattgtttttaatt

SEQ ID NO: 168942 - DNA, 920 bp, Cannabis sativa
tcggtcaccgacaccatgtcggtgtttaactaggattcgctatatgggtaaagtgcttctttattactcactaatttaagtgaaatctaaactaaatattctttttattttattaacctttaaaccaaatattcttattatacactagagaaatgctaaagagcactattggtgcctaacaccttcttatgtgtcaatatggctattagttcaactaagtatcgggtctcatataatttaatataatagtttttagagagtatcgctaactaatcgcaacgcgacatgtcgcaaaggtgctagccatcactgatgcctaatagcaatactctatacactatatgcaaaagaaaaaaaaaatgctccaattttaaagttcttgaaatttgtttccaaaacacagctgaaacgcttttctattattgtttgaatgtccacattgataatgcatagaaatttaatacatacataatgatgattgactattctaattaattttgaaataaaacttatacatcttaccatacacttcacttttaaataaaactcagcttatcgttcttccttcttaatgtattttttttagtgacgtactatgatatgttttctagttattcatgaaacaaataatatatataaattttagaattattactaatttatattgtgctaatttatatagaaaagtataattttattgagcattgctattggataatggtattagtgatacctaagcacttctaaacatgtcactttgtaattgactagtgatatttcttaaaaattattatattaaactatataaaatttgatacttaattaaaccaataaaaataataatgttagaaatttattggagtcacaattatatatataaaaatatgtgttgggtcatcaaataaataagtcaaatttat

SEQ ID NO: 168943 - DNA, 591 bp, Cannabis sativa
  modified_base (512)..(521): a, c, t, g, unknown or other
tgatttggttgagttgaaagagttagtttctgcacggtttgtttcctttgctgctcaaatggcttcaatgcagacacagttcctggaaggttatctatttggggccggccaggaggtagcctttctccgcgaaacagggacttccactatcctatttcagttttggtctttttacaaggtcaagtctcgggagcattatctggaggcctcttccttacatcgacctttgcgagcttttcattttagccttatatgcaacttttagggataaaatcttcacagagatgtgtaagaagggattcaggcgtgtcttttcaatttttcaagaaatttttgccgaatgtgtttcttatctccgggttcacccttgagcttacccttcagaggaagaatttaagcgtattcctctcgaggagactttggttgagtgtgttcttcgcttttgttgcatgttaggccgagtgatttgggcggatggaagtaggattttgttgttggaatatattttaccnnnnnnnnnntttactaacaagtatgtttttaaacatcctaatatggatttctaatacaatgaaaataaacacataaaag

SEQ ID NO: 168944 - DNA, 728 bp, Cannabis sativa
gcgtggatgacgcgacaagtataatgacacgtggcacaaaaataccataattgaattaatgaggagtatgtaaagttattatcccccatgagatatattctatgtaaagagtgagattgagtaattactccctatggctatgtttgagcaaccacccgtagggtgagtatacacactccccaagggtgagataggtgactacccccaaggtaggttaagcaatcacctctaccctaccctgggggtgagtcatccacctaagggtgatagattagtttagaagatatacccatcaccccgtgcactctcatgatttaggaatcatactctacctacatatgacatggttaatgcaatacatcctcttattatcaatattacatactactaagcactaaacacaacatggggagtaaaagagaaggtactcaggagtactacccccctaaagggtcggacagttaggccgcatcttagggagtaccctttgttggaacttattttaccagaatatagatttactaacatgcatgtttaattaacaccctaaatatgaattctctgaaacaatgaaataaataaacacatataaagtttagaaaaccttacatcgatggcagcagaataatgactccttccgcttaaatctcaccttcagtttggttaaccaccgttttgttggaatatgttttaccaagatctaaatttactaccatgtatgttgttta

SEQ ID NO: 168945 - DNA, 775 bp, Cannabis sativa
caatgttgaaagaatgaatagtagcgataatatataagacggaatggtagcaacgttggccctgtcaaatatcacaaagccattggatatgcctctcgacttcgttggtagcaacgtttctactggagttgatccatgtagatcgcaattgacacctgctcaatctaagtcgatggcagcagcaaggagagcaccaaagtcggggaagacgcatggtgcggatcctagacctacaacattaagggtgctccaacaacacaaacactagagaagacaaagataacatcgggtcttcgcgtgcaaggcgaattgagtgttcgagtgatttttttggtgttagtggtggctcactaggggaatcgattcacacattgttgatagacgaaggagaatctttgattggggacgacggtggatctttgaacgaagacgattgtggatctttgacggcgacagacggaacgaagtggtctttggacgacgatcagaagcatggttgggccagatctctgaaagccattggagtagagacaacgattctattttcatctccatcggtttgctgaaatatatatataatatctttactcgtgctacaatttacatatatggtgttatgattataatggcaataaatagaagaaggaagtattcagagaggatgattattggaagctgcttcaaagtacttcaaagattttctttagaaaaaaaaaattacagaaggggcaactcattgctatcacggaagaagaggattgattgtgttggctta

SEQ ID NO: 168946 - DNA, 711 bp, Cannabis sativa
gtaaactttaaaatcataaaatgtgcatttttactattaatcagagcccaatgaatagaactcagaaccttagagtatataagaggatctgtttcaacaaatctttcatacaatctttatactataatttttatataaatatataaacatattatacctatgtgtaaaaattatagtataaagattgtgtaaaagaatacatttttttatgttgtcaatataaaaaattaacatatgaaaaataaaattagtaaagatcaaattaagataagttaaaactgaattgtaaaaataatacaatgactaaaataataaattaattacataaatgttacaacacatatatataatatataaatattataagaaatgtagaagagatgaattacaatacatgtaatatacaatatatataatataatatgataaagaagatatatatacactcactcacaaccttgagtgtagatttgtgaggatcaccatcacttgaacaaggtattacacctttatccaaaaacttatttcctcccatctctaagcactaagggaactctcatagaataactttgaaaattatcaagctttttagggtttccagcaaagtgcattgttgatagaaacttgattgtcacaatatgagcaccttaaacctctttatatagtttttaatacttttgcaattttttttttcaaaaaaagtagatttac

SEQ ID NO: 168947 - DNA, 620 bp, Cannabis sativa
ccatgtaaatttccctataaaaaccccaaatcaaatcaaaaacaacaatgggccactttacaaaataaagaaagaaaacaatgggccagactattaaagcctatactagcactagcagagatgccacataagattcaaattcaagcctaagtgttagggtgtattagggagaataggttaaccttttcttatttttcgttgaaaacgatcattttattttaataacctgctctgttcttcttcattaaaaaaaaaaaaaaaagtaaaaaactgttcttagtttttattcgtgactaagccaagttcaactaccagcaattagggggttcatgggttcacattccatagatttggactcaattgatccgtccaattttttattaaaggttaaattttgtaaatcgatctaatatgtaataaaaaagattcaacccatcaaatccaactatgaatgtattggattagatatgatcaattctatttctaactattgtatattatacattaactggttatttataggattgtattttttttttttttgtgaaaagaagataaaacttcattaaaataagtcatccaaaactaaggatgaaatatcagttggcagggtagccata

SEQ ID NO: 168948 - DNA, 632 bp, Cannabis sativa
aaaaatataattttgactttattttgaggtttttgactttcttatgaagttttagtagtgtggtactaatataatagtccttatccaattgaatgggttaaaaagaatggtgcttttcctatatataatatggttggctattggtggttacaatggtatctttgttgtctacaaagaattaaacctaggatttctatttgggaaaagaatgtagttatccatagagtgcccctatgggacctttgacaacaatattccatacaattacaaatataatggatgtgtatggacttgatttgaagatgtatgttttgaggtaccaaagaatatgaccccttctttttgacatatttatagctaccaaccaaatcacattattttaatcatatgttggcatgcatattaattttatattttatgaataaaaagagtaaatgtcatttttttcgtctaaaaacttaaaaatgagctagtttaattaaagagaatcttaaaattaactctcttttttatccggttataaaagaggatgaccattcttatataaactagtccgatgttacgtgtaaagtacgtataattagttattttttaattataggtgatattaagtgcaatatatatatatatat

SEQ ID NO: 168949 - DNA, 512 bp, Cannabis sativa
ttgagcccttagctcgggtgacaggttgttccagcttgataaagccatgtgctttatcaagaaagtcgttcatggtggaaattgccttgagacgaaggtcaaaccatagatgactcatctccttgagtcccgttacaagtgtcattacccctgcatccttaatttgccattattaggaaggagagaatttgttgccaaaagcatccaccagatcattcgatgagttgatcaatctagtggaagcttgaggtaccactggtgagctaggtatgtcagtgtggcagtgaagattctgcacctgatatcatctattactccattcatattggtcaacaatttgatgtaatggatgtgagatagcagatcttcactctcagagtattaatgctaagaagggttcttgaacttcggaagtaatggtagagcattgattcgaccagagttcaaattttgacaactttggggtcataattcccttcactagggccgctatgttgtcaaactatgccctg

SEQ ID NO: 168950 - DNA, 1593 bp, Cannabis sativa
atcgttgaaggtcactaatgaagtgcgactcgacctaagaacggtgggagaccatccacattgattacctcgggaggcttcttcttcagcttcccgagggattgcattttggaaataatacacccgagccgcgcagtcttgggtttcctcatcagctgggactagaacctactaccacgacgtatacttgggatacttataatcataagtatactcgttttcagcgaggaggccaacagatctcagactggcctctttaagaaaaactccgctaaccgaagaccaaaaggaagacccagcagaagcctacgtcgctcggccatctcaggagttagagttggtcttttcaagaccgctgtcaaaagaaaaaaaaaattataagtcaacgaggcaataattaaaagcaaggagtaatttaaaacccagtttgcaacaaatagctacttacatattatgtgaaaagcagttgtgctaattggggagaggccacttgtctagaagaagtcttccttaaaaggggtgttgtttggtaacccaacgatgatcctacgatcgcttgtatgagtcctaagatagtaaaagccttttgcacaactgccttgaccgaataaagatagactatttccaagggagtggggcactcccatcctaaaattttatacagaacccttagacttgcaaggattctgtaggaaatgggaaccaattggaatggggctattccaaggtggttaatgaactccttaaaataatctcgcagggggagaattgctccaaccctgatgtgctcgaggctccaagcgcgtatcctagtcgagccactagtacttgcttcgccattggtttcaccattggctccctcgcgtacctcgcgagtaagtcgttttggtggatagcagctaaattcaccaggggcgacagatctaacacgacattttcatttttgatcaatgccacaagtccttaaaatacatcctacatagtccgctatggctcttatcctcgactcgatgagttcggcctcgaaggtgacgttgggatcttggggagtctttgacttacgaggcttggaagaaattatttcaaagtccaggttaccttgtgaaaaagcaattgtcactttgggtaaaaataggggcttagccaaaggaataggtgataaatttgggggttcaggcaaggcaacatctcgtaagaaacgacgtttaccctctgttatttcttgtaggaaacgcctataacgactagcaatatcatgttggtaggtttctattaattggtctctaatttttgcatcgtttatctctaatttggactagggttttaaaattctgggtttgtacgggatgccaagttcactaggatactctgtttctaaggagtttggagaataaacttctgaaccagattgggacatttttcaaaaaagagcaatcccaattcctggatgaaatttattaaaccagaggcttaacaatatgatatacccaaaaatttgtactctacctaaaccctaaaaattatccagaagaatttaaaccaaaatcgctaaaaccaaatggaatggcaaaaatgcaaactataaaaatagtg

SEQ ID NO: 168951 - DNA, 752 bp, Cannabis sativa
atcttcttctggtcctcttgtatacaaaccaaagccaactccaacttagaaaactgaaaacaaacaaaaaaaacatataaaaaattaaaaaaacatataaaaaaccaacaaactaaaaagaacaaaacaaaaagaaaaaaagcataccttcccatcgaagcctcgaggtttcttcgaaagataaattggttcgaacttgaggttttgtattgcagatttcttcagctcacgaccaacaggatagaaatccttcacagtggcctaaaaaaatgggaagaaatcaaacttgttaaaaaaaaccagttataaataaacaatgaaaaaaaggaaacccgttataaaaaatcaacgtacctcgggattgttaaaaacctcagaaacaagttccgaataacctccattgtttttcttgtatgtaatctcccagtttagcaatcgagtatatgtattcgcaatcctcttgcagtacttaggagaaagacttataagtatctcaaacaaccaaataaggaaagaaaatggaaaacctttaaatttaaaagaataagacttatccttttcatctttggccttctcagtcttataaaagatatcgtcgccatccttaaaagccagattcatgaagtgaaaagttgtgtcccagaataattttccaaatgctatattcctcaagtctggcagatccctgtaatatccgcttttcttgaagggtaattaattttttttttaatacttagtttattttgtttgct

SEQ ID NO: 168952 - DNA, 1778 bp, Cannabis sativa
  modified_base (288)..(306): a, c, t, g, unknown or other
  modified_base (351)..(359): a, c, t, g, unknown or other
  modified_base (386)..(386): a, c, t, g, unknown or other
tggtatatataatttttttaataacattatcttattttgtttattatttattgtaggtatatatgttttgttatatgatatatgatttttattgtgtatagtattaggagtgttcatcaaaccgctcaaaccgtccgcactacaccgcaccgtaaaaaaatgcggtttgaaattctttgtggtgcagtcgcggtttgaatttttcctaaaccgagcggtgcggtttgctgttttgaattattaatatgcggttcaaaccgcaccgcacattataaaaatactaatttnnnnnnnnnnnnnnnnnnnatatgtgaatgtccaacccaaaatccactaattattgtattattnnnnnnnnntttcttttttcatatttattttcaagncttatggtatttttgacaagtgttgctcaaattttgttgtatttgtgatagtttaattattgatgatagtccaaaccgcattaaccgcaccataccgcaccattttttgttctgcggtttctatggcttttaatttcgcggtgcgggtgcggtttgagaaattagaaaaaccacatctgcatgtttgtttaaaaaaaggtcaaaaactgcaccacccgcaccgcgagcacccctgtataatatatcatttatttaagatatgtgatatatataatgattatatataaattttttggtatgtatacatattttaatagtggtacatataattttgttagcataatatatatttttttgagtattaatttagtattgttataatttctttgtaattaattctgtactatatttattacaaaaaaggctttttttttttatagttaatgaaaatctgcggtaacagtttgacactttcattgagagcttttgtaataaaaactcagaaaataccctccttatagacacaactacaaatttgtatctataaaggataatacccctcgtaatgaagaaaccatctagaggagaccaaccttcaccctagaaaggaacctcagggatcacaaagacccaacacgattgaaactcctagatctagaagaaatgatgaaaattttaactcaactggtgaacagatcccatagtggcaaagtgaagactcctatgataccaccagatatgtcccagtggtggaattaaaaaaaataggcaacttcgataatgcctagttgagtcaaactaaagaaatgtcgagttagaacgagaggttgcggcagccaaggctgcacagggaaccactcctcaaactcaacctgatccatctgcaaggtgaccacagggaaggccttaaggttcccagaccaggagacaagaaaataatcaagggaatcccataaatacgtaggaagaacaacctgggaatacaagagatatcccaatggatagagaaaatccaccaaatactggcaatacaagaaatcaagagcatcagcgtgatgtttcaaggacttcccatggttttgcaaaccagaggaatgaacaacttaatatactggaatcatctcgcacgagtgcaatgcaaggcagtcgtgaccaagaaaccaggaaatcccccaatatgatgggagaaatactagaaatcaacctaggataggttgacccccgagacatccacaaaggccttctcgcaatgacagagaacacatacacacatacataagtctataaaatactagtgttactaaaattgtcttaatatgactattaaaaaggtgagcctaaattgtcccaaagaccctgaacactccaggtctaaccgtcatgatatgtaca

SEQ ID NO: 168953 - DNA, 520 bp, Cannabis sativa
  modified_base (464)..(472): a, c, t, g, unknown or other
aaaaaaaaaaaaaaccaaaatgggtttctatggtgtatatgattgattaagattattgcattgcattagatggaattaatttggattgagattaagataaatttaatgtgttaatttatgttttgtatagtattgacttttataaggtgcagggtaaaattttcaattagattttagcccaattgaataagcccataatttattagttattaagagaacaacaaatctgatgtaacgatttcgcttcaagtctttattgggcatcctgctacagacttatagattttatacacgggtacacgtcactttggctgcttcttagaatgatgactggccttgcaaatcaacatgagtctttttaccatgctttgttcttacttgcacgcctcttgggaaaatttctccggaggtcacccattccaagattgctccagaccaaccacgcttaactgtggagttctttnnnnnnnnnctaccgaaaaacaagatgcacctcgttgatataggtagtaccaatcaa

SEQ ID NO: 168954 - DNA, 2022 bp, Cannabis sativa
ggtaccagccaatggcaataatgagcttagccatgctcctctagaggaacttggggatggtgtcgcggtagaaaaagacagagctatttgtgctagggtgatgtttctgctggtcctcgagtagcccgttctttgggtgggtcatcagggcgtcgctccacaggcgaaaggcgagctgctcccacggatcctcctaaggaagcttctcgcctagagtcttcatctaaaggtctgctagctaaaattgcaagttttttttgaagaagaatattaggaagtgatcttcagctggctcttctcagaagagcctttctcgggggagaaaactgctagctttggtcctttgagcaccatgcctttcagtgctcctcctccattgtcgaagtcgagtgcccgaagtgattgtggggcatcacctggcactctcaccttggtcgcctcccttaccccttctaggaaatttgcatgcccagcatggatacttgcgagcatgactcgacgaacgtcatttaatagacaaaaatatgcacgaggcacacggtcgtgcaaaaactaaactcatcgttactcggattgttacaaaccttacattggtttagagaaagtaagttgccacatgggtattcctgactgaaaaggtaagttcgtgtcacacaacgtatatttatagatgcctaccggcactacaagaaatgtcactttttccaacacaatttacttttaccagcgcatctcgcaaactgtgctagcacaaaggtcaaagttttaccagtgcacattcgcagtggaaaaagtctaacttttactagcgcatttacgtgttgggaaaagtcatttttgccagcgtttttcattttgcgctggtaaaaattctgatactaatgttgatttgccaacacatcaaaagtagattttgttgtgccagcacaatactaaacttttgctagcgcaaaaatgtacatggcaaaagtgacattttttgtagtgtggtcttactagtaaaactctttagatgttttaacaacgtttctccttgtttggaagcaactttattgttgggattaaactcacttaacctgtcaagtcagtatgtctatctatttgctcatcagatgaatctgaagaaagctactgctagtcataacagttggctttaataccaacttaaaggggaccccaccaacaattataaatatgtgttcttctattctccaagggggaaagagttctaatctctaatctccaaaatctcatactttagattcagtttggagagagagagtccaagatcatagtgagtgtgtgtggagggatgtaatgagagtatcactcttgaagtaatttccctcaatgcgagacatttctttgtaatactttactgtgttgagttgtaatcttgggctcattctattgtgtactactgactattccatcattcattcattatcaagttaagttttctttgtctaatttcaatcaagttcaagttttaattatgtgattagttttaattaggaattgtgtttcttggacattgttactgttgtaataacctattttgagggtgaggattcaccacaaatggtatcaaagctcagggtttagagttcaagaatcacagtaaatcaatcaagactcaccttcaacatttcaagaattaaactcaaactttcacgaaccaaattgaagcaatcaagaactggttttaatggcttcaaaaaggtttgaggtggacaagttcaatggttcggatgatttcagcgtatggagaattaaaatgaaagcctttctagtttagcaagcgatctatgaggcacttgatgatgaagccatgaaattaattgaagacaataagaagaaacttgtgattgaagccaaagcacatagtgccatcctgctcagtcttggtgatgaggtcttgagggaagtttctgttggaaaagttctcattacaagagagaatatgaggattacaatcaaaatactcaaaataaaaatagaagtatttcatcaagattacaa

SEQ ID NO: 168955 - DNA, 1167 bp, Cannabis sativa
aaaatatagtagataattataaggggtttttttattttttatattttaaaatagttttttttacatttatataaaaaaaaaaaacacacacacatagcgaggccttaaatcgcaattcaaattcaaatcgtagctcaagcaataactactggaacaactcaatttgtaaaaataaaataaaaaattaaaaatagtatataaaataattctcctaattatatataaaaaaatagttatggccctttattatagaaatgaggtgagagaaattaagtaaatactaaagtgcaaaagaaatgttcgatttatttttgtttttaaaattttaccatgtttttttttattattttttttaattaaaataaaaagtgtataaataaggcacagtaaaatttattttaacaaaaaaaagtagctaacttcattgagaatgtcatttattaacaaatatgattaattagcgaaattttactctcattatatatgtagttaacttaatgtaagaagctcgtgcaaaattataagtgattttatttgcgcttaataaaactcaagaaagcataactaagtttagaaaataaaagtctacaatcattaattacaacacttgtaaaacattcattaataacaatatagaacatagtaaatataaaattttgagtttctattaaggaattcatttaataaaaatatttgcatcctattagttagtgtaactatcaaaataactttttttaaatgaatgtaagtgtaagtatgagaatcaatttattattttacttaaaagatatacttttatgattcacatcatatgttctaaaatgaagattttttaaaatatttaaataattaaactaaaaatacttacatcaaatgtaaactcttctctatttaaaagtttctttaaaatttacaatgcgtgttctatatttataaaatattatttattgctctaaacatgttttattaataaaaattttacaccacatactgaaatttttaacttgtttacttttttactatgggatagaattttttcaaaaatactgtgtttttttcaaaaataatgtgtaaattttataatatgtacagtgttaagttttcatggttgttttttggttgttccactgttgtttcaattaatctattttgttgttttataaaaag

SEQ ID NO: 168956 - DNA, 920 bp, Cannabis sativa
tgaaacaaacaactctattccaacacagatgaagctttagttacctttcaagtttaatgtttaaaaagagaatctcataagatcatcttatgaaaatgatgagtatcaggacagaagttggtagattgtattgttgattgttgattaacagaactccttgcttattctctacaacattaacaaaactaaagtcaaacatatgaacaaatcaaacttttggtgtctgccaaacatgtgagaacttttttccctcaataagttccaaaatattatatattaaataataattacctgtgaaatggagtaagtttgttttgtagttgatgaacattaaaattaacattaaagctatataaccacttgttttttttagtattaacacttaaaaattaacatcccaacttgtagttacaattccatttcaggtgagtaatacataaaagtacagcagaccacagaccatccaaacaaatattttcttgcattctcccagcagccaaacacttattcaaacatcataaacccagaaaaaattcaaatacacacacacacacatacatacatatacactcactcacactacaaaaatcataaaagtaatatcaaaaaagaaaaaaaaatcaaacaaccagaccttttcatcgatcctgtttgtgactgagcatgttttcggcttcgggagtagtgctcgccattgatgacgggaagaaacgaacgagaattaatagaaaaccagggtgagaaaaatattattattatttttgaaaaattacagcttgtaaaaattttaaactttttacattgaatatttttttttaggctaattagtaatttttcacctgaactttgacatgtactaaatcgtgcctctgaacttttttcgccgttaaaaatttctccgaacttttgagattgttaaa

SEQ ID NO: 168957 - DNA, 732 bp, Cannabis sativa
tacttggtcaatgcaaagtgttattgttaaatccaaaagtgcttatggatattttgtcaagtccttacacaattactatgatattatttatgatgtctactttaaaagctcttttcatctgatagggattgagacatattagatatgtgcaatttaaagattatttaaaatgaattccactttgtattcaaacttactatctcaaaatatcaaaaccacatatagatgaaaataattagacatatgcttaactaattaaatctaccaaaatcattaggactactaagattgcaactattttcaagcttagttggcttttcaaaaatgattaaggattgaccttattatggttatcgaaatcattttacaaacacttcaatactaaagtagcaaattagtaaaatttgtctatttgattttgttcctaaaaatgttctattgttttttacaactatatcagataatcccactacatccattgtatcagctcaattaatgacagctgaagagatcaataccattgaagttcctagacagataatcacggtacctagtattagtaggagggtttttaggaatctacctcattatgactagggtgacactagtggataagtcattgttaattttaacaagcaatggaatgttcgagaaaggaactctaaaacaaagttatgataacttggtctaatcgttcacatggacagtccaaagtcttcaaaatacaaggat

SEQ ID NO: 168958 - DNA, 868 bp, Cannabis sativa
gggtgttgggatttaaaaaatatggattgaacatcatccaaaattatgatacttagtgaacctagttattctttactatagtggttaaatagaagaaggttagattgaagctcatcaagaattcatgaaagaattagaagatcacaaacaaaaaactcatcattcgagtaaaaagaacaacaagaatgagaacaagataaacaattgtatgaaatagtgtttattgattactctacttgatcatattcacttcaaatgcaggtgatcttgaaatggtgtcattaattccttgtgagcttgaaactatacttcaatgcttgtctgtagaagagagttgtaatatctctttggaaatatatttgtttgttttttagcctaattttaattataattatgtgtcttacaattacaaatgctataaatgattgtaatataattagatgattgtatttagttgaaatactatatttaattttcaaaaaaaattaaaattaaaataattatcattcaaattcaaataataaatttggttgatattaattaggatactaataaaaatttaaattaaaaaaacctaaccgatttttcaataattttaagatctttatctaacaaaattataatctcacaataagaagatattaatttaaatttatattaacgcaatataactaatttttaaattcaaataacttaaaatttaattaaacataatgtcataggattttgtggagtatatttaggataataatttaaattaaaattaaaacaatataatttattgtcaaatttaaacaattttaaaaattaattaaacaaaatataatgtcataggatttacaaggaacaacatttaaaatgtcattag

SEQ ID NO: 168959 - DNA, 1455 bp, Cannabis sativa
  modified_base (1406)..(1410): a, c, t, g, unknown or other
cagggctagccccaagtgtcaaactaggcatttggccccgatatttgtacccaagaattgttgttttttctccgaaaggacctatttccctatttttgattaattcaacaaagatacataagtcgaatgtccaatctgatacttggaaggcatccaaactgacaaattgtcaacctgggcgctgggtgctaggggcccgactgctcaaaaattaacttggtccgattcaattttgatgcctcaaatatgtacgtggtatgtctagttgatgtcccaatgcatgttttgactatttcacactaagacggtcatggaaacggaaacccttgttgaaaatgtcaacttgggcaccgggtgaaacccggtgcccaagttggcttctgagttgcaggttcatgtaatttcaactcccatggcttgtattaggttgctccatctcctcatggtatataatactaaaagatagtcagttggatacaagtaattattaaagtctgaacttctaccctagagatcctaaagtcaatttaggcataggtctaggttgcccacccaggatgactgctattactcaagtctactcaactctgtgacatcatccttcatgccacgtgtcaaacattgatgtccacgtcactaggaaaagtttccaagttaacaattattttcattaaaataatgtttttcctctctttaatactatttaataataatatttatttaactaattaatattattttattgaataaaacttgttttcctaatttttgtactatgatgtggcatctaactaggtgacatgtgtatcatgttttataatttgggcagatgattctactcctagcaggctatgaagattaatataaagcccaaagtcatacatgaatggtaggatgtccgagaaagattggtggacatccgaccaacttgatcacatgagtaacttgcatggatcgaccaggggttgggagttagcaaatttagagacgtacatcgttatttccaagcttgcatgtcacaaaaaaaaagtccctatatttttgggattaattcgcttctctaaagaataaaggcaattagcttagatttctcaatctctttattgtaattatgaaaacataccagtttcctattttatttgttatagattaagggaaaccattcttcatgtaattagcccctataaatagtggtttaatctcactattcagggacacgaaataattcagagtgaaaacactcaagagtgaaaccttgatctaagagtgaattacttagagatcattgtaagaggtttcgagagagatcagagtattgttgctcacttttctcacaagttaatacaaatatggggagtaggctattaccaatcataaggggtcgaactgttgggttttatgccctnnnnnaaactccatttcaatgtaatccgaattattcaatatcaataaaga

SEQ ID NO: 168960 - DNA, 1041 bp, Cannabis sativa
attaacctaataattaataataacacattattaattaatttagcatttttttatggtctacatcataaataatcatatacataacttttctacgattataagtagtcaagaattattttcaaattttgtcaaaataaacctgattttctatgtcatgtcaatttttaaataagaaattaatcatgaattaatttcaagcataaatatctattgaaaatagaaattaatatagagtattttataatcttaatttataaatattgcttttttaagaaatatcatatgtatatatttcttgaattttttagagttctctataattaagggcgtcaatattttggatgattattttacaaaataaagttaaaaatgactataaaataatattatatcataccaccttagttagttttttaatattatatttatatattattatcagagtcgatcctaagataaaacgagcaaaatatgcaatttaggtcttttaaggcttagacactagaattatatgtataaataaaattattattagtgtattcataaaaaaaaaattattaattattaaaataattcaacaaaattatatgtatagtagagtggtagatcgatatgttaaagttaaatagatcaaggatttaatttctaatctaatctttttaaattctttttagaaatattaaaagaatggttatgaggattaaacctgaatttttttaataactttaattaagactaggtttggtatgaaagaaagaaaatagaagggaaagaaaatataagagaaaaaaaaaatagaaaatctatttcattcttaggttgtttggtaggtaggatggaaggaaagaaaattaagttgttatgaaattactctattattcttaaatttccaatctaattatattaaaaaatatatattatatatgtaaaaaatatttttttttctacgaatattttacagttaaagacaattaattacaaaaatacagataaaaatttgtaataaaaaaaaatgtttaatgaaactctaatttcgatatt

SEQ ID NO: 168961 - DNA, 789 bp, Cannabis sativa
ccctcttacaatttttttcttggtcgctgtgttaattcggtgtgaattaattttgtttttttagtacttagtaattatgaaagaataaaattcatcaacatacatttttcaataataatataaagccatcggacaacaaaaattaaaacataataaaattttgacacaaaaatgctctaatttaatttaaaatatatataagagtctacactatcccattattattagtgggacatttttggagcacttctttttttactttttgtatattttaataattaaataataaatttattgaaaaacaaataattaaataatgttattatattaataaaatattataacaataaaaaatatattttttagtataatttttagtgttatgattaaaatagaaaaaaatataatgttaaaatattattttttttgtaatattgatttaacactaaattaatattttgctttaatcaacataatattagttgattaccttttttctttttttttttttttgttaaatcagtaaggaaaaggtaaaaaaaattaagttcaaatagaagtatattgatgatatttgttatttttatatagatttacatgctacaatttttctttcccagacaaaggtgagttctactttaggattgaatcaagctaaattgtgatgttaaagtagggcttgatagcatgtgctcaacagttgttgttaggaaccatcttggtagggtggtttgagttcagacatcccgtgttggcttttttgatgctctttgtggagaagcggcagcc

SEQ ID NO: 168962 - DNA, 685 bp, Cannabis sativa
ataatttgaaggcatacaccttacttgatattcaaactaatcatatttttaattctagagatgtcattttttatgaatcaatatatcccttacataatggtattgccaatacgaatattgattccttttttccacttataaatttgatataccttcctcttcgggttatccacatactgctaattttttaggtgctaaacaaccagaccttgtagcaccatctccaatttctccaaagtcttggagcgatacaactatttctaccaagtcttgtagaaatataacaaagttgttgtatctccaaaattacatttgtgataaggttactacatcaaaaacctatcccattgctaattacatatcttacgatagtttttctaattttttcagggttgccatactcgccatttacacattatctaaacctacttcatatgatgaagccatccaacactaagtgtggcttcacgcaatagatgctgaaatagaggcattagaagccaatcatacctgggatgtcatttatctaccaccaaaccagtcactggcaacaaatgggtttgtaaaattaaatataacccagatggctcggttaatagattcaaagcctgcttagttgctaagggtatactcaaaaacaaggtattaattgttgggttttgttccctaaataaaacccatttca

SEQ ID NO: 168963 - DNA, 522 bp, Cannabis sativa
tagagattatcatgctcatctacttgagcaggctatgcctgctactgacgaagctcccttatttcattccctcagatcatctcttacatcgtgacatacatttgttcttaattttgtggaggtggaggattcatatctccacaccaatcctgagcccaaatagttcgcggttaagcctatcagatcacctcagaggcataactcaatacacttccgaccataggtttcccataagttagagctcccaaacaattattattactaatcaacatttccatactcaggaaaatattatgttactatcaataatccttatcatgcttttctaacaacatatttttccacatatcacataagcatgtaatcaattaacacataagcaaataacacttattgtaccatgagtcgaactagtcttcacagaaaatgtacatatccagctagtttttaggatctttaaaccttagttgctctgataccatgttgtagctccctaacctataaggccgccacatgtgtact

SEQ ID NO: 168964 - DNA, 1298 bp, Cannabis sativa
ataataataataatatgtttgacatataccttacttttgcatatgtcacttggcattgtgcttttacttcagcccaaattatcttgggcagtagcacacgccccatgcatcaaaaacaaaaatccctttctcatttttcacttacaatagcgcatgctctactgtaggtgacaattcatcaattttttttcatccatgccgtcttccaacaatagtcgatacacgatattgactcaagcattaggttagtacttccttgacagtatcatttcttgatgaacattcactcctactttggtattcttttatatatatattttatttgataactacttgaatagatttaggatggtatttctagggtttatgtgaaatggttgagcattatttttatttgctcttgacatttatttatttttgtcgagaattctgaaagtgtttaaagagatatgtagcttttgcttgtgaggtattgacatatttatatatatattgaagagggatgaattttgctaatgtgttctaacaaattagctttttgatccagatttgctattgaaaagagagtttatttgtgtttatgggcttgggctcttactaggaattttagattgggcatttggtaaaatattaaagaataggaaaatgtatttttgaatgcttgtgcccatccttgagttgttgaatagcaaggaatgtgtttattgtgttcttcatttgtgtacctatctcgagatttatggaattccgaagggggataccatatttgctgatagtattgttacttgcattgagttgtggaaaagggggtatctctcattttttgtccctagaatatggttgttggatcgacacattctgatattgatagtggtggctgacaagttatggtccttacgagcatggatggtgattttgatcgagaggttctgaatgcctcgtctctcgttcctgtcaccgtcacagaagagtactatggtcaggatgtagacgaccatgatgcgattgggttagtggtggatggggaggaagtcccagtaataggttatgccttagcccaattagtgaacgaggatgatggaccgagtctcctaggtaaatcacagagtattttacgcattaatcccaactctaaattgacggttccactcctagctcgaatgaggttggcttatggcattcctcgtaatataaaaatgaggctcctaggagggaggaacgaatagattaggatgttcctgattggtgtggcatgtattcgtatacctttttccgaggcttcaggtttccttttccac

SEQ ID NO: 168965 - DNA, 866 bp, Cannabis sativa
attaaaacaatgagcaagaatataaaatatacaacatgagcgaacaatttttgttacacaaagccataacttactccaatgagaaaaaataaacaagcgccaatatcttcataagtgtgtgtaaagtgtgctcatgtagtccaagattagtaagactttctagaccattccctcaatctttatttttttttgttttttttattattattaaaaataccttttgacttgaaactctctagctttttttattgtacctatttatggctttcactttcttttagagatgtattcatcctctgttggccgaaagtactaatatagaaggagcatattaattattagtacatgggtttaagagagctcttctcattacatctgaaagaagtagccgttttaactggagaagacactagctcaatttacgaacagataaaactaatgagtaaactatagtagtgaacaaaaatggtatgctcatgtcatatatacgaaacaactttactcagagttagatataattaatgtaaccagatgcaactgagaacagttcagatagtacagagaccaatggttgctcttaaatgagtcaaggtttgagtatttagagctttagtgaataaataagcatgttggttagttgtgggcatatgtgagatagacaacatatttaacttaactggatcacaaatgaaatgatacttgatgtcaatattttttgtttgagagtgctgaactaggttcttaggaatgtttatgacacttgtactatcattaaagatggttaatgtttgttgtgggttagtgaattttagtaataaattctagatctacttattggaagctctgttatatagaaccatggtccc

SEQ ID NO: 168966 - DNA, 653 bp, Cannabis sativa
  modified_base (592)..(607): a, c, t, g, unknown or other
atattgtgtttggttctacttctatctctaaagtgcaagttttgtttctcaaattcaactagtgtttaaaatgatcatggtaggtgaactcacctattttttaggtctccaagtgatgcaatctaatgtgggtacgtttcgctctcaatgtaagtttgcaaagaacttggtgaaaaagtttggtcttgagaatgccaactataccaatactcctatgagaacaacattgaaactaaccaatgatgaacaaggagtaaaggtagatcaaactttgtaccaaagtatgataggcaggttgctttatctcactactagtcgtccagatatttgttatagtgctggtgtttgtgcatgatatcagggaaatcccaagaaatctcatcttttcgttgtggaaaagaaacattcgctatgtaaatagcactgctgattttgggatttggctttctaaagacactaattctaatcttgtttgttttagtaatgctaattgggcaggtaatgcagatgatagaaaaagcactagttgtggatgtttctatcttagaaacgatcttatggtcatggcacaactgttggaaattattttacnnnnnnnnnnnnnnnntaacaagtatgttggattaacaatctaatatgaattctaaaacaat

SEQ ID NO: 168967 - DNA, 534 bp, Cannabis sativa
aaaatgcattcacatcatatacaaaaatacacaatagtagcagtagcaatacacacaaaagctgtcttgttgcagtagcaatacacacaaaaatacacaacagtagcagtagcaatacacaatagatagtagctaattaaagacaagataaagattataaccaaataatagttgcagtagttagagaatagtatagaattactcacaaaagttgtcttgttactgccacatgtccttaaattgtgccccttgccaccacaacccgaacacttaattatcacatattttctcttcaatttcttgcccaaaacaagttcttgaagttcaagttttctacttttctttggccttcctggctgcttcttgtgaactggatttttcattccaatcttaacactcatcttgattccaaattgggaaaatctagtgagagtaagctttcatataatattcttttttgtaccacttactcacatacagctctggatcctgtttattgtgccaaattgtagccacagcatggctacatgggat

SEQ ID NO: 168968 - DNA, 687 bp, Cannabis sativa
atacaaggaaaaccaaaggctatctgtcttgaataacaactgtataaccgaaacataatagaaaactaacccttttaactaattccataacaaactcaactaacctatttacaacaacacattccattaagctatttatttcttttaaataaataaaaaataatactttattaaaatattatcccctcctaatatataggagaattacgactctcttgacatgaattttctcttattcatttgtatattctatttcttcttactttttgttcgaaaatgagaacaaaaggaaaatagcctcaaatcttgacatacactattagaagtagtgagtcggttagtttgttaggttagttggcaaggggtcaatgttagttgcttagctggtctaatagattttattacgaatctttgtcctgtaatcatgtataaaaggatctcaaatgaatgataaagatttgagctcactttttcactcatttctattttttttcatttctttgaagttatagttgccaatggtttagcttctatccttttagtgaaatagtcaactgtgactacaacatattgtactcctcctttccctttacaaagttatccaatcaaatctatcccccatatagtaaagggccaaggagactgcatttgtgtgagcttgtttggtggagctcttgggatctttga

SEQ ID NO: 168969 - DNA, 853 bp, Cannabis sativa
gctgaagcctcgagatctatgcatggatgggctttgaggagtcggggaggaggtctggtacgaacggcgtggcgtccgaaggctgctggggaagagactgaggccgttcctcatttgggtgaactttccctttcacccgtgctaaaccatggaaagctccctgaccttttaccatcttcagaaatgcgtttgaattgtgttgagaatgacgagttgggttttgcatctgggaggatgtgtagagataatagggtcaatcatttgaatccttttggggaccacgtagcatgtgagaatggtgggtcggattacttgaagaatttgaatatgttgtgtgggcctcctgagttggcacgtgattggcctcttggatcaaataatgggctagaatataactacaaattgaattctaaagcctaatttttttttctggggtttgtgaaaagagcagcgagagtggagtaaagcccaaagaaatgaatttagatgggcagaggcctattggtgttgggccatttcttagcaacaaattgaaacatacacttgtggttattcttggaaatgatatagagggtgataacgggtctaggctctctgttttgggttaagattattctgagcaccttgatgaaaaaagatctcttgcaaaatttttccaagctcaagaaggatatctctaagaactggctgagttcgcttctcacggcccaattaaaagaaaagcgggtctatgtgacattggtgttcaaccaacttctgaaactaatgaaagaaccacaccagtgaagaagcgaatacttgatgttgagtctcattcttcaaagatcgtgcctaaatggaatatgagaagagt

SEQ ID NO: 168970 - DNA, 743 bp, Cannabis sativa
tatatatatcaatggttttcatcttcagacaaaaagaaaatatcaaagggccaaaagttgcatacttgttcggcgtgggtttcttcttcatcaaatatcatcttgcttcaaggatacaaaccctttcctatttattctaaaagtatttttatttatttattttttttttatttttttatcaattccacagaaagttcttttaaaatattaaatttgagtttctctctgtgaataatttttgagtttctcactttgtgaatactaggttgtatatgtctttccaaacttgtgtatattgatatgtatttatatattggagaaatctaaaaagatctactttttagaagagaattttgtattcattgcataaatacatcctttaatttgtctaagactcaatgctttttttgagagatttagctagattttggagattatatatatagatatatattgtgagtgtagtttctttgaaaaattatagatggataaacacaaacttagttgcacatattttattgaaggtttgatatttgagaggttcctcttcattgtttgaatcattgtgttgttgtttgtcccaaattaaattttgagtttgttctttaagattggaaaaggcttagttttttgatccaatttgatttgggctattttcaaaaatatgggaaaaattattaaggttatgataaatatggcataaaaagtaaataccactaaatatggcattatctaaccaatca

SEQ ID NO: 168971 - DNA, 1893 bp, Cannabis sativa
gcagtactttttgtgtgtgctttgtactcttctttctttctaatgaatttttagttaaaatatctgtcaattaatatatttacatgtaaaaattgatctctctgtgcaattatatatttatgtaagatgttgtatgatatatcttcattgttatattagtataatatttcacactaaatatgataagaaatccttattaataagagctagtttaataatctatcttatcttaatttgttgtgaaaaaaatcggctgattaaaggtgtaagaatatgttgagtgttggaaaaataatattaaaatgtttgataacttcattgatgaataatataataatagtgtaaatttaataataaatagtgaggagtaatacaatcaatcttttattataatttttcaattaacttttatatctgaaaatatatgtaggaatatttttttaattttttttttataacagtatttgttatagttacaaaattatcaatgtaaatttttgaaattttttaaattatttacggtaccaaaaataggttcaaagtttatctaacacgcatggtatcaaaatttatgttttcgatactttaaactataacaaatactattatataaaaattaaaaaataaatattttaatattataatctatacatcaaagctaactaaaaaattataattaatactcaaaataattatcataatatgtaatgacacataatatatatttttccaaataatttatccatagaatcatccctaagcagtcttgtctaatctttccattaatatcgatcaatcacccaattattatatggtaaatacacaccatgaaaatgaaatcattcctaaaatgttcaataattttttttgtcatttactaatttgaccttcaaacatcattttctgttttgaaataaattaattaaacaaaagaaaaatacattttcaaatttagtaaataataaattagaaaatagtatggattaaaatgtttatctgtaatctactgttaattaagatgaggttatatattgctatatacaaatttagaaattagacaaatcttgtttgagacggaagatatcacccaaaatcaaagaaaagcatgtatttgtaattttgtatagaaagattaaaccatatagataattttccaattataataataacatcatttttattttattaggctaattaatattaaggtttataccattttatattttatactaatttaggttttatgtgtatattttttaaaaattattttaaatcctaaattttgtaagatattaaggtcatcaaaatctttttaaatatcattaataaatatccttaattattaaaaaaagagttatattattttgaaccttaaattttaggataatcaccttaattttttgaaaatatattttcaacctcatttttcttaaagatttaaattaagagttaaaatccattttagttaaaatattttcaaatataaccaaatacactgtatttataaattaaacattttaaaaaaccaaattactatagatattcttttttttcgccaggcccaccaattttttttgggcatagatgcggttcggtcgaaattgttttgttattgtgattcgatttttactattgtaatattaatcatgtctctgagtctatgcatgattttgaatgtttagtcttttctttatgaccataattttgagtattttagtattacatgattttattttgtttcgttggtaatttttctttgctttttgatgacttgctgttaatttgagtatgcctaactaatacccaatttacccctggacaccaactaacataactgttttgacagttatgttcgttatgtgtctactactgtttctcaagtgtgtatatata

SEQ ID NO: 168972 - DNA, 898 bp, Cannabis sativa
tcatagggcctgaatcttccttccatgctctttccgggcttgtgacaagctcaaggctattcgtgagataattatccataatctccaggtacctaatttttttgttggaatatctatgaatttttccttaactatttggattatatgcttgctgtcatgtttaaaaaactcaaagtttgtctttggaaaatttggtatagacgaaataaatgggttaatgaaaaagttgaattgaatgacgtcatgctgtttgattagagtatggattattttgagtggttcctttctgctacaaaattaagaactctaatgatttgaggagcattcaaaattctcatgatgataagtacaaaccgttgcatggtatggtcaaaatcaattgtgatgttgggcttagaattgggtctttaaagactagggcaagtactgttattcaagttcagtcatttcttcaaaaacctggacttggcttggttgtttagctcttgttgctgttgaagcttcgagtaatttgttggtatgcaacttgcgatttgtcttggatattcatctgtggttttggaatttgattataatattgttatcgcttttattctcaaccagagacagttgatcattcttatttaaggtgtattgttagagatattattgtttattgtaatcacttttctgttatctgtttcgtgtattatcttaggattgctaacagtgttgcacactcattggcatagctagctccagggccgacccaagtattttggggggctcgtgcaaaattttaaaattggacttttttttatataaaaaaaaaaaaaaaaaaaaggtgtacattaaaactacaatttacatactagctttttttttttaagatttatttataaattttcaattataaatt

SEQ ID NO: 168973 - DNA, 694 bp, Cannabis sativa
  modified_base (605)..(608): a, c, t, g, unknown or other
ttggaatataattaaagaaggtagttgagctaattaaattaagagggtagagagagatttaaagatagataagaaagggaatattatgatgagtgattgataattgatatcatatctaagagaaaaaaaatcaatttgaagatttaggtctttattttctaattgaatattgacactttaacataaaaaaaaattgaaaaaaaaaacctaattatagaaaagggttttctcatttgtactttccaaataaaacaaatatcgtaagactagaaaaaaaaaaattaaaaagagggtatatgggtgattccccttataaaaatcattcaaattaataaatatatataaaaaaaatacaaataattgcaagattattatatataagaaaattatttgatagtaactacttttaatcactatataattatttttaatttttcaccatgtgaatttgtaatttttgcatatggttgtgtataatatacactcttccacgtgtaacctcttcatctctaaccatcctctctatatttaattaaattttagttaaaatagttaaaatgttaaaataaagaaccattgctacaatctgttgcccctgattttgnnnnatatacgtggaccaactagacagggacacgtggatcagagcgtcttaatgctataattatttgctaagtctttgtgatataaggca

SEQ ID NO: 168974 - DNA, 593 bp, Cannabis sativa
gctccaaggatcggtctaagaggtggattaatactcttatggaaagacaatgtgaatgtgaagctcttgcaatatggtcatacctttttctactgctttatggcctttcaagatgacccaacttttcactttacggctttttatggcgcccctgctgcacaagacaaagctgcttcgtggacccttttaaataggttggttgattctgctcctctccaaccgtggctcataattggtgacttcaatgagttattatcaaatgtgaataaggaaggggctcccctacgtaatgaatgactaatggcagactttcgagcttctcttgatcactgccacttgactgatacaccatatgaaggtgatgcattcacttagattaaaaatcgcacggtaacaatcactttgaaggagcgtcttgactggtttttcatcaataatctttgggatgatgtttttctggtacctcgcatcgctcatttggattactttcactcagaccaccgtgctatagttggtgtcattgctgtgcacaatgaaccagcacagcaagtgttgggttttgtgccctaaataaaaccctttacaatctgatt

SEQ ID NO: 168975 - DNA, 663 bp, Cannabis sativa
accaaggtcagaaatgaccattttcaacatttatcgattgtttttagataagttttcaatggtctacatgtttctctgaatttatttacttgattgttgattgtaattttttgttaagttttcgacatgttttcaatagtttctcgaaattaacatattttaataggttttcggtggtttttgataggttatctaggtaatcttctctgatttgacgacgcaagtaggggctttctatttaggcttcgataaattcttgctcgtggggctactacaactgagaataaattgatttcaccagtttagatggtgaggacgctggtctgggttcaggttagatgcaggtgtgggtttggtttggggtagacaccgaactaggttgttgggtgtagacgccggtctgggtttagggtagacgcaggtgtgggtttggtttgaggtagacaccgaactaggtcattgggcttagacgccggtgtgggcttggtttggggttggaacatcggtgtggatttttcgggagttacagagagaatgagggagtcagagagagaaagtgagttagagattttgaaaacattaaaatgttcgcagtactttagaaatggtgttacaaaaataagcattaatgacatgtttactaaaggagaatgagaatcaatt

SEQ ID NO: 168976 - DNA, 867 bp, Cannabis sativa
ctccataagtgatagatcacagctgcaaggattagcactcttatcctgtccaccaaattcggtcttgaacaacccaaccaaactgtccacctatcgtagtccaaagaccacccagcaatgcccaaccacagaaatatgttgtacagcacctgtatagaaaggttacacttgaaaaattaaaggttacacatttaattttatttacaatacaattcacagtattagtgcaaaaattttcatccatttataatgtgatatttttatttaacaaaatttattattcaattttttatttgacaaactttttatttgatgattattattattgcatgtgttattttattgttcactattatactttatataatacaatcatcattatatattagcaaataaaaatttaagacttcccaccataataataacaaacttttaaatttttatagcataagaattgttctgtattagtaaatattaaagaaaattaaattattgtttaaaaaaataaagaaattcaaattattaaattaatttaaaagcttaaattaaaaaaaaaattaagtcttttgaaagaattaaactcatgtcattgtacttgataacgataattttaccacttacaccatgattatattgattattgtaggattaaataacgaatgacttcaaagaaaaagttgacaaattgttaactaatgacttcatacgagaggccttttacccctcatggatttcaaatcctgtctttgttctgaaaccaaacggcacctggagaacttgtatagacttttcaaatttaaataaagcgtgtcttaaagattgttttttgctacccaggatcgaccagttagtggatggaactgctgg

SEQ ID NO: 168977 - DNA, 1046 bp, Cannabis sativa
atttgtaattaaatgtaattaatataagtagaataataattttgacatattagttaagttattgtacatatgttatagagattaattgtttaaatcttaataaaacatctttatatttaatatttagtgtactttttgcttctcctcataaaaaagaatattcaccctcaactttagttctccatccgccactggttacattaatttgcttataatatcattttcctctacacattcatggatcacttaattacttaattattgaattaagaacttaataaccacaccacacattaaattaaagtattaataatatttaagtttagttttcggttgcaaataaataattaaatttaatatttaatgataatacactacaaaaaaaataggcctatatcttggtgggctcggccctccgttattgttctatctcgacgggcgcaacctatcgtaaatttgaatgccgacattgagaaatggtcattctcgacgggctaagcccgccgaaataggtaggcaatctcggtgggcctagcccccaaaatagatgagcaatctcggcaggctaagccccccgtgataagtcaactttttattaaaaaaaaataccgaaattaaaattcacttattactgccaatgttatacatctatgctttcacccaaattttaaaccataataatcactgatataaagcaaaaataattttttacacaagtatcaatacataatcataacaaaaaaatttcaccaaaggttttcctttgaattgaatgaacattccaatcaagaaaattccaacaactactcacatagaaaccaagataaatatctatatatacatcaataaatttttattaatcataaataaaaaaaaaattaatctaaataacccaatttaaaaaatgaaatcaataaaaaaacccttataatgacattgaaagtttttgcctttgatatgaaaagtccactttatttcaactatttatctttctttcaataataccatattttttaatttcaattttataaatatcaaaattattt

SEQ ID NO: 168978 - DNA, 517 bp, Cannabis sativa
ctcttgaaacataacaagcacaacaaaggacatgaaaatgacttacgtttggatgcttacctttctacttttcataagaagttttggaggtacctggacgaataaacactcagtttattctttaacaagatgtatttgtagcctctacccataaacgttttatcagcttcttactattcaacatcactcttaccatctcttgcaaagttcaattctttctttcaacaactccattttgttgaggagttttaggagctgagaattcatgagctatgcctgtagacttacaaatatcatcatacacagagttcttgttaccatgatcacttcgaattcgaacaatcttaccaatattataatctttttcaactcttaatttcaaacaaagggatttaaaagcatcaaatgtgtgagattttttcttaaaaaatcaacctaagtaaagagagagaaatcatcatcacaagcgaagatatacctttcaccattcaagctttcaacttgaattggacccata

SEQ ID NO: 168979 - DNA, 1689 bp, Cannabis sativa
catgacaaaaaagtctggttatgttggggatatgtttcaagttttttttttgttaacacagaattcattaacaataatgaagccttgtaaagaaaattaaaatattaaatatgaccaaatctaaataaaataaagggacttttacatggtattgtagtcaaaatctacaatctctacgagtcggtattattcttttatagtgtgtctggatacatggtagcatttttggatattttctatacttattctctcagttttattcatcccaaacgattgtgtgttccctgcaccctaggttctatacctatttataagattttcaggagtgacaattattctcctttaatcttatctaggtaaccattcatgaaacgtgaacaatcttcatgtttcatatttacaatatgtgtgataaataaattaacagttgataatcgcttcttgtccttatcagaaagtattgtctttatcaagataatacattcaaaatatagctcgtattctttaatgatgtttggaaatgactagatgtattctgcgagacactagttaagatgttttcctttcttttggcatttatgacaaatcttgagacaacctttaagattgtatctttcacatccctttaggtcaatcattttgcgtcatccatgtgcattccgagatggtccgtactttgctcatttgccttagtctttcaacatactctttgagtatgtggatcaataaatcgtaagctctttaaagaactcagtatttaccatttccagtagttcacccttttgtactatatttatgtcatgtctatctcggttaagtccgagatgactttatgatattctggccaaccatttgtatctataattttaattttattggacaactattttataatacaatgggagggctatacattattgtaacgcccaatatgaaaaacatttgtttataaattcacaccataaaagttaaatatatatacttatatattaacagaagtcgggatactaattttaaaagtaatttcttgacataaaataacacaaatagtttttttttatatgtcacacagtgaccacaaaagttgattcaaaatgttagcccgaaaccctccatgctgcactgctgtaaaatgtacaattactgctaggctccaaagtcactgctcctccgccttagctttctctttacctacatataaagcacactggtaagtcaacagactcagtaagatatgcataaaatatacattataatgtcgtcttgtaattaggctcccaagcgcctatttacaaagcttcacaaatagtcaagaacgttcttaactagggtacgactgctgtaccacatgcattacgtatcatcgctgtactaatgttggtagggtataattcgtacctcgagtgccactaagtattgtaccatatgcactcagtacccagttgtactagtgttggtaataccggattgcactcttaaattgtaccatatgcactcagtaccattatttatactagtgttggtagcttataaaatatataattgcattcatattacattcatacactcatatatatacatactttatgtcaatcttatctcattaccaggttcaagcatgtcggtcgacctgaatggaaactcactcactgaacggaggccctatgtcacaatcgaataaatcgataa

SEQ ID NO: 168980 - DNA, 1050 bp, Cannabis sativa
agttctacctaagtggttgtaacacaacaatatttgaatctatcaagtgtaagctgcttttaagttttgaacttccactcattgtccttgtaaacacttataagcaactaaaaatccatatttatggcatgtataatcaggtgatccaacataaacaaaaccaatcaaatagttgatttcagtctcaacaacaccaccatagtcaaataatcaaaagcattaatttccgaacatcataattcaaaaaacaaacaattcatataataaatgagagaatgaaaggtctggactttcagaccaatcattcattcattaattgagtagaaaaggagtgacaaaaagtggtccttcctatccaattgtctaacccaataacaaaatcaacaacaacaacaacaacaaataaaacccatcataatactactaattagggtcaataattcacagaacaaaaaagaaagtgagaaaaatacaatgaaagttaagtctttgaaacaaacccatgtcaaattcagcagagaaagaacaaacccagttgtgttcttgattcatatatacatatataaatatataaatacagagaaagtgaagaaaaagatgagtacccttttagaggctgatgataaagcctcgaactttgtagagagatgaagaattagtacatgaaaaattaaagctttgatgattttatgaaccggcaaactccgcttttaaatctctgacagactcttgctaatcctcgtaatttacacgaaaatatgagcagagcaattatctcatgcatcgcgccctattgtattaaatgcactctagtcactcctactacgagaccatgaccatgtgtgatgatgaagacattattacttcatagttcatattcttttaacacaaaaattgttatgaaatgattattatttttattaccattattttttttcatcactctacgatttaaatgagttttcatttttttttggaaaggtaaatgtaaaattttattaagggtaaattgcggcataaatacttaatgttttcgattttatacactta

SEQ ID NO: 168981 - DNA, 1145 bp, Cannabis sativa
atatccggaaggtaacatcaaatgttgggggttacctctttttagatttaggcaaaaggataccgaatttaattttatcctgaataatctcacgtccaaacttcagggctagaaagcgaagatgctgtctaaagcgggtcgtgccacccttataaagtatgtgggcttgatgttgcccatgtatgttatgcaaacgaccaagctctcgagccgccttgttgctaagattgatggaatggttcgtgatttctggtgagagtttgaaaaggataatcatggtctccatctaaaagcttgggataagctttgcctccccaagtctatagggggtcttggatttagaaaaactagggagatgaatcaagcgtttatggcgaaatgggggtggaacctcttgactggtaaccaatccctttgctgcaggatcttggaagctaaataccttaaaggaaagcttttccttaacagtacttccaaagattcagattcttggttttggaaaaatatggttagaaccatctctgtcttaagaaaaggagcttacaagttggtggcggatgaaaaggatacgaaggtttgggaggacccttggatagctcatgagaaagactttttccctcgttctaatggttcctccactagtggagtgaaaaaagttaccgagcttctgttagataatggcggctggaatatccataagttataaatagtctttttgataaaggagactgtttctgcaatcctgaaagggggcattccgtatggccagggcgcaatgatagatggatttggactttggaaaataatggtcggttcatgagaaaatcggcctatctagcccaagctttagatagggtacctccttctgaggttgctccttcgctatggaaaaagttgtggaattgtaatatctcagaaaggttgaagactctgtggtggtgtatcttgtccaaggcaatcccagtttgatttgagatctgtaaaaggtttcctattgaggatgttaattgtcccctttgtgggacaaagaatgaatctattgaacatctgtttctttccagtaatgtgacttttcacttgtgacgatcctttccttggggtatttaccctatttgtggtactggtatgttggaaattattttacc

SEQ ID NO: 168982 - DNA, 518 bp, Cannabis sativa
ctctagaagaaatgaacaagaccttccctactattataacaccaggtgcgacgagtaaggcctctcctggaaaagatggagagacgatgaaaacctctagagaaggcaaagacgacacctaaagccacttgaaggtgtgcccaagatggggacaacattgaccctcgtattggggaatcttctcgggagttagtcctaccgaggaacttagagaacttccccttaacacatcgaacctgatcaaggttatcaagaatggaacaaacctgaggtttgagtgagatgctcatggcttgccttaggagaaatcaagacatttttgcttggtcgcacgaggacatgattgggatcaactcccaggtcatctatcatggtctcaacatagacaaagttaactttaatcctgtaaacaaaaacacatgctccttgacaaagagcgctccaaagctctcaaggaagaagttgaaagactacaggagaacaacttcatcagagaagctttctacccagtttgggta

SEQ ID NO: 168983 - DNA, 548 bp, Cannabis sativa
cttttcagggtataaaccccaacatttttctcttccatactatctcaagagtgtacttgcaaaacggtatataaatacctccgctcaaaatcaagttgctccatggtagagttggactttccaactatggaaatcctcgttataactccattggattactaaattcaaaatctatagggaacatttgcttttttttttcttcttctacaataaattaattattgggaaggaattaaagaaagacaaagctggtaaggtcgcatgatgatgagttggattgaaatcggccatcctttgtatttaaattgattaatatgtagggtatctgaaatttacttagactaataattccatggattttagccttagacgatgatgatgaagatgaaggaagtgtgttgtgtgagccaaacaagcataactcttctccatatcagcaaagttaaaccctagcaccaaaccccaaatcatcaaatgcatccaatcaccttcttcctaccacttggaaagtcattagttttgaaaataatttttaaagttacctaaat

SEQ ID NO: 168984 - DNA, 1414 bp, Cannabis sativa
ttgtatctttgttatttctaaaaaatagaaaagttacccaaaacacttttcagagaaaacattggaactggcctatgttgatataatgttaacgtgggtgctaggaccatgcatcaggtcaacctgggcactaggacttgtcatcaggttaacctgggtgctaggtaccagttctgactcctagatggctctgtttgttccctgaaagcacccatatcttaatcgttcatgaaaacaaagaatatgactagaaaactttgtttgaagtgtcagttggaagtggcccaggttaacaacatgtcaacatgggagttggaacctagcaccaggtcaacctgggcactggatcccagttttggccttcaggtcgatctgtttctttcccaaaagcatttgattccttgttttggatggagatgaagaaaaggctcaagacacatcttcaatattgttgttgtaagcgtcccaatttgacaatatgtcaacctgacgttgggtgcatcaccaagtggcccaagcaccaggtgcccgagtgctttaaacggaagtgttccaattctaattctagtacctataacatgtttatggaatgtcttattcatgtctaagtaccaaattgaggtattttcactaagacgaacccgaaaactgaaatccaagtcaggaatattgtcaaactgggtgttgggtgaaaaccctaagcgcccgagttgactttctgttttgtctcttttcagtcttcaggcctctaacttggattcttcttagttcataatattgaaggatggtgagttggaaacaacttagcgggatccaaatacccattttgaagttcacagagtcaacctaggcacagagctagggacccctcccaaactaattgctatgactcaggactactcaactccgtaaatatttttcttcttgccacatgtcaaacattgatatccaaatcaccaggattaatttttgggtaagcaaataatactcatatttattgtaatatgatatgaaattaataaagaaaatattaaggataaaatgctactcaacacaagtgatactagtgtgaaatattatttcatagtggttttttttttgttttcattttttgaaatggtatttgatagttttttttttttggctcaataaatggtatttcatagttgtttttttttttttttttttttttcaaaatctatttgagtgttgtgttactaataacaacactcataaggcatgtttggtacacatgaattagattaaacagactaatttatctggtctagtgtttgggcatgctgaaagtctggataactaatccaactaatttcatctgtctaggattatttatcccatctagcaggatgtgataaataatcccatacaggtgagatttttttatctttttttt

SEQ ID NO: 168985 - DNA, 860 bp, Cannabis sativa
acatataaccaatcacgatcctttcttgatactccaactgatgtgctcggtactctagctgatattctcggtactctaacataaaaatatgtatgataatcatgtatgcatatatatctttatactaattttaccttgattctgaatgcaagtgtgtcggtaaccctgagtggaaatttttgcttgacgatttaaggccctaagtcacaatttacgcaaaaatgataagtggcctgctatatcactttttggagactttaacttaaaactaaaagtttctctatcgataaatagcgtaaaaataccctaattattgaggaaacaccaaggctttaaaaattctccaaaaacggtaggtcgattctttaaaaactgtaggccatttttctaagacactaccaagaaaccagtagaccatttttaagctgttttttgctgtagatttctcaaaaatctattttttaactcaaaactacctcaaacttcgtacaaaactccagaacacctaattatgacataagcaacataatacaaccaataaaaatatcatcaagatcctgaagctaaatccaccattgttgagctaaatttgagctttaaaattcaaacctagctcaaactccacaacagccacaacaaatcctaaataacaacttaaacaacttaaaatcacctatggaaacaatccccaaacaacttaaacccaaaagaaaacaaacattcaatttgcatgacaaaattggactttttcacttaaaaatcaaagagaaaaggagtaagagcttactgttgaccgaggttttcggcaactaataaaataatataagattagagaactgtaagaaaattagagaaggatt

SEQ ID NO: 168986 - DNA, 715 bp, Cannabis sativa
aaataatgtcagtatcaaatagttacttcgggccacccagtcctttccttggactaccatggccggccagccgggcagaatcctacatggatgcccaaggccggccaaccacatgcaaacaacaccatggtaggccagcttatacaatgccaaaatgatgaacaaagctggaagcgcaactcaccagagaaaggtctcgaagaccgatagagtacaacctataaggcacaccatcacccaactcttgcaatgcatcatccaagaaagagatggccctatctatgtgccgagtggctgactcagcagccttcttaccagtagctaaccccacccttctactgggcctcctagtaccttggctggcaggctgaactataggctacccaacgggtgcaaacccaggtggaaggggagacagtgatggtcccctagcatctgcaccgcgagaggtcttagccacctgagcgctcactcgaccggtgggcttgtctgaaggcccacctgtaagacctctcatctggaagacatgcttgtgaaaagaaagtagcaaagtcataatgcattcataaatattcaacacaacaacaaaggtatggtgttataaactatcaaataccatcgtcgtcaaaagaaaagctatcagagttcataactacatctttgcctttgcccttacatgtgggtgcagggcgtgtaggtctatcagaaactgggc

SEQ ID NO: 168987 - DNA, 1095 bp, Cannabis sativa
tggcttcctacccgtatggaccttaaagactgacaataagctatctgagagtgtaccttccatattaataacaagctatccgggagagattccatacacggtacaagcttatctggaagtaccttttggattctaccaggccttccgcacagggctttctggatccacactaagcttcctatatctgcgctccagattcacagcttctaatctcaaatgacaaaacttgtaaccataaccaacaaaatctccaccttggtttcaagttgaagtcgcttgataaatcattgatttaaatgttgttgtcctctcaacccctctgggatcaactgactccgatcagcttcaagcaatgctcaaacttactatatcgtactaccttggttatcatatcaaaaggattgtcttcagttggaaccctgacaatcttcacatcttctttctgcacaaccacttgtatgaaatgaagattgatatcaatgtgcttagtacgttcatggtgcacacaattcttgattaattgaattgcactctgattgtcacaatgaacatcaataaccttttgattaagctttagctcctccatcaataatgtgtgagatcataattatagtatttttgaagggtgttatattattagagtatttttaaaagtaaaagtgtaaaaaataatatagaagaaagaaaaaataaaatattatatttttaaatgatgtgaaatttttcacactcttacaaaatgctactaatataagttttctttatttcattagttttatgcccaaattagaactagacttttgagcatgacttggtcttcttttcactctttgtatatgtctacgtagctaggccttcaatttgagcttggccttttgcttctatatcatctgattctgatctagtgacaaaacttgggtaagatgagacaaacaaacaacgtagaacttttgaacttaaaaccatgatgcattccttcttcagccttcgatattttataaacaataattagtaattttgccccttgaactttcgacaatattgattttggcccttaaaatatacgacttgttaagaatcccccttgaactttta

SEQ ID NO: 168988 - DNA, 676 bp, Cannabis sativa
atgcatcaaatatataaagggtgcatgtgcattgattgaacttttcaatttcacaatatattatttcaaatttaattcgtgcttgtttttaatattataatttaattcgattaattaattattaattaaatggatcatcatgccttcaaactaattatttttgtctaccaaataattttaaaattacatatcaaaaaaaaattattaattttattttatttaaataagttcgggccaaccatcgaaaaatataacaattcctcgtacttaattttatctttttttttttttttgaaatttaatcaactcacctcattttttaatcaactttatcaactttatctcattggtattactataccaaggatttaaatattgaatggatataaatactttaatatatatatatatgtggcgtgttagattaattaatataatttagattgataaataatcttaaaataaatatactttatttaaaatttatttagtagactataaaaaaagttgttctagtagattctttatctgttttgatatttatgagagcttttagtctattttttttttctcaaaatcgcatacgtcactacaagaaatgttatttttgccagcacatttttgtgctggcaaaagtatgtattgcgctggtaaaatagaatttacttgtgatgtg

SEQ ID NO: 168989 - DNA, 1109 bp, Cannabis sativa
atcctcatcacataaacaaaaaaataacaaaaaattctgatgactaatgatgatagaatcacacctctttgccataaaataagaattttttttaatagaaagacataatgaaccagatgaagccaataaagaaaacagtgaaaaggaaactgaaatcatcagtcttaaagttaaaaaaagaaagcttattgaaagcaaaacagattaataatatgagaacgtgaacaagttaatattgtcttgatcattaaaagaaaatgtcactaaaataatatagactatttctaaatgatgaaccctacaatagacccttttccgattagattatttttgaggcttaatgtcacgatcggttatatggttggaatgttagtaatgcaaagctctaacctgcaaatttcaacagttttgttttctctcaaaaaaagcttaacttgaacactttttaaccaaaaaaaaaaaaaagcccaatgcctttaataacaaatctttgaataaaattacgatgaatcaacatttctagtaacgaaaatatcaactgctttgcaatcgcttgaacttgctctttgggaaggagcttgttatcttaagaatctcaaataattcaccttgtcaagtgtgaataagaaaagttatctgtcagatacatatccactgtatttttgcagccaacaagtgtctggtctaatagaatacaattacttgcggaaattcggtgacaacacaaaactcttgagggctctcaaaagaatcaagcatttcaatgatattttcatgcttcggctttcgtagaatctggcattaaaaaaaaggcaaacagtctgaaaaaccaagataaaacttttcaaatcaaaaaacaaagagacattaaaaaaatccatgacttggaaaccaagatgatggtcgtaactggccattcaattagttactattattatccttttcttcttcctttatatacctttcgaaatgacctttcacctacaagttcaattagatgaagaaaagcaacaaatgcccgccatgcataccagatctgagatttgaagagaaagaaagcgaagagaagatatatatatatactagcaaaaagttacgtgcgaggcacg

SEQ ID NO: 168990 - DNA, 754 bp, Cannabis sativa
cttttgacttgggcttgccactactatctttaccgtccaatttccttttcttatccgaataagaaggagagatggactttgcttcaacattgtttgactcaccttcattagacttattcttattaaggttttcaaatatagtatcaagtcggtcaattattgagtcatgttaaactatagcttgtcttgaacactgaagcaatgagtgagcgactcaagaataatattgccttgagtcctcttgtctaggataggcccatttgtctttgtctcatgtataagtgcaatcatgtgctatatatgagttcttacgaagacactactcactaagataaagttttgtggttctcataaaccaacatcatattaatatttgatttccacttaaggaaatattcaccattcaatttttttaatctctagtaaagcaattaagtgattttggcatagtagacattttaaaaacaaataaagtgacgtaatgattatacttggataatgaatatcatttaagaattattgtacatattattcatgagcgcatacaagtaaaacacataaaatattatttaagttattccacgataacactcttcacaattaattactgtcctagggttgctattgagtcaatttccttgagtcgatgagacaattatcatctttattattttaaaatctaaatatctcatatttcattttcaaaatataaagtaccgctttttgactaagttaatgttgggaattattttac

SEQ ID NO: 168991 - DNA, 939 bp, Cannabis sativa
caaataagttagaatttccttcctctccattccggccgcagtcacttcctgaaccaagttcttcacaaattccagcatgctgtcccctggaattttctctatattctaagaggaatttttcctagaaaccagatagatcttgccaaactacaatctctgaagagatgtaagcaattttccttctggaatctacacagagcacactccttgtctacaagaaatggtaatctttccttaaccagaatagcattgttcaaaactcgccaaagtaaaactacaattctagggtgaagatcagaatgccaaagccaattccaaactggctgattctccttgaatctgagtttttgatccacaatgtatgcacttttaactgagaagcttccatcttgtttctctttccaaattaatcgatccttgttaggaaaagggagcctaggaatctctaaaaaaatttcccccacttcctttccaaaaaattgtaaaacaacttcctcatttcaagcattacccaaggataaatctactattgttctagcagtaaattaagttacataattgtattttaaattttgggtaagtttataatgaatatttctaaatgatcaatctgatcattttggtgcatttgacctaatttgttttgacatttaagaaagttttttaattagtttaattttttttatgactgttgtaattatttaaaacctaaatttttttaaaaatttatataatttataatgttaaaaataaaatttaattatcttgttgcacatataattatttctttttatattcttagcaaaaagaaaactacttttttgattatatggataaaactgtattcttttacactataaatatttatatttcttaaaaaaatttacaactaattttaaataactattacatacgcgatgagattaaaaatttctgagc

SEQ ID NO: 168992 - DNA, 941 bp, Cannabis sativa
gctgtgtaattaatttacatgtgttgtgtttctatatatatatattaattaaccaactctcttaaccacttcttggacttaaatctgatgtatgatcatgtctttcgtgaggaataggaggaagaagattccacgattatgtataatatacataaggaccacattatgttaggacttttattttatattttatatatatatttttttattttaaagtcaatgacaatataaattatatggagaattatcaatacatatagagagaaatttgtgactttatagtatatactttgttaattgatttaaggattttaatagatgataaaagggatattttgttttctttgatttttgtggcactattttgttttcttttgttaattatatataaacaatttggttataatataaccatgatagataataatttaaaacatatttttccttaaaagaatatatatatatatatatatattgagaggaaaaaatatattatttattattatttacttattttttaaaaatcgataattaataaatatttttaagagtaataagagaagaaataaataagaacttgagacaaataattttacaatataagtgtggccaagatgtacaagtaaatgaaagacttagaacagagtttttcataataggtgacccatgatttgggtaagagctttgtgagttcttcaggttatttgctttgggacatgtgtgtaggtcagtacttgtttagaattgacggagataagtaaagcatcttgtgttttaaggatgttaagatcaagagcatgatcctgaaaccgatctgccatctgataatggagtgtggtgcgtcaagagaagttgggtcttgatctacttttactgtctgtacttctactttaaaagcattagtcagtcgatatctttgagagacatgttgaaattgggta

SEQ ID NO: 168993 - DNA, 795 bp, Cannabis sativa
gtctttacaaacttttaaaggcatcaattctagcattttcataaaaatctgtttgcaaagtttacaaaaatatgtattttttaatatatatatatatatatatatatatatattgtaggaaaaacttaaaaaaaaggttaaaaatattgccttcaacaaataatataaagtaattgataaccagaatgttaacaagttaccttaaaaaattctcatattttttagtttttcctataaaattatttgtttagaaaaaaaatcatatttttgcacaaattgtacaaaaacttatgaaaaattaatattttcacttaatttatatacaagtttttaaaaatatattcagtcatatatcacaattcttaattttttctaataaaattatacattgtatgggtagtattaagaaaatttaaatttttatacttaatttttttatctaattaaaaaaatctttttatattattatataggttggggttgttttatcgaatgaaaaaaaaaacatgaagaaaaaaagttttttagtaaaaaaaagataaacaaaagtttattttaacttaaataatttgtatataaatatattttttatataaagtaaaaaaagagatattttttttttatattttcttaattaagtagttaaattaagcataaaaatttaaaaatttgtttttattatttaccatttgatcaaaatctaatgatttaatatttttaaaattaatattttatagttaaatttattcagtaactatcaatggtatttctatatatatgtgtccaaatttgtgt

SEQ ID NO: 168994 - DNA, 941 bp, Cannabis sativa
ggtgataaatgctaaaagacaccggcaccctctaatgtataatatggttattagtgtaatatcgagatttatatatttcaatgtaataatttttaaaagatatcattaaataatctcaagaatctcaaggcaacacctctataaaaggtgttgctaaggattatgatgagcaatactcatatactaaataaatatattcccttcttttcaaaaaaaaaaataaatgtattccccatacaaaaaacttaccattaagactgttttgttgtctctaagcaaaaaaagaacaaaggaaaacagataagactgttttattgtcttggagcaaattgtcgttttatacatattccatgctatgaactattgtcgtttggatttatttatatggtttctgtatcgagctccaaaaccactactataactgtataacggctacaaccatacctatgcactatataatgtaatagatcgacgaacacagtaataatactttgtctctgcataaagaatttggagtgtgatcgagttattggtttctaatactgtttctagtactggcagaataacatgcatacattacataaacagagataaaattgaagatatataataataataataatagtgtaacacccatcttggatgtcatagaagaatatattgaataatattattgatgatcataattaaagaatatttctgtttattaagtcagctaagatgtttcaagtaaaaacgtacgtaacatttcgatttgaataaataaaaattaattcattcattattaaagttattttcacatttaaattttcgacataatctattaaagttttgtaattttaggtactacaacaaaattgcaccagtggtctagtggtagaatagtaccctgccacggtacagacccgggttcgattcccggctggtgcaatttttttttt

SEQ ID NO: 168995 - DNA, 1278 bp, Cannabis sativa
aaaataatttccaacaaaaacttgtacttgatgccaatgatacttaataacatgcttaatactataatgtttttctagccaaaacatctaaaaaatattcaacaaacaaatcaacgaaaaatattaatatcaattagggtaaagaaagaaaaaaaaattcctaaaaataaaaacaacatcaaagagaagatttgttatgaaaataattacctttgttgagttttggagagtggctaagagagaagagtattatggatacattatatttttaagttaggggtttattaatatattttaagaaaatttttatataatacggtttactaggattttttagatttttattatgtttagttagtaaattagtacgttttagggtatttatattttatttttggtaaaaaaaatattagaaaataggagaaaaaagtttattttttaataaaaaaattaagaaaatgagagaattaaggagagaagagaaaaaaagatttatagtgattttagaatgccatgtcaccgcctcatacttctcctttatatatatatatattgattgatttatgatatatatatatattgatatattgatagggaggaatcaaattagttagtctaaaatttaaaatttaaattatattagcataatttttatctgattagttagatttttattttaaaatgcaaacatattatacaatatctcatatacacgtatatacttatatgaatagttttagaaccctagcagctatatatctaccttattttaatcatctctcaaaatttttatcctctatttcaccaaatcaattgttctaatcttaagagcttcggggttagcaatcaaccactgttatctgatcatctttccgtgtcttggaaatcttcaggtaaaattcgtagttgtgtttttattttcgttttcagagaaataggccttcataaaactaccatatctctctccccataggtaccgtttaaaagataatttaatgatctatatttttcatgcagagactctttcctaattctgaatatttcgatgtaaaaaaattcatgttttcatgctggttgtcgaattacagtttttcaaatttctttctgatattgtctcggtaaaagtacgatatctctctcaatatctattatttcctagcggttctagtactgctggaaagctaattcaataatacatattttctttgaagaaacctttccctaattcggagttcttacctatcaaacgtcggtatcttcactcggttaggatatctc

SEQ ID NO: 168996 - DNA, 685 bp, Cannabis sativa
  modified_base (642)..(649): a, c, t, g, unknown or other
ccgctcttccgatctttggttctttgttggaggattgacaaattttgatatcttttttttgaagcgttcctaatttatgtacgtcggtcggccaataaggttgcttgtgcattagttcagcatttgtatgattagataaaaattcttttataggaacccaaaacgtaaatttgaaaaaaagttaaaaaaaagtatatatggggtaatttcccaaaaaagaacagtaataattaaacggtagggaaaaataatgataaatgctaaaaagtactagttgtgtttagtactctcttatatgtcactattgctattagtgtaattaaatatcgggtcccatatagtttaatgtaatagctttaagagagtatcgctagttaatcgcaaagtgacacatcaagaaagtgctaaatactactagtgcctaatagtaagagcattgctattaagcacctgtagtgcctagcacattctcgacatgttgcattataattggctaataatattctttaaaaactattatattaaactatataggactcaatacttaatttggccaataataatactaacacataaaaaaagtactagataccattggtccctataacaattctctaagggggcgtttggtatgaggtgttnnnnnnnntttgattatagggaatattatgaaggagaatatgat

SEQ ID NO: 168997 - DNA, 507 bp, Cannabis sativa
tagatctctcacccttgaggatggtagtactatttctaatcatgctgatattgaaagtgaagtctgtctttttttctctagtcttttttgctctcagggtagcagcagtaatgctactaacttacttttgtctgttattatcaccaaactttctactcaacaattttgttttctggatgctccttttactactgatgaagtcaagacggctttatttcagctttctggagataaagccccgggtttggatgggatgaatgcttatttccaccaaaaaaattggaatactttgggggaggatctttgcatggcgatccttgacattctgaataataatgctagcatgaactcaataaatagcactcttattgtccttattcaaaaaaaagctaatgcctcgtctcttaaagatttcagacctattagtctctgtacaactctttataagattgttgcaaaggttatagctaataggattaaggcggttatggaggatattatttctcc

SEQ ID NO: 168998 - DNA, 1044 bp, Cannabis sativa
cccaccatctattttctttaatttaatttcaaccaaaaattgagtgatttaagcctgatagtaactggatagtggacgattgaagagagagagcttaaggtaagaattggtttttgttttaagttaaaaatatttggttctatatgttgactttgtgttttggaatagttgtggaatctgtgacttcatgattttatttttgtgttgctacgggattaattacaatgtttacttgctgaatttgagatagttttgaggtgataatagtgtttgagcttttaaagctcaaagctcaagctttaatgatatttttgtttaaggactcgtttttaatttttgttacgttaggactgctgtatggatgatatatatttgtcttatgaagtttggaatgatttggataggttttggtggtgtttcgggaggtgtaaaatttgggattcccgtttcttgccaggaaaccaaaaggaaatggttaaccgtttcacaaatggcaaatcgtttctagtagtgtttttgaaccccagttttcgtatttgcttaaggtttgaagtagggataccctagtgacctataggagatccttgggaatgaatttttgggcatggaataggttagattacttggttaatcattcttttattgttatgacaaaggacctgggatcattgatcattctccaagcaagtcggccaacacacctaaactgaaacttaaggtaagaaaagtataatgtaccacatggcatggcaggtttcttcattattgattatctgattaggccatagcattgcaatatatgggctcgcttgattaggtgatgcgatatatgaatgccaggttatggcatgggcttgcctgattaggtgatgcgatatatggatgtcaggttatggcatgggctcgcctgattaggcgatgtaatatatggatgccaggtgttagtgcaaattttcgttaatcaaaacttgagcctaatagtgataatctcacacagaaaaataaaaacaataatggaaaagtatgaacacaaaggatttttta

SEQ ID NO: 168999 - DNA, 785 bp, Cannabis sativa
ctgtgagtatactgttatgcgaattttaaatatgagtctatccactttctgttttatttgtggcatccttggacattcggagagattttgcgaacagttttttcatacaccacttgatcagatacagaagccatacactctggaattgaaagccgctccacgaaggaaaaactatgcaatcggggagaggtggttaaggcccggagctgtctctagagtcggcggaatggtgttttcggagcatgctacaaccggagagggatctacggtcatcaatggcaatcagataaacaacaatcttgggaggcaattacggcagaatcaacatccacctatcaatctgggatcatcatcacatcaaccaattactgggagggataagaattctaatttgatggctaattctttgcctcaaatgaaggaaagtgttgctgtagttgaccaagcagtaatgagagatttgaatagtggagatatggttttagagccaaataatattaataaggaaacaagtattctcgttttggatactaagaggagaaggactgatattgttgatgttaatgggcctgggtcagataacaatttgaataaaaacacagaggaggatgtggaagacaggatcattagggagaagaataatgaagtcaatactggaagttttgaagatattgggcctgtgcaacttcaaagagaggacatggataccgatcttttgaaaaataccacaaaaaacttgtttggggcgggttctgtttcacaggcccgccggggattatgaatgt

SEQ ID NO: 169000 - DNA, 608 bp, Cannabis sativa
agcttggggataatcaatcttgtcaagttcttggaattggcactgtcatgttaagtccagaggaaggaaatgaaactaaattgaagcatgttcgacatgtaccaaaaaataaaagaaatctaatctcagttgctatgatgtatcaagatggctgctctgttaaagttgaaaatgtgtgttaaagataatcaaggggtctatgatagttatgaccgaagttagcaggaatggtatctatgtgcttaatggaattttagccatgaatcatgtcaatcataccatgagaacagatcaacaatgatttaacatagaaggcttggtcatgttagccttggtggtttgaaatatctgagtaagaaaggagtatttgggaaagaccatattaatgtcgtggatctgtgtgagcaatgtgtgtttcgaaaatcaacaaagattaaatttgggattggaaagcacaactaaagtaacaaattagactacctgcactcaaatttacgggggccttgaagggccttttaagaggtggagcaaggtactttctaactattatagatgattataccagatatgtgtggattcatattttctgaaaaataaaaatgatgcct

SEQ ID NO: 169001 - DNA, 1603 bp, Cannabis sativa
ttgtcgatgctagggctcgttgcttgtggtggtggttgggttgaacgagcactgagagagagagagagagagagagagagatgagaaaaaagtgattttaatttttttttaaaatcatgaaataattgtttttaaaatttatttaaatttgattttaaattaaaaaaacaaaaacaaaatcagttactgaacactaatttcaaacggtgttttcataatttgattaaaaaaataaaaattaatttttaaaagtgttatcaaacagagccataatatatattaattatatttttattggatttttttgtgtgttaaatttgtaatacttagttgttttgtgtatttaatttcatgatgtttcgtggattggattagattttgaggtctaattggattggatcggaggatgatttttcaaatttcattactaattgaattggatcggatgagaagaaaaatgttggattggatcggatgcccaaccctaaatatgattaaaaggaactggccaagtgagtttcttaaaaatatctaagaaaagcttatgattctttgacagcgtaagagctctatagagaatatgatttcgaattcctgtataatggaatgactccactatttatagggaaaaattacatcaatttggttttccaaaaacaattaggaataaaaagggaaacttaggtagtttcctattttatatttacaacatgtagaaatcccaccaaaataggaagttaattgaaaaatgtaaatggataatatccctaaaactgtgcctcaatcgcattcaccctggtcggagtgtgcgacttctctgacattcgaagctgctcagacagtttcattcaccctgtgcggatgttccataccaatcttcaaatgagttatttcttgatattaaatcactctggatgacataccgaggaatgtacagttcgtccaggtcacaaaatgctctccacgtgtcacccaaaagaatgtcatgtcactctgtgcggaaattgggatgacatttgacccccaagtcagtgtgggaactttctgcttgtacgtggacttgctcgacccacgtgctaggtgaatggggtgatgcgtgcttagactatgaagcgtgtgaatagggatgtcccttcgtatctttgagaatttattacttctcctcgaaagttgcatcttgatccgtgtgttgatggttgtactctcccatttgtaatgattatactctcttgggaaaaaatctaaaatttgaaatgtgaaattacctagatactgttcgtttttatgatccatatcagagttataaaagcgaaagcaaaatttgataaaaatagttttgatctaatatgaattttaatcacaaggatctcaacataatgtatatagattaaatctaaactattaaaagaaaatcaattacctcttgaagtctatcaaggcatccttgtttcttttcgtataaatccatgatcatccaatccaacaactttgttgaaaaatccacatcttgatcttccaagccaacctcaacacttaggaatagagtgggctattagatcttatttggatgaacaaatttaggtattacagtgtgtactcaact

SEQ ID NO: 169002 - DNA, 520 bp, Cannabis sativa
ttctgtgaaattgtaaaaggaagatctagacctagacatagaccagaccctcactcagacccgtgcttggtcccaaatccagactcaggaccctgacctgaacctcagagtcagaccccaacccaaacacggacactgaaccctgacactacctggactataacctagaatctagacccaaacttggacccgtctagggccatagacctgaacccaaacctagccccgacccaagacccagaccctagggtttggaccatagaccccaaactcagaacttagatgaacttggacccaaaccctagactcagacctcagatggacctcaaacccaatctcgaaccttgacccaaaccctagaccttagacctaaacttggatttagacttggaccccaaatcctgtaacgtccccacttcaagcctctattgggcccttacacccatggaatcatgactcttatacacgaatacgtcactctggatgcttcatggaacgataactgaccctaccgactaac

SEQ ID NO: 169003 - DNA, 876 bp, Cannabis sativa
cactttctctgatccatgaattatcaaaacacatcaaaatcaaatctacaaaatttaagtatttcaaaatattttctagaattggaaaattagctatgtaatggttcttacttcttaccttgatatttgttataggcaatttcctttaaagtaatccatgcttttttctttcttttactagatacactgataaatttttctgcatttgtaagaagattagaactactttcagattcagattatttcttattcattgatctgttcctctttcttttctttgctttcaacagagtaatcatagttttcaccataaatattgcaggactatgattaataggaaactctccagatgtttctggtaatggcagtaaagctggctcacccaatttctcgagcattactattaggcactttaaggtgtccaacaccataccgatgtgacgcattgtgattgattaacggttttttatataatgtgtgagacccaatattaaattacactaataacagtatgtcatttttgtattagacaccataagtttcctttagcatttctcaaatttctcaggctaaagagagtttaatttagagggattttgatttttcagtggttttgaccttagatgggaaaatttgttttaaaagtcctattggagtaccccattaaatgtctttgcattatttttctcaattctaattgtacagttgaatacactgaggaatttgttcacatctacaaaccaaaaagttgtttagttaatatacagaatctgtaaacaaaatgttaaaaactaaacaaactaatcatgagtgaatgtgaattcactatttagatttcaatggttcatgttataatgcagtaaacatctctagcca

SEQ ID NO: 169004 - DNA, 917 bp, Cannabis sativa
aaagctggtcctatagatgctattgcccttgagcacacacttgactgtatccccaccttggttactaccaatgactctttgcttgctccattcacaacgctagatgttgaaagtgctcttacagctatgagtgcggataagagctcgggaattgatggaatgtcggccatgttttatcaacaacattggtccattgttggtgatcttgtatctcgtgcggttctgaatattcttaacaatggtgctgacccctcaagtttcaaccatactctaatcacactcatcccaaaaatcaagaagccgcaccatgtgaaggactttcggccgattagcctttgcaacgtaatctcaaaactggtcacaaaaatgatagttgcaagattcaaggaggtgcttcctctggttatttctgaaacttagagttcttttttagcaaatcgattgattactgacaacgtcttggttgcttttgagttagtccatgctatcaaaaacaagacatccgggcgtcatggtattacctctctcaagcttgatatgagtaaggcgtttgatagagttgaatggactttcattgaagaaattatgaagaaaatggggtttgctagtggttggattacacttattatgagttaccttaccactaacaaattttctttcctcatcaacggtgaaatgaccggctctttgatcccaataagaggcttaagataaggctgcccattatctccttatctgtttttaatatgtgctgagggcttctcaagattattgcaacatgagcaaggccaaggcaatctacatggcttcagacttacaagaagggctcccatgatctcacacttactcttcgttgatgatagtctccttttttgtcaagcagatgaaagttcatgcctagctatcaagagggtgtt

SEQ ID NO: 169005 - DNA, 541 bp, Cannabis sativa
  modified_base (454)..(457): a, c, t, g, unknown or other
tgtggagccgactcttaatcttgctattgctgactcaacaccatgatcctctgaaaatttgctgcaacttgaagcaaatcttgctcaattcaacaggaatttcagaaatcctgtgccacaaagaggtcagtattattctccatactcaaactttccacctccaaattttcctaacttctcatctaatcgagcttcttattctgggaattcctttcgaggatcaccttctttttacaactctgggagaggttttattcttggcactagaggaggcaaaccacctcagcatcacaacagaattcaatgtcagttatgccataagattggccatactgtcattgactgcttttatcgttttgataaaagctttacagttgctgttacaccagctgagtctactccaatgcaagccaatattgctcaaactgctcctattgatgacaatcattggtannnngattctggtgctacaagtcattgcacaccagatctgcaaaacatagtgactccagctgactacaatggccaggatcagatattt

SEQ ID NO: 169006 - DNA, 2242 bp, Cannabis sativa
tacttaactttaaagaaatgtgtttttatcgcaaagttgtcgcaaaaatgtcgatataaaattgattacaaatcatattccccatacatcgcaaataatatcgataaacatcgataaatgtcacaagaagagaagaaactagttatgattctatatgtagtaattcatcgcatcatatatcgctacatgtcgcgaaatatcacaaattgtctccctcattgaacattgcatgacaaacgcgcatacaattggacatttaatgctaattaattttttacatttattatcccacctttccaacaatattgatgttagtatgtcgagaacaatatcggtaaacgtcgacaaatgtcgcgagattaggtgaaactatttagcatttcatctcattgtatatcgaaaacatgtcactcaatgtcttgaattgtcgtgaaatacctctctgattgcgcatttcatgataaacatgtacaattgtctaattaatttttgacatttattatcccactttcccaacaactatttgtgtctataaaagaaaatttctactttataagttacatatgtttcttattctttaaccctagagtgctcctctcttataagttctaaatatatagtaaagagaataaacacaaacttctatctgctgaagagatcaagcaggaacctagtgacgaaattactccagaaatgcaagaatatataaacaggtttaaacgttttgaaaatgaaaggctggcaaacgaatggaggttcttacatagtaaaataaataacgagtggctgaaatatccatatctaccaccaggattccccaaagggtgtcgtcgttgcagattaagttattttaatggcgaaccggtcaagcatggatcattgtgcccgtactgcgagtctcatcgacacagtaaacacttttaaagtttgtttagtcttgtttagtgactcatgtgtaaaagtttagaatcaaaaaatatcgtgaaacaaatagaaaaatgtcgcaaaaaattacaaattatgtttcaataaactatttatgtttgtgtatttcgctactttaatcgtgaaatgtcaccacatgtcgatatcatcacaaaattattatgtttcaatatgtcgcgtctaaaattgcaacatgtctcaaaataaatatcgcaaattaaaagacatcaaagttatttatgtttctctatatcggaaaacatatcgtcaaaatgttgcaatatgtcgatattatcacaaaataattatgttccaataaaactatttatgtttctgtatgtcgtgatattaatcgtgaaatgtcgccacatgtcgatatcatgacaaaataattatgttcaaatatgtcgcatcttagattgctgcatgtcacaaattgtcgctaaatataaccctaataaaaatataaaaattgttattcttattgttgccatgtcgataatgtcatcgatatatattgcaaaatgtcattaaaaacatacccagaaagaaaaaactgcaaaatagatttcataaatcatactaataatgcatgcaattaaaatacgaaaatgatgctcaaaccttggccttgcatgtagctttgttgtgtaccaaggcgccacaatttgaacaatggcgaggttccacaactttttgaccgttagatggatatcagttagtccatattcttcctgcattgctcttccttggacgacctacggatttcttctccactggtacctgacactcatgttttgcatgtgttctggaagcacccaatcatcctcatcactgacagcattaattgttgcatcataagtcttcttccacgtctctttagtgtaataggggaggacagagcgtacagactgaaattttgagtaagcatcacgacacatgaatggggacaatgaattttcaacaattggaacatgccgcatgtgcatgttctctcaactaagttcacatcaccaactttctcacagtcagaaccgtcagaacctctaccaacgttaagcaattgtgcaccgttacgtaggacgcttctaaactaccatcctcgtgttgctttaccaaatcttcctcaaaatgagttgccaaaggggtagcgcacttacttgccttttcgagacgctcagcgaaccaattttacagtgcgaaccttatgaactcaactagagtagtaattggatattttcaaaattcttctgtcacattattaaggctttctgcagcgttgtttgtcattatgttg

SEQ ID NO: 169007 - DNA, 546 bp, Cannabis sativa
taaattagtttagagcagatgaatgctaattgattataataaacaactaaaaaggatataaataaacatatactagctaaactaatttacagtcagtcattcactaatgattcaagggtttgcgattttattttcatacctgaaggtgaacgtgaacgatggccgacgccgtccggggttccggtgtggagcagaagcaggggagggagatccggagagcggagagggactctagacagtctgacagagaaaagagaaagggatatcgagagaggagagagggaaagacacgagggagcgtctgcgtcgtcgattgtagccccgccggcaccgacgactggttggggcctgggggtgtgcgccgcgatgggaagcaaagtgtctagcgagagagagtgacgcggcgagtggtcggattttcaaatgggattttttcaacaatatacttaaaatataaaataattacaaaaataacttaacaaaactcaattacaataatattttccacgtaattaaaaaataccttaatttcaaaataatatgcct

SEQ ID NO: 169008 - DNA, 691 bp, Cannabis sativa
  modified_base (621)..(661): a, c, t, g, unknown or other
gagtcatctgaatatggatgtggtagggatgcatgaaggggaagaagatgtagatatgctgctgctggacgatgatgagggcgatctgtcagggattgatgatcggtgggttctggttggacggtttctcacgaagcggagcatcgattttcaagcaatgcaacacaaaatagcttctctatggaaaccgggaagaggtatgtatgagaaagagcttaatccaaaccactttttatttcaattttaccatgaaattgatattgcaagggttatagatggtagcccatggactttcgatcgggctccactaattttcgaacgattaaagacaaaggagaaccctcgattggtctctctgaaccgtctagagttttggattcaactccataatatggaatcgggtttcatgacagaaaatacagtccgtaatgtggcgaactatatcggtacattcgtgaaatctgaccccaataactttgttggtgtttggagggactttctgcgagtccgggtgtcattgaacattgacaagccattaaagaaaaaaatgaagcttgaaaaaaaaatggtcagtcatgcactgtcgtttttaaatacgaagactgttgggttttatgcccnnnnnnnnnnnnnnnnnnnnnnnnnnnnnnnnnnnnnnnnnaaagatcagaaataatattttatgttgcat

SEQ ID NO: 169009 - DNA, 1920 bp, Cannabis sativa
cccctgtagttattaataattaattacttttattattttatatgattatcattatctcattattttatttaattatttagtatttgcttttatatataggtaaacccaaatttatatggtgatacacgcacaagactttttgtatattggacagtaagtagtagaagtgtatataataattttattattaatttctcattttgaattaattaattaattaatgtttgattaataatatgtatttgtagacggatgggtacgtttcaaaaggttgctttgatctcacatgctcaggttttgttcatacgaatccaaatgtagtcttgggtggatcccttgagccttgctcatcccaatccggaccccaatatgaactaccaattaccattacactcgtacgtatataacatatagtatagactacgtttaatttcttaattgtgttttttttttaatatattttgttaatatatataggatccacatgttgggaattggtggcttaaagtgggacaagatgtggcagtagggtattggccgggtactcttttcgggtatttgcaacacagcgcggtgatggtgcaatggggcggagaagtgtacagcccaaatgtgagggagcaaaagcctcacacaaccactgccatgggaagtggtcagtttgcccgcctccttcatggggaggcggcttatgtgaaaggggttaggatcatggactactcgttgtccctcaagtaccctgaatgggtagatacttggggtgatgaggattattgctactcggcttttaatgaggttaagtatggaattgagcctaccttttattttggtggtcctggtagaaattcgctttgtccttaattaattatattatattatttaaattgccttaattattagttcatttctcttctaatgtaatatcaaatctcataatctcaatgtaatactaaattatttttgagagttgtattaatctcagcctcttaacaaaacctaccaaaagatgaaaaagtaataatctaaaaaaatgttcaagttactattattaacatatcaatccattcaaacatttatagaagttgattttcaaaacagatgtgacgaaatcattatagttgatcagttgaacttgaatttaatctccaactattaattttttcacattgacaaatagatttgttttgaaaacaataagtaaaataggatgtcgtgttcttcactgatatatgtaaaacatacttaaaaaaaaatctccatattcaacaggaagaagttgtgttttctatgaattaaacatcaaatttcattgtctgagactctaatgcattggatgttaagcccattggccgtgtcagtgagccacaagctcaactacgacctcatcccggactatccttaggacgttcatggcctaggccatgggccatggacttaagaaatatatatatatatatatattaatcacagatctaattatatttttaaaagtgttttaatattataaattttaaattatatttaatagaacctttgctaaatcaaagaagaagaagatgataatgagatgagcaaaagcactaacttgaagtcattgttggagattgtacagaaggttatgatcttccaagaatatactatttctctaaagtattttccctaatggggaaggaaagaatataggaactctagtgtttcttgaggaccactacctatttataggttcattatataataaattttgggtatttataatttgatccctcaataaattacaaattaacttattgtatctacacattattttcatgacaatttagtactattttgatacccataacataattggtcacttaaatttgtatcacactttataatagcatgtacattatacatatgtgcccacaataggattttaat

SEQ ID NO: 169010 - DNA, 603 bp, Cannabis sativa
ccacacttctaaattttaacattttgcaagttcgtttatgaggctacaacttttttagtgatgtttatgaatttgtcaccaaaaaatattagaataagttgaggaatacctttttttttttttatccactaattaaaaataccttcttattaaattctattaaaatatacttacttttatgagtgagttgtcaaatgtaccatcactctctacttaagtctagcatataatttatattaactcaaaaggtttaatgggaacatcatctataaaagtgagtatatcttaaagaatttaaaaataaaggtaaaaattaaaacaagtaaaataaagtgggtacacaatgtaattttctcaaaaaaataaagtagacataatgcaataaaatttttgatcatattggggccagaagcattttcatcaagttaacaaagattaggttttgttgaaattatgtatataattttataagttgattcataatttatggttttatcttaacaaaaaggttatgaatatcattaggtagtatgagttggcacctgtaaatggttagcagtttctgtaattattattaaagtaaaataagtgagattcgatatt

SEQ ID NO: 169011 - DNA, 799 bp, Cannabis sativa
tattatgtacgtatatagctaaaatggaaaataaacatgaacgccggagtcgtatattaatcatgattctctacgatgaaattattattatatgttttaaaatgcccaaaacatagtacacaacaaaagagttatgaataccgatattatcatagatacgcgtaccatatctttattaattacgagttctttttaataaataaacaaataaaatgtcgaccttaaaactaatgactgcttctcttaatctccagtttcaccttctattttaatttttgcctggaaaaatatatacccgaatattttttttttctcataatgatgttccctataattaaaatatcaaacatgcgaaattttagaaaatttttaatagttaccgaatttataaaagagtttcacatattttaatttattagctattaggaacatagcaatgagagaaaaagaatgttttactgaattgttatgtgtgtactttacagaggagaataatacttatttataggacaaaagccatgagtagaaaaaataatagaaaatggaagaagagaaaaaacctaactaattccctaattaattctaataggccacttcaaggtggaatgtagaagtttgtgacacccatcttagataaaatttctttgaactgagtagggaaaagttgctttgtgaggatgtctgcgaggttagcttttgaaagaacatgatgttggattaaaaactcctattgtgggcacataagtataatgtatatgctattataaagtgtgacataaaattaagtgaccagttatgt

SEQ ID NO: 169012 - DNA, 507 bp, Cannabis sativa
taaagtttcaaagcttgtttattagaataagtctcacattgttaatatgtggaaagagaaaaccatatagaaaattcatggactactcctctcattgctaatttattttgagatagaacgcatgcaccttatcgaattctaacatgatatcagggtcaaattaaaaacttatgtctcctcttgttaggtttttgacctgttataaaaaaccataagaccaaaggtctcaatactaaaaattggtacacattagttaaaaggtttcaaattggagataaaaatttgacctgcgtagatggaaacccgtgggtacccaccccaaatgagacagggaatatccactttggtgggttatggggcgagggtgggggaaattttatttacccgaagagggttcgaggcgaagtcggggctaatactacccaccccatatgcgagctcaatatatagttttcatataattttttaaatattatttgtataatcgtattaaagttatttgtataa

SEQ ID NO: 169013 - DNA, 890 bp, Cannabis sativa
taacagtcgccccctttcatcttcttcctccgcccactgccacctcccccagccaccactgcccacgttagaactgaacccatgccgcccaccaagccgtccgaccccaacgtagccacgtagccacccgtgcgaagaacaaagaacaatcttcgtgggttgccgtccaccaacaatctttgtgggttgccgtccaccaatgattggaaaatctttcatccacaccgatctttctccatccacgcaaggtattgttaaaaaaaattagttttttttgtaattaatttagagcaattatatattttatgtgttgaaatacacttcattttgatgaatttttcttaatttgtggtcgaatttatatggaggctatggtgttttccgatctagtatggtggtggttgaggaaaataaaactaatatatgttctcgattatttatcgaaagattctcgataggttatcgacaagatgttgtgaaaaaaaagtttgtttttagtttttttttgtggttaatttagatcgattatatattgaaatacacttcattttgatgaatttttcttaatttatggtcggtttatatggtggttatggtgttttccgatctagtgtggtggtggttatgtatgttctcgattatttattgaaagattctcgataggttatcaacaagatgttgttaaaaaaatatttttagttttttttttttttttgattaatttatgcttgattatggacatattcttgatagattcttgataatattgattagtcttttagttgtcatgtttggtaagtgtagaggtaaaaatttgcttaatatttgtgatatttttgagaagtccaatatgcaagtcagacgagcccatcaataatggatccaacaat

SEQ ID NO: 169014 - DNA, 848 bp, Cannabis sativa
  modified_base (788)..(811): a, c, t, g, unknown or other
tttgtgcttgcacaagtgaatgaaattggctagtgtggtggccgacctatgtcacattgggatctctttgaacgggatcttgggcttggttatctggctgggcagtcggtggaatgttttgtccatttagtccccttctaccatttggatcatttctgaggtcatgcgcggtgcctagccaatcgaaaaaccaggcaccaagttgtcttggtgtttgacttgcttggctaagaggttggcctaatacctctttataagtaaatttgttcacatgtgtacctccttccaaggggtagtctggcaaaatttggtcgtctaccgtttggcccactgtttggacttctggcctttatttggatggctgaccactacgagtctatgcagtatgactgatacatacccttctgacccacttagggggatgctagatttagttgctaattgtctactggtaacttcgtaagcccattctgattagcacggtgccctgcctggaacgatcattatcgctgcttgctgagccctcatgacttccatctctcgatccctccattctctgaattgacgtctttgctcatcaaaggcaaggttaatagctactcggagatcttcctaatcatgatgcaaagtgttcttatggccttgcataatcacaagttcctctcatagattttgaagtttagtgtcatctctaacaggccgttgagtgttattggtacatgggactttggtgctaggagtggtttgatcggctatcatactggtgttctgttggaaattattttacnnnnnnnnnnnnnnnnnnnnnnnntatgttgattaacaccctaaatattaactttctaaaa

SEQ ID NO: 169015 - DNA, 1155 bp, Cannabis sativa
  modified_base (1083)..(1100): a, c, t, g, unknown or other
tttgtctaagactgaaccctcccccgttatatatatagaaacgatgaaactatagataatttgttttgtagatcaatgtgctattgctccttgaagcatattgcatggcctttacaaacaacatgtgagtagataacatttccaaaaccaacaggcaatagtaaaaatgagatgacatctataaggtgctagatttgctatttctataaagaatatatgatttctctacgcactaggctacagtgggaaaacaatgtaaggactttccactctaattaattacacttaatggaaaatcaccattaggtgaatttagtttgcttcctctgttttgattcttttttgttttgctttgattttgaggatatctcatcccctctatttttactcatatttctatctttccacccttaaatatacaaattcttggtacataatatacttgagagattatcttatgggggagttgttttaagttttgtattgatagattatcctatggtttgtattgataggttataccaggttctgtaccacaaatgccagttagtaaattaattggcagccaacgtagagcaaaactatggagaatggcaacaatttgagttgtgtggttggagagaaatgctagaatttttgaaggggttcaaagttcagaagtggatgagtgggagaaagttaagttttgggcagctactcaggtatttaagaccagattttaagaggatttgtcttttttaaatctatgtagagaatggaaatcattgatgtattagaagtatttcagtgacctagcaatttttgtttagcactgctgagtgctaactgttattggctttatttgtttatggagaatttttgtaaccaagattttcctctgccaccaagcgaggattttcaatacataatggggagggtccctgtctaagacaagaggtccctttctctttttcaataaaagattgataatcctatcctatggggttgttgttttaagttttaagagaagacatgtttgtttctatatagctctgtaaccaccgtcttcctaattaacctttagtaattttttcccctgaactnnnnnnnnnnnnnnnnnntgccccttgaactttttttgccgttaaaaattccccatgaactattgagattgtt

SEQ ID NO: 169016 - DNA, 845 bp, Cannabis sativa
  modified_base (402)..(410): a, c, t, g, unknown or other
caggagagattttgcaattgggtgtcgcaatgtatattactacattaatcctatctagactgttggagtcgttcccggacagtggtagaatcaaagggattcaactgagtgggatgggctaagattatctcacatttttttttttgcagatgacctaatcccaataaaaaaaaaaatcttacttttagtcacaacaaaacttatagctaaattaaaatagttataactaattataaattatcattcttattctgtgactaaaagatttgtggctaaaggtattagtcacaaaaattacagtttgttgtgactaaatgtatttttagtcacaatatttattgtgaataaaactaaattagtgacaccttgaatctaaatactatgttagaatttgggataagnnnnnnnnngttccatctcaaaaccaattggtaatgggagtagctcattcatcttatatatggcaatttctttccacacataagcaatgtgggaccactactacaaaaatagtttctcttgacgtttgtaaactgtcatttaaagtattcccgtcgttttttataattgtcgcctatacgaccgtcgtaaaacgggcaaattaggcgacggttaaaaaccgtcgctaataaaaccgtcgcctatagtatagggtatggtttaaaatcgttgcctataccctattataggctacgattttaaacctttcggaattaatgtaaaaaaatatacatatatttctgttagaaaaatctgtatttttccccattttttttttttgcattagttttataattttacttaaattaaaataaaataattaactaattaattttattacaata

SEQ ID NO: 169017 - DNA, 1844 bp, Cannabis sativa
ggctgaacctctataaaatccctgcgtgttattattgctttatcatatatttgttactatatatcgtttatcgcttataaaatacactcattgtcgttggctaaaagggaagtcaacatataaggttatacataaaccctttatttaatcttttaaaataaaagatgatatctaatttaattctattgactgaatatttagccaactgacgcagagtcgtaataaatgagatttaaataaaatttgtaacaataaatgtaaataatgacaccagaaattacactaaatgtaaagaaagacaccgaaatttaaagaggttcgaccacagatgtcggttatatcctactcccctttgttttattaatcaaggttacaaaagtcaagaataggctcttgattgcaaagaatgaatagagtgcttttctctaagggctccaaattgcggatgcccctcctaggtcaaggatgaccccttatataggggaaagggttggtgcttctcgctttaggagacgcgaccaatgcggaaccatcatctcaatcgtctcgttgatttttagaggtagttgaagtctgatttttatgataatatcccgctattttcgtgggtttataactttgtttgagcctttcgtgggatttgaacatttgaaataataactgacgacaagggtctccaaatggtgtgacacagtctttgacaacctttggggatgaagcccatacttgggggcgacaatctcaaaatccaacttgaggagggcgacaatcgtcatcacaagatgaccccccgagacccaacatgaggagggtgatatttgtcatctcgaggtgaccctctgagaccccttgcacgttgttagtagttataatgttatgtagatgttcacatctacctttcagagtatcaattatgtctatggtgggtgtagtgtcatctaccccttagactaacttggtatgtgggtgtgtggtgattgttcattccgcttacgaaggtgttagtccattatttttccttcatggagacacccaccttactcaagttaggggtaaagttgaccatctgacttccattctaatggtcatgataacccttcatggttgatgatcatgaccacccttcatggttgatggtcatgaccacccttcatcattaacggtcatcccaacggtcaacacattacctattcttcattaatttagtccctgtatttttgtgccacatgtttctactattgacacgtcatcgtcattaaaatttgggtaaatatttgccccccaaagtttctagctgtatgaccatacgataggaactttcttctgtaacccgggtctcgctttagttgttgatgccttggcgcagcagcaccaaaaacactacgcctatattaaaatcacattccaaaaatctaaaaatattttccccaaccattactcttttcacattttacaatataaccgaaagataatttttccctttacaagcaaaattaaattagaagaaacataatgtaaatatttgcaaaaaaataaataaataaattacttatagcattataataatccttggagctttgaggtctccatcttcatagtaggtaggttttctacactttctcttgcaattttcttgcttgaaatttgaaattggatgaagtttttagcacttctttttggtagttttttccatggctgaaaatgacattgaatcattgggatttttgagtttttgataaaatatgagtgcttgacaattggagtatactcaaaaattgagcaatctcgagttaccctgagaccaccatgtggtaggcgggatgtcactgttgggttttatgccc

SEQ ID NO: 169018 - DNA, 1772 bp, Cannabis sativa
  modified_base (1704)..(1740): a, c, t, g, unknown or other
atcataactgacaatgggacccagttagaaggagacttgttgagttcttattgcgcggagaggggaattgagatgggattcttggtagtagtgcacccacaggctaacgagcaagttaaggtagcaaataagataatcaagaaaaacctcaaaatgaagttggaaaaacttaaagactgatgggtagatgaactgtcgaacgtgctctgggcgtatgagaccacgacctgctccaccacatgtgagacacccttctctttggcatatagatgtgaggttgtgcttcccatcaagatgaagctcaactcatttcgtgtgaagaatttcaatgaggattctaacaaaaaagccatggtggaaaatttggacctcttggaagaaaggagggacacaacccaagtgaggttggcagtgtatcaacaaagggcaacgcagtacaattatttgagagtctgcatgcatgcctttaagacaagagacttggtactaagaaaggtccttctaaatactagggatccaggagcaggagttttgggagccaattaggaaggcccctatcgaatcgctaaagtcatcccacccaggacctacaagttggcccgcatggatgacacatggtaccaagggcatggaattgagaacacttgaagaaataccattatttagaaggcaagtctggtttattagtatttagccctccaggctaaaaacccaaggagataacctgtgggggtaccaaagccagattcctatcatctcttcttatccatcttgatattctaatgttatgaaataaaaggccactcagatggcatcaaaattgttctctggaatataagaatattaccttggagttagtcaaccacactttgttatagaatgataaaaggcagtgtccgctcttttaaaaaaaatgaatgacgacaatcgcggatgaggaagtaaggtacaaaaatttcttagctggaaaggattagctacccttacttgggagaagaaatatgcctctccttgcaaaaattactgagcctaaagggctctagaaagatgcttgtgggataatgtttaaatgagtgggatgcctctcaaacataaccagatattcataaattaaggggggatgcaatcaagtacaataagtcccctcccatccgaataaaaggatgaagaaataaaacttgttcctgatttgcattttgattaagttgatggcgcaaatcaagtgcatttttgtttagacactcatgaaggttaggctatcttcgatttaggtgctcacgaaggtcaggctaccttcgctcatagttactcacatatcttgtctccgagtaactctcggattgataactttgcgaattgctcatgctttcttaatctgcataataacgtcgagatctacttccttctcgcgtttgcctactcgaccgactatgccctcgagaccttgaatgtctcgagcttgaacttttttcatctcgtacggcccttcttctatggaagagattagatacacgtcctttattcaagtacgtgtatacattttctctatctgcttgagaagaacgttgaggatgtctcagaggaagcccacttgaccttggttgatttttaaggtttctctcattattatgagggatcccctagttccatggtagaagctgtctcgcttcttcatgttagaaattattttaccatgatcttagnnnnnnnnnnnnnnnnnnnnnnnnnnnnnnnnnnnnngaactttctaaaacgatgaaacaaacacatat

SEQ ID NO: 169019 - DNA, 1240 bp, Cannabis sativa
ttggtaactgaattacaaaaatcgttacaaataaatattttctttttttttgttagataatttgtttttatagcactaatgcaattttaatttgggcggtgtaaattaaaaatatatacataaatagtagtctaataacaaatttgaagagtatgtatttacatttttaaagttaatatttatatatttattaatgtcaacaaactagataagttaatacaataaattttctcatattatacatgtcactgtggcgttcttaaaacttagtaagctataggaatttttttttttaaaacttttatttaaaaaaaatgtggtactttaaaaggagaaaagaaattttttggatttctaagttagatggacccaaagtacatgcttgctcacttatactcagaacccagtccaatcatataaacgaaaacgaaaacaaaaattgaaaggagaacttttttcaaccaaaaagagtttgaaaaacaataatctacaatggaaaaaaaaatctaattgaatttgaaagaagatagttgtgattattaccaatgtaccattgcttttgcaaagttggagctgtgtagatattggaaaaagagtcataaaatgcattgtcatttacaccagtcaaaccatcctcataaaaattgtcacccgtggatatcacaaactcaatctctagtttctctccaattatgcccatctatacaattacaattacaaccaacatattaatataattatttcataataagacatagcatcatatacgaaatttgtatacctattttattttatttgttttaattttttatattttttttaagatatatttacttttatagatgatgtaagttaatataaattatgtgttagacattagagaatgaactcactcacaaaaataaatatattttaataaaaataatatgaaaatatttttaattaatggataaaaaataataaaagtattgttagtaatcgagtgaattgtcctgagtctaatattatgtttaaacttattattgatgagattaatattatttctcttttagttgaagttgatagtggttcttgttgtgccatttcgcgtattgcgaatgatgtaacatacgaactaattaagtctgttactagttcgataggagttcatttatggactgatgcttatcctaattttattagtgctcctgtaacaactgatttgatttaatttaataccatgctttttttttaaaaaaaa

SEQ ID NO: 169020 - DNA, 1397 bp, Cannabis sativa
gcagctccaccagttcatcaatggaatccttttcagaattctctgaattcctctcttactgttcgactcgatcgaataaattatcttgcgtggaaggcgcaagttatacccaccgtcataggtcacggccttgacgatattctgctcaccggagttgctcctgttcgaaccctcgttaatggcgacatcaatcttgagtacacatcttggaagagaaaagatcaaatacttctcagctggcttcgatcttcaatgtccgaaactattcttggatcatctgctcaatacaattcctcttacgaagcttggcgtgctctggaacaaaggtttgcaagtcaatccaaggcccgattgcttcaaattaaatcacagttatctacaatccagaaaggtaatctttctattactgattactgtgacaaagtgaagcttcttgcagactctttatctactgctggtcatcctcttgatgatagtgatttaataatgcatctgttaaatggtttgggacccgaatacgatcctgtggttgttcatgttaccagccttgtggataatctttctttagaatctatacaatctttgttgctaacccatgaaagcacgcttgaaagacactacaccttgggtgattcttcatccaagatttcagcacatctcactcgttatgctcctggctctagatatcgatcttatcctccccaaggacgtggaaccaatccaaattttcgctctcaaaatcgttcttttggtcgtggccacccctccattcctcgacttctttgtcaggtttgccacaaagctggacatactgctgctatatgtcattacagatttgataaaagctttgttacaccaaaaatgagtgagccaaaggcctatcttgctgagattgatgatcaagaagctcatcaagtttattctagctctgcccttccagaatttatggatgattttgagtggtatgctgataccggcgcaacagatcatattgctcaaggcatggagaaccttgaatctgaaatcccctattctggacctgatactcttgctattggcaatggaaaacgtctccccatcagccacgttggtaaatcctctcttccctcctcctcagttcctttacatcttaacaatattcttaaagttcctcaaataacaaagaacctaattagtgtgtctaaactcactgaggacaataatgtttttcttgaatttcactccaaatgttgttttgttaaggacaaggtaacagggagagttttgctcaaggggaggctgaaaaatggcttatacacactatcccatagttcttttccatcatctcgggtccagttagagtgtcatcttgcctcaactcaagccaaagcagaatcctcatctttgtctccaacttc

SEQ ID NO: 169021 - DNA, 571 bp, Cannabis sativa
aaatcttttattttattaaattatgtattttttttaaaatagtacaagatagtgtcctaaacttaattttttataattttttctaatataacaaatttaaaattttttctttcaagaacagatgcagaaatataatcaatcttatcataacacctctaaattaagtattattaaattttattttaataaaaattagctcaatattttaaaaaatacagaatcaaatctatcatttattataataataacttgagcaaaatgcaagtccaagatagtattgaaaaaaaggtctactgatgcactcttatttttttcgacatgtggaagaattttttagtccaattttttatggtcgtttacattgtaattatttaggacaacatgtaaaattttgagaaattcaaaaaaaaaaatcaacacgttcaaaatagggttcaaacactctattttacacgattataaaatggggagttttgtttgcaccccattaaatgataaatacacctcattttaaaaaaaaatatataaattaaataatttttaaaaattacccctaatattttttttaaaa

SEQ ID NO: 169022 - DNA, 582 bp, Cannabis sativa
gattgttgatacgtgagagccatagttggctgtttaagggaaaaaaaaaatgaaacggggaaatgggaagagctatgcctatgtgttgatatcataaagcaattgtagacatgttgaagttgaagaagaagaagattgttgggtctgtggagacaccagtggtcagtggattcgattagattcgataacgaagaagaagagcggtaaattagtgtgggaaatggattagatagacagactgaacaataaagacggaatattatttatatttacaaaagtgataattgcagcaaataattttatttgttgcaattaaccatttatgtacaaaatttagtggctacgagtatttttggatttaaaatattttaaatgagtagttaactttaacaaaaatattttcttcaattttatgcaagtagctaactgtaataaataaaactagattgtaaattttaccattaaattcagggtgtgtttggaaagctataattgaatttgtgtgtaattagaggtaattacacaatttgacatatttgtctgaccatttaattacactctaactgtgtaattggaagtaat

SEQ ID NO: 169023 - DNA, 848 bp, Cannabis sativa
  modified_base (131)..(144): a, c, t, g, unknown or other
ttaaaaaaacagtatatggggtaaatccccaatttaatatttactaataaataaatttatttaataaataattattttatttttatatataatcaacattaaataaatatataaaaaatatttttattttnnnnnnnnnnnnnnatatataagattcctgtactcaaccaaacgttctaattaaattaacacgaatatgattacatattaccctataaaactaaacacaatttacacattttcctataatcatattctccttcataatatttcctatagacaaattattttgaacatctcgtatcaaacgccccataaagggttattgattaccgttaaactatttttcctatattatcaatatctatgataaatacattaaataattatttatagtaaaataagtacataaaacttatagaaaacttatgttaaaaagaaaacttagggaaaacttgttaccgtattatattgtgtttatagaaaattaaaattatgtttttgcatttaattaataaaataattaaatatgaatagtttattatgtatatctggtgtaatataattataattgtccctcttaaaaaaattcaaaattttcatttgcccgattcaaatggtttaaagtttttttgtttgtttaattaatagtaaaaaaattatattgtgtttgtagaaaattaaaattatggtttggcatttaattaataaaaataattaaatatgaatagtttattatgtatatgtagtgtaatatttttatatattaaaagtgtctatctaacggaatttcttggtttaacaaaatatacttaaaaataaaagaatattcagttaaatttaacgat

SEQ ID NO: 169024 - DNA, 515 bp, Cannabis sativa
cgaatttcctcataatcggggattatcaataggtcattctgttcattagccgagaggtgatctactataagatggtctaagcgttccagcggtcccttaacagtattggtgaaaatacttcccaaaaagctggagaattccttgcctatgtctcttcggttgctaatccacaccccttccttgttcaaaatactctccactgtattacgtctatttctaatggtcgttgtagtgaagaaaaatttggagcatttgtctccctctctaatccaagatatatgggctctttgctgccagtaagtggccctctgcctaagtgccccatttagagatctcctagtttcaacctcctcttaccactccctcgatcttgtaggagaatcctggatctccttcaggtgtcgttctagattagcaatgcgagtatccagttttccaaattggaccttctgccatttacaaagtgcaaggtgagtggcccccactttcttgaaaaccctggccggggcccagcc

SEQ ID NO: 169025 - DNA, 1077 bp, Cannabis sativa
taattttttgatggtaaaaccatttaaacttcacttatattacctatttaccacggtggacatgccacagtgtatacgtcacaaatttttaatggaagatattggcgacaaaattacctgaaattagagacacttaattacatatattgattttttggtggtaaaacttttcaaatatcacttctattagctatttatccattccatttaaaatgctctgttaagtgctctgcgactcgaaccatcaaatctccccttcccctactccttcttcttattttgcgacaaacccaccatacaacgatgaacctagggacaaaccaacgaacctagcgaacccttccaactgtagtggtatcgacgaagagttgtgggagagagaaagaatcaaattcggcgaggtcaaggcaagaaagaaaaacttcaaagaagggttgggtcttggtgcttagagggaggctaaacggtggttttgtaaggtcgggaattcgtttttagggttcgtttaggttgaaggtggctagagttgacttttcggagctgtacgagaaggagaacggaagagagagggagtgtgggtggaaattaggattacagagagaaaaatgtaaaagaaagagaataagaagaaaaaagaaaaaaattaattttaattatttttataatttttaaattatttttaaaatatttaattaattaaaactatgtggaccactaaattctttttatgtgtatacttatgtacactgtggcaggtcttctatggcacttcacatagttttttagatggagggtaaatagctaatagaagtgagatttaccaccaaaaaattatttatgtggttaaatgtcactaatcataaagtgtaagtaattttgccgctaatatcccccactaaaatttgtcactgtacactcgtggacaatgtgtgatatgtccaccgtggcaattaacatagtcttttgaatagaagggttaaataactaacataagtgaggtttggagggttttaccaccaaaaaatcaatttatgtgattaagtgacactaatcatagagttgttcatccaattcaat

SEQ ID NO: 169026 - DNA, 908 bp, Cannabis sativa
  modified_base (857)..(869): a, c, t, g, unknown or other
taggcatcttaaagtacaccccttagacattttcatacttacccagtgtccaggttgacgtcatatgtcaacatgcgcgatgagatgtcaacctgggcgttggatgtcaacttgctaggtcatgaatttccttcagtaaaacagtcataactcacatgcaatattgatctgattattacaattcaacttgaatttcgaagctaattttcaatgcttctatcaagtcacgtgtctcacactttaattgcaattgtaaagatattgatctcaaatttcaccccaagggaattacaaaaataagctttgtgttacctgcagcggatcctgctgggctttgaaaaccatgcattagaagctaattttcatcgttggatcatcatatatggtcaaaaatagctaacttgtatttccccctatttttgtggacctcttttgttggtttttatggtccatatcagagttaaaaaagcaaaagcagatttgataaaaatagtttttatttaatatgaaccataagcccaaggatctcaacataatatatatatatatctatatatatatattaaatctagactaatgaaaagaagacaatacctcttgtagcctatcaggggatcttcactatcttttagaataattacgatcatccaatccaatacttgttgctgaataattcacaccgcaagccagcctcaacacccaagaatagagtaggctattagattctataggatgaacaaatttacgtattacagtgtattctctactcatgagacattataattgagataggagttatcacaatctcatatcgtggttggcgtgtgagatgaagagagagagagagagcgagagannnnnnnnnnnnnagagagagagagagaaaagataattcctaacttctctct

SEQ ID NO: 169027 - DNA, 700 bp, Cannabis sativa
aagcaccaaaatattaactctagactgtaaacgagacttaattaatttactcactgcttcaagcaaaatacacatacattcttctgtataaatgtctctgccctcaatattcaattcattagtttcctatctgccttttttactaaataagagcattatgatttaaagaaatggtaaagggcacacccacatagttagctagctccactatgaatacagcattatatgagtaatttaatatcagatcttctttatttattttattaataattataggaaataactaattatttataattacctcatagtggtattaagcatcataatatctactgatatagcgttctataattagttaagaatttatattattatttattaaattaagattctaatattagaatgtaatagctagtaataattagtgaattttgtttactaaataaagaacacacaacaataccctggttttccaacaccatgcgagaacaactttagaaaatgtgataacatttgcaccacttccaccaacaagagatgagataacttgaccgaacattttaacactcaccattaatatgcaccaacaataatttctcatctcttgtaaaatgccacttaaatatatggaaaatatatatgtagaagtaggagtgttcgcagtgcgggtggtgcggtttttgagtattttttcaaacta

SEQ ID NO: 169028 - DNA, 1580 bp, Cannabis sativa
tcatttatgtttaatgcttataatagcttgatcaccaaatatttatttatgattacaatacaaaatttgaaaagtgagtgttgattatgctataattgaatagacatagattttgatattggacaaaactacctgtatggtctgtgtagcaattaggatttctatgcttaatgtaaattatgtctaatttaccacagaagtatagaacatttacatataatttagattattttggggccaaaacagggccccaacacctaggttgacatggatgttaggccctacaccctcgttgttatgcaacctagtttgcatgtttctactcctcaaacacaaattctgctccgagaattcttcttattttggtcaaaaattgaggaggagacctcgtttgcaatctcaagtgtcataaaagtatcaaaatgagccctgggaaacaccccgaagagcactcaacacccaggttgatgtgtggcttggtgctaggttttgcttatatgattttgattctgtctcgagcatctaacagtttgtcgtagtaaatgagatctacgacttgtggcaagttaaattcacactttgacatttcaccttttcggtaaggtggaatattgacaaattcgaagagtttcaagtctaccggatttcacaaaaaagcgacatatccgagaactggtgaacaacttcaccaaaacgaggaaattgattatgtagtgtcaacatatcacttagacatcaaaaaatacaagtctagacgtattttcactcacccaacgtccagcttaacgttggaatgtcaacctgagcgctgggtcctgaatagccttttgtaaaatgaccataattccctcaatattgatctgattgatgcgattcaactttcattttaaagctttttcaagtcatgtctcatactcatatcgcaattccaaaaaaaatcaattctaaaatttttccccaagacaagtgctattttctaattacccaaaaacaatctaacatacgagattcaaaagtcaattttagccagtagatcatcaccaatggccaagatcaacccatagcgattttttcatatattttgtattattttaatagaatctccttccctataaaatgagaattttactagttcatttttcacattccctataaaaagagaagtccactagttcattttttatattgagcacataaagttaaagtatttctctccagtttctctctaaaaatataaaactcttgccttagtcaacttcttaaaattctcgtgagcaataaaaattcgaagcagacgtaattgcattaacgttgcaacacggggacggaactactataaatcttgtctctatatttagtatttatttactcaacttatatttttttctcgtcaatatagctagcgaatgttgatcaaatttttgcatcaacattaggtacattaaattacaataatcaataattataaatacctctttaatatccaaaataccttaagttgcaaggttctcgcagccattaaagttaactcgctttcatttacttgagcaaccaacgacccttttgatcatgagattaat

SEQ ID NO: 169029 - DNA, 510 bp, Cannabis sativa
ctctctctctctctctcgatttctgcaaggggggagtaagggattttgagtcttcaattgttattccagaattctagttgaattctaaggttccaacccaaggtatcatttcctagctatcttctctatgttcttctcaagtctaagttgtatgttgatggtggaatggaaagattttgttactgattgtttaaggattgttctaaattgtattttgatgtttgattatgaggtttactgctggtttggtttaggttaggtaattattttgttgtttatgtcaaagtggggtttatgagctctagcttggggctctaatggtaggttgagtttttgtgtcaattgtggtgttctttttgttggttttgggctgttgaattgcatgtatgtggtgtggaaggttttgagaaatttgggttcgatttgaatcaaggggagcatttttggacagaaccggtcgaccggttctgggggagcattagaaccggtcgaccggttggtatccaggaa

SEQ ID NO: 169030 - DNA, 1051 bp, Cannabis sativa
aataatcgacggcataaggtctcgttatatttttggttaatactttccccctacgatattacctgaaatagcgccgatagaaaatttttccaaaaacaatgcgaaaagcccttaaaaattgcatctaaaggccaattttctagtagtgacaagttattaataagaagagttcttgatccttatgttattttcttgatcaaccaaagttaaaactaataaacatattattaatcaagtcttagcttcatcacatttaggtgaaaacaattcttgcttgaccaaattatgcaaataattatattattttgagcaattcaaagacgagaaagtaactttaaagaaataacttaaataaactaatttatcataattctaccaaaattttggcagcataaggactatcaatcggacgttcccaaaaaaattaagcatacagttaataacatataacaatctagaataatacaaaattaatttttacccatctaatcacagtacaattaattgcagaacctacttcaccaggaatagatatctaagatattcaaactccataaaataaagaattttgatgttttagtgattataccttttttttgaataaaattagctacttttgcgctctttaatcaacactaagaacctaatacctataaataattaaattaataatgttaaaacttccgtttaaaaacttatcaaattaaacaataatgtagattaaatttcaatctttacaactattatcaacttatatgtacataaatatatataaagtaaaaatacacatatatattaccgataatacgaagctctcggacgaccacttaataaggagaagttcgacgaaatttggcaatggctaaaaaatcaatttaatacccaaaaaaaaattaaaaacattacatttatatatttacataactaataactttattgaaaaaaataaaaataaataatcgaaacaaaatattttctataacaatttaataaaaaatttaaatgaaaatcaaagcaataccaaaataattaataaaaaccaaattttttt

SEQ ID NO: 169031 - DNA, 817 bp, Cannabis sativa
aaaccaacctatgtacaaccctagtggacggagccttaaatccaactaagccccaaatcccaaatcatacaaaataggcaccccaatccaatagcacgaacacgatagatgacctggaattttgtccctaatttatctcgttattgatcttcgtaatcgtcagcaaaatgaaatggatctactgcagctaggcatagtactcttgatctgaaatcgttgacaaaatgaaatacaagaaggacgccatgaaaaaagctaacgaagttcgtgcaagttgaatcgggggttcgtgactagatgcgaggagatgggtctggtttcgtggaacttttcgaaggcgtgacttgtgcgcctgggtttgttgcgcctgacttgggtgctcagtgtcaaggaggctccttcgttctaagctcttacctctccctacaagctttaatggcagatctagatgaagaatattggagagaaatggatatgagggaataaacagaagaaagaaaaagaaaatgagaaaaaaaaaagtttttttaaaaaaaaatattggaaaattctacaatacacccccttaaaatgggtgtactgatgcaactcctaactgtttcggtatctattataattttttagtctaaatttttcatagtcgtgtacgttatagttatttaagacatcctccaaaattttaaaaaattcagaaaaatttaacacgtcgaaaccagtgttcaaagaatctgttgcatgcgtgactttttttattttatacgcgtgtgaaatagacggtttaaacattgatttctacattataaattatttcgaattt

SEQ ID NO: 169032 - DNA, 533 bp, Cannabis sativa
taacaaaattaattacatttttttgtacatttatttgtgctaagaattaatttcaagttggttatattaaaaataaaattgtcaaaaattgagctcaaggtcttataccattttagaaaatacaaggttcatttgttatttaacaaaataaataatctagaaaatcgataacttttataaaatatagggtctaaaattgtattaatcctatttaaaaaattttaagtttaatttattatgtaaaagaaaaaaaaaatatttgcttttactgttaataaatatttggatatgctaaggaccaaattgatcaggtaggttttaacaaataaactagcaataaaaaagtattagttaattatttattatttttctaatataataaactttaagttgatatttattataaataaatgtaaaataaaaatatatctaatttgatcattaattacactttcagatcaggtttatattattatattttatttcgacaaaaattaaagtcagtatatatattattttgtactattttaaaa

SEQ ID NO: 169033 - DNA, 1052 bp, Cannabis sativa
agaaggagtggatgtctaatatggccactattaccttggctgtggctccgcccctgtgaacaacgtgcattatcattgggtttggccgtacggtaggacgtctaagaactagagagaaagggaaagaacgtgatatagcttgtggattggaggaatgagtttgtggcagagatgtaggagattgcatcgaattagaaaattcacttgatgttaagttggaataaatgaaactctaatttttgaaatggatttttttttttaattttttagaaggagtggatgtctaatatggtaaaaaaatattgtaaatattatattaagtagtttaattattaaaaaaaattataataaggatttaaatataaaaataaaattatttataaatattaattcttaaaaagaattttgtttaatatttaaattaaatttaaattaattagttataattgatttaattttgaaaaaataataatttattgatagtttattattatagattaaaacaaataaaataaaattaaatataacattcaatagttactcatatatattaaaaaaaaaaattatactgaatggtcagattttgttccttatgatgaactcaaccttccccattataaccttgaccaatctcttgctgctgtggtcaatcagttcctgtctactgaggatattggagctggatcctctgtttctactccctttagttgtactcttgaagggggtcctgttggtccttgttctaatcctcccacaccccttgaaggacatcctcattcccactcagttctcaatgcctctgctggtggtagtgaggctccttctcgtgttctctgtgacatgccaatctccactatgtcttctgtagccattactgcccatgaagaagccctgcatgctgctccttatgtggaccatatctctcggctgtctgagaaagctcaaggaaaagcagttgctggtgctaaaagggctgctttcactccccagtctgttgttgttggtgattcccttaggaatattctgaagcgtgccagagctgggcctaccat

SEQ ID NO: 169034 - DNA, 549 bp, Cannabis sativa
gtcagcacatgattttccaatgtactttcctttgttcacataggagttttgaacttggtacaaacttcaaatgaagagaatgtagagaacggtgcactatggggatcatgttcttctaatctaccttgtcaacaactactagttctaagtgtatcgcgatattcattacggggtcttcgttgttgctatgcaccatagtttcttggttcacaatccaacctcaagaaaggtacctcaataacttcattgactaccaagtcatctttgtcgtccatattcaaactataataggatcattgttgtagtagggagcattgaactccttaaactgaccaaatcctggcagttcttagtgttgatctatattcgtaggagcctcctcattcacactaaccacaacatttcttttagggacaaaagatccaaccacgctccgagggggaggattaaggagagtagactccaaatttccaactctttttaccttgctcaaaaataatgacataaattctgtatttgacattgttgccctcatctctaagaacgttc

SEQ ID NO: 169035 - DNA, 2594 bp, Cannabis sativa
  modified_base (796)..(799): a, c, t, g, unknown or other
  modified_base (2540)..(2552): a, c, t, g, unknown or other
aacaaattccgtgagaacaaaactgtaatgccgatgcaccagcaaagttggcaatgcaatacaaactcgacaagttgaatttggtaccagttgaattcttaagcgaaccaagtatatgtgaaaaggaagaagtcgagatgataaatacatccccaacatggatgacgcctatagtcaaatatctattcaacgaagaactttctacagacagactgttgtattcaatgtctcgctatacaatagttgaaggcaaattgtacaagagaggttattctatgcctctcttacggtgtgtgttacaagcagaagccaatgaaataatcaagaaaattcacgagggcttttgtggagaccatgtaggttggcaaagtctatcaaagaaaatcatccgtcaaggatactattggccaacaataaacaaagacacacatgaatttattaaaagatgcgacaaatgctagagattttcacatatacctcgcacaccaccaacagagttgagaatgatgacctcaccatatccatttacaatatggggcattgatctgattggggcattacctacaaagcgaggaggagcaaagtatgcagtggtggtagtcgaattcttcacaaaatggacagaggctgaacctcttatttccataacttgtaaaaaagttcttgattttgttatcaagaacatcatttgcagatttggaacaccaatcaagatagtatccgataacagaactcagtttgatggtgaattgttcactgaattctgtgagaggaataaaattattaaaagcttctnnnnagtatcgagacctcaagcaaacagacaagtagaagttgttaattaaacgttaaaagatactattaagaagaagttggacgctgttaaaggaagatgggtagacgagctatcacaagtgctttgggcccattaaaaatagagaaaatagcgacgggacacactctatcctcattggcattcgactcgaaagcaatgttactaataaaaattaacattgcgacccacagacgtgaattctatataaagaagaaaaccgagaacttctaaatctgtccttggacttacttgaagaaaggcgtaaagagtcgcaaataaccaatgcaacttatcaacatcgaatgacgaggtatttaacaaaagagtccgaaaaggctctttaaggctggagtttggtgttaaggcgtgtatttgcaaacacgcgagattcggctgctggagtgtttaatccaaattgagaaggtccttatgttattgaagctattgtgggaaccgatatttacaagttggcttggctctacgactcgctaataaaaaaccactggaatggtgaacatttacgaccttattactagtaaaatataatatgtgaatgtttatttatctttgtaataattaatgcttattataaataaagctaaagtttgttcaagtaattacaaagtgtatttactttaaaattaattcgggagaatatacatgtgtataataactagaatccacctagaagtatatactgtattgcaaacccaaaaagttaaatttttttctacaaggaaaaggataattgatcaaattgtctattgacaataaagtagcagttgtcaatgagattaacttataaaaccataataagctatatgtgagatgaatacttaacgactcgcattattcaggcatgtatcataaacgaggcacaaataagccttgaaaaataatacgtaagctgaaaaatgaatagacgatttaactattcataggagcaatcaaaatatattcaaaataatttctgaagtgaattattcaaaatattttaagtttgctctaaaatatatatttttatacaacgaattagaactgttcgcatataacaaggcaggttaatatctgctcacaaaaaacatggtagattgataactacttgtacatctcaaaaaaaaaaaaaagagatcaaagctacattcaactcaaagtatcttaagctaagtcgagaaaaaaatgttaaaattgtgaagagacgcaatagaaaaacatttgaaacctcaaaaagcaagatacgaggcataaagagaatatataaataaactatgttggacatccaacatagcaaaagtttttacaagtgccacaaagggcaaatattgtctcggcttggtggccattttactaaaagtataaactatatatataatgactaagtctacatagtaggagacttagttggttcttcttcttcttaaacctcctcctctgcattgccagcgtcctcttttttggtcttcttgcaatgtgctagcatctctcaagtcctgtcacccagaaaactaaaatccatctcgggattggcaaaccaagcttggtaaattgatcgcctggaaattttgttgaccctatttttggtgtcaactttagccttttcaagttttctttcagcctcggcttggatagccttatttgcatcctcgagttctcaaatcttcttcaaggcattttcaagatcggtctgttgggttttgtgccctannnnnnnnnnnnntcaatataatcagatttactttttaataaagatcagaaataa

SEQ ID NO: 169036 - DNA, 644 bp, Cannabis sativa
aaccatgaatgagataaagcgtctcagtgtgacgaaacagctaggccataaatgaagtggatgtgcgttttgtaccctaactaaaactctatttcaatgtaatcttgaatattcatttatcaataaagaaacagatttatttcatggttcacatgtttatttcatgatcatttgtttaatttataatttcatctataaatccttatcgcattgatattcatgattactgtgttgtctacacattggaaagtaatcaagattatgtaatttaataaagtcccacgatttatcaatacacaagagttccactgatatgaaaatcaacaatgtagtttgctcacaccttagataagtattatgcccttttcagggcattggtaaagtaagcttggattgtatgtattgttatcgttgtggcatgttcaacacacaagtatacgtaatcgtttgtattgctcacaaagattgaggtcaattccacaaggattgtagttaagtacgttaaaattaaactcttacgtcaatttggttgaataagatcatttaagagaaaatttaaactaggaaacaataagaatagtaaaaattaggaagcaagtaaattaataggcaaattaacaatgaataaaagttagggctttcga

SEQ ID NO: 169037 - DNA, 770 bp, Cannabis sativa
tggtcaaagatatgtattaggaagcaatatgtatttccagaataatggtatgagtaatggagatattgtacatctttatatatcatgatcttatctcgtttttaagtaatgtaaaactttagttgcacacccaacaattctcctctcaaacaaaggaccatttgacctcttctcaaacaattttccatccgtgcactccccaccttccatctccactctttgtatgatatttttcgatttgggcctaagccttcacagttttgttcttgtgcatattttcaaaagatatcataccaatggagaaaatgttcattctcagagcatctctaaccatgctatctaaacactctttagcaaaaatagtgagtaagacttgaaaaaatgagctccaaccatacaaaaaaatagctctctgtaatagagaatggatagggagctccctacttttttgttaaactttttaatagtattttaattaaaaattttccactattttataaaattattttatatttgacaaatataaattataaaatattatagaaataatcaaatactaactatagcagagaacataattagagcaacaacaataaaaataaatctctattttaactttttagctaaaaaaaatagggagtatcattctttttctagtcaatgtaggactttagttgcacacccaataatatgttattaaatctataactatcatactattcatattatatctatgttatattaaaggaggctatataacaaaaagagat

SEQ ID NO: 169038 - DNA, 893 bp, Cannabis sativa
aaaaaataaaaatgatgttgccgcctataaaacttcaatctattaattaaactagaatttcaatcctaaaaatctaacaattaatttagatgtatacttactttgaaaaataatatatagatgtaaattaacttcaaaaaagcatcataatcattctacattgtccaatctttccacaatcaaaagattaatattgcttgcaatatatataagtggttaatagtaataggaatggattaagagcattgctattaggtactagtggtgcttagcactttctcggcatgttacattgcgattggctaacgatactgcctaaaagctattatattaaattatatgagaccaaactaatagtgacattaacacatacaaaaataccatgtaccactagtgatctttaaacttttctcatggattaatcatgtaaataggttaattatatgatgtagtaattaatgaatgtaaattatgtcactcaggtgactaaggaatttttagattacgtatataatgacgtaaggagtttcataaaatgaatcacgtgaaatacatattcttttcaacaacagacaaccatgtaaggataaccagtccaatattccatgtggtaaattataataatggtgagaaaaaacaaagttaaaatatacaaattagtaataaagccactaattaagactgttcatggattgatgatttcatcccaattttttatttttttctgatccaaattagtattacgaattttaaaatttagaaccaaactgaaccaatctaaaacctttgtgtagttactttctattgtggatattgtcccacgtggaataaatggtagataagtgagccatatataagaagatgggctactctactcattgtcaattggcttt

SEQ ID NO: 169039 - DNA, 553 bp, Cannabis sativa
tatatgatagatatacttaattataaatttaatattattttaaaaagtaagcctataatattaatgcctaacctattgcctgttcttattctttccaagaagcttccatggccaatcagtgaatagtaatactatttaataatactatttgaagttcacgttagtaaatagtaatactatttttttttttaataatattcaattttcaaataaaagctcagcagctgcctgcctattcatcttcacttcagttcagtggactggaactggactcgtcgtcaccgacttaccctcacccacactagtcgactcgagtcgttgtcacccacagccagtcacgaactcacccaccctacccttaaactattaccacgcacggtaggcacacacacttcttcttctctaagatcagtaacggcgactggttctcttctccggcggagtcgcatcccagagcagtcggctcagttcattttagcccattaattaaacattcaggctcaacctaataggacccgaacccgactacacccaacccgaaaaagcccgaccc

SEQ ID NO: 169040 - DNA, 661 bp, Cannabis sativa
  modified_base (546)..(567): a, c, t, g, unknown or other
gcccaagttgacatcctcaactagtgttttagtttctaggtctgtcttagtgaaaagtgcccaaaacttgcattaggacatcaattagacatactgcagacatatttgaggcattataatcatattcagagcaagttgacttttgagcacccggggccccagggccccgaggccttgagcatccagtgcccaggttgacaatctttcaatcttggcctaagtgtttgattgaaggtccaaattttgaattgaatccctcttcataaaaaatttgtaaacaggtcctttcgtaggaaaaacaaattcctgggcataaataataacagggcctaaagccaaggttgacacttggggctggccctacgcccagtatgggaacgtgccaccctaggccacaaaaaatgagtttttccaaaattctttcaagcatcatctctttcttaaaaaaaatcttgagattaaactattttcaaggaccaattagaatttctaaaagggcaaaaataaatcctagcgccaatttgacattgttgggttttgtgcccnnnnnnnnnnnnnnnnnnnnnnaatcaaatttactaattaataaagtttagaaatcatattttatattgcatggttcacatgatttatttcatgtttataaattctattaggtcca

SEQ ID NO: 169041 - DNA, 961 bp, Cannabis sativa
aaccatgtcaatatagacaagacatattatttgttttttttccttgacctctttctaacaaatgattgatttaaaaaaaagaaaaagaaaaagacccataaatatacttaattacatatatattcaaaataaatgatttaggtaataaatcacttgatttggtaaataaagttaataattgcaaacttaaatttataatattattttttttttttttgagataaaatttataacattatttgttaaagctatcacgattattaaaattatatgcctaaataaattatgtaattaattactaaattaaaaatttataattttaattaataatcaaataacatataaataccatatatatgtttaaatatagaatttatagaaagtaaatgttaacggggaaaataaataaataaacaaatgttttgttttttgacaatcaaatatttttaagttataattgtgcattagcgtccaaatgttacaggccgattcctctgcttcaatttttgtaggaattcgtgtttaacatatttttgtatttaagtatgattttttttttcttttaatttaacaccccctatctcccatttaacccttttattatattcaaaaactcacttgttagcaagacgagtagaacacctcaacatgataaaattcaacggccaagatcttcccaacgtgttgcccttttcattccacttctcacctttagcatgcattagctagacggtctaattcaatataatactatacaatacaatacgatgtaataccagaaacataaatttataacttgtgctttacatgctacacacgtcacgcgtatataattggaaaatttgattatttatgcttacattttgaaattccgtattttaatattttcagtttaattatttaattaagtgattaattaaatgcaaaataatgaaaatggtactgaaaacagtttttccgt

SEQ ID NO: 169042 - DNA, 552 bp, Cannabis sativa
taaattataaaatattaaacgagttcccgtcaagtcaaggagtatcatcctcgttcccgactcgtttaacattccctacagggccccatccacatggaagaaatgtgtatccctaactatttgtacctaaaagtaatgctaaattaaaattgtatagtgtgatctttatttattttaaggatatttgcgaagaaactcttttaatatttgcatttgttagctttaataaaaagaatagcgacaatagtcttttccgtatttttgttgaacctgttagttgtttgacgttaagtgatattaacgtgtaatttaaaaaaaaaattaaatagtttatagtgtcaaaaataaagtttaaataattatttatcacaagtgtaagaaaaataatcatgtgtgtaatcaaatatttaactcttattttcggcaccctaaactatttaaaattttctgaatatttgtaagacattccaaataactaacatgtacatgtataatgaaaaaataactacaatgttctcatgaataccaaaataaataaaaaaaatctacaat

SEQ ID NO: 169043 - DNA, 807 bp, Cannabis sativa
tctctctctctctctcttatgttcaggtggatggcgtttgacggagcttcttatacggcgggattctgggttgacagagcttccaacttcatgttcaaggttggggctttgtgttcacaggctttggatctgaactaattatttttaggaccaattgtttttaggtttattttgattctaatataaattgcgtatgatctcaaattttatttgtctgatagacactgatttaggggttttgtatttaggttatactattatttgttagtatgtacttattttgtaattttagtaattaatttgtaatttttagttcaaaattatgcgtgtatatctttagcaatttatatcaaatttatattagttatttaaagcttataggtcatatatttaattgtattaaaatgcaattaataaagtattattaatttttacaatatataaaatctgaattaaaaaagattgaatatatattttttttaaaaaaaaaaattaatatatatgtgtttaaaataataataaaaataataaaaaattaaaataaaaaatatatagtgaggcattttttgagttgctgttactttttttaaatttgaattaaaagaaataaatattattttttttaataaaaaaattaaaaataataataaagaataaaaaaaaaaagaaaaaaaagggatatagtgacactttttgtgtgttgctgttgctttttcagtcaaataaaacttgactctaaacgtctacagtgacgcgtagagagtgactgtaaaagggttcagtgacacgtgtgaagtgtcactaaaa

SEQ ID NO: 169044 - DNA, 660 bp, Cannabis sativa
tactcgtgagctcgaacggcttgtatcacctgggatcgccaatatgggtagttttctcggtcgagacggattgtaattggagcgagcaacggtacgactggggcttgaaccataggcacgacaggagctgggatttcaacaggcggagcttgaggaagaggagcatcgacgccttgaccagcaacgtgttctcggcgagcttgactgacagaggaatcggattgggagccagtagaagccatcggctctgataccaagacaaaaaataaaagaaagaaaaacttgaaagaagaagaacgagaagaaaagaatagctctgtatttcctctgtattgaatattcttgtgtgtgttacaattgatacagtacctgtgcttttatatacaaaaagtaatgagaaaatcttaacagaaaaatattccttattgctaatatagtgacacgtatattaaggtattccaaaggataaggaatagaattgttctagagaaatctaaatgacagcaaggcaggaggagaatattctgggtatcaacattttatttttcaacaatttagattgagtaatcaactacggtaatcagcctattagtttccccaaattaataatgcaaactgatatttattactttttttttatgaaaattatatatatatata

SEQ ID NO: 169045 - DNA, 702 bp, Cannabis sativa
  modified_base (675)..(676): a, c, t, g, unknown or other
gaaatggttaagaaaatgctctactacttggttataatcatcaataatcctcccattattctcaaaggtagtgattttattctctaatttttttttcttcaaaaaggagtgaaaatacctggtgttatcgtcaccattctgcaaccaagaaaccttactccgttgtcgaagaaaaacagtgtattgtttcaaggcatcaacataatcaagacttttcactttctcttcttgaagcaggttgctgttgctcgggtctctggccaaactatcctgagctatgataaaattagctttgcattgattaaaccgcaactcaatatctcctacctcctccctgctgaacttcttcaaagtatgcttcaaccttagtaagttcttcactaaaccgacatcattattagtttgtgaaggtttgaaccaacagcttagaactctctctctgaaattgctatgtaatgcccactgattgcagtatctgaagggtctcacacccacactaccaactctattatttttgacaatgcaatagctatgatctgagatgcactcccatttaaagcaagcttcagtattggggaagttatccatccaatcttcattaataagtactcgatcaagatttgaaaaaattttagaacctgcatcatgcttgctatgttgggttttatgccctanntaaaactcatttcaatgtaatcagat

SEQ ID NO: 169046 - DNA, 909 bp, Cannabis sativa
taagctgaatatgcaaaatcagatgctccaaagttgacaccatcaaaaacaaaagccaatgcattgatgggttgagtagctgcaacaaactgattttcaaatgaaagagattgtattagtttcattgttaccatttagagagtgaaaaggattagtagtatttacgagcattattattgggcaccagtagtgctcagcactttttataggtagcgtcccacgattagttagcgatattcccttaaagtttttcttaagttatatgggacccaatacgtaattacactaatagcaatatgatattgaagagatgaaaatactaggctcaagtagtgcctttaagcaattcttttatattctttgattgaagagatatgagactcttttagctagggggactagaggatcaagctatctttttttaatgttgtggagaaaatttcttccatgaaaattattattgtgtttatataattttaactttaataattattagtgagaatagtaaatccatatattcatttttgtcttctttcttttattttctctctacttttggatgtatagattttggtggccccatccttattttgtctcatcatttttctcttccatcaattttcttcttataccaaacacactcatatttaccttctccctatgaacattgttctacatagaataaatagtaaaatattgagtcatatataagaacatatattaatcctatccgatcagcacttatacagatagtgatcgtgtccactctgatacgattcaagaatggtgagcaaaaaataaccaccatcttaaagaacaatattgtggacattgtcttacgtggaataaataataaaatattgtgtcatatataaaaaaaaaaaaaaaaaaatggattttaagataaaa

SEQ ID NO: 169047 - DNA, 700 bp, Cannabis sativa
aaaaaaaaaaaaaaaaacccaaacgaaattggtttcgaagctaaaaattagagttttccccatgttggaaaaaccggtcaaccagttcactatgcctgtgaaactggttaaccggtttccctgctgcaaaaaagggaaaccctggtttttgctctaaaacccaaccaattctcctccaaacctgcctaaacctttcaaaacagtctcgtaccataaaaacaatatattgaagtcatcaattcacaacagttcattagtttaagcaaattgccatagttgagtagaattttagctcaaaaacccttaattcctctaacacaaaactaacagctctatttctaatcaaatcaagcttaaacaaactttaaatcaaacttagaaacacattttaacctcactttaacatttcggtcaatctctgaaagctgagagcatatacaaaatattatatcatttgtactctataaactcatcaaatcctgataataagatggactcgtagaccgtgaagaattaaatttaaaccataatgtaaaaatctttttgtttattatttattattgttataactattatccttctaaaattatatttataaagtttaggctcatttattggttaacgaaaatcggcgttaacagttactaaacaaatttaactataaatattaattttaaaattattaagctattagattatc

SEQ ID NO: 169048 - DNA, 741 bp, Cannabis sativa
ctaagttaatcacttaattctttctaaaaatacttttagcatttatcaaccttaaattaataaaaattcaaattaataccactaaaaacaaaataaaaatgaccatatggccctttcaaaagaaaacttaaactattaaaatctaggggtgttttggtaattttaactaacccaccaaatggacaacccaacagtttaaactattttgaaaataaaaatccaattcaattcatcttttattgtcgtgacatttctaacgtctctgccaaattccacagtcatcgggcccgaaaatattttatttcaaaaatagcgtccgcaatacccacatattccaataaaatcttcataattaataaattacgatttattcaatcatttaataaattcacactaactaatctaagtaagatcataatcttacttcattaccaaaataattacatattaaataaaatatgtccaattaaataccattttattttctgggatattacaactatcccctccttatagaaatttcgtccttgaaatttactagaaaagctggggatactgttcctgcatcttcgactctaactcccaagtcgcttcttcaatcttgttgttccgccatagcactttaactagcggtataatcttgttccgcaatactttcttcttcctatctaggacctgagatggttattcttcatatgacaggtcgatttgaagctcgatatctgttggaatttattttac

SEQ ID NO: 169049 - DNA, 1572 bp, Cannabis sativa
aatttgatttaaaaaaaaaataacaaaacaatttgtccgttagttgaaaacaacaaagacataactaaatcaaattcttctttggatccttggaggagcctcatcatcactatcaacaaaatctattttttttcatgcgagcatacttgaagaataacacaactagcctatcacggtgtttttcagcatcaaatatcgaaggaataagttttatatcaatgaagtattcagcaaacgataccacaaaacaaccgtagttactggaaaacaacatcaaaaaaatcacataacagaaaatacctaaaaaataacaaaacaacactaacaaaaaaaactttaaataacttcagtgattattgaggtgaagcatcaaccttaacaacattaaaaggctccaaagaaaccaatttgttatcctttttaaactcatcaaacaaagaaaaaaaatacggcaatagcaccgaaaatggccgacaagctttggtaacaacactatctttcatagctatcgacaaagagttgtacatgtacaaacgccttttctcaacatttgaatgagcatgaatccaatgtgattttgactccatatggataataaacaaaatatgattgcacaaataccaaagagcaccatacaaaatatttttacctctaatataatcagtaatggcatgttgaacagttatcaaataaggatcttttttctttgatgcaacattacttaaacaacttatagaatcagttaaacattggtcaggatatataagcttatgaaactatatcttggatgcaacatcttctacacgaaaacgaaacagtagaactatcttatccttgcccttcaagtaaaccttatccttgtcattgctaaaataaaaaaaaatgaaaataacaaacaaaaaatatttctaaaaataaagaaacatgaaacaaaaaaaaaagattaaacaaaatcacatactggtctttctttgttcgacgatctttacctagccataagtcaaaatcattctcgtctctatgttcaacatcttctccaattttatcatcaagaggacacaaaccaggtacatacttaacaactccataaccagatctatctttagaacttgaaatcgaagagtcaaactccataaagggagacgtcaaagctactagtttcctagatttcctcttttcaacaacaaaagtttcctcaattgcaataggatcatcttctacaacttgaatattagaatctacacaaacacctgttgaaaccatctatatataaagaaatatgtataaaaatagaaagttagtcattaaataaacaacttttgagctactaaaaatagaataataaccataccacaacaccaacaacaggaggctccttaatctcaatatcttcagtatctggaacttggttaccagaatcaccaccaatctcacctgaagtcatctgtataattttttatttataaaaaaattagaagaagcctaaaaattcacaaccataaaacagccagaaattaaaaaacaaacaacattaccataatctcaacaactttcacacccgactgaacagta

SEQ ID NO: 169050 - DNA, 765 bp, Cannabis sativa
gaagacaagggtgatcctcgcacagatgttgaagcaggtcctagtcaattcggtgtttgctttcccaaaactcactagggtttatctacaaaagacaacacacgagatgagtgtttggccgggatattgaacaataaataggcaaatatgccgacctggaatactcaacagattaaaagaatgaaaatattcaagaataagtcaaacccaaaagtttgaaatttttgggtttagggctaaaattcacgaagctttgaataagcaaagtgaaagacggacaatgagcgatcaaaggccaaagtcatgaaccgtgaagttttagagattattaaaaagaaaattgcgaagtcttaaacctagattttcgatctatgttctactgcaaagtcaagaacacatgtatgaaaccctgaaattaaacatgcaaagtaaaaagaggaagaaattgaaaacttactcactgttcaacatcggagttcagaccaaatgaagctcctcggatgcttttggtagaagtctcacgacagacttgaagtagaaaagtggaaaaaggcaatcatttcaaatgtcatagacgtatcagttccccccaaaagaaaatattgggaatcaaatataaccaagtgtaaccgtcaaacgtggtgagagaaagccgggtttcgaggcattaattgagttagagcattaattggccgaaaactgaagagatgcctggtcagcctcacatcgagtcgcaaacacacgcgcctaacacgtgtcacccat

SEQ ID NO: 169051 - DNA, 592 bp, Cannabis sativa
atattgttagccaattgtatagcatctcagcatcatttcaaaataatattaaatactactagtaaccaataataatgttttatatatgtatataaataatattttactaccccaaattaaatttaagtatttatgtggtaaataatatatttacatatatatttttttgttggactggccacgcgccactaccaaccatgcaatggcatcattgacaaaatgaacacggattggaaatttgaacaaaaatactgttatttagtggcactttggtatggtgttgggaaacaagccgagtaaaaagtgagtggaaatttcaaagtaagaatgctcattgaaacttaacaagagtcaaaggatatacttactatatactcatcttcacttctccacgactacactcatcttcatcttcaagtgtcaatatgaaaatcgtcttcttctctctcctattatcactgttaatatttttcattttcaatttcgataattactcagttgaagcagcatcagacccttactacgaatcttgcatagtccccaaaatttgtggaaaccaaacaataagcttccctttcttcattcaaggcca

SEQ ID NO: 169052 - DNA, 846 bp, Cannabis sativa
tagacttatgtctaaaaacaccacatatacttagttaaataatcataaattaaaatgcaaaagtgaaggataagcaaacacaataaccagctttaatactttaaaacccaatgtatagatttggaggatagacatctccattataatattttgatgtcatttttttatattatcttgggtttaacacattaagcatctctagtattattcacataatctcatcagtatacagagtttaagttcatcggagacattatacagaatcgagagcttctaaccaaacaatatgctactcaatttgtagattgtttaacaaaaaaaacttactaacattattttatgaaaaaaactattcttggcagtcttgaataatcaagggcttttttctataataggcactttaggccaaaattttatatgtttagcttcgtaagggaagttaaacaaaaaaaaaaaaatccaaacttttttttttaaaaaaaaagtatcgactgaacctttttcctccttcttcattcccagttgcttatttcctctattttaattctcaactaagacacgatttaagctccaaaaataatcgtccaagttatgtgataccaacaccgcaatgtagatctcaacaacaaaacaatctaatcctgaaaaatccaaaatcaaaaggtaaactagaacccaaaagcaataattcgaattatattatgcagataatttgataacaacacaaacagagggcaatcgaagcttacccaaaaataacttggaagaatctggcaaaaaaatgcaaggtaccaatatttttagtgtttttcttcataattaggttgttatttagtgtttgtcaat

SEQ ID NO: 169053 - DNA, 775 bp, Cannabis sativa
cctccccacacttacccagcctgtgcttaagctcttttgcattagaaagctgcttgtctttttgccacaccgaatgtacaatctgtgtgcactcatcctcttcagcccaagcgctttcaaaatgaaatcgagttcgccatctaatcgcattattcgtctttagattgggatcggactccatgaggaggagagggcaatgatccgaattaatgcgatctaaatggtgaactttcattaatggaaacatatcgaaccaatctgaattcccacacactcggtccagcctttcaaaaataaggtcatttttcctaccattacaccaagtataatcacttccttcatagctcacttcccgcaattgacaactatcgagagcctttctgaaattgtggattaggtaattcggtttaggaaggcctccctttttctctctttgatgcaggatctcattaaagtctccacccacaatccaaggccccgagtacattcgacaaattcttttcaagagcttccacgaattaactcgttaacttggatctgggtcgccatagaaaccagtgaatctccaccattgaccatgatcgattctaacgaaagaatcaatatggaatggagagaaagattgcacatgggtttcaacatccaaaccccaaagcaacatgagacccccacttttgccccgagcttcaacggtaaaacagcccacaaaacccagcttgactctcaaagcttcagcccttacagtaccaacctttgattcagaaataaagatcat

SEQ ID NO: 169054 - DNA, 587 bp, Cannabis sativa
agtttgaaatgaaagacttgggacttgtgagggaaattttaggtatttgggttctaagagatagaaaggaaggaagaatgatactcactcagagaagttacattaccaaaatggttaagaagtttagttttttgatactgctaaagccactgcggtaccaatggctggacattttaagctctcaaatgaaaattgtcctaaaactgaacctagaagaaaggaaatggagagggttccctatgctgttgcaataagattttaatgtacataatggtcagcacaagaccagacattgcacactctttgagtgtgctgagcaggtacatgtctaatccagggcctgagtattggaaggccttgagatgggttctgagatacttgaaagggacatcaagatgtggcctaaactatgagagggatccaagaaaagtttccctaactggttatgtagatgatgattattctaatagagataacagaaggtccactactgtctactcactacaaaaaatgtacagttatatttagagacaacttttagtcacaatataattttttttgtgactaaatgtgactttaagtcacaa

SEQ ID NO: 169055 - DNA, 697 bp, Cannabis sativa
acatggctccccgccacatggttctgtgccgccatgttcagatcatcacggcatttcatcacaatctccatctctttcgaaatgagactcttataaatgacaattgaactaatacacaaagctgcttgcctgatcaggttccttgttggtcagatactttagaacacttaaaaattttaggggtggggggtttttcttttttcaagggcaagtgacgttaataactgatccatatttatatatttttttatatcttaattttcttttgcttatttcgtttatctgatgaattaataatattgctagaaaaacttaattatatcagtttaattaatttctatattaattatgatagatcattcagaaagtaattccaaaagttgcttatatatagaataatagtattttttttttttgaaaaatgaaataaatgaccggttactcgcgctgaaaatacaacttattgggattagtattggctttgtatattaaatatccttgtaacttctgatttaagccaaattgtcattacctttaattagtttcttatctaatgatacaagtactggatatttattgaaaattctaggatgaacttctttaaaatggatacattgatacacttttatcattttagcacccgaaataattttttagtcaaattttttttaattgtcatgtacgttatagttattta

SEQ ID NO: 169056 - DNA, 561 bp, Cannabis sativa
gagaatccttgaaaatgagagcacgcaaccatttttacattgtaatgattaaacttatattcatctttaattatcattattattattattactaccttaaatgggtgaagaagtcccatgcagatttggactctacgcctctgcccatctgatactttatgcattttccatttcaggtcaatatcaagtagctcaatcaatttgtctcttctaacaggatcactcccttcaactgtcaatttatttagattaaaaaggaacagagttaaatcattaaatgggttattttagaaaagctggctaatcacaaagggttgtcttatttattcattcataatctcaattttttgaaaagggtttagcatcaaattcagaaaagagaaagaaattaattatagaaagcaacaaattaacttacctccaaatatcatatgctcagcagagaagtctccttggagtggaatttctccctgaaagagtaaagaaacaactttaactataatgaacgtatgtgtattaagactaaatcattttaaagaataaacctatgtaattaaagtg

SEQ ID NO: 169057 - DNA, 1273 bp, Cannabis sativa
acaactaaaacaaatttacgtaagaataaccaaacaacacagatagaaaaatatgaatcaagaagacgagactacaaatatagaaaagaaaagcattaaaagaagggagtgaattacttactgtcttgctgagaatttctgagcaacagaggactttgcaagtgaaaatttgaagattgagaagctgggtccttgcgatttctagagatggaggatcggttagatgtaatacgcaagaaaagtgtaagggacaaagagggcatgcaaggttgagaaaggataatcaaaaaaaaatcggtagaaaggcttgaaggtttgaaatgcaaaaatggcaaaacgaactttcacttccaattttttaccctattactaatccccaatcgatcaaaagaaagttgatctaacagatgggaacattgcaaatgagaacggtcagagcattaaatgctaatgatgtgctcgaagttctgaaccgccaaaaactcaaggcatgcaatttttcaaaatatgggttaatacgattataccatagtaattattgaaaaagccctttttaattaaaaagtattttttaggaggtaattgttatacccaaaattcagctttataccagaggctaacgtgtatcctacagaaggaatatgaatcaaccctgataatataataatgatgtattattaaatgcaattaaaataactcgttcctattaaatataagtttaatagataatgttcaaactcattggcaacttagtcttatgcgagacaagaataaataactattaaactggtattgagacatatatctacctcgagataaactcatttacatacgcaacaagaggatactctcctgtacaagcagattaaatgtagcaacacacaactacctcgcgttacacatatcgaggagatcacctcacattactaatgccaattaagggaacaacgagacacaaccttctaagttagcataaccgtctaatagataaaaataaagaacagttgggtagttattagatattatcccatgtgtgattaaatgaaacgtggggattattcacgtttcatgaacaattatatttgtaccaatcccaaaaataataattgtctacctatattcctataaataggggcagaatctatgggaaaagagacagcaaaattgagagagaaagtattatcattcaaatattgatattgtattctgtactcaaaaaatatccctaatagtaaggactcgtggagtatgtagattttaactaaaaaatcac

SEQ ID NO: 169058 - DNA, 1429 bp, Cannabis sativa
  modified_base (758)..(764): a, c, t, g, unknown or other
tataaataaataaagtaattttgactacattaacacggttttttggtcaagaaatcaaattaaaatgaataaaatatgaataaaaatttccttaaaaaacagaggataaaatcaaatattctataaaaaaaaaaactcatatttaattcacaataagtcaaaagagtataaaatcagattttgaaaatcttttcacacaaaaaaatggaaactatatttttgaaattaaataataaacatataaagcacccatcaaaaaaaaaaattaataataataaacatataaagccaacttcgaaaatattacaaacattatttttgtttattttattaaatatggcaataaacttttttacaatactcaataataatgaaacaacattgatattaggtacaataataaaactaattaataatattctcttagaatgtatttgttataagttttaatttgcatgacaatgacaatgtaggtaagaaaattacatgttgagaatgtagaactaatgtataaaagtttttatattacccactaaggtggcgtttggttataggtaatgaaatggaatgaaaaaaaaaattattttattattttattattttttttgtttagttatattttaaagtattggaatgacattttaatggaatactcttttctctattttagtggaatgactattctattttaaaaaagaaggaaagataattccaatgtaacaaaagaaaaaaattaatgatttttttattaatttttnnnnnnnattttaaattttattccattttattcttatttttattcctattcttatattttccttcattccaatcaaacacaacctaaaagtgttctctcaatatttcttcctataaaaaagatcgttattactttaagttatatgttgtagcatttccgatttatccattaattttttaaattaagatttaagaataaatgagtgggtcttacgttgtattttttatcgccgttacatttgatatctggtacttgtctttttccttgtttgagagtgcatcactttacgtatattattattattaaaaaacctttaaaatttaaaatgagtttacaatgtaaattgttataaaaaaataaataaatagaatttatctctttaaactaaatttttttttattgtttttcaaaatttttcgataaattatgagaatatatatttttaaagttaatatttatatatttaatggcaataaattatattttaaatagcttcaagttattaaataaatcattatactgtaactatacttataacttatagtaaaatctgttagaaataattgggggtcacaactgtatatataaaatgtgtgttgggtcatcaaataaataagtcaaatttatgtggtctattttggaataaagtttatgacttaagggcatgattgt

SEQ ID NO: 169059 - DNA, 857 bp, Cannabis sativa
tttttttttttttttttaaaaggtgcaaatttttttttttggctattttcttagttaagtgtagctacaaagtttaaaggagattcaaaaatattttagggataattttaaaaaaatacaaaaagaacaaaaaattagaaatacagtttgtacagagtttcaatacttttacgggtttttaaattttatttacataaaatacggtatggtatatttttatgttatattcttgttattttgttgttgatgttttactatttgtatattatttttttgttgttttgatgttaaaatacagtaaaaatattaaaaatctttgcacctaaacatataaaaattttacaaaaattaatattctatgtaattattccaatatttaatatatttttattactttttccttctatatcttcacatagttaatgttttattattttaattaaaaaagttttttaaaaatataatattaaaatgatgtagaaaaaatatagagaaattgatgtatgatgtaatgtaagagtttaagataaatagaaaaagtatagttttgatgaagtattttaaaagatagcggcagagaaattaatgaaaatgttagcactcataacaacttctctaaaatagaaaaactttacattttttaaaaaatcataccaaaaatatactacagcagatgctctaagagcatctccaatattgaagatgcaaataagtgatttaaatatataaaatatagttcactttgttaaaagcttactccaatagtgtactaaattataatacaaaaatctcacataatcaaaagtgatctaaatttgcatcacaatataacatgatgcaaaatttgtatcaaaata

SEQ ID NO: 169060 - DNA, 585 bp, Cannabis sativa
tttttttattgtcactaaatgttacttttcatcaaaaatttattttttttattgaaaaaacatttagtaaaaaatatgattttatggctaaaaaagaatattgttattaattcataattttattttagtgattattaagagtgtggaagtgtggtggagaaagtaagatacggtaaaaatatataataatttgaaacttaagtgataagtggttgaataactcattaattgttattgaatgccaataacacttagcatcttttatcgatgacaccctagtacgattggcgagcgatatttcgaaaatttattttttaaagtgatatgacacccgatacttaattacaccaataacagtatgacatcaatgtgctaggcaacaatgtattttagcaattctcttaatcttatatatagtattaactttttttcacatgtaaaattaagagtgcatttggtaacactttttgaatcagttttttatttttaaagttaaaaaagtaaaaatattttctaaaatcatgctataaaactatatttacttttgaattttttttaattaagaatcttctttttttttttttt

SEQ ID NO: 169061 - DNA, 507 bp, Cannabis sativa
cattctaagtttattagaataaataaacttagggaatatttttagctagaataaatatttagtatgtaattattaaatttatttcctattttatactaaaatggtactttggtaaacttcacgtaaaaagtgtttgtatgagtacagattttatgttaaaaatattcatatgagtacatttaatgtgtcggtatgaattatggtaataaaaaattatacttggtgtgccgtgcaagtagaattggcttatgtattgtgtatttttacgtaagttttattgtgagtttagagattcatacttgtacttattttgagagtgttgttgtggtattgaatgatttggattttttgaagtagtgtaaaaggtgttcttagcaactaaggtaagaagagtggacatctgtgggttagatgttcatgtgcttatgagattttgtattatggattgttgtttatgttagtattgttagcatgtgatagtgataaggcttttgactgcttgtgtga

SEQ ID NO: 169062 - DNA, 747 bp, Cannabis sativa
tgtgtatgcaaggttgacagcttgacattacggagtaaactcgtttttctttccctatcctaggatgtgaggtctcgagatcttttggtgctggtggcggaggatgtctcataagcaatgggactctccgtctttccgacactccttctcttgtggttgtaatcaaggcaccctgtcacgttgtttgtctgtcgagacttcttcatggtgattaccttcccgcctcgcttgagaccctctcctacttgagccttcactccttgcttgaggtttgcccatgttcacatcctcctccattgcttgaggtatgtggtcattcacaccctcttctccaacgacatgtggtggtgggtcttgcactgaagcgatcaactgattggcgttgaggcaaatctcaatgtcttgaagatggtgagagcgtctaggaattttatgatgattttatgcaaagaaacaacttgactcgagcttgttgttcccacagacggtgctaaactgttgatggtgagaactcgtcaactagctttgtggccaaaaaatctaagtgaaactcagaaataagatgatgaggaagatgaaaggaaatatatatttttatggataagagatttctttctattgtattcaatatctgaggtacaccataggatttccaacccctctcacatttaagaatgaggtatttataagtcctaatggcctgagttacatagtggtcctaaatagataagttgttgcttttgggct

SEQ ID NO: 169063 - DNA, 2043 bp, Cannabis sativa
  modified_base (312)..(321): a, c, t, g, unknown or other
  modified_base (813)..(816): a, c, t, g, unknown or other
  modified_base (1082)..(1084): a, c, t, g, unknown or other
aaaaatagggtcaatagaattgctaggcggtctatcaagccttgttagccaatctcgagatggatttcagctttttggggaaagcagccgaagagatgcttgcatactgcaagtagaccaagaaagaggagactgaagatgcagacgaggttgaagaagatcaagaagaaccaactaaatcccctactatgtaggcttggtctttttatctctttttttatttatttaggaaaatggccctttggccgagacaatggttgcccctagtgccattatttttgtaagaaattttgcattgttggatggccaacnnnnnnnnnnatgcatttatctttacttttaatgcctcgtagcttatgtttgaattgaatatgtatgtttgttgcattttatttcacaatttaaacatttatattctgatccacttattgacactctaggaagtatcccattgttcctattttttttcctttaatatgtttaagtaaatattaatatactatatatatgctgagcagttataatctgcgtgtagttttaatctgtgagcagttcaattctgccctgttatatgtgagtactttacaatctgccatgtctaaacatttatcttttagagcaaacataaaaaatgttttgaataattcacctctgaaactattttgtatatcttttgattgctcatatgaatagctagatcatctattcatattttagctttagtattatttcaagtattcttgtcctcgttataatacatgccaaatcaatgtgagtcattaaaacattcaactcgcatatagctttatgttnnnntatgagttgatctcatttacaactgctattttgatttttctttttctaaagaaaaggtttttcaattttttgattttatattgtccatagacaattttaatcaactatccttacctttgtagatgtctttttttaattttctcggtttgcaacataatatttatttctagatgaactttagttaatatacacatatacatgcccctcaagtaattctaaagaatataaactttgtaattacttgaacaaactttaactttattaannntaagaatttacatattacagagataaatacgacatttatattttgcatttactggtaataaggccgcaaatattaactattccagtggttctttattagcgagccattaagctgagctaatttataaaccctggttcccactactactttggtaacatagggaccttcccagttttggttaagcactccagcagatggatctcatgtgcttgtaaataatcgtcttaacacaaaatctccaacattaaagattcttttcttaactcttttgttaaagtatctcgtgattcgatgttgataggctgcattagttatttgtgactcattacttctttcttcaagtaagtccaaggacaggttcacaagctcttggttttctacttgattatagaattcaggcctatgggtcgcaatattaacttctactggtagcatgcctccaagccaaatgctaacgagaatggagtgtgtcccgttgttgttttctctgttattctgtgagcccaaagtacttgtggtagttcatctacccatcttccttttgcagcatccaaattcttcttaatagcaacttttgaggttttgttaaaagcttccacttgtctgtttgcttgtggtcttgatactaacgagaagcttttgataattttattcctttcacagaattcaataaactgtttgccgtcaaattgagtcccgttatgagatactattttgattggtattccaaatctacaaataatgttcttgacaacaaaatcgagaacttttttgcaagttatggaaactagaggtgcaacctctgttcactttgtaaagaagtcaactgctactacaatgtactttgctcctccttgccttgtgggtaatgccccaattagttaaattccttatattgcaaatgggtatggtgaggtcatcattctcaattttgttggtggtacgcgaggtatatgtga

SEQ ID NO: 169064 - DNA, 661 bp, Cannabis sativa
acgacagtaacccagacctaaaatcaatttttcagccctaaactcctctaacttcagaccccttcccttgatttcttcctaaattaactctccaaacgtacttgtttttatattcaggtaaaataaatcatttttttttatgtcagaatgttaatattttttctttttttctttttcagttccaactgtttaagcttttataaagcttgaggatgagaccatcacaccaagcttatgatctcattagtatttacacatttttccctttttaggttttttcttttcttttctttaatttgtgattttttttcaattttcttttttttctgtttatttgttggcggagatcctcaaacaaatagcacatgtgttattttatttcatcataatactttataaaatttgtgtaatttttaaagaaatgcatgatatatttaataggaaatgagaatattatttgtctttattaaatgtgttaattattttatgttatctgtgaagactcggtttaaccgagtcaaactttatatataataatattaaataaataataaaatatatatatgtatataaaaaaaaacaataaagctgaacccatcgtcgtcccactctctctatatatctctctttaattttctctctcttcaaaacacataaaaag

SEQ ID NO: 169065 - DNA, 640 bp, Cannabis sativa
gaattattttgtggcaaaaagatggatccaatgcctaggttgataatggtgcagggcctagcccccatgttgacattttgttaacctgggcgatttctaatcagtttcttgaaaagtattccatgcatcttttcaatttttagaaataacaaacatataagtgatctcaaggagctaacgagatcatctaagggtgggccaagcactccggttgaagtgaaacctggttcgcatgttttcgctcttcaaataaaaatttttccccatggattcttcatattttggtgaaaactagggtgggagacctcgttcgcaatctcgaatgccctataactatcaaaatgagcccccaaaaaactacccgagaagtaacgcccaagttgacgtgtggcctggtgcaccaggttcattacattctaactcatctcgagcatctaactattttttttgtaggaaacgagagctacaacttgtgacaattcaacttcacactttgatattttacccttacaaaaaggtggaatgtcgacaaaattagggccggccatgggtaaaacccatgcatagtggccggccatgggttggataatgggaccactttgcaattttgccattttgtcattttcccatctcattttct

SEQ ID NO: 169066 - DNA, 719 bp, Cannabis sativa
aatgacttctcaaaaagtcactcagcagcctcccgagagaagtcactcggtaatgacttctcaaaaagtcactcaaaaaacctcctttgaaaagtcacttggcaccctccctagagaagtcactcaacaatgacttctttaagaggtcactcggccaggacattgcaaatgtcactcgggcatgaccttgcaaaacttggcgggattttcccaagcaagaggagaataaagcaataaggatacgatcacaatgataaggtaagcacgcgaggagagtacagccatgccttctgcaagctctaaaagtaaggaggtacgagtagtggagacaccgcacctgctgaggagtcgactaagggtacactacagccacaacccctacgactcgggaccacctaaaactagacaaggatacgagatgcaagaccacctcctgcacctacgatttgcagcctgaaagtgatagcttgtcctctttgggaccactatgtatctcaagccacttaggcctataaatactccatcctcaaatgtgagagggggttggaaaattagatttgtaatcttgagcttgaaagtaatagaagaaattttttctttactctaaaatttcatggtcatttgaggttacattttatcatcatcatctccatcttatttctgagtttaagtttagattttaattttccaagtacaaagttagttgacgagttctcacc

SEQ ID NO: 169067 - DNA, 1066 bp, Cannabis sativa
tatatatatataatgtataaatattaggaatatgaaatgaatcatggtggtgtgattcattacactacaagggattttttttttctttcctttcaacagaaaagaaaaatactaaaatattataaaatggcatacgtcatatcttttcaacgttgacatttcgaaccaaaagatggttcaataaatagtcttatagagaaaatattgatcattgataccttttcattgctccagcttcaccttcccgaattaattcccaattagtgttttagatacaagttgaaatttttgataccacattaaactcgtacgagctcgaaaagtatgaacttagataaaaaaaaaaatatatatatatatagggttaggtacaagttacaacaagatacattgttaacttgttataaattagcataatacaacataaaaaatatataattaagcacaacacgaaagacacgaccttttagcaacaataaactagtcccaaaaacgcgtcacacgacaagttcgaaaagcacaacatagaattgaaaaaaaaacccctataatttaataattataaaataatatatatttattaaaataataataaaacttaactataacattaagtattataattttattattaaaattatatattaatttatttattgagtgtgatataaaaatttaaatattcataaataaacatttaaattctaataattttaattattatttttatataattatctgtaaaatattgttgaaaaattacataaatataattgaaactataaaagatacatatagtgtagtaattaagcccattagttgttaaaaaaaataaaaaactaaaacacgaattcgagtctagatattgaaattccgtattttaatattcttagtttattttttgataacacttaattaaatgcggaataataaaattggtacaaaaatagtttttttctgtagctatagaagacaattctgtaactgcagaataaaccagaaaaacaaacagtgcataaaagtaaaaacacacaagattttttatgtggtttcaacaatcctttca

SEQ ID NO: 169068 - DNA, 1105 bp, Cannabis sativa
tatgtacttctattatttacatatacataaattataatttgatgattttgttgcagtttgaaagggaaaataataataataaccaattgcccatgaacataagaggagttaaggtggaaagggaagaagaaataagcgaggaagcagtgaaaatcacgctgagaagagcgttatcgttttattccactttgcaaactcaagatggtttctggcccggtgactatggtggtcctctgtttcttctacccggactggtacgtgttctcacatatattttacttattatcgatcacgtacgtctgtactctctttggtctactcctaattttttatatgagtataaaatatgggtcatattataattaactataactaaaatgtttaatatcaatatatatgaatgaatttagattatatataaatgtatcgttttttattagggatatatatctctaatattacttcatgattttatctctaaactaaactaaacaaaactaattatttttgttaatccaaattaaactttagttagtaaaattagataaaaattctttaattcaataatattaatagttcgaaaaaaaaaattatgcataatttgataaatattaatgttcgggaggaaagtttgatccgatagcctttcattataataattatatatgtaaatatattattatattatgtgcatgaataccatggccacggtatattattaacattttattccatgacttctatgacctgttatctttaatatcttaaaacttttagaacaagagaacaaatatatatatccatacatatataatataaataataataatacatcatttatgtctttatatatatgacaattcgactaattgaagagctctatctgtacaattaattagtaccatgatgagcttattaatgaaatggcaaaacctataattattccttttttaatatttaaaataaatcaatggtccccaaatgtgtaccttttatatataatattaataatgataaaaaaaaaaacaatgatatgatttctaataaaaaatattgacaagctattgtatcattttctcattattaattttatatatatatatat

SEQ ID NO: 169069 - DNA, 643 bp, Cannabis sativa
aaacaattttgaaactcacaaggtcaagccatatttcacgcttcacatctaggaaccactcttcaacccacatttgatgcgggccccactcaactgatgagattactctattgacacccacctcccaacattttgagccactttttcactattattggtacacgaaaatattaatttgggtgcaatatttcactataaataaatagaccaaaactattgaaaatgacatcacatttttagagtagaaaaattatactttgtcattttttattctctcttattattatttttagtgacaaaattaagtgaattagaataataatattggtgaagttagagcgtagctattgtactttttattttcaaaattaatattaattcttttgtgttccatctccatatatcaaatgagatgttaaaccaaggagggtcatcgaagatgttctagtcaaagtggataaatttatcttcccaacagatgttatagttctggacatgaaagaagacagcaatgttccaactattcttgggataccattcttggcgacaggccaagcattgattgatgttcagaaaggtgaattgaagctgatggtgcaaggggaagaagtggtcttcaatgttcttaaggcaatgacttttc

SEQ ID NO: 169070 - DNA, 1079 bp, Cannabis sativa
tagatttgtctaatagttttattgaagagttacctgattcaatttgtggtttgtacaatttacaaactttattgctctcacggtgtgaaaggctttctcaattaccaaagaatatgggaagactggtcaagttgcgccacttagatattggaggtgtacctttgaaagagatgccaaaaggaatcaatcagatgaaatacttgaatttcctatcaaaggtaataatgagtgacaagcacaatgacaatgcgtttaaaattacagagttagcagaagctgaatatgtaggcgaaaggctttgcatttcgggtttggaaaatattaaggatacaatggaggcttcaaaggctaatttaaaggatatgaaagacctcaagacactaactttgagctggaacagtgatgttgttggggttgacagttcgcaaaaagaattagatgtacttgaagcacttcgaccccacacaaacttgaagtgtcttgtgattgaaagttatagaggtactacattctcgaattggattactgattatgctttttctaatttagtatcaatcagtttgaaagattgtaaaagctgctactttttgccaccacttggacgactggcttgtttgaaagatctcacaattgaaggatgcgatagtgtgttgtcgataggtgatgagattgatagcaatggtcctctgttcatttgtttagaaagtttaacaattaaaagtatgttgatgtggaaaggatggtcatttcgtagtgaagctgttcttgaagaaggtcaaatattccctcttcttaaatcactgaaattgaaatattgtccaaagcttaatgttgggttaccttgttatcttccatccttggaaagtctcactataaagcaatgtgaagaaatggaggttttgcttccaagaacaactcaagatactgtcacagccccaccatctcttcatcacataaatatatcagattgtcctgtgttggagtcacttgtagattggggctcacactccaaagtgagaacacttattctatgggacactaaagcgctttttgagaaccgtagtaaatggaatctacag

SEQ ID NO: 169071 - DNA, 950 bp, Cannabis sativa
tatattgcttttgcaatcctaaatttctcaaatcaaccaagcccatggaaaagaaggatgagcactgaacaatacctccatttaaaagggaaccaaagtaaattcttctcacctgaaaacaaatctgggacataaacttgtcaaggaaacccaaatctagttgtttcgtcgataacacggaagggctttccggtttgagcgtaactgtaaaaatttataataaaatatatcatcaacttaagagtaatgaaactttgtgatgattatcttctgatgtttactgtttctttccaaaagaattgggattaatctttttcctttgcaaaacccagaagaaataatatgaatatatcatatatgattggtcttattaagcaccaacgaccaataaaatgaaagaccaaataaagaaaaataaatttttacctgagatttctacgtaagttgatggatctgtaaacgagaatgtttaagagatatcaagattcctggtacctccttagagactatattagaaagttggtccattgaaactaccaatcttttaaatttctgaccaagtatttttgacaaacacattattataaacattcaaggttggaatggaaactaatttgtgtttcggtaagtgtttagggcagtggcttacggcattgaaagcttttgcaagaataggttcaaaaatttgcgttagagaagaatggtttagagtcgttgatctgagagatcttgaacttgaggcattcgttcgttcccaatctagaccattctctgagaatttgaggcctcattcgcataacaacgtgtaaatagctaattaaacaattaattaacaggtcaaaatataaagtatattgccaaaaaaaaaactgttacttttgaataaaaaatattttaaaaataaaaagtcacatcataaatttctcataaaccaagaatttcagttatat

SEQ ID NO: 169072 - DNA, 1045 bp, Cannabis sativa
aatatatcaatatatcaatcaatctacctatttatctatctatctatcttctatctatctatataaaggaatgttagaaaggttatgtggcattctaaattttttttaacctagcttatctattttatgggaatttcatattttcttaaaaaaaaaatacacatatatttatattatcaatcaaatatcataaatacaattaataatgtcttttcatttttctaactctcacatatataatactcaataataaataaaattaataatgtctttttatttttataactcttaaacatatagtactcattattattaatattattcttatttaaataatggtatcttttcattttcataacttacacaatataacaaaaataattacactacataaattatatttgatgttactattgaaagtataaaatgattgttggattccttacattttatcttttcttttcttatctctttttgtgcttgaaaaatgcagaattgagattgaatatgttgacggtcatgagaaatttgaagaggaggatggtatcaagattttgatgatggtaaagttgattccatctatatattatttttattctacatatgttctttattcaagggttatataccttctacatactatgtatatttgtataggatgcaatgtattccaatttcatctttattatatatgtttacgattatgaaaaattgttcaaatttatttataagatgtactcatataaaactaaatgatgcactaactggaagaagataatgaacatgcgtagaaccataaagtttgttgtggctacatttttaagtattaattattgtttttctttgttaaattcaattattttttgaagttttcttatataattttatttttatttaattactattttatgttgacttcataatttttatcttttgtatttttatatatacataatttatgtaaatatattttataatatgtttactctcttctttcaattcttctatattattcttatattttatttttgcaaaaaaaaaaaaa

SEQ ID NO: 169073 - DNA, 1040 bp, Cannabis sativa
  modified_base (1007)..(1008): a, c, t, g, unknown or other
gattcaaccattaaaaaattagctctataatataatagagaataaataaggagcttcttaattttttcgctaatattgtttaatagtattttaactaaaagtactattattatttttttattattttataaaattaatttatatttaacaaatttaaattataaatataaattaaaataggaagtataataataataataataataataaaaatactctctattttagttaaaaaaaaatagagagtagagatgctttaagtgtgtaataattgaaatctttaaaaaaagtaaacttgtgtgagtgattcatataaaactcgtaattcttaacttaataataaaattttggtaatatgattaatattattatgtgtgtaattgaaatttattttctttgtttatatttaaacaatctgtgacagtaatttgaaaagcaataataaaatgctaagataaatgctatagcaaattaagtatgacatgatatattttaatttaataattattataaaaattgtatcattggcttaaaagtgtcactttgtgtagtggtattggacattattagtggctattaataatattcaatgttgtacatattctaacactctaaaataaaattaaaagaaaattaatttttttttctttattttattacccaacaaaacaaaccctaatgcatttgattataagttgtgggtaatattagaatggaaaagaatcaaattctgtaattctttttttcaaatgcaatgaaatttaatattcaattttggtggaggattactaaatgaaatcgagcatgttcttatatatataatatataactcaatatttttacaattagtccatgtaggacaatattattcaataaaagagagattatttcaatgcatattatttttttttatctaattcatataaccacattaaatcaaattgaatttcattttatatattttgcaagggtaattagcaatttttacctcgaactttgacatgtannaaatcatgctccctgaactttttttgccgtta

SEQ ID NO: 169074 - DNA, 697 bp, Cannabis sativa
tctcaaacaccatatgttcaatcatagtcattatttatgtcatgatggatacatttcaatgtttttttttttccttaagaagtttgtgaaattccgtgttaaattgtaaaaacgagggttgaaaagaaaaccaacgaaacaaaaattttctttatgggaactacaccttaatctaggggctagtatatagtacatcactaatgtatatcaatatcagtatttcttttccttataattaatatataatgataaaattttgatttcttatttttgagagatttttataaaataaaaaataatttgcggtataaatatttaagtttaatttttagttacaaataaatatcgaagaaattgaattgtatacccactttatttattttgatttttacttctatttctatatttttttaagatatatctatttttatataatatccctattataccctttagattaatgtaaatcatgtgctacacttaaagtagagggcaagggtaattagggatgacaattatacctacgggtacccgctcctaatggggcaggtacgggagttgactttgagggcgggggtaggtatgggtttaaagattcatacccgagtcggatcaaggcgggagatacccgccccgatatgatatatgtatatatttaagttttaaaatcataactactacaattaaaataacttca

SEQ ID NO: 169075 - DNA, 1027 bp, Cannabis sativa
gtcagagaatagccacgtcactgtcagaagacttccgaatgcagctcttgggcttccccgtccagatgcagctccttaaccctgaagaaggcgttgttcgcctcctctcttggaaggcataaagggctttcgggagtaggaggatcctatctccagggtgaggctccaggaagtacgaagggttggggcccgcctccagtttggactcggccttcggatgctggaagcccaggccgctgatgacgcgaatcgatacatccttaatatgtcacatgttgccatccaaaaacgtaaataacagtaggcattcatagaaaccgcaagcatgagacaatagtcattaatattcaattcgcgtaatagccatggtcaaattcaataccaaataatacaacaacaaaattaacataacttcacagagaaagagacaaagagacacgaactaaccctccatcatgtctaagcttagcaagcaactgatagctgaatttaatagtccatccgaatgagaaaccaaaccgctcaacaaagcaacctaaacacagtgacacatgaccacattatatcgttattactcaatttgcatcaaacagaaatattaaatagatggatcattacctcagctgtctcaaggtaaagatttacttgtctaacttgcgacgaaatggaaggcagtgtgacttcacaaaatgctatacaggatttgataaaactgagatgtttattgccacatttcaaagccttgacggctagacaattgctcgagtgaataagaatttcctgcaatatatcaaatgataacaatacatattttcaatccatcaataaatttcttgattgacattggatcttctcaatgtactctataatctttggggataagaaattataacaaattgctagatagatctgaaaaattcaatccataatctcatagtagttgtagaaaatggtgaatcaattatgcattatttaataaaataacaagtatttatatacaaaactagaaagactaaatagaaaatca

SEQ ID NO: 169076 - DNA, 751 bp, Cannabis sativa
  modified_base (212)..(223): a, c, t, g, unknown or other
ttaatccattggtgaacaagttaattactgaggtgaagaacttcttcaaaggaaaagatgccattctcaaactgttgaaggagttcgaaactttgctgtactctgttgatctgctgctcagtgatgccgaggagaagctcatcaaagacccaagagtgaggaagtggcttgatgatctcaaggatgtcatttatgatgcagacgacttggtnnnnnnnnnnnncactgaagcatggcgaaacaaactcgaaggaggtgatcctcatgaatctcatagcggctgtagttgtactagtagtaaggtactaatagtttaaccattaaacttaaattttgcaatatattatatattttttctagaagaaattttaagttcaatccacccactgtttagattttattagttggttttttggtttggtttaggcaatttatttggattagagtatttgtaaaaagaaattgtactattcaatttgagaatataacaattcctcagtcttagtctatcaattgatctattgtctaatacttgtcaggcactcatgagactcatctcatcaactgctttaacttcttttgataagtccataaaacttgagatacagaagacacttgagaaattgaaacttcttctagacaacaaagatcttggtttggaacgtgtgaaaaggcataagcttccagtgagggtatgtgctccatcgctagaagaatctgatatttatggaagggatcatgagaaagaaga

SEQ ID NO: 169077 - DNA, 920 bp, Cannabis sativa
aataactatgctaaattaagatgttactttcatttatttggaactcttaattattatatcattttaaaggggtaatgatatttgcacacacataacacaaaattgatattatattcatgtaacaagtaatttcatgtaatcatttttatataagatagattctactatcaaaattgatttgggtatgtgtcaaatttatgtgtgatttatgtgtgcacaaactattttttaaaaaagttaagaaaaatgtagagttgttgttgtgggtcatcgatttttctttattccacaactcaaatagtattctaattttttagctaaaatagctaaaatattaaaatagagataattttattattatttttttttgatatgcttctattttagttagcattgacgaataatagaaaaaaaaaatgtgtttttgattaaataataataaaaaaatatagagagctctatctattctttgttataaaagtcattgtttttatggttgtaactcattttttaagacatcctctctattttagctaaaaaaatatatttaagaagtatggttagaaatgttttaagatttttattttcttctcggttttgcgtcagatacaactttagaaaacttaatcaatatacactaatgactagcatacctacaataaaaaaagaaaatgatatctaaaataatatagtatttatttttaatggatttttaattttttgaataaaggcgttatatcataaaacgaaatagttagaccttacggtcattacaaaataagttctccggtaaaaaggaaaccagaatagagtcgtacaaatagtaggtaaaagtccacttagccacgttatagacaacaaaattacaggacctactaacattaataaaattacaactaataaaagagggagaagactta

SEQ ID NO: 169078 - DNA, 635 bp, Cannabis sativa
  modified_base (151)..(172): a, c, t, g, unknown or other
catggccttaattatacaacaaagccttttcttttcttttcttcaaaacatgcttaaacatgtcttaatataggctatgtgaattttctgtaaataatttaatcaaaatgagaccatataaggtaaacaatttttattattattattattnnnnnnnnnnnnnnnnnnnnnnttattattattattatatattttccatgatgaaattgtttcccatatgaaaggttctcagaccaatgtggtccacagaaaccaacttataaataataatttcttctttattttttatttttgaaatctaaataataattaatatgcattcaagtcatccatgtgagactgccaaattatattagaactattttttgtttttttgaatgtgatgaataatatcgacatcagatatagtttgatcaaacttgttattaagttgtatttatattaatgtgttgctgacttgtcaccatattctccagctacccatactgatttttaactaatatatacaattagttatatatatatatattatattttttttgcgtgtatatatatactagaagaaagtttacgtgcgcaatgcacgtatatttaattttattttaggttatatatatttatttataaatgtcaaa

SEQ ID NO: 169079 - DNA, 668 bp, Cannabis sativa
tttatttattttttgaatgcataataattttaatagtagggccttaccaatttccttaaaaaaaagtggagccttaccatttaattttatgtgcgtgatatattaatagtgttcttctatgttatgtgatagcaccattaaaaagtagaaatctatcattgtcaacgaggaagtaaaaaactaatacaatgaatatgtaccatattttctgaatttagcaaagaattaaatattgatgtttctccgatgtttctagattttttgaatagtgatttgttgttttcaaaaaacaaaaataaaataaaaaaaaaaatagtgatttgttttaaaaataaatacaatatatattgttttctaaaaaattaaaatattaaaatatatctccaaaaatattcatcgatatccataaccataaaaatgtacaaaatattttatttgttaataaaagaaaaaaaaaattgatgtgatgggtgcagagaattaaatggtttagctaataattttaaacatttttattttgtattataatatataaacaataagcgttatatttattattaaagtgtacgaatcattataattatttaaatttattagtattttataagttttattattaattttaggagttttttcatttttacactttaaacagttttttttttttt

SEQ ID NO: 169080 - DNA, 1110 bp, Cannabis sativa
agttggcataccattataccaccaattaccaaatacgtagaactaatgtatgtaatgtgattactttcagataaatttatttatatataggttttggatagtgttttgtttgtacacttttgatggacgattttgccggtaggtctccccaatttattaggatcacttgtatctttagttctaataacattggagtctcttgttatgtgagagttacgatatccacaattttagagagattgttcattgaaatttgtatgtaattggaaatcctccttaaacttttttgtgaggctagctaataattgttcttttgtcgtgtggtaagaagcttgcaatttggaggcatagtaaaccattgtgctagcatctgacataagtgatcaatgcctaactatttgaacgagtgttttcgattgatcgtttgagtagattctatattgttatttgtctttgcaagcttaccagtaaatctaagattgtagtgatgttcattcttttcataactttccatatatgtctacatggatatccatcacttatatattatatttaaattcttattaaattttaggtaattataaattgaaactttacatacaattttttttgaataaaatttaaaatttcattaatacgaaatttcacccattacaagagactgaacttcagcaggacaatcagtccactgaagatcacgacctgaagagaaacaagagctccttgcaatacaatgagcagccttattaattttatagtaatttgtcacaattaacaataaagtctatgtatctcttaccttcttaatttagtcaaacttagtgtaatttcttaaatttgacatagtcaatttctaaattctaataaatcaattaattgagacatcaaggtgatattatccaagccactgcggagactattggcctatgtaatcaagctcccaataaatagttctagaatttaccgagtaaattctctatcttattgatttatcttaagtccacaatagattcagaatttcactcttgattacatagaacgctctgatctccaagaataaatacgctattagttatctattatttcaatataaataatcaatgatcctct

SEQ ID NO: 169081 - DNA, 1015 bp, Cannabis sativa
ggaagccgatgaatttcattcgacgttaacttgcgccgacaaattggaaaaaatcatcactgtttgggtgatcgaaccctccggctcgggggtctaccatcgtctccccagggacgaaaagacgcccaatcacaattacaacagcttcagggcatggagctagacccatttattgtccagggccatgcttccacttcaggattacttcatcgatttttttgtctttgtcggcctttcaccttaccaactaatcctgcaagcttaccgcctattatcaggcttgtacattttctatgttgccaagaactgggcccacccagtccggccaaaattttgtatttttatgaacttctttttgtccccaaaaagggagacaaatttaaggacggtttttataaactctaggcccacccggccaatgaaactccactgcccttcaattttcaaaagaatgtgaaggagtaccgcaacagatttttcttctctttcggcttcaaagcctttgagcacccggatctgctgacaaattgggtcagggttccccctatgcaccgcactgctcccactcaactcttcctgaaccacacacaagtgtttactggttacaagaaggaataatttaacgtgggggatctggtcacgatggccaattgcaagagggctaaattgatcttggagagcaaatctgtggaggactttaatttgtctaaggttccctgcctcaacattcgaaaccccaggagtgagaaggcgctctgggaggatattatcttgttcgcagaggacagatacaataaatatagatccaagagggagcaggagctagcatttgccctggtgcaggacgcttttggaagaatctctcgggaggaggcatggaaagagagaactcaagtccagcccaagtttctatttctggttcctaactctggggccccccggtgaaatcactttcggagcctgtaagtctcctttgaacattcactttgtcccttctgtccaagactatgctgac

SEQ ID NO: 169082 - DNA, 1173 bp, Cannabis sativa
tgggttcatgaaaatgaatagaggaaaagtgatgaaaggagaagttgaatctcttgtttggtaagagcacaaaatttagtccatccaattatgggaggattaaaaaggaaaagacaaaataaaatgtataaattataaaattatctttcaacagtaatagatattgggctatttgagatttttgtctctgatttatgtattattatacctttgaattttttagctcgttaaaaataatttctgaactattcacaatattgtaaagtaatcttttatttgattttgttacacatggaaaacaaaatgatgacatagatatttatattattgttacattagtgtcacatgtgttttaaataaaaaacactaaaaatatgtattttaaaaaatcattaattttttttaaaattaattacacatgtgacactaaaatgtcatctaaacatccatgtcattattatgtttgtcatatatatgtgataacctaatagtaggataatttaaaatacactatgattcaagtgaataaaagaacatttttaaggaaatgaaaaattgagaagcacaataatacatagttcataattcggtgagtaaaaatactaaataatataatattaatgttcaaatggataacattatacttttactaattattctctctctatatcttctaacttaaaagagagcaactatgacgcgatgggagtcctctccctgtctccatccccgttaagaaatttaattcctatcatggacggggcgtgaatcccttaatggggcgggaatagggtgggaaatcccctaatataaaaataagttttttttttaaaaaaaaaatatataaaaatattaaattgtagaaaaattataatattacacattatttattattaaatatacgaattattatataaaacacaacaacttaaatatttataaaaatgacactaatataataaaaaaatacaaatatataacataaaatataaaatattaatcaaataaaaagtaatatattaatcacatcctaagagagtgtcattcccatccccatttagatggataatctctgcaccattataggtgagtacttgcgagcccggtcccggcttgaccctaaaaatacatagtcctaaggctagttaaattttaaggccctcacttttagaa

SEQ ID NO: 169083 - DNA, 1371 bp, Cannabis sativa
cataatataaaaattgctaaagtaatgtctttctttcaaaacaaacaaaaaatttcaaatttatttggttatttaggattttggcttataaattatgatatatgtgttattatgtctcctgaactttttagtctgctaaaaataggccatgaactattcacagtattataaattagtcattctgtcaaatgttatcatacgtgataaacaaaatgatgacatagatgcttaaccaattctcacgtcagtgacatatcaacaccacatgtgtaattaatttaaaaaaataattcaatttttttaatttaattttacataattttcttaatcacttttgatatttagtttaataattttttaaaaatacaaaatttttttaattttaaattatatacatagcgttgacgtgataattgacatagtagtcatatcatcgttatatttgtcacgtgttataaaacttgtgagaatgactaatttacaacagtgtgaatagttcagtgactatttacaacgggctaaaaagttacggggacacaatgatgtataggtcatagcttgagagacaaaaatcctaaataaccaatttatttgaagttgaaatgacatgtcctttactttattaaacgacaaagaagcttcataaaacgacatgcatttcttaaagtaaactatatatagctatccttaaaatttaagacaagtagcgaataaaagcattttcaatattagatgaagtataataacaactcaaatattttataaaatcacttctaaatgatgatctataatacatcaacattttagttccttacgaaaaaaaaaattaaacttatttaatttatcatttaaaatatattactaaaagtctacattctttttatattttataacatatttttacattacattatacatcagcttttttaaatacattaccaaaatcctactttttttttaaatttattatatcttattcaaatcaaatatataatattaatatatacatacgaaaattaattataaaaacccaaaataattaataaaatatatttagagtaatgaatagtactttataaatgtgaaccataaataatgtattttaaagaactttcaaaataaataaagagtttagagcatttattgtagcgtgtttttaattcggttttttaaattttttaagcttatttattttaaagaagttgttgtgagtgctcttagttcataaatagtgaatctttatattaacatataaataagttgtgtacttactaggggtaaaaatcggtcggttatggtcggtttttaaaattttataaccgaccggtcggttacggtttttattttacgaaaaccgtaactgaccgttta

SEQ ID NO: 169084 - DNA, 1396 bp, Cannabis sativa
aaaagtgcatgtcactaaatatttaaaactctttttagtgacgtgcattatttgacagtaaaaatttaatatttgagacccacattgtgtgtcactaaaactgttcaaatattttaaattaatttttattttttatttttttaaaaataataaaaaaaacctatagcttcacccaatgcgtgagtggaaaaacttttccactcacacaaaaagtgtcactaaaaacaattaaaaaaaaataaaaaataaataaaaggacaggcgtgatgttgggcattaattatcatttactttttatctttattaaataaataagattataatattaaaaatatattaaataacaaaaccctacatttttgactcaaaagaaaagaaaaaaaaaacctaacttattatctcctctgtctgccgcctccttctctttctctttatctttctttcttatttttttgctggaagtatttcagagttgttgtccaaatgcaacaatatactcaaaccaccatttttcataacaagccataaaatcgagttccccactccaaaatatacctacacctgcctctttctctccttttctctagaataatctcagattgatttctctttttgtcatgtaaaaatggctgtgctaatagagacacacctcgatgatgagttttgaccattgattcaagatttacgcccccttaaatcccagatctacctcctttatttttttctctgtcatgtttccctttcttggtggtggtgggattaggtgaagaatggtcgatcggcgctagaagtggtggtgacgagttgggatggtggcgttgggtgaagaacggttgatcatcgatctgcctctcctcgatatatatatttttacttcaggttgtattgttcttctttttgttttattgtttttgttttctgtctttcactatcctttgccttgtcatttatctttacatgtgatgaaagcagcgaccagaattttggctcttagttgtggtggtgggttcagtttcgatgagctgtaaagaagcctacaaagtttgcattattttaattttttagaaattctatattggtttgttgagtttgattctatgtatatttactccaaaatttctgtaatgagaatttttgtccagcattattatttttatttctcaaacagaatcaaattaattagaatttttgttagaattttagtatgttagaaattatgtattggtttgattttgtattttctcttatgttatcaaattaatcagaatttttttttctgaattagtattcttatttctcctctttagcaacaaaaaaaaaatattttacaaaatgaaaatattattataacattattattgttatattaaattgtatttgtatataattaatataa

SEQ ID NO: 169085 - DNA, 702 bp, Cannabis sativa
attccattgggaaatcttctgttttctatctcaacatgctagcttccaactttctttatcattcctcactgttccacttgttcgggtttgtcataatacaggcacagttgttggagagaaccccatcattaagtgatctaaatgaacttatttatgggcaggtataataaatctttttagaagtcatccccagcagagtttttccagtcaatatgtccccatgttttgttcatctccattaggaaggagttagtctttttccacgcgccattttttctttctacaaataactaacatctattgttgttctgttatttcacaggaacatttgggccgggatgatttatcattcatcttctcacttaaggtatgcaatgttctagtcttgccaagtacgaaattctttctttccaaagcaaaagtatatacggtaatgtattagaatcataggtatttgattgcttaagaattctctattcttggtcaggggtcagacaatgcaacactatatggtgtttgcttacatgtcctagaaattgtacagagaccacctggaatcttaggtggtgcatcacctctttctcattcatcaggaggattcaaccgatttttagtgtctgcacctcgctgttattgtgtactaactagagttcctttctttgagttacactatgagatgttaaataggtaaatttcacctct

SEQ ID NO: 169086 - DNA, 1388 bp, Cannabis sativa
  modified_base (775)..(780): a, c, t, g, unknown or other
  modified_base (1351)..(1358): a, c, t, g, unknown or other
tggtatcttccatccaaaaaaacttatcatttattttttaaggacatgtttagttaattcataagtcgcaacattaaaattataattaacatgaaaaaaaaaattagataataatattttaatatctaaaaataaaaatacataattcattatagtacaatgataacattcagagctcatcttaagtttactaacaatgcaatagtttttgcttgaaaagccgattgcaaataaaaatttcttataaacatttaaaataagatcactcctaagactaatctaaccaaatatctattttggactaactaaatatctatttttttataagtaagttgttctttaacaaaaaggaaaaattgtacgatcaaattcaaacatgaatatagaatggatgatattataagtcatgagttttttatttagaaaccaatctgtaaaatgtacttgtttccacgatttctgtgtgaacacacatatccctcgtatgctcgtattttattaaataataaataatattattaattattatgaccaaattttttaatataatatatgttgtattatttaatacataataaataatccgtattagcttatattataatatttacaaaggatttggcgtcaacaccaatctaactcggacccggacctagacccaggacccgagacccgaacccggaccccggacccgaaccctgaacccgaactcgaaccccagacgtggacccggacccagacccgtagttggtgttgggatcgagtgtattaaaannnnnntataactttacacaatcaattaatacaaatcaataccaaacattatattgtattaaataatactaatacaatataatatcatacaacacaatccaatacaatacaatacattacaatacggcgtaccaaacgagcccatatagtatatgagattctaatttccttagattaatattcttttttttattatttttaattttggattgtccattcaaataaaatgaaactaaatatcatcttaaataaatgatctagtttacacaacaaaaaatatatatcatataacaaaatatatacatatatatggatgactattcaatagttacatttttattgtaaccatgattgttacattttttttacctgtaatagcaggttaccaataggtaaaaattcttttttttttaaattaaattaatcataattaataattttcctaaatattaattttatttttttatttttgaaacagaaatcttatattaaagaacaacattacaccaagcacgactgcttggcgagcacaaggaggtataaccccaatccatatgcagggccggccctaggcatnnnnnnnntaggcccgtgcctagggcccacactttccg

SEQ ID NO: 169087 - DNA, 1261 bp, Cannabis sativa
  modified_base (512)..(512): a, c, t, g, unknown or other
gagagagagagagagagtaatagttttggggaccccattattgttgtggcccttcatatcagaattatatatattggagtggtgtttggaattgggggtccgggggtgtcttctgtggttccctctatagaagaagtaatttgtgtatgtgtttcgtacaaactttgtggactttaggttttcttatgtgtacatattttatcttttgaggtttggtttgatgagtcacaaagcttatcttattcttatctactagctactactaccttttttgttccctctctttttgcctactttagtttatttgttactgagcatctttgattcatatccttgactttttatgtatattatatatatatagagcaagattatggtatgacctagcaaaagttctctaccgatagggaattctttttaactattgattttagatcatgtggttattatgatgtaaggtgtataattttacaataaaactgcttgtatacaattaaaactttatacatatnataataatatttaataatatatttattttttttaaaaaaataatattaataattaaaatatttattaatttttaatttgaattattattagtttttctaaaattaatttaaattgtttttaaacaggtatttattttcaaaaaataattttatttgcgaactttattattatttttttttatattaataataaattataacaaaattggttacttaattattttcgccattaatttgtttacatacatagttttatcataattatcttttacttatattggtttaatatttttataaaattatgtattaatatttttatttgaaatattttattaattttttttattgaaaaagaaaatttctattaatcaaactaagtcaattacatccacaaaaggatttctcttcaaaagagaaatttacaaccctttaacaattttaagaacaatttctctatgctaaacaacttcatttttggtacaagattaagtctacttttgaggagctctttaatgctactatctatacaactcagattcatacactttttttcatttatacacaaatgtcggtttagccaaataccataaattgcacattctaacacattcttatgaacaacatataatttttatggcacattctaataacaaaaaaaaaaaaaaaaataaaattttttttaaaaaattaactagaattaaaatttaggttgttaaagaatatttaaaaaaaaaaactaacaaactcct

SEQ ID NO: 169088 - DNA, 741 bp, Cannabis sativa
tcttctttcgttcactttctagaaggagtaaaactaaataaaaaaaattaactgaatattataaaaaattaactaaataagaaaaatacttataataaaaataactgaatatttttttctttgaacaaaaatcaaattaagaatacaattttttttttttgataaatcttactattttttttaatagcaatcaattttgcaatttaataagaatatcacttgttagagagataatcataattaaaattaaaaaaatgaactaagtataaaaattacaaataaaaaataaataaaaaaaacacaattaaatttaagaatacctagtatattctgcttaaatgacaacaacaaaaactactgcaacgtcattcaacctcacagtttgaccattcaactgcaaggtacttaactgtgtagtgtattattaacaacttttttaatcgcatgaaactctttattctcagccattaacattaatttgatggtgagtcatcaaaaaataaataataacaaagataaaacaaaataaaaacaaaaatatatcactcaaaactatattactaatcgcaatagtaaaaattacaataataaaacacaaatccaatcaaactacactaaaataacctcatgtagccataaaattaagaaccaaacactaattttcatttcatttctttgttcggttgcattttaaagtattggaatgacattccaatgaaatgctctttccactattttggt

SEQ ID NO: 169089 - DNA, 584 bp, Cannabis sativa
ataacaaaaaagatgtttatatattagcaagtactggtgtttacagagttacaagaccaagcagatgcaatcttaaatgtgccaaagaaagtaaaagagcaacatgtgagactaggaaagatcatcattctatatccaatgtttccataaaattgtttaagggatgcaaagatgtcaactttcttatctttttccttctttactttctcgggtttcatcttgtcaactaaaataaacaatcttgatgttaaggcttttaaggtaaggaacactatttcactccattcctcaccaaaaaacttcattgacttgtacataatatttggtggactgcaaatcttacagatgttgtacttaacaagaaaccatatcttaaaagatggtgaagaatcgtagttagtggcaaagcagtaaagcttaatttgtttcgacacatgaacacaagacaaaatcatgcccatattatttggtcaatgtttgttaagaagtcagtgatttagtgcatgtttagcatcataattaaaaaattgctttttgtttttaaaaacagaaaattgctattgaaaacaatttgacttgtttgg

SEQ ID NO: 169090 - DNA, 698 bp, Cannabis sativa
tggctaaggctaaaagggatgctctccaggccgccatcacttgtcaacactacacgaagcattttgacgacagagtgttcatgtgctggaaggccaataatttcgaaccccaccttcctttctatcccaagcctgaggaagttctagcccaatttttggagaaaaatgaaaaaaaaaaaaaaaacttgaggttgtattggacgaatgcaagggtcctcgtcttcctacccgggttgattaagtgtgacttttatttttcttttatttcatccttccccctacctataagacaattatgttttcttcaaggggagactttttatggcccagccccaggccttctactatttacattttaaacaacttgtatgacttttaagtttattttgccttttactttcttatattcgtcttgttttttgcccgtatgttatgccttaatacccccttaagtgacgtgaaaagagatttttgggtcacttagcttaaaatttgcatgcgatatcgcatatatttctctgataccggttacattacagaatataaactttttcccttaactattgatagtatttgcgaagatggtcagcattccaagccctaggtactgtgcatccatccattctttttagcttataggtcttggagcctatttcatcctcaatttcatatggtccttcccaatttggcccaagtac

SEQ ID NO: 169091 - DNA, 712 bp, Cannabis sativa
attattattattattattgtttagcaccactaattaaaaataacattaattagacatatttcatataaattataatattaatatatatgatttcatatttaattatgctaatagtaatagaacacattaaagaatattagacaggaccaatttcttttaaaatttatcttattattattaccaaagcaataagaattatttttaagaagaattaattaatgtcgggtcgatataatatgtcaaattgtttagttacaactcttgttttgtggctcattcaagtaattaattaaatatatgtatattatatactactcttatttcaatttggttatggtgttgattcacagaaaataaatatatttggatacttgttaactagacaaaatttaggcgcatactattatgccgagcaatcttggccacactacgaactgaagagaagaaagaaggaaaaaaatatcaattagagtactattattgtcctggtcaattcaagtaacttctttaatttagcatgtgcttttgtactaatatatatatatatatatatagtacacatatattgaatgtttagctaaatttatacatatataaactggaaaacgattagtagctagtaagatcatgacaaacttatcacaatcaaaaaaaaaatcttacttttagtaacaataaaacttgtgactaaaagtaaaaaaattgtaactaa

SEQ ID NO: 169092 - DNA, 506 bp, Cannabis sativa
aaaatacgttatttaaacgccaaagtctatatacatttataattatcttgcttggacagatgacatgtagcaataagaaaataatattattttctctctataaaaacatcaattcgtgattttttaaaaaaaattcgtaaaatcttaaaaaatgagattttagatattttgtataaatttaccaatttaaaatggaaaaattatagcaaatagctctaactcataagactatatatgtattagagttagtctcacattattaacgttgtgtgaaaataaattgtcataattgtcctcatttcaaaactcgtagagaaatgactcttttatactatttttttttaatttatattatcttttggcatttaaaaaatttatagtttttaaaaattaatagttttgtgaaaaaaaattttatttaaaagttatgtcaattttttttttaatttgtggattgttggtatataaattttattgtacaatatatttctattttcttgtatggt

SEQ ID NO: 169093 - DNA, 774 bp, Cannabis sativa
tgacactaaacctagtgcattttgctttgcttgtccaatttcagttttgtctcaagcatatggctatttttccatcacgaataagatctctagctcgtggcatgtcaaattcatattttgatatttcaccttttcaacaaagtgaaatatcagtaaattagttgcaaatcgggcaatcccaagtgacctggttttgcaaaagagcgaaacctccgagaattagtaagcgactttacttgaataaagaaattagctaagtgatggaaccatatcacttagacttcataaaaatataatttcgacatgatttttcaaatttcaattgtctttattaaatggtttgcaaacaaagttgtgaatatttttggctaaaagtgtttgttcttccccatatcgtaactattactacagtgggggactttatagtcacgatccaaagctaattctattgcaatttcgactcatcaatgcgatgttatttccaaattattttaatagtactatacattaatacagaatgaacgagacgcatccaaaacccatatacacatatatgtatatacgtattttaattacgtgataatatattaaatttattggtatttaaagagtgaaactgtgaaagcaagtgacactattaagtcaaatgcacactgcttttgcccatctttaatacttaaaacaattaagtcgatgcttgatctaacaagttaaaaagcctttagtactttgtacatatttatatcacagaacccaataaattaaacaagaaat

SEQ ID NO: 169094 - DNA, 682 bp, Cannabis sativa
tattatttaaattaataattaagtcataacaactttatacaactattttgaaattttaatcacacaagtgtacgtatatatgaggtcgagcccacaagaactacggttaagtactaaacaattaaattcttaattctatctagtgacaataatttttaaagaatatttgaaattaaaaattaatttgaaaacaataaaagaataagcaaataataataattagagtttaggacaataaatttcaattgtatcaattttatatggccttatacaattttgattcttattctaatttcatgtgatagcagattagctacttcaatctatattcttatattatgatatatagtatttaaattataggtaaaagtcatacatttttgtggtaaattaaacatataattttcattaagcatagaaattacagtagttacacagaccatacaagtactttcgtcaaatatcaaaatctatgtctattttttttaaacgaatttatgtctatttcactatagcataatcaacactcacttttcaaattttatattgaaatcatatacaaataattggtgattaagcaattataagcataaaacataaatgaaatagatgaacataagaaattagggaaaaattaaaattacattaaaatagaaaaatctcaaacaatatccattaacac

SEQ ID NO: 169095 - DNA, 864 bp, Cannabis sativa
ctctctctctctctctcttgtctcccacgtgtacatactatttcaagtgtgcgtgagataataaatcctaattttattatagtgtctcatgagttgattacacattgtaatacttaaatctattcatcctataaaatctaatagctcactctattcctgagtgttaaggctacttggaagattaaagtgcggattcttaattaaatcaagttcttagattggatgttcaattgttatatgaaaagaatcaaggataccctgataggcatcaagaggtaattgaatttctttcagtagattagatttaatctatattattatgttgagatctttgggcttatgattcatattggataaaaattattttaccaaaattttgtttatgtttttataactctgatatggaccataaaaactaacaaccattttataatattttcttagtgtgctttttcttgtattatttgtatataaataaaaaaaaactaatatatgaatatatgaaatctgatttttaatttttaatattattttttgagttgtctttttgaattataaatctaataaaattattcatcaaacataaattttgattgatgaaatgcttaaatttattttataattaatttttaattaatatatgaatgacaaatacccaaatttctaaggctgaaaagtcatacaccaaatgtaatagctcaagatatataaaacacaaaagtaatcaaatagtcttaattgataaaaaattattttaaatatttgttacaaatgttatgaaatttaagtttatattatgaagagatttttatttattttaaatattattagtagataaattttattttaaatatttgttacaaa

SEQ ID NO: 169096 - DNA, 598 bp, Cannabis sativa
tacaggctctgcccttgttattaaatcaatttcaaaatcgtttcctactttgggggtgaccctggtagcttctctgtaaagacatctagaaattctcggactactggaacatgttcaggtcccactagcggttcctttgtagtatccactaaacttgctaggaaaccgatacaccctctcttgccttcaacgctgagattaagggaatccgagatccttgcaccttacccacaaatgcaaatgggttctcaccctttggttgaaaagttaccatccttcttttacaatcaatggtttcgttatattttgtaagccaatccatacctaaaataacatcaaaatcttccaaatttaattttatcagatcaactgacagctcccttccttccaaacctacctgatggagataaccaactctccagtaggcaataaagtaccaaaacctcttaaaagcatatcgctaggtctactcaaattttcaattatactacttgaaataaaaggatacattgcaccaaaatcaatcaatacagtcaataaagtaccagcaacagaaagctgacttgtcacagtcgaagggcccgcatcagcctcggct

SEQ ID NO: 169097 - DNA, 799 bp, Cannabis sativa
actttgcaacatatcaattcgatttgaagttaaaaagaaaaatttgagattatatatacttattgtatttattgtactaattattactttgttgatattaaatataattagattaaataacaattagtttttcattttaaatatactttcaatacaaataattaatgtttttttttattttatagtttaggccagacgctccatgtagtatcgatcatatcaatgcaatacgagatgagtgcgccaaatttgtgtagcatttgattgattgagtacaaggttacaattttttattatcatacatacgatacaagttttataagtattgctatatattaacacttttagttttatgtaattaatatatagtttgctttatcgttattaattatagagttaattactttataattatgtcaattagatataagtgttatgatcattatttttaacatttttagtattatgtaattagctatatttagatttatcgttatcgattatagtttacaaaacaattttgaaatatgaaaatgcaaatatattgtaatttccctttacctccatttctgcgtcattttataaccgacgcaagaattaaaacaatatttgtgtacacataagtgtcattttagaatcgacgcataggctgttgtgtcatttcaaaagtgacgcaaaaagatttcatttttcttttgtgttttgcgtcggttataaaatgacgaaaatagttttttgtgtcattttataaccgacgcaaataaattactatttacgtctgcggcttatacgtcggttt

SEQ ID NO: 169098 - DNA, 532 bp, Cannabis sativa
tcaaagtattgtgatcatttatgagtcctattatttatttccctttgaactttaaagttagactttgaggcacttgagctgaaaatttgattaaaattaaattacaattaagatttcatgggaaaggcaatgtaatttatataacaatgatggtttacttttgtgtgtttgttgttatttttcttttttggtagttgaacttggtctttactcaacggcgagtaatggttaattttgggaaaatttgttaagtttatttttatgtattttttaaagtctaatttagagtgtgttttagtatatttattattttattattcagagttatgcttgatttttgttttatttgttttttacaaaaaatatttggagattctcaattttggtaattttaatattctgcaagcctttttgagcaaaaattagaaaatatgataaagaaaggaaatttctttaatttttgaagagtatttgttacgatatttttagcctattatttatgttatttttaaagttaattttcttctttatt

SEQ ID NO: 169099 - DNA, 1159 bp, Cannabis sativa
gaaattaaggactgacaatggactagagttttgtgctgatgtgtttagtgaatattgtaagaaaacagttattggtaggcacaaaacagtccctagaaaccctaaaaaaaatggtcttgcagaaagaatgaataggaccattttggagagggtaaggtgtatgctaatctattctacaatcaatttcaagacacatatggaagcatggacaggtcacttgtctagctatggccatctaaggatctttggatgtcttacttatgctcacgtaagacaagacaaactagaacctagagctagaaagtgtatcttccttggtcctgaaggagttaagggttacaaattaatgagtattagggatggtaatcaccaaaagatgttcattagtagagttgttgtgtttaatgaagaaattgtgtacaaggatctgttcaaaacacaagaaaccagaatgttgaaggaaccagattagagagttcagtttgatgtggagcctatggagcaagatcaggttgcagaacaggtggagatacaagaagatgagcctgaggaacatgaagatgcaactgtttctgaactagatgaacaagggtttgacaccctggaatatcagttggttagagatagaaagagaagagccatcagacccccagatagatttggctatgcagatgtggtgtaccctatggcttcagttgacagaataagatggttcaatgctatgggagaagagattgtatctcttaagaagaatggaaaatggatagtagttaagaagcaagttgggcaaagggtgattgggtgcaaatgggtttacaagcacaaagagggcataccaggagtagaagaagccaggtttaaagctagactcgtgcctagaggttttgctcaaagagagggactagattacaatgaaatcttctctccagttgttaaacatacatcaatatgattgctactcagtttagttgcttcagaagatcttgaattgaagtaattagatgtcaaaacagctttcttacatggtgatcttgaagaacaaatcttcatgaaacagccaaaaggcttcgaagaaaaaggcaaggaggatcatgtatgtcttctcaaaaggtctctttatggtctgaagcaatcacccaggcagtggtacaaaaggttc

SEQ ID NO: 169100 - DNA, 886 bp, Cannabis sativa
aaaattagggccgcccatggattcaagaggcttgccaaccatggaatcaaaaacttggccgaccactaccttaacaggttggccaataatagcctcatctaaatggcaagccaaagctccaacatggctagccacttggtctataccatggcttgcccgatttgccaaattctactctcatacattttgtctactattaccaagaagtaagctaatctttaatccattgaaaaaggaaaaaaagaagagaccaagccaacttaaaacggtatgtttgccagtaaaatgttgccaggtgcctcagcaaaaaagtcaaagagaggaaattctccgtaagagacttggtgctctaaagaatattccttgacaacaatgatcctacaacaagcaagtttggaccaaattgaaaaggttgacacataattataagataataagaaaaggtgcatacaagcctggcgagtacaatgagaacctggagttggctcttctactaaaatactggaatagagaacatctcgataagtgctctcactagcaaatttgtatagcggttcctctaacgtttcatcgtgcagtaatccataaaagagctagtacccatcacccttcagtaatggccacccatcacacttcaatggtggcctttgcacagtaagtcctacaaaggtagaaaaatataaaagagctagtatccatcacttttcaacatggcctcctttcgttcttcagcgatggcctctgcttgacatcttgggtaggggtagccaaaacgtgatttcaaaagcaaacattaagctataagactttgttacacgtaagaccaattgtgtttaaaccacttgctaacaaagataacttcttaaagttattctttttaagttcg

SEQ ID NO: 169101 - DNA, 670 bp, Cannabis sativa
ccggtattggctttagaagttccacttgtactaaactcaattttgattgagttaaattttgggcttaactgagattggtactaattcatcaggggattatttgggtaaatttcttcgtgctcatataagcgtaaacattaccaagccccttctgaaactgttgacaaattggtttgattaaggttgaaccaaaataaaaaattcctttgagatatgagaggctcctcgagctttgttattgttgtggcattataggccatcctattcgtgaatatacacttcttcctcctaatgtggctcgtggtcgtcgttggaagtatggagatttcattaaagccacccttgttttttgaaatttggcatatgccaagtggtctcgatttgaaattcttcctggtggttctagaagccaaggtgaggaacttcgtcttagactccggtgattgatcggttgaagcttgctagttcaggggttaaaaaatcaataactaatttgattaactatttaatcaaattcatgataatagtaaatactttactaatataaaaccatagtaatgaacatgatgacatcgctaaaaatttatttcggggatcccttattagaaaagttttacaaaaaggactatatatgttaggctaaaattagtctaagtttcgggtcgtattt

SEQ ID NO: 169102 - DNA, 592 bp, Cannabis sativa
ttttgtcataatatccataaaaattaaaatatatatgatttttttttcaaggagtacccacttttatagaagagagaggttagaaaaacactcacttgaacacgcgcattgttgttcgagccaagttggtgtagtgtgcaccttattttttgaaaaaaaaattatttataaaattattatttttatttaattaattaaaatagctattaaacatgtttaattaaatagtaaacatagacgttttcccgtcttgatattcagcatcgttctcatgataccatattgatcaaaaacgtctttctttctgttacgatcttatgtgcattccttatataatgcatcagaatcaacgggagaaatacatctttttttcatagattaaattatatagaattatattacaatatgtatttcgagcaatagttttgttgggtgtggtatttcgatggttttctattgtgcaatagaggtccgatgcagtgattcaattgggttgtttcatttagggatgacgagactaatagtctgcttgcacaattttggacagtgtcgcaaacattttgtaaagtctttttttggcaagttagttgac

SEQ ID NO: 169103 - DNA, 507 bp, Cannabis sativa
  modified_base (394)..(404): a, c, t, g, unknown or other
gtgctttctttcttgatatctttcgctttgttgctttgtcttcttctttgcatgttttgtgtgtgtgtgtgtgttttctttgtttgagtgattttttgctgtgtttgtgttttttttctttcttccaagaaccatgtgagtgtttttctctttgtgagtgtttagctgtttttttttcttttcttttttgaaagttgggtgtggagggttttgtttttcttgctatatttccgatattttgcttggttcatctctgaaatagcccttttctttctgtgtcttagtgctgttattttttgtttcgactatagctggctggtgttggtgaattcattggaattttttattggtttgtgaacataaataatgattttattgaggaaattacactctnnnnnnnnnnnatattgtcctcttttatttttatcttcttttttaaaatctatcatttttacctctttttttaaacattgtaccaattttacccctgtcatttcaagatactct

SEQ ID NO: 169104 - DNA, 1187 bp, Cannabis sativa
aactgtgggcaaacagcggcagggtgttggcgcctttgaattttgatacaatcgaggacattgcagtcagtttgacttagctaaccattaagaagtgggctttaggaagtagcattgatcctgtactcctgaccaatgcttcgaggaaacatgctgttggggtatctcttatctcggcctcacttttccttttttacttagtgtgaacaatcactatttttcttgactttttccctttattttagattttgttgggcagctaaggaatggtctagctagaatgccattttgttcacttctttattaatgggtttccaaaaatctcggtaaatgttttagtactttcaccgagagatataaaataaataatagacagtaattcttatgtggttcagacattaataacccctagtccatgagtctgtagtattagccttgtaggcatgtgtttgaatattataagtgttcacaatttgaaccctagctctgtattcatgttgtttctctcttgaagaagaaagcttgtagcaaattttctagaggttttgtatgtctaaaattgttcaccctttgcacatgaaaaataagggtacttataggcacacacatgagtaagggcataccctttacccaactagggtttcttactcaacacgccacaggagctgaaactatagcatgatgatttgaccgttggttggtatgaggctttcccatcgtgtggtgtaaaattgttgtaagaaaattcgtgggaataaggacacatgtcgctcaaaggtttcaccttgaaaaggttttgtctacacaaactgttagataaaaaagggctttaggggcatgcacacgcactaccaaggtctggcacaggggacaagatctattttgaggttagatgatatgtaattgcttccataagctttagataagatacgaccaaataagttctaagaccatccggtcatagccttctatcagacttgttgaattttttgccctaaataaaacctatatcaatataataagatttactaattaatataagatcttaaatcattttatgttgcatggttcacatgatttattccatgattatatttaaatgtattaattttattaagtccagaacatatacatatatatatatttgttcatgattataatatcatcaacatagtggaatataatca

SEQ ID NO: 169105 - DNA, 870 bp, Cannabis sativa
  modified_base (811)..(838): a, c, t, g, unknown or other
gctccaaacttgagcagaatccatcaaaaattcataaacaagaacttgaactttcaagcaagcttcaacctctaattccaacaacaatacaacaagtaaaacttgaattcacacatagaaattaccctaaaaactcatctagaactcatcaaacataatccaatacaaaaccaagcaattacacccaaacttatcaaggttaacacaaattctaaccacatgcattttcaagagaatacaacagaatttcttgtttttctacaaaaatcctcaacaataaactcaactataaaccagcaagagaaactacctcaaatctcttcaaacccaagcacaaagccaccaaatccaagcttgaatcaagtaaaaacctcaccaattcaacacttgaaagaaagagataaatagagggagagagaggcggctttgaggagaataaaccagaaaatgaaattcatttttcaatcaatattcatttgttgcaaataatcaaagtataccaagttaccaaaatgcccatatggccacataatccctcttataaacatttaaggacaaaatagtccttttaatacctcctcatactcaaataaattcagattattcatgcttaaataaaatgccaataattaatctaagaattgtatttcggccccaaacctggttcggcccgaaatacccaattgtgattataccgcgccaactttttagaatacacctgaaaaaggacataacaggcatactatatagtccataagcacctaaataaattaaattcacaatttaacccttctcgggtcaaaattactannnnnnnnnnnnnnnnnnnnnnnnnnnntaacatgtcatatctcatattaattcacatat

SEQ ID NO: 169106 - DNA, 1709 bp, Cannabis sativa
aatatatcgtggtgtaggaaatcgttcatggccgctgtataactacgataatagttaatccatagagcatcagtggtgccttttagtcattagatgatttattgctaatatgtaaaatatagtatactacgtacacacttgcatttatatatggttttgaatttgagatataactacgattcaactataaaagttgaactcccaataataagaattggaacttgagttgtgaactccaaatccaaaactcacacgtaagaaacaaaattacaaatgttcaaaatgagatagactactttaacttactactttatttggagggacactcaattcatcaaaaagttttatgactttcttacaattttatgtctggaacttatgagagtgcacatatcttttaaaatgatatgggtacttttctgaattcatcattttatgttctaatacatacctgatgaaccacaaaatgaaaagataaatcattagtgggtttgtgatgaaataaaaagactttaaatcaaaatatgagattcttggcttgaccaactcctctgtgatccatattgtttaaaatttatattgaaataaaagacaataatttattaactacaacagatgaactcattctctcatttattcttttaataagactcaagaaaaaggacatatgcttagcatgatagataagttttgatgaaagttgaatgctcacaaggtggaagaataattaatcaagtaataattaataaaagttggaaaattcaatgtttgttatatagcttattatactccaagtcagaaaaaataaagggtgtaataatgatttgaaattgtgttacttacaagttacttagagacttaagaagataagagcttacattagatatttcacttagccggcggcctacatataattcacactcaagattgttaactttaaaaatttgaatatgaaagtgaaacttagtatggtaatactcacaagtctcttagagattgtgaacaataatagtatagattcttcaaaaaagctctcttaaagcctcctacagaaacatagaaagaactaacaattgttagtattgtgatatattaagtaatgccattaaaaccttaaattaattttaaaaaaatgttcaacttgacttaattacatgtattaagattgttatcaggtatctttcttgtgaatatacattgtgagatgagtgaaagccttcaaatcctttaaaaatggattggaaaaaaaggaaaaaaaaataataataataataaaaaaaatcttaaggcatgaaggaacttcaaatttacctttcaattaatcaatcactaccattccgatagatcatgacaacaattacaaacacaaccctcgatctcatgtcatattgtttcaattactcaatcactacctttcaattaataataatatcatgacatcaatagtgtttcaacataaaatcggcagaagcccatgactcgatcccatcactacaaaatccaattatccttgtagagagttctaccaaaatcaacaggagcaggtggttattatttgttatttgttattatcgctataccgtgatgtatttcattcatgtaatttgtttttttaaaatttaatgagatttattttattatatataaataaaaagtgaccaatgaatttctcataaactattttatttttattaataaaccattttatt

SEQ ID NO: 169107 - DNA, 953 bp, Cannabis sativa
tgaggatggactactgttagaaaaccaaaagaatgtaaattgatcaattgtaaatggatcttcattgaaaaggaggggttgttaagtaataattgcaagagatacaaggccaaacttgtggccaaaggatttactcaaagagaaggagtagatttcaatgaaatcttctcacctgttgtaaaacatgcctcaattagagaaattatggctaaagaagcttctaaggatctagaaattgagcaaatggatttcaagactgcatttcttcatgggaaactatatgagatcatatacatgaagatgccataaggttttgatgacgataaagatatggtttgtttgctgtagaaatctctctatgggctgaaacaagctccaaggcaatggaatctcggatttgatgatttcatgatgagaagtggcttcaccaagagtgcatatgatccatgtgtatactttaatggtacactctttcttcttctctatgttgatgacatatttttaatagcgaaaggtaaaagtaagattagagaaatgaagtcactattgaagtctgaattcaagatgaaagacctaggtgaagctaaggaaatactaggcattgaaatcagaagatataaacatgcatctctgactttgacacaagaaaactaccttagaaaggtactacatatgttcaaaatggataactcaaaatactagacatttcaaactgtccaaagatcaggctcccaagacaaaataggaaagagagctcatggactcagcaccctatgctagtggggttggaagttttatgtatgctatggtctgtacaagccagacataacatatgcaatgaacattgttagtaggttcattgcagaccctggagagaagcattgggatgcactgaagtggattatgagatacatcaaaggcactcttgacctaggcctcacctacagcaaaag

SEQ ID NO: 169108 - DNA, 593 bp, Cannabis sativa
tggtaaaataaattccaacacgattgctaacatagttgcttatatgtacaattttaaatatgtgtcgcatttatattagtccacctaatttaattatttaaaataacatttttatattttttaaataattaaattaggtgtaccaatataaataccacacatgtttaaaattgtatacataagcagctatgttggcagccatgttgacagttaggatgacactttaaatttgttaacagtttgatgatttgatagattttactgttaaaatttaaatttagaaaattaaatgtaaatgaaataataatttagaaagtttaagtgtaaatttttttttttttttatatatatatatataatagtgtttttatcgacgaaaaaataaaaagtcacaatatatataaagagttgcatagttatttgatagttacctaaacaaacggaggcaacagacgtgaatgtttaatagttgatcacgtgaattagtaaaaggccaattaacaattttttccctcgaattttgacatataccaaattatacttcctgaatttttttggccgttaaaaatttcccatgaactattaagattgtt

SEQ ID NO: 169109 - DNA, 831 bp, Cannabis sativa
cgtttatatattacaactatatttaaattagatgtgttataaataaagtattggggatttgaaaaatggagagaatcatattttaatacgattatataattatattcaaagaaaatgattacataattaacaacttccaatttgactacatgtccccttttaatattatagactcttgaatagatctaaaacgcgttataatataatttgtcattttaaaaaaaaaaaaaattgatgtgcaaatacaaattctagatggccttgcaagggaaagacacgaaaacattaatcatcattgtattccctttcttgcaaagaattattttaaacctaaccccaataaatatatacataatttgtatagacttattcttcttcttcttctctttaatttgtacataaaaaaagattttacttggccgggtaattttattataggcttaaaattaatttattcactaaaaatatgctagcatattttacatcatgcaaaatatacttacaccatttttctcattcaattttacccttaaacaaataaaaatcaaacatccatctctctttatctcttgtatctctctgctctaccaatcggacgacccatcaccggagctagtgttgttcggccgccttacatttcaaaaaaacttctctcgttttttgcgtttttttcttctagtttacaagttttttttgcgatattttgcaatatttgacgatgtatttgcaatgattacacaaatctgaggtcagggatgtatttgaccattggacctggtggggtttttctttttttttttttttctttcggttagaaagagatgaagagag

SEQ ID NO: 169110 - DNA, 600 bp, Cannabis sativa
ggaaattcgccatgtcacaggtgcgtcatatgtttttcattgatcggttttaagatgaaatctcataattttaaggcaatgggtggcgaaactaattaagttttaatttttatagactaaactcgtttgtgtgtggcaatactctcttaagttcacttttatttgcaaatttaagacatcagttaaattctacatgtgtgcacgtaacattaaaatctcggagccaacaaaaatatattacgtatgcacaaatgtacaccggggcaattcatgtgacatttaacagtggaatttaattcaaatctgcaaataaaagtgaaatttagaaagtgttgccacaaaaataaaaacatcaaagagttaattgtataaaattaaaacatatgagatatcgcggccaattgctctaatagtttaacataaattaactaatccacaaaaaaaaaatgtgtgtaacaatattgaacaattcaaaataaaatctatgataagacaaggtatcattatctaatccaatttattcttaatactggtttgtttcaattttattttttcaggtggattatgtgttggggaaaaatcccatggagatgagctatg

SEQ ID NO: 169111 - DNA, 702 bp, Cannabis sativa
gcttatgtgtatatttttgtacacataacgtgtttatatagatacacttaatatcattatttaaaaattattttcaaaaaatattctaaaattaaataaaatattttttaaaaaataaaaatattataaattttgaaataatttatatacttttaaaataataatatgaggtgtaccaatataaatttgacacatgtataaaagtgtacatataagtagtctatattgacaattaactgtaaaaaaatgaatgacaccttaaatttgtaagtaaaacactagtttgaagggtttcgccgtcaaaatttgaacttaaattatgtgtaattaaagtgatagttgagaggatttagctaaaaaaaactctaatatatattaacaatactaattattctttgctttttaataattttaagccacttaaatatttaattaccgatattcacctaattttatgctttaaaaattaaataattatatcattaaaattaaaaaaaaaatagatatttgagtgcaacacataaatacttaaagtacagataaatttttattaagtatttatgctgtcaacttccctaaaaatataatattagtaagttcaacattcatctaatgaataaaaaacacaaaggccatagacaaaattgttttctcataaatgagtaagctaatccagaggggacacaaaattttgtatgaaac

SEQ ID NO: 169112 - DNA, 1174 bp, Cannabis sativa
caatatacatgacaatttatattgataattatttacgagaaacaacctagtagcactaggcactattaatgtataattgcaatgctcttaaaaaaaaattgttttaggacactcatatagtgcttagcacttttgtaagttctacttataattaatatcgttattgctgtaattcaatatcaaatctcacttattctactttaataataagattatagaaaactcttaaatagtaataaggcactacctcataattgtgctagctagggagcttggtgtcccgtaacagtcatcatagtaacacaccatgaggtgatgatctataaataattaacgattttttataatctttattaaaagatttatatatactgcatgtccctaaactatataagttttagtaagttggtctctaaattttattttttgacaaattagtccccaaactataaacatttgggcaagtttatttccaaattttattttttggtaaattagtccccaaactttcattttattagtaacattaagtccgcactcttagatattgatttttttattattttttatttattttacttattttaatttttttttgttaaattaaaataattattttttaagtatttgtacagtatttgctttctcaataaaatatttaaaatatattttattcatatatattattaataagataaaaaagcataaacactcacagacccatataatgcctagaagaaattctagctcttcacgttttttatattttaacatttatagtatattttattattgatgtatgaatatgtaatattataattttaattatatatatttaataattatttaaattttacatcaacgctggtaaaatttcataataaatttcccgttggctataaattaaaaataaatttataatataatttcccgttagctacaaaataatattttactacatatatatttgaaattaataaattatcaaaaactttaagagtggagactttatatttctaagaaaataaatattaagggaccaatttactaaaaaaaaaattgaagaaacttattaaaacttgtataatttaagaactaacttgtcaaattttatatattttagaaacatgtaatacttattaactaaaataagtaagacttgatattaaaatgc

SEQ ID NO: 169113 - DNA, 725 bp, Cannabis sativa
taaaatatttgtgttatatataaataatttataaaattaatattaaagcaaatttttattaactaaataattaatcttttactgtaataaataagttgtaaaatttaattttataataattaaatgtataaatagcaataaataataagagaattttttacgtgattttgaagttaaatatttatagtccacgagtccatcttattcaaaatttatagattgtatacagaatacaattatactgttttttagaaatgaatgataaacaatctcaatattatctattttttcaaagattgatcgtccctaatttcttgagttctgtccctatttataaaagtttagaatgacagttaatttgattattcataactattcatatgaaacgtgaacattctccacgtttcatttttatgcacataagataattataacacaaaaataaaaatataaatcttacatattaattaattatatatatgatgataaaatattaaaaaagttaaaattaaaattaaatttatatataaaaaaaattctctgcatgacctatatcatcattattattagagaacattgttctacatattaatattaaaatattgaatcatatataagaacatagactactccattcattaccaattagttttaccaatttgtttcgagatggaacctcatgcatcttaaaccacatcttatcaaattttatcatggtatgagag

SEQ ID NO: 169114 - DNA, 1227 bp, Cannabis sativa
ttgattatggaatatttgactagatggttgattatggctgctgatcaattaaagtttaaataccaccctatgtgtgagagtctcaaaataattagtctctgttttgcggatgatttgatgttgtttaggaaggggtccctaagctccttgcaggtgataaaaagtgttttgaatgagtttgaggccgcttcgagtcttgccatcaatgcaaacaaatctcaactctattttggaggggtaaaagcagaggaaaaacaggctatgctgagagaaatgaacatgttagagggagtttatcccctcaagtacatgggggtgcctctaagaccaaccaaatggaaagcggaagactgtggggtgattatcaagaaaatcaaactgagacttcgtacttggtcaacaagacatctttcttttgcaggtagggctcttctcattcattcagttttgcttgggcttcgcaactactggatgagtatattcgttttgcctcatagcattacaaaggagattgagaaactttgtagagggtttccttggggttggaatggtaacaagagcaagttgcatgtggcctcgtgggagaaagtttgtcttcctaagaattatggtggcttaggattcaaagatggggtcaaatggaatcaagctatcctagacaaatatatttggaccatttcaaccaaaagtgacattctttgggtgaaatgggtcaataatatatatctcaagaacaattacatttggacctatgatcttaaaaatgatgctagttggtattggagaaaactttgacatttaagagataagtttactccgtgtgagcttactaatgctggagatgccaaaggccgactcaacacgaagaagctatacaatagcaaactgcagcaaactgtttttgagatcagcaacagtatttggagcagtgtcatagtgcccaaacacaggtttgttttctggcaggctgctaatgaccaattgctaacctgggataaatttgctcgcttcaaaattatcctggacaatgttgtttgtccagtttgtggggctgaatatgagtccaacaaccacctattttttgcttgctgtctttctcagcaggttctctctcaggtttgcaactggcttgggataaccaattggccaagtgattttcaagagtggcaaagatggttagtgaagatcaagaaggataaaatacagcgagtttacaccacagtcatg

SEQ ID NO: 169115 - DNA, 754 bp, Cannabis sativa
gaagagaaaggaaaaacacagcgcccacaaccttcctaaaaccaggtcttcataccactaccacaactggaaaccaaagcacaaagaagaaaagctctcacaaaaatctaacgcaaaactcaccctggacccaaactagtcgcacaaccaaaacaataaataaaataaaaaatccctgccctaaacgctcctctcacgatctctctctctgagccctaaacaaatgatccacaggctacaccctaacagataacaggtgtaagatcacagataatcaaaacccctttggtgttgacacaatttttggagcgatgaagagcaccgctgacggaggtgtattcaagaaacaagatgataaagcatacccactctctctctctctcttctctctctctacacatcacgtttcttgatcaaaccttttgttttgaagtagtgctcaatatataatgatgttattctaatcgaagggacgaatagtcccttcgattccaatttaaattttctacttatattgttacatctttttaaaatatatataacaattataacatctgtgatttcttttggactataaagattaaaaattattttttttttatcatgtcttttattaataccaaattttcttgtttttcttttgcgggaaatttttccattatacaaacagaatgtatggcaattgtggtcgttgtggattggattatttccttaggatttgaaattaacattgttgaatttgattgtttagcaa

SEQ ID NO: 169116 - DNA, 563 bp, Cannabis sativa
tatgctagtcatatccacacataggaaaatgattttgtataagtaaaaatttatcaattaatttccttttcggagttgttttcattttcaaatagtgtttaattgattacgtatttattaatattcgtttgattggtctaaggttatacaaaaaaatttgtttaagtcacttcttttcttttaatttagttatttttttttattgtcgataatgttactcagaatcaattggtaagatgtcaacaattacgtgaattacacaaacaatttcaaccagcctctctttcggtggaagaacaaataatcactatttatgttggaatgaatggttaacttctattcaaatacatgcgaatgatttaacaaatccagcttcgaccacgacatttatatatttagatacgactaccgtactatcaacaagatttgtcgctaaagacatctattgaatagttgaatagaacaaattctacatgtacacgcaataaaaaaagattcttctctttatcggaataatatggtcgttatgctcattactaaatttgttgaagagatgaaatata

SEQ ID NO: 169117 - DNA, 864 bp, Cannabis sativa
ttaatccttttgttgagttgattttcaactttagctatgtaagctttgaacacgcccacatactgagatttttcattaatgagatatatgtacttataacgtgagtaattgtctatgaacgatataaaatattattgaccatttcaagatgttgtagggaatggcccacaaatatttgtgtgaattaattctaagacttttgaagctctattgacacataatctcttagttttaatctattttctctttatgcaatctacacagacattaaaacttgtgaagtcaagagcgtctaaaatatcatcaggcacaagacactcaattctaccatttgagatatgacctaagcgtttatgccataatggtgctggattttctttatttaatttacatttagaaacttgtgattccacatgcaaggtttcattataggatgcaattgtttctagcaaataaagattgttgtaagcattcaaataaccagttccaataacatttgaatttaaagaaaaagtaaactgattgtttccaaatgaacaacaatatcaaaaattatccaacaaagaaccagaaactaagttacgtctaaaagacggcacaacaaaagtgtcttttaaatccaaataaaaactagttcccaataataatctaaaatgcccaattgcttccacttccaccaattatccatcatggacaaagatgtgtcttttaccactatttgactttcggtcgctcagacaaccctacatagaaatacttatttgagtagtagtagcagagtctatccaccgagtgcttctaggtactgaagctaaattaacctcaaaacagaccaaagcaagattaatacatttctttacacgc

SEQ ID NO: 169118 - DNA, 667 bp, Cannabis sativa
gtcatctgtcgcaaatagtaattaatttgtgtcggtggtatctgtgacactaaaaaataaaccgacactaaaaatgaactttttttaaaaaaaaaaaaaaattatacatttagtgtcaattaacatttgaagcaaaaagcctatgaatttacaaaatccatattccaaattaagtatccccaattcgcgagtcttccccatttcaaaagccattactctcttctctctctctgccctaaccccaaaccccatgaacggcgatcgaagcttgccccaaaccccactgctcgccccaatcgcactctgccctcttctctaagctctggccattgacgcaccaccttactccgccccaatcgcagctctcttctatctctctctctctgtgctccaaaccataaaccccattgacgtcgaaaaaactctcctccgctcgctcctccccctctcgttctctcctccgttaaaggcaagctctctccctagcattgtcatttttgttcaggtcaagttcgcacaaaattactctaacattgttgtttttattcaggtatatatattttaaaattaaaaaacctgttataccgaaattaaatacagtaaaattggaacgaattaccgatagaataatctggctgagtcgcggacaatgtcgctctctttaaga

SEQ ID NO: 169119 - DNA, 574 bp, Cannabis sativa
atttggcattgttggcaattttttgctatatgctttgggatgctcaatgactctccttgctcgaatgcttaatgggtttttgtgttgcttccctaaaggataaatagtttaataaactcttcaaaatgagttcattcacatttcataccaactagctaccaaatcaattgtaaaaatatgacgtctggagaaaagtcaaaactgaaattaaaattcaactaaaagtgtaatgagaaattataaggctatttgattgtccgagtcataggtcctaggtccgtgtcttaggtttgggattgggtgcgaatttggatcctaggtttgagtttgtgtttcggtcttgaggtaggggtccggtctgtgtcccgggtcggagtcctctgaggttggggtcagtctgtgtccaggtcttatgcccgaggtcggatctgtgtcccaggtcctgatcttaaagttggggccaagtctgtgttcttattaagagttagtcccacattgttaatgtgtggaaataaattgtgatatataagatgaaagggctactcctcccattgccaattggttttgggatgga

SEQ ID NO: 169120 - DNA, 652 bp, Cannabis sativa
aaatagcagttttttgtagtgtaccattagtctaatgatgtactataaggaatctccattactggtagcattggtagatccatttcaatttttaaagaataatttgcagcataaatacttaagtttaactcccagttataaataaaaacttaagtttaatttttggcagtaataatacctaagttatatttttgaaattttgtagatacctgactgttaagttattattcacgtgttatttttttattggtatatttaaattatttttttaaaataataaaaatttaatgacttggaccaattaaaaattgtcacgtgacaatttacttaacatttaacagtcaagtacctaattacaaaagttctagaattataacttaggtattattaccgcaaaaaattaaacttaagtatttatttgtaattgagagttaagccgccaattattattttttaaaataaaatatctataaactaaccgatcaggaagaaaaaaaatagcaccagtgcctaacataaacaacaatgccttaattgcctattgtttagaattgaaaagttaagagcatgtttggtattgttttttgttttttattttcaaaaaattgtttttagaaatgagaacaaaaaataatttttgaagtttttaaaa

SEQ ID NO: 169121 - DNA, 778 bp, Cannabis sativa
  modified_base (751)..(752): a, c, t, g, unknown or other
tagagatgagagaaccagctctgttcttgagctggtttctgagagataatcaacaaaaaatgaataacaacaacaaattaaagagattagggtaagagagagcaaacacagagagtttttttacaaggttcaccaccaaatttggggctacgtccttggtgagctgcctcaatgaagatcagctacaatccactatcaaaatcaaagattacattaagttcctaagctccaagacacaagagtcatcttggtagctcgatctatcaactcaggtatgtacaacttctctcactctctcttattttcttttctcttaggatctaacaaatcctcttttctttttctctctttctcttctaactattttctttcctcttttgaacgcgagatgaactctcactagatttgaacttctttttccatctctttctgaatgtgagaagtaagtttgaagttgtaagtatttctgggcttgatttcttctatatatagttgatgtgtagctgagtaggttagttagcattaactaatcaattcttgatctttatttctaatagttaggttagttaggctttgtattaactaactattttggcttctaacttgtgacaggtcatcttatatggagaattatttcaacaacttcattgataaagtatgctaaaaaaattagcaatggtgtttaattaatccaaaagatttctcattaaaaaaaaaagaagaattaaaagatgttgggttttatgccctnnataaaactctttacaatctgattagt

SEQ ID NO: 169122 - DNA, 895 bp, Cannabis sativa
attagaaatcttctatgacaaggccaataatatttgtggctccttggcaataggagacatgtcggatattttgttgagatttacctcttagcatatttgaaccaactatcattctaagactttctaagtcaacttaaagaaaaattcggattcaatcacccaatgggatgttaaacaacacaacacagaaaaatgtaattagtttttttttttttttatgaatatgaaagtcatggtactgctcaaactccaacattacaatttccaattacaaacaattcaccacccacctgactatactaaaagccactaagaaaaatatagcagtagacaaatttaatcggcaaaaatatggaatattaattaatgtaaagaaaaatatcatttacaataattaaatcatatttccatttctttggttatttaatccttaattattaaaatcatatttttttcaaaaaaaacaagtagtgaatccctattaatttgcctttttcatttgttaacttcatcacaaaattagaaaacaaactccgcttcgcatacgaatatattatgtttaatgataattacgtcaatagaactagaaaaaaaagttaaaaaaatatagtgaaaaaatatgttttgttatatgttgatgcgatttttcgtcaacttaatctataaagattattattttaagaataaattcaaagaaagcagagacataaataataaatgaagagcagatattattacgtagttttgtagttaaaatgtacatacttcacgagtccatattatttctgagttttggttgggtttacaatttgatagtttctgtaaagcagaattgctcccattttccctttgagtgaacccctatttataggaataagatggtggttactcaatc

SEQ ID NO: 169123 - DNA, 599 bp, Cannabis sativa
  modified_base (563)..(564): a, c, t, g, unknown or other
gcttgaacaaacactaaacagtcgctctggaacaatgttagaatttggtaaagatacataaaattttatctcaaaactaattgacaatgagaaaagtcatcttatatatgatatttagtttccacacatcatctctttaaacacatgcacacaaatgcataaattatggccacgagaaatatgagcacaagtagaagtagtattcactctttattggctttctgatgttactatagctataaattacttttctaatctttgagatttgcatagttatgtttgtaaagttatgattacgctgaaggttgttagtactcttgaaatttaataagctataagaaaaaaaaatattgcatttttcaaaatttgtaaaacaaatgtgtaattttgaaagaggaaaaaaattttagggtctctacattaggtggacttcaaacacgtctagttcatctatatatgcccagaatcgggcctaattacccttaacaaattgagcagtgccacatgtcttgaaaaattgtcatgaattgtcatcttgtattgtggacaatgtctcacatggnntaaatggtagagaattgagtcatatataagaacat

SEQ ID NO: 169124 - DNA, 700 bp, Cannabis sativa
tttttcatacacggatttgattttcagttgttatctacgatcaaaatctaaaatcgtgttttcttttcaaaaatttgatctcctcctccatctccacgttctactttgtaactgcccacaattttccctttttttttttcattttataaaatgctatatacaagggcggtgacttggtccttatctgcaccttcaccattgttgaagaaatctggggaaataggtgttaaagcttgggccaacaaagctaaaggtaaacgtcctattgatgacaataatgattctaattttgctctccctgttacaaaacttgttcgtcctcctcagaagaagaaatgaaaaactgttaaggctgagaagagtcctttcctggaggctaaaagatgaagaagtaatctgatcatattatcaaggttttatttccgttttatttttcgttttgccataacttttaaatatttcattttttatgagttatgttttccattcgattttagtataggttttacattttttggttgtttaaatgtttgattactactttgaacatttgttaggtttaggttttctttttattttagatttttttttttttcagtattgtaacattttaatgtttgttttattgttagtgaattgtattctttatcttttttttttctttcgttttggtttcactaaacccccacaacccaaattt

SEQ ID NO: 169125 - DNA, 1016 bp, Cannabis sativa
tagctatctatcctatgttttttttttatgactgcaaggttatgtctcaaataaagtatttttcacaatttttgttttacatataccatattattttaaaattaaattaaaattgcgaccactcgagtttattttacaatgcatcctttaaaagtggtgtattgctacactcttatttattttcgtatttagaaaataaaattttagtcaattttttcataattatatatgctataattatataagatattttgcaaaattttgagaaattcagaaaatttaacaaactgaaaatgggactcaaagagtttgttgcatgtgtgattttttattttatacgcacgtgaaatagatagtttgaacattgaattctttattgtaaattattctgaatttttcaaaattttaaagaatatcttaattcttaaataactataacgtataccactattaaaaaaattacactaaaattttttttagatatcaaatcaattagaggttgtactaatagacccatttcagagagtacattgtagaaggaccctaactttatttatgtcgatgaataaataaaattatgatatttagtcaccgacaaatatttaggtgaatcaatgataaatattgtagtagtttgaatgttgcatctataagtgaaacaaagaaaaaaagaagatatttgaatttcaaaccacgtgattcgctataaattaaataaaatcaagattaatttaactttgtttttttataggaaaaagtcatcaaaacaatagctaaagattgatcttttgtcgttataccttttattttaaattgtattaagtaaatatttctaaaatttattaaaaaaatcactacaaaaattattatttttagtgataattttttacacaatataatttttttataattaaatgtgacttttagttacaacaaaatattacttgtaactaaaacatattatttagttacaggcggcctgtcactaatttagttttagtcacaacaagtattgt

SEQ ID NO: 169126 - DNA, 1388 bp, Cannabis sativa
tgctagttagggtgttacaactttatagtcatttgtttgacatgcaacagcttcaacccatttagacacatagtctactccaacaagaatatacagatttctaaaagagctaggaaatggtcccataaaatcaatgccccaaacatcaaatatatcaacaatcaaaatgggatttaaaggcatcatgtttcttttagttaaacttcctaacttttggcattgttcacaagatttgcaataaacataagtgtcatgaaagattgtaggccaatagaaaccacattgtaatatttttgcagcagttttcttaccgctaaaatgtcctccacatgcatgatcatggcaaaaagatattattttagattgatcacaatttgaaatgcatctacttatgatttgatcgagacaatatttaatcaaataaggatcatcccaaacgaatgttttggtctcagaatagaatttagatttatcatgtttaaaccaatgagaagttatttcacctgtaaccaaataattcacaatatctgcataccatggcaaagaggatacatgcatgagttgttcatcaggaaaagtttcaatgataggagtagactcattaatagttttgacaactaatctagaaaagtgatcaacaataacatttttatatccctttttatcacgtatttctaagtcaaattcttgtaaaagcaggatccaacgaattaagcgagctttagcatcttttttagacaacaaatacttcaatgcagcatgatcataatagacaataattttagatcctagaagataagatctaaatttctccaaggcaaaaacaacagcacgcaattctttttcagttgtgcaataattcaattgagcatcatttaaagatttgctagcatagttgatcacatgaggtattctttcaagtctttgtcctaaggcagcactagtagcataatcagaagcatcacacataattttctaaggaagattccaatcaagaggtcgaataatgggtgcagtggtcaaaagagtttttagtttattgaaggcagcatgacatttattatcaaagacaaaagcattttttttccaaataaatgacataaagggcgtgaaattttgctaaagtcttttataaatcttctataaaagccagcatggcctaagaatgatctaacttcttttactgtttttggaggaagaagttttgaaataagatctgccatggatttatcaacttctattccttcagatgaaattacatgacctaaagtagctccttttttaaccataaaatgagatttttcccaattaaggactaaattcttttctttgcaacgaattaaaacaaggaaaagatggtgcaaacattcatcaaaagaggatccaaa

SEQ ID NO: 169127 - DNA, 1854 bp, Cannabis sativa
gacacaaaccatacaccagcagctcctatcgacatttctggtgcacatatgcctactgctactgctcctgccaatccagaaaatacatcagcagcccctaccacaatttcccttgcaccagaacctactcacaatcccactgctccaaatcctacagcaacaagaagaacctctcgtccaaccagaccccctacttatctacgggactatgaatgcaattctgcaatccaagaccaatcttctactccacatccattacataaatttctttcttatgacaaactttctaaatctcataaagcgtttattcttgcagttactgctctctttgaaccaaaaaattacaaacaagctagccaatacaaggtgtggaatgatgctatggacaatgaaatttttgctctcctcaaaaataaaacttggaccgtgatcaaattaccccccaacaaaagagctattggatgtcgttgggtctacaagatcaaatataatagtgatggctcggttgagcgatgcaaagctcgtcttgttgctcaaggctacacccaacaagaagggttagatttttttgatactttctcccctgtcgccaagatggtcaccttcaaacttctattggctatttcctccatcaagaattggccgactcttcaacttgacatcaataatgccttcctcaacggcgatcttcaagaagaagtctacatgacattacctcccggcttcacccctcccaacactgaagacaactccaatttagtttgcaaacttcataaatccatctatggtctcaaacagtcttcacgacaatggtataaaaagctttctgatgctcttttaaccgaaggcttctcccaatcccaagcagattacacattattcaccaaaggatcccataacaccttcattgctctactcgtctatgtcgacgatattattattactggacctaacatcaacttgctgcatcaattacaagcatctcttcatgcacagtttcaactaaaggccttaggacctctcaaatattttctgggatttgaaattgctcgttctcccgaaggtgtctttctctctcaacgaaaatacacactgcagctccttgaagacactggttacacaagcagcaagcctactaaaaccccgatggatcctcgaagtaagcttgatgatcagcaaggcactctcttagccgatccctcatcctatcgacaactcataggcagactactgtatctaactctctcaaggcctgatatcactttcgctgtgaacactttgagccaatatatgtcttctcctcggacccctcacttgcaagcaattaaccatcttctccgatatctcaaagggagtcccggccaaggtttgctttacaaatccagttcttctttacacctccgtgggttctcggactccgactgggctgcatgtccaacaactcgacgctccataactggtttttgtatcttcctcggcgattgtttagtctcttggaaaacaaagaaacagaacactgtttctaaaagctctgcagaggccgaatatcgtgctttggctagcacaggcagcgaaataacatggattcagtacctcctgaatgatttccaaatccctcagccgactcctgcatttatctactgtgataaccagtctgcaatccacatagcaaataaccccaccttccacgaacgaaccaagcatatagacctcgactgtcacttcatcagagagaagatcaaagcttccactattcgactaattcctgtcaacacaactttgcagttagccgatgcttttaccaagcctcttccctctactactcttctttcccatgtccgcaagatggctgtt

SEQ ID NO: 169128 - DNA, 816 bp, Cannabis sativa
atgcagcgtcctgcttttagagagctttttataattggtgatgcttttattttatttgacttttggaatccatgaaagagaacttgcagtagcactttagatctataaacttggtcattatattcttgtgtgacctcaagtgtttatctatcaaatcataatagtgcttaactttggggtgtatatagtttgtatgtgtgattgatgaacttactgaacaggaacatactagtacttgcactagcacttcaagattaagaaacttggtcactaggaataacgccaacatttcattaatcatactaactcatgtctgtaaaattttttgaatactcctataactcctagctcccatatactagggtaacacctatctcctctataccaaggtgtatgtgacagacatggctattgtgtacaatgttttttttgtgaatgctcatgtaacatacataactctcgtaaatactcatccaataatctagagatttgttggttggcagtgtttaactcactaaagaaataattatagttaccttcagaccaactctacaagctttattcagcacttgagagcatcatcaagtctgtgagctgcaattgattaataagaatgaagtaccaacaatctttactcaatgattttattcattagatattaaattcaattacatcatcattgtagctagattgaataaaaaagaaatagaatttgcaaatttgcattcttatcaaagaagctaaattaatccccactacaccgatgctctgttcgactagcaatgcaggggccataacttggtgatggacctcttg

SEQ ID NO: 169129 - DNA, 793 bp, Cannabis sativa
gagagagagagagagaaaagaaagcttgactgaaatgtttttagggttacaatttattatactgtgtgtgtggttgtgtggttggttattgatattttttttatttttaaattattttttgttttgctaaaggtatgtgtatttattatttatttattcatgtctttacctaggcccacgcatgcttttattttttgtcatgatatttgctttttttttttattaacgtacagtgacgcgcataatgcgattgggtatgcatttcccaatatgtctggcgcgtcgctataccatattttaaatttgtttaaaattattaaataaataattatgatatagtgacacgctaggtaagtcgggatatactttcccaaacgttcctggcatgactctataagttagtatttttaaaaataaaaaaaaaaatagaaacttatgggtattactctttagtgacacttcataattttagtgactcacattacaagtgtctaacactaaaagtttagagtctaatttagtgtgtcactaaaaaccaatcctaactctttagcgacacgcaaaaatgtgcgggtcactaaatagtgtcactaaaagaccaaattgtagtagtggttcctcactggcgtagtctacgccctcaaccagaatgtcgctatcagcatcgactggctccccggcctcattgcatcccccatagtttaggcgtgcaacctcctcctcttcctccgccacggagggactgctaggacggacatcgtcctgctcctcaatctcttggacctcagcgtcc

SEQ ID NO: 169130 - DNA, 1024 bp, Cannabis sativa
caattgataaagcgactcgactcactgctgattgtatttttagtggtgcagatgtgtcgcctgagttagcctctgttctaaaggctgacttactggaataaattttgatgacttgagctaaagaaaaataacttttttttttgttgaaaaaattggatgcacccatgacctacttcaagttgtccaacctcgtgctttaggagcacttctgtcatcccaacctaacagacttccaccattgcactcctaacatcagatctaagataaaaaaaatgatgcaatgagatatggagagaaaggatagaaggagagatagaaaaattacataaatatacgtttagctcaccctatcgcagttgtagacacacacatgagccaacgatgcatggagatcgagaatcacagatagggagatcgagaggaaaactagagacatgcttaaagggatagaaagacattacaagaagaaaagagtattagtgaggacaaaaagtcgtcattgaaaggtatgtttttcgtcactgatgagcattaatggcgatagttgtcatggataatttgtagttaaagtctatttcgttattgaaaatagttattaaattttagttaatatgtttttttattttttattttttaatacgagaagctatattaaatttgcctttttttttcaaaaaagaaaatagtaattagatttcaattttgttttataaaaaattatttaattttatataaatattatcttaatggtaaagccatataggaatcttatcttccatacccacaatctgggttccaccaatagtttgttcacaagttgagttttcataactacaatctgttaatgcagatttttgttaaccaataaatgagttttaaagtaataaatactctaaaattaaataactagtaaaaataataatgataaattgcaagaaggttcttaacgtggttttgaagttaattcttcatactccacgagtccatcttattttgggattttataaattgtatacagaataca

SEQ ID NO: 169131 - DNA, 646 bp, Cannabis sativa
gagttgttatttgagtgcatgttgtatacggtaatatatatttattactacatatttcattttagttttcgtttatgaatatggcattttgtgttcatcaaatagtttcagtttaattctcacgatctaattcaattaaatatgcacataagtatgaattaaatttaattaaaaaaagtacaaattgaatattaatttacattgtaaaatttaattaaatctatacatacttataaaaaatttaaaaaattatataaataattaaaattttaatataaaaaaaataatttaaaaatctaatacatatgatataaatatatttcaaaacttaataactcaaatatatattccattcatatatatattttacataacattaaatattcttcgtaatacaatttttttttcttcttttgaatttgttatttgttattttatttattttaaattattgttggaagcataaaacaacactaatttattttattttgttgttagttatataattttttttttataaatattaaataatttaatattgaaaagtaacttatctaaaatatctgatctaatctgtatttttctgaattgaattggattagatttaagtatttgtgcaataaattggatcaaaaatataaactct

SEQ ID NO: 169132 - DNA, 873 bp, Cannabis sativa
  modified_base (661)..(665): a, c, t, g, unknown or other
  modified_base (832)..(838): a, c, t, g, unknown or other
agctttattttatttgtagttgcaaccttcaattctcaatcttgaagaacaggtctcggagcttcgattaaacatggcagtgaccatgaaattgtgggtttctcaattcccaaaccaggggcatcctcaccgatttatgctgaagcttaaaccctcctagaaggtttaaattggtgcctgacaattcatttgcaaccaagtcttgttgcatctgattgttctcagttagttctcaaagtcaaaagcagttggaaagataattatgctctttcaagccttgaggaattgattagacaatccttatcctatctctctaatgcctccctacaactcatccccaggtctgaaaataggaaagctcaccattatgttagggaagcatttcagcgtgataaagactatatctggagagtttaatttttcctctttgtgtgtagctgcagcttgtgtttagttctctttctcttctcaccgcagttgcctaaaaaaaatcttcaagacacggctaaggtcatccaaaaatatatacacacatcttctactaaacacacataaattacataaatctgatgcacatctatataacattaggagtaggggtgttcatcgtgtttatcaaaccgctcgcactgcaccacaccgcaaaaaaaaaatgcggttnnnnntttttacggtgcggttgcggtttgaatttttcctaaacagcgcggtgcggtttgcggttttgaattattaatatgcggttcaaaccgcaccgcaccctacattataaaaataccaatttgtatatttatttaagtctaatatatgaatgttcaactcaaagtccacnnnnnnntgtattgttgacacttaattttttttttcatattt

SEQ ID NO: 169133 - DNA, 720 bp, Cannabis sativa
atgatgatgatgatgttagttggagttggaccaagtaacatttaaagggtaattaatggtactaataggaatctgtaatgttgttatggagagtacaccataatgttgatgatcataacctgttactcctactagtactactatgtgtggggtcaaggcattataaccccatcgaagacaacactctacaccctttaaattatcttcattaattaattagtaatatacttaataacaacaacatatatcacaccttaataccacactaatgatgtggtgccttataattttttagcaatttcttatatcatgttaaaaaaatgtgaataaaatatactttgcattttatccatattgactaaaaatagaattgtttctattctaaaagccttatataataactttgtatttttaatccaagccacaacacacacagagtctcactcacgctcgtctcaagccaattaataggggactgagccaaaataaactaatttggccttttatatataaatttctttattttttttttcatatctagtggtaaaaatataaaatatatagcattttgaaaatataatttagtattttatcttaataaaatattaattgtagtatcttaaaaataaatgagatattttttcaaaaatagttatatttttttggtaaataatagttaaaatataaaatattgttataaatattaataattatgtggat

SEQ ID NO: 169134 - DNA, 763 bp, Cannabis sativa
gatgcaaacatcaacaaatagtgtaagaacttgaacttagatagctcttcatctaaccaaatggcatgctttatcaaatcatgaactgctaaagtcagcaagcaatatgaatactatacgataaaactgtcctaaaaaatttagacattaaagctataacgtcctcaaacagcacatccaaatagctagagctttagtttgtattactgaatactacacaccaactcattaacatatcaaaaatggtcttcaaaacatctacaaaacaaaataagataaaaaatgaattgatcccctagcgatgatattaaactaataaaagaaatttcaataatttcaaaaaataaaatattacattattcataaaattaatatattactattaaattactttaattaacaagagatatttatatttaataaaaattacaactccataaatcaatttctatactattaaaaatatgataaatataacaaattagaaaaaaaatataaaatataaataataataaaatcttattagagtaaaaataattaagaaaatttctaattcaataaaatgaaaagatttaaacttaagttttacaaaaatataatatacaagaacaaaatcaagagaaaaaattactattaatagtaaataaaaaatatgttgctatgaaatattatttatagatgtccaaattactaaattaattatcaccattaatgcttggttgtatttttctttattacattgatttagtttttcattctttta

SEQ ID NO: 169135 - DNA, 866 bp, Cannabis sativa
tggaacggctgcggggcggtgaaacacgattgaaagggctgcgccggccgcacggtggtggtgatagatcatgttgaaagggcacatccgaatttgcttgagcaacaggcataaaattattattgctattggatacaccaataataataataatcaacaacaaaaccaagtttctaatacacaacatttttctttctttctttctttctttcttttcaaatgataagaatgaataatatagtaattaatttgtaaactaatgagatgatatgtggagggagggagtgagtgaaagattagatttttataatgttgatgaaccaatctactcttgacacttgtcacttcttgattcggtgaggttatatataataatataaaactttctatatccacttgacttgacttagcccattgcaataataatctaggtaggacctactctagttagtatacttgtcttgtgttatgtgtcacacaattcaatcattgaaaagtctcttgttccaaaaaattattgaaaagtataaaaaagtaatattccttactaatattcttgaaaattattatattcagtcatatataatctcttacttaattcaactactaacaatattaatacctagaagaatattagacataactaatactttttaatatttcaaaaaataaataaattagtaaacaacattcatagtcttagttgatgaaaaaatcacaaatatttttttgatgagcattgctattaggcattaatggtgcctaataccctcaagacatgttgtcttgcgattggctagtgatactccctcaaagttattatattaaactatatagaacctgatacgtaattagaccaatagcga

SEQ ID NO: 169136 - DNA, 838 bp, Cannabis sativa
gcagagctcttggaccaggtggccgggagtgcctcgaagctacccacagagacttaggtatcctacaacaatgcgaatgtttttgtgctggctcacttcgcaaagtggtaagccattggggtaagtcttcaagacactagctttttatttttctctgtcctttgttttggcgtttcaaccttcttacttggctttatttcttaacaggcgcccttgctggcaaaaagggccaccgtggaggttggcgcactagtgagggagctggagtgggtcaaggcgtcgaaccgtgacctgggcattgacaacgagaccctctaggctgagctcacggatgccaagtttcaaattgagggcctgttgcaggccaattaacagttggaggaggaaagtgcccgccaagctcgcttcatccaaataatgaaggtcgtccacgacctttacacggagactgtggagcggatgtctggcgtgggtccttcctctcgtcaggggatgcgcaaccatgaacctccaaccgaaccattattaaatctatttattttgtatttctttttactttctttttgttagtatatccctctccttaactactctttttcaaccgcggagacaattaactttttcttggctgcggggagctttttaatagttgaataggatacttttgttgttcctttcttagagacttgctgtgatagactgtttaggggctggttgcatttcgaaacatctcgttccaacggctagtgtttcaaccttttcccttagccttggttgtctcctagttgcttcaggaactattttttatttggcccttcctttcccggggcagcaattt

SEQ ID NO: 169137 - DNA, 533 bp, Cannabis sativa
  modified_base (485)..(495): a, c, t, g, unknown or other
gagcactcatgaattaccagacatgcaaaagacctattcgcgcaatgccgcgtcaaacaacaagaattgtgggggtataatgtgtcttatctttttagaattggtttgtagtccaaaagacaataaattcaaaacattttttacactcatgtattttgcccaataaaatttatttttctaaacttccttttgaaacatgcaggagaattgttgtaagttatagctatatgaatacatttataatattatatatatttcaaaagaaacataaacgtgactcattcattttttttgacttggtaatatatttgaagtatattgcattcctatcaattagcaactagatccattatcctagcaacgtcttttttgacgttagtgcagagaattatatataatcactcaatatattaagtattaactactggtatatatacatatacatagggtaagttgaaaaataccccttttattaatcaattaannnnnnnnnnntctaattttatatttatttgaaatatacctctttttat

SEQ ID NO: 169138 - DNA, 548 bp, Cannabis sativa
aggaaaaaggagattcattataaaaatatgcaattttttgttggacttaaaagtaatatctagtcttgaaaattggatgtggtaactaaaaaatcatcactacataaaaagtaattgtagtgaaatcactacaaacttatagaccttttttttcaaaagatataattttaattttattatataatcattaatcactgtagttataacaaaacttccttttataggttccctttttattttaataatttagtctttcaaaaaaaaaatcagttatctcattgaagtatcaaaagaaaacaatagacacccataaatcagagggtaaataacattttagactctgtgttttgcaaaagttaccgaatgaatcttctattttggtaaaagataaaatacactgtatttttcaaaatgataaaataggaccttgagtttaatttttgataatttttttttaaaatataaccagtttgaagacaatttctaacacaatatagaaaatgtaaacagttttgtcataacacatttagatcgaattattattaaat

SEQ ID NO: 169139 - DNA, 707 bp, Cannabis sativa
ttaaatttaaattataagtaacgctaattatgaagtccatcaccacaagttttgaaatgagagattctcaattgattttagctcttggattggtagataaaagtatatatatattcatcctacggttggtaaatgacaccgtgaaagcaaggatactgatttttgtggaagagtattggtatatggtcattagtggtgtttagtatctttagacataatatgtgcttagctaataatattttctaaaaattattacattaaactatataggatctgatacttatgtaaactaatagtgataatgatacataaaatagtgctagacattactcgtatattttagcatttgtcttggaaacctactaatttgaagtttctatcgtactattttatattaaattaattgttaaagtagttgtactatttcattgtaattgacattggtgttcttcttattatcattgtttgacgctcaaatgtgatttttattagcggtggttgtagtatagatcaggcggtcgattccacgagaagataattttagacaaaagcgttagtacaaaaaataaacaaaaaaatttaataaaaagcaacaaataaataacctaataagtttgaaattttttattttagtaataaatattaaaagaaaataaataaagtgtgtaatcaatggtaaagaagtaaatgctttaagaatcattcat

SEQ ID NO: 169140 - DNA, 757 bp, Cannabis sativa
taatttcgagttgtgtcaaaaaaatccagactatatttacatgcacttattaattatagttggctctagaaagatactagattaatattagcatatatattattaataatgtgtatatatgatttgtacaacctatattggatttttctttttatgcatatgtttattataaaagtgcttacagatcaagtgaattattttgctgattcatttaattcattagctatcatttttattttttattatatagttttcatcatatatatattctattattattgctattttccacatactatattctgtaataatgataattaattatatatatttaagagaggactcctctcgtccactaattaaattttatattttgctttacaaagaaaaagtcggttgactggttttagtaacatgaattaggtgtcactatcttatttgccaaggcaataataaagctcaacacatggccacgtgtcagtaaattattggatatgaagaaaaatgtagacacgtgtccattaaatgtgagtgcgcttcacttgcactgagtggcagattctctagaatccaataagatttggactacataacaatatattattccaacaactcacaattctctcctctaaaaccggtcattacgacttaaattcaatgcttctatataatttgataactataaattaacagcattgctattaggcactagtggtagtactttttcgacatattgcgttgcgattggctagcgata

SEQ ID NO: 169141 - DNA, 1028 bp, Cannabis sativa
cgcagctagaatacagtgcacccgttcacattggaataaaatacagatagcgcagctgcacccctggaatgaatagtttttgttaaaaaaaagatttgcgcaaaaaatccttaaaatattcactttgttacaaattaatcctccacctcaaaaaaatagcggcaatagtcctcaaagtcacactctttgtaagtttgttaattctaaatttaacttctccgttaatttatttaaaagtatcacgtgttaaaattttattagtctaaataataattttaattaaaaaaacaaaaataaaaaatatatgttaaaatctttaaaattatatttttttttatttttttctcctacttcttcttcatcataatattcatccacatctcctctctcattgacgattaaccacagcaactagacaaccgaccacgttgccgttgacggaatttattgaccgcgaaactccatctctgcctcccagttactctcttctctccctcatcctaagtcgtctcctcttcatctcgacgtcatcgcctgattccctttctctttcccgcctttgcgactggcgtctccatcactggcctcatctccggcaagaaaaaatccacctataagttgtccttgtttgtctttgtcttcgtctctctctttctcgactccacctccctttctcacttttttttgccaaattttctcagagcttccacagagtgaaagaattccagacaccatagattatctgctccttttctttcgtcgttgccagtcttctctttatcgacgatcaacaccaacccccagcctgcaaacttcatgtaagtgctcaggacactttatactcgtctactgtttgtttgtattgcatgtttagagtatttgggttgaatgctgaattcgtgggaaataattttgcctgagtttgttgtgtaatgcgtaggatctctcttatttgtcccctggttgtttctctttactgcgttttcttttgggaatcacatttttctgtcgtaataacgcctttaggg

SEQ ID NO: 169142 - DNA, 989 bp, Cannabis sativa
gatggctagtcaagctcttagttaggcaatctgcaacttgatcatgtgaggaaatgtatctaatgtcaggtgtcttgtttataaccttatctcttacaaagtggacattgagttctatgtgttttgttctggcatggtaaacaggattggcagccagagcacttgctcccatgttgtcagaccatgtaataggagtagactgaagtggaaagttaatctctttcaacaaggcttgtatccaggagattttagcagtgacttgggcaagagccttatattcagactgagtacttgagtgagagacaacggcctgcttcttggatgaccaagaaactaaagtatctctgagatatatgcaataaccagccacatttctcctatcatctgggcaacatgcccaatcagcgtcagagaagcctgtaattgccaatttttttgagtacttgatgtggagtgcatgatacccttttaagtaccttagaactcttttagctgcagtccagtgtgttgttgtgggtgcttgtacgaattgactcagtttgttaacagcaaacgcaaggtctgttcttgtgtgtgttagatattgtaggcctcctattatactcttgtattctgtggaattagtgagaagattcccatcagttttggataaaggctttcccacggtcattggtgtagagtagggtttcaagtgagtcattcctgttctggccagcaactcacgtatctattttctctgatttagataaaggccagtatcatctcgatgtgcctcaattcctaagaagaattacaagggtctgagatccttcagagcaaaaatttgaatgagtttggtggtaaacattctcaatttttctctgttgttaccaatcacaatgatgtcatccacgtagattaaaatcatgatgatagtggtggtgtttctgtagcaaaataaggaggaatctgtaatacccggtaaaaatatacatatattttaaatttta

SEQ ID NO: 169143 - DNA, 517 bp, Cannabis sativa
aaaaaaaaaaaaatgtataaataagaacattaacataaataacgtatactgtgcgtgacatcagaaagtatttataataaaaataattagttgctctcgtattaattataggacaaaaaatttctccctcaactattctccttgtaaagttttttcgttgaaactattttgcatgacaaaaaatgaacaatatgaaaaactcttcaatattaattataacttttgcaatatagttgagataatttgggagagatttttgtcatacaaaaaagttggaagagccaaacttttcaaaggtatgtacgtggaagtttaagatcgaaaacaaaactatttgtccttattattatatcataataagagtttttgtagaaaaatatttacttactccggatcaaggtaacctggtgtgccagcaacaacagttgacacatgagtaccatcatcggtgggaaaaattcttgacaagccaaaatcagccatttttgcatgaaaattctcacttattaatatattg

SEQ ID NO: 169144 - DNA, 1057 bp, Cannabis sativa
  modified_base (710)..(715): a, c, t, g, unknown or other
aggagggacaatgaaatgatgaacaagccacttctagggggctggcaggccacccctagccggccctatggccagcatgcacattgcaagtgcaaggctaggaaatttttgcctagcaagtttttggtgcgcaactttaatccatggaccaaaagtcaagaaacgaatggggcctttacatcccacaaaaatagatggaaatgaaggacctatggccagcataccccagccagcttgcagatactacatggtcggctagcatgaactctgcaagatttttgcctagtaggtttttggtgcgctgatttcattcctggacatcaagttaagcaaccaattcagccttcacagcccgcgaaaatagagggaaaatataagtaacttctctatttttgaggggcaatttagtcatttgaactttattaatttattatgtaaataatagctttatttacctatttttaagggatattagggatgtaagctctactatataaatagtattagtaaaaccctaaaaccctaagtcttaagctctaagtttgataactcatctcatctcatctctctctcacacacatagcctgtccctatcaattgagatttaacaattatagttctcacattgtaatcttcagagagccacttaagatcccactactatagtgatttaagtggcattatctctagtatcaatacaactaaaaggnnnnnnggtcattacccgctaactaaggggccgagccactataaaatctcatgtctatttacttttctattctaaccgtgtaacacatggcaagcaccagtattaaatttgaatctgctgtcggttggcaaagtttaaggtcaatagtttggtgctttcattgagagcgagttattaatttatctaatcaaacgtcatggttaacacaaggagaactacaactacaacatcttcctccatgtgtcttccccaagatatggcgattgatcctgttgttcgcattctagtcacaactagaatctccacaaacccgagagacgtggataatcctttcacctcactaggcat

SEQ ID NO: 169145 - DNA, 1567 bp, Cannabis sativa
tgtttcaggaatttttttttgccattagaaataacaaagatatgagtgatcttggggagcaaacaagatttctagggagccagaacatggcctcagctcccaggttgacatggcactaggccttgaacccaggttgatatgcaacctgcttcgcatgttatcgctcctcaaacacaaattttactctatgaattcttttaaaatggtagaaaattgggtaggagacctcattcgcaatctcgaatgccatagaagtatatcaaaacgagtctcgtgaagcacctagtgcctaggttgacacttgacttggtgcgcttggttcttcttattaaaattcgattccgttttaagcattcaactattttttcttagtaaacgagagctacaacttgtgacagatcaagtttacacttttatatttcaccatttcaacaaggtggtatatcgacaaaatcagggagtttcgagtcttcccaattttacaaaacagtgacatccttgagatttggcaaaaaacttcactaaaatactaaatctaactaagtgctgtcaaaatatcacttaggcatcaaaaaatacaattctaagacgttttggaactcacctagcgtccaggttgacgttagaatgtcaacctggctgcaggttgctgaaaacccttcagtaaaatggtcataactcactcaatatcgatctgattggcacgattcaacttgcgttttaaagctatttcaatgatctatcaagtcttgtctcacactcacatagtaattttaaagatttaaagaataaaatttgttctcaacaaagtttaatttttccaacaaataacgcaaaaaccatctgaggatgagattcaaagtccgataattgataattttcacccaaagtcaatttttatcattggatcatcgttaatcatcatgaatggctaaaatcagccaaaaataattttttatatatattttttgtatttttgaattattattttcgtaaaacttcatttcctataaaagtggagctactctagcttattttgtacattcttctaagtccccataaggtcagagcatctctctatactttctttctctagaattttgagccccacacttagttaattctttgtaattcttgtgagaaataaaaaacttgaagtagatgtagttctattacggtcgtgtcacgggggttgaactactataattttttgtgtctctcttacttatacttaactctcattacattctcgtcaatctagctagcgagtgtgtccagatatttgtgtccaaatttttcatcaataaccacaataaatattactattttatttactcttttgccacttattaatataattaattattttttacatcttatttatatatttaataaaaatttttatgtactttcaataaaaaattaatatttatgttaattttttttacacctttctatcaaaaaaataattaattttatcttaaatgtattggagcactattataaaatttgggatagatataatattaactacttttttagcttaaattatacactatctattgga

SEQ ID NO: 169146 - DNA, 746 bp, Cannabis sativa
tcaatagaataaaactttaacaatatcaaacctttaatattataatatacaatacttatcatcaagtcattatgttcaattgtttctaaaaaagataatgtaatatacacatatattacatatatttatccttatataaaaaaatataataaaaattataatgtaaaaattggtaacttcataatatatagtgccgtacagtttgaaccacaattattaaatcaaaactgcaactcgcaccgtatcttgcagtttggtaaaaatgcaaactacaaccacaatgtaaagaatttcaaactgcattttttatgcagtatagtacgttacgggcaatttgtgcggtgtgagcaattcgataaacactcatgattaataacccctcgcatgtttacttaaaagaaatggggatcaatggtatgatattgattctcatacaattgtttactaaattttgaaaagtgagaaagtaatagggagaaaacaattgatttccaattttattggggatcaatggtatggtatggtattgtttacaattgtttactaaattttggggatcaattgtttaccataccattaatccccatttgcccacacaaattaaggagaaaacaaaatgaaaggttgttcactattttttaaaaatctataaacagaatataattacgtattttaataataacaattttatcaaattacattattttaattatctttcctagttatataaataaaataatataatt

SEQ ID NO: 169147 - DNA, 500 bp, Cannabis sativa
  modified_base (451)..(453): a, c, t, g, unknown or other
attgttatcaaagtaataaaaaaagctttagttatctgaagaaacgcattgtgttcaaaggcataaaattaaatacaatcttttaagttcaattttatttcctatttttttcgtgtcctatataatgaaagcagcaaaagtatttctatttattaaaaataatagctatatatatgcctactaatatgatttgatattctgtgagatacatatttttatttgatcaacctaagatattaattatgttatattgaatttataagtggaatatgaattttgttaatttatctgttatgacatgggtttaattacattttttttttttaagaaatttcaacttcattaaattagcattctaagtacaaaacatccagaacaacaactggagcattagatacagaaataatacgaccagataaggaccgtgacatcctagcaacaacatgtgctnnncggtttgctgatcgtttcacaaaacgaatttttattaaaggcataga

SEQ ID NO: 169148 - DNA, 557 bp, Cannabis sativa
gaagggtggtgttgatcgtagcttgtctgctattaatgaatttcaacaagctttggataattgtgctttggttgatatgggatttgaaggacaatgctttacttggcttaataaaaggcaaggtgctgcgcatgtgcaagaacgactggatcgctacttttgtaaccaggattggcataatttgtttccgtcagttaaagtccttaatggagattttatccattcggatcatcggcctattgcggatattctggaaaatattgttcggagtcacccgaatgataaaaagagaagctttcgatttgaaactcattggttgaaagatgctgaatgtcacgacattgttactcaaatgtggttgtgtccagatgttccgttggataaccaagaaagtattcttgatatttttaggaggtgtgctgatcggttaggggcatggaataaaagtaagtttggttcaattcctaagctggtgcgagaaacacagaaacagttggacgatctcctcagtgtgtctgccctgttggttcgaatggatgaggtcaaacggcttgaga

SEQ ID NO: 169149 - DNA, 989 bp, Cannabis sativa
tactcaggtactggttgacaggttgagttttttcttttttcctaatttaatggaggttttggtgaatatgattattgttttagcgattctaccttgctagctctgttctttttttcctttttttgtctgatcaatttgagctccggtaccttttgaggatccgaagcttgcgagtttctccggttgagttttattgctcattagcgagaactaagaataagaaaatctttaagaagactatatctgcttaattcgtgaagaagatctttgaaatagaagaattaaagttcattttccccaaaataactctaaatcgagtctcatttcacgttttactttacatatatagtaaatttccattctcttgatctagagaaatgaaagttgctgtcgtggagtttgttctttagaagagtccttttctgtggtcttaatcatgaagattgtgcttatttcaaaaaagaaaaaaacaatcatgaagattgtgcttgctggagctgtttcgagtcataaatctgacctttttgaatctttttctggcatcttcatgagcttcatgtgaagacctctctctctatatatctgaccaaacagttatgggctcataacttttcatagtgtggtccagtccaggccatattttgttccaatcagttctcactttttagcccttaaaagtttctaatattttcctcaaaaaataccctaaaaaatttcgttgccaaacttgtttttcgaaggaaaaatttggcttggagttgaaataaaatggccaatagataaacacttcaaccttcctatttcttcatcgttgttcgtgatcgcattcccagtacttgcttctccatttttctgatcctccaacaaactatcacggtaaatatatctctatctgtttttcttttttctttttcgtagactgaattcattccattttatatagtcgtatttcaatattatgtgaattgtgatagtattttagttggtgt

SEQ ID NO: 169150 - DNA, 2570 bp, Cannabis sativa
  modified_base (644)..(651): a, c, t, g, unknown or other
  modified_base (791)..(796): a, c, t, g, unknown or other
  modified_base (1902)..(1908): a, c, t, g, unknown or other
cttctttcttctcatctactttatattattttatattattttataacaatatatacttaataactctcatttcatattttcaccattaaaaagtaactttgatatgtcaaacttttacctaagccataaaaagagattgtaaaagaatttattagttctgtgtaaatatttttagtatattttgtgtattttctttgaaattataactttttattcctcattctcatgtgatactctctatttttcattatatttgtatcgctctttatataattataactttttatttctcattctcatgtgatactctctattcttcattatatttatatcggtctttatataattatttttagtacttttttttctcaaaaaaatattttatatgtataattgtatatatataaatatatatttttttttgaaaaagatagctttaatttatgatttataacccttaggttgatattatgttttaattatataattataattatgatttattttaaatgtatatataattatgatttttttttaaaattatatatatataattttttgttcttgctcaccctctcttccctcacataataaaagtaagtatttacagatcattgtttaatttattttatgtacaaagcaannnnnnnnaaagaatattaatgatgattacaagtgagatataatgatggcatcaactttaaatacagtggtgactacaaatgaaatatggtgatgatagttgtttaaaattatatgataaattttctatagatttattatcttctttnnnnnntagatctctattttgtgtaagaaatatttagtttcaaattttctttactataatgtattttttaaaataaatttgtgtgtttttctatttatataagaatttgtatgataatttttttcaattctttagagttttctatatatatttattctttttttaataagtatatatatatatattttttaaaaaatatatatataaaaataaatttaaaattatttgatattaattttattgtacaattattatttatataattatttaacagccgcacacgaagcgcggcctgttttctagtttcaattatataagggaaacattaaatgatatacatagtctttgtccatttattgagcatattataatgtcgtatggtacatcgatatacgtccctcaagagtttgacacattatactcgtaaccacatacaacacggcattgtgtgtgcacagtatattttttttttctttttttcgtttcagcatgaatattatgtatataattatgaatatacatatattatggcacgaatgagactttaaaagaaatatatttataaatatatattacacatattttttttgattatcgcacttttcatataaacatatataattctttttttctaatgtacatgtaatataatttagtgttatgattatctataaattgtgcatatatactaattcttgtggtaaatcgagtacacataaaaattaatttctggcaagttacgattgggatatgcataaatcattgattgttttttttttcttcacactttgtgataattttggcagcatgataattttagtgtgttttttttgagattttatatattttccatggctatatctcacttttgaagatcttttgtagcttaaaaaaagcctagatcaaagtggtccatgaaaaaatataagaaaaatattggatttattttagcagtataacggtatgtaaaagtaggattttttcctttatgccttggctatatctcacttttgaagaccttataataagaataataaatcctttttttcgttcaacagtaaagtttcttgaactttatatgtgtttaaatttcattgttttagaaattcatnnnnnnnatgttaaacaacatacatggtaataaatctagatcctgataaaataattcccaacatggaatgtctttttcagagcactagtaaagtaaattaggatcagatgtattagatatacattagacttgaccgatattgatagtagaggatatatcattaacttattattatatcttttctaagtcactgtcacttagttgatcacatataatatgatctcaatcttgagatggttgagctctggcttagttgtattgcacgagttctatgactttttcgttaccagcttacccgtaggacaagcccatacttacatcttgggaaattggtagtgcaattgagtgggactattaatcatagatacggacatcaataacttctatgtttattagaagtaaaaagatggttccttagatgttggtttaacgtgataaatgatagaatgctcatatcagtaattatattagttttttgaaatatcattgataagtagctaagtgttttaaggataaaatacattgaagggtaaaatgataattttgtccatactcaatgtgttatactcaaaattcggtgtgcacatcagaggaagacacgtgtcgagctggcaagaacaaagggctcaaacacgcaattgtaagtacacttggcatggaacaactcgt

SEQ ID NO: 169151 - DNA, 1471 bp, Cannabis sativa
tcatttcccgctcagtgaaaacgtgcgcggaaaagtaggtaaaattttttgtgaaaactttgcgggcgcattacattgcaccggtaaaagtttgcacaattaatgaaacaatgcgtttcatttaggtttttttttttaaacttttactggcatacttaagtgcgctggtaaaagtcttttatttttttattttttattttttttttcagaattaacttttatcggcgcatctaaatgcatcgacaaaagctaatgttgaatatgaacccacgtagaccccccctcattttcccctttctctttctctttcttctttctttcttcttatcttcttctttgacgaaccaccgctccaccaccaccctcaccacctcccaccaccataaatcaccaccacccatcaccctataatcaccaccacccccatcccattaccattttatctttgttgttttgaaaaataaacaaaaagattgaaccacaccaagcaccacctctgacgatgaatcaccactgcacctctggcgatcgctgcctgagtctccaactttagtgttgtatttctcactttcagtcaaggtaatctctaatatttattttaatttttatttgtgtatataaatttagaatttattttatttatttaactttgagttaaattattttgtatagtgatttaggtttatttttgtgtatagttagaatttatatgtaatttttttgattatatacgaatgtgtgtatttttgtgtgtatatatatgtaaaaaaatataagtttatgtatgtatatatatgggtgtatgtatgtttgtatgtatatgtgtgtatatgtatgtgtttatatatgtgtatatatatgtgtttatatatgtatgtatatatatatatatgtgtatttctatatatataaatatgtgtatgtatgtatgtatttatatatgtgtatttatatgtacataaatatgtgtgtgtatgcatatatatatgtttatgtatatatgtatatatgtgtatgcatacacataatatatatacacatacatacacgtatacatgtccacatatatagttattatttttatattttttaaatatttttatttagtaaacagattttcgatgtcgctttatctgttgcctgaaaaaattcactcctcgttatatttgaaggttagtatgctttataatatacttagatatggatttacccggcaatgcctattagtagagtttgaatatcttatatattcatctatagtgaagtaggttctgtaaaaaaatatactacgatcggctgagtgacaaatattaatatttaaactattttagtattgtgtctgtgatttttgtgtaggttttaaaaatttgggaatgatcaattttaaggtgttatgctgccgaattttcggtagaataacattttttatttgattattatttaatttaaatttatattaacaatcaaattt

SEQ ID NO: 169152 - DNA, 511 bp, Cannabis sativa
ggaataacatctggtgcagccgcagctgcagcaattaagatagcaaagaggccagaaaatgctggcaaactcattgtggtaactaatcagtgtttattattatttgttttttaaaaaatagtaatagcatatgaaatttatttttattatcaataaaatactgcgtattctttatttttacaaaataaaaaataatgtgaatcgagaattaaaacaagataatatttttggtttttgaatatgaacaggttgtgttccccagctcaggagagcgttatctttctaccgtgctttttgagtctttgaagaaagaggcagagaatatggtctttgagccttaaagttaaatgtttaattatctgatatgttaattgagagaaaacaataatttcttttagttttacttgtacttgaaacttaattgctttggggctcgtttggaacggcgtattaggttgtattgtattatattgaattatattttatgcaatatttttatgtaaaactatat

SEQ ID NO: 169153 - DNA, 590 bp, Cannabis sativa
aatgagaaacatattgtcgaaaatcattttttccaaaacaattcacataaaagtgaaatatctatgaaaaattttatggtgcaacctctacaaatggtctaccaatatctttctatttgttttgacattctaaataatttttagttaaattttgttcatggttgtttacgctgtaattatttaagacattttatataattttgagaaattcaaaaacatttagcatgccaaaaatagaattcaaacagtctattttatacgtgtataaaataaaagagtttcgcgtgtaacagactatttgaatcttgtttttagcgtgttaaatttttctaaatttattaaaattttataaaatgtcttaaataattacaatgtaaacgatcataaaaaaaaatagattatttttttttttcaaatactaaaacaaataggtaatattaaatagtttgagattaaaatacataagtaattggtatagtatggttgcactttcttctataccaaataatatcttatataatgactaagacgtctaacttttactttatttatttatttatatacccttttattaaaaaagaaaaagaaaa

SEQ ID NO: 169154 - DNA, 868 bp, Cannabis sativa
aagacgatagccaccgtcagatgaaacctttctctcttccttttttcatctcttcctcaatgtcggagaattcaccggtacccctgaaccagcgagcccaatcccaaacaaccttcctaccccttgcacgaaccctctcgcataggttgtatgttctctttctctctctcaaatgttcttagtatctttctatctctctctcgatctcatattttttaattgtttttttagggatgtatatagctgatctcatatgcaggatttccatttcgctccatttgactttatttttctggaaaattagtgaaatttatagttgggtgtatataaaattatagctagctctttgtggattggttatcaatgaaaagcaataatattttatttatttttcttcatatgaatgggatctgaattgttgtttgtgtttatttttaattttgtatctatttttgagtttggatgggtcttgaataatcaaaattcttagcttagatttggctcagaatgtttcgtgaccaaatttgattttgttagttgtttttggattgcgtcgattatgaaccaatgccgaaaggatgcacacatttataattatttatgcgttgattgataaaagatgcaaaaaaaagttatgcttcaaaaaaaagtctttgtatctacgactatcacgttagttacaccaaccaacacaaattcttttatatgtcacttcaaaacaaacagaaaaatcccttttatagtagtggccaattaatcccaaaggtctatcattacagaatagaactcttgaatgctcatatatttttaggctaattaagaatttttcccttcgaactttgacatttaccaaatcatgtcccctgaa

SEQ ID NO: 169155 - DNA, 880 bp, Cannabis sativa
ggggtaattatagatatggaattcataccttctataattatttagaagtaaaatgatcatttccattgagcttagcaaaacgagttaaatggtggagtaattatttcagtaattatactagtttactgaaatatcatttataaggagcttagtgtttaaaggataaaatgcattgaagggtagaataataattttatacctatctaatgtagactgtctatagagaatcattgattagtttgattgaaacaatagataatttatagcgtatttatattggatatataaagtgttctatgtaagcaatagtgcaattctaagtctatagtggagtcatcaggaattaataaatttcaaatcaacttattaggagattgattttataggctcatagtccccacattaattaggataatattatcttgatgactcaattaattggattaagcaatcaattaaattttaaaaatagacaatgtcttatttgagaacttttctaaggttgggctattttgagaagaaaagagaaattagggttcattatttaattatgacactttgtgaatctaactaataaatataaatttaaattgtatttttgtttgatagttatttataattattaaattaaaatttgtattttaatagtttagatttgatgattggtaaaaattagaaaaagatatattgttttattaattgaaacaaaattggaaaaaaaaaaaaaaacaattcatgagcctataatatggattcatgagtccttggcaatacccttgttagttgttatagaaagggaatgggctttttcaattttaaccaaaaaaagtaataatattacaaaaatacttccagctgaccaaataaacaaatatacatc

SEQ ID NO: 169156 - DNA, 641 bp, Cannabis sativa
  modified_base (492)..(503): a, c, t, g, unknown or other
aatcatattaattgtgatcatgttttaggtcctgatctcatgcaaattaataatattggacacaaatatttttatgggttttttttttttttttttctttataatcattctcttctctctctctctccaatgaattgttgttcttgtattttccgcaaaagaataatgccccaataaagtttgatggctaattatataactccaaaaatatgagtccccttaattgataatatatattatgtacatgaatatatacatataaattaataatgcccgggatcccaattacagtactgtaccattataattttaatactataactcaattatataataatatggatgtcattatcatgtcaagaatattaaaaattactaattccacccataaaaaaattactaattccactatgacattgatataattcaagatatctataattataagttaggacaattattttatatattactttattattattattattnnnnnnnnnnnnattattattattattattacagtttaggtttaggttgttgcgtgagtttttaatgtgaatttaaattgtaatttaaattattttattaagggaaaaaaacaaaaaaatacaaaaaaggaaaaaaaattacaaaaatac

SEQ ID NO: 169157 - DNA, 743 bp, Cannabis sativa
ccaccttttggctgctggtttaccaatttttgctggcgaaactaaggtacttcgccgacaaaagttacttatgccaggaacttatctcaccgacataagtaatacctgatggaataatctggctaccttttgccgacgaacttagttaactgcgtcgataaaagtgttttttcttgtagtgaaatgaaagttcaagtttatccaaaagctaatgatcaatttcaaatttgaatctaaagtattacaactaaattgtaaatcaatgaacacagaaattacaatcctcccctcacattggaaacacattctaaccgagtattgcttgggtccccaagaactaagtaaaataaccttcactataaaatcatttagaatacattctccagtcctgatttacaaatcaaacgaagtatactgaaatgatttcatacaaaaattactaatattctcgattaacaatcaagaacaaagatctaagtcctcttagatccgagaagacaagatccccttactttcgataagttgaactccctccaacaaattagtttgaactcccttcagatattgcatatcaacattcgtttttcaatccttaaagatccaatgattgacaacctgcaaacacaataattatacaaaaaaagaatttgtcctagcaaagcaagaatctcaagatgattctatcaaagatgaagaagttagttagaaaatgcttgatcgactttttataaccaccacttcaa

SEQ ID NO: 169158 - DNA, 570 bp, Cannabis sativa
ggtggggacacgcatggtctttttgataaagagttgaccatttctgaattaaaaagaaagaggctcaattcgattgggccaagttctatagactctaatttaaatggtatttctacaaatgaagacgatttggtaaccaaaaacttgtttggggcgggcctggtttcttaggctcgcaaagaattatgagtaatttgagttggaactgtcggggcttgggaactcttaggctttacagttcctaaaggatttagctttctgaaagaagtccaagtttatttttctttgtgaaactatatgtggtaaagctacattggagagagcccgtttgtctttgggctatgagggattatttgtggtggaggcccgtggtcacagtggtgggttgccatgttatggaaaaatagtgaagagggagcagttattaatttttctaaaaagcacatcaatattctcactcatgtacctggtatgccaagttggagactgattgggatttctggtgaagctaataggggccatcgtgagaataccagggtgattaagtattttgtgattaaggaaatgtaa

SEQ ID NO: 169159 - DNA, 595 bp, Cannabis sativa
gtagccagagcgtccgaaaaaccccactacgaggctgtcttccccgcctatgggggcggtgaaaggctcaccgcggccggtagtggttccaaatggtccatatgttttgagatttgtttggaaagatagtgaaaggataacatcatcaggtatatcattgaacttaccatgtgttccactaatggatatcaaatattcaacgggccagttcaaagcaatctacaacatacatttgatttgatcgatgatcagaaaattaaaattaaaatatatatatatatatacacatgatctatatatatatatattatacctttctctcttgacccttatctaagggatcagggttgttgccaccgaatgtcccagagataaagccagaggcgtctttgaaggaaatggacttgatattcctatcttcatagatgattatctctttcaatccacaactcagtttgtagctccaagggtcaccacctgtgctactcccatatgctcccaacgaaatcactccttcctaattattatttaccaccacaaaccattaatataataataatatattatattaattaacatatatatacatgcatgc

SEQ ID NO: 169160 - DNA, 705 bp, Cannabis sativa
tagccttcaaaatagtcaagcctttaaaattcttttccaaaaaaattatgatggatttggaactcttaacccaaacaataaaatatatcaataaaagcaatcactaccgctagagacatgatttatttaacaatgtttttggtttggcagatttccaacatgcatgcacaaacatcattatgcttagtgacgtcacattttttttttgagctcaaaatatgcttagtgacgtcacacttacttttgtttggtaagatagacaatttgtggaaaatttgatagattagttgactattagaaaattctttactctgtacgaataggaagattaaggaaataggagaccggttggaaagtacatatgattaatatatatattttttaattcttttattttaatagaaaaggaccagtttgctttttgctactcttagaatctaaatttaactgaaaaaaaatatatataaatcaacaattccttaaatacatatatatatatactatttttttttaaaaccattccaatccttaagacctctaagaaggagaggtggacataaaaatatgtattcattcattactagtttcatccaatacacgagaatgaatacaagtatagcgggaccaccaaattttactaacagtcactacaacacttttaacatttaattacattcagcaataacgtttttaaaaaaacgttat

SEQ ID NO: 169161 - DNA, 706 bp, Cannabis sativa
aacaacgtgttgtaccagtactctgcccacggtagccacttgacctactgattgggtttagtatacatgaaacaatggagttatgttttgaggcaatgattcaccacctcagtttgaccatcagactagggtggtaggcagtattgcggtttagagatgttccctgaagaagaaagagccccttccaaaacatactcaagaaaaccttgtcgcgataaaaaatgatggaacaaggaaatccatgaagcttgacaacaccacaaacaaacacggtggccactgtaacaatagagaatgggtggtgcaagggaatgaaataagcatacttgctgaggcggttgaccactataaggattgagtcaaaactagtggagctgagaaggccctcaataaaatccatcaaaatatcgtcttatacttgttctggaacgggaagaggatgcaacaacccaactggggattaggttaagtacttgctttgctgtcattgggtacactcagtcataaacttttgaacatcctgatgcatgctagcccattaaaattagctatcaccctctggaaagtcttgaagacccttgaatgtcaacttattggactattatggtactcccaaagtaaaatagggatgaatgtggaggaagaaggtaaaacaaggtgccctttaaactttaaactgttggaatattattttaccaggatctta

SEQ ID NO: 169162 - DNA, 633 bp, Cannabis sativa
caaaacatgatcaaatgtctcatttattgcggctttgatcgaggctgtggtgaattaatgcggttatatttagtttaagagtattgttattaggcactaatagatatgttgtcatgtaattggatagcgatattttccaaaatttatcattatactatatgaaactcgatatttaattggaccaataacgatattgacacgtatgaaagtactatgtatcgttagtgccttctagcatttctcttagtttaatgcacaaatatttgaaaaggaaccaaaaaacaaaatgagattctataatgaaagtgatctttctaaaaaaaaatggcttcgatgacaaaataatttccctcataattgattagaaatttatacttatttctagtattgttccaattttacccttaacatttcaaaaggttctctatctctttaagagccaatttggtacaaatgtattgtgagaaaaaaaattatagctatactgtaagagaaagtagctgtggaaaagaacttagcatgaatattagataaattatagattttaaaacattatgaattattaagattatattataatgataataattgtaggaaattaatatagtgttttactattctgtccctacacca

SEQ ID NO: 169163 - DNA, 534 bp, Cannabis sativa
tcgcccgcgcccactttcccgtggccccgcgcctgctcgctcgctatcacctgtactcgcgcctactcgcccgtgcctgcacccgctctacgcgttggccctgcttgtcctattcactcgtgcctgctttctccgctcgcccgtgccccgtacgcactcgctcactcgtgcctgcgcctctgcgttcgcttaccacacttccccatactttcatccagacgcagtgctggtgccagcggcttttacactctgccgatccacctttttatcctgacaccaactgatctaatgagaagatgtcaggagggataacgatgacacaatacacttacataacgggaacaaactttagttcgtctaaagtacaaaattgaaggggaattttttgtgtgtggttaatgaagcaatgatccaagtatgattgtcttccagggctttaatttcagatgacatagctgttggaattattttacgaggatcttagatttactaacaagtatgttatttaacatccttaatatgaacttctaaaac

SEQ ID NO: 169164 - DNA, 1207 bp, Cannabis sativa
ataccatttttcaacaactaaaatcaagcccaaatcacaccaaactcaaccgaaaacatgcttagactcaaatccattattcacatattatagttatcccaataggaaatcaaaaacacaaattcaagctttaatctacagcaatatatgcaattattacacggctcatcaagcatcaaattccacttttcaagcttgaaaactcacacccaaatctcaattatgaaccccaaatttcagcatactactccaagaaccaagcttcaatttcaatattttaaaacaccaaatttcaacctaataatcacacaagaaaatccaggtgcaaatcacataactctcaagctttatcaacatacaaaccacccaaatcacctctattctcacaaacatgcatgtaagtaccaaaaacactaaaatacctaaaatcatcataatattcagcaacaaaaactcaaaataaaaaaggtaaaaaaactacctcaagctcttcaatcactagcaccacaatcttcaatcaccaagcacaatcaccaaaattcaattgaagagaaataacaaagtgagaaatggagaaagagagatagggtgtttggttagagcaaggaaaatcagaaatacatttgtcattttctctaaaaatccattttgttgaaaataaagtcaaatagtcaaatgaccaaaatgcccctagggccaatataccacatatgcatacaacaagggaaaaattgtcatttcaccactcaccaaacttaaataaattttagattattcaattatttataaaatgccaaaataaaatcttaaaaatgtatttcaggccccgaactcggttcggcccaaaatacccggttgtgactatgccatgtcgacttgtcagaaaatacctacagaaagacagaataaatatactatatactaatatagtccataagcacgctataatattaaaattacgcttttacccttctcaaggtcaaaattacaaaaatacccctggctcaccaacgggatcttaacatgtcatttatcagtataattcatatatattaaattatatcaaaattatataataatataattccacattaatagatatctaactagttaggatttgctaattgttaggttataattagcctatgtctcgggtctttaaagttagcattatctcgtctattggtgtcttttggagcagttttac

SEQ ID NO: 169165 - DNA, 756 bp, Cannabis sativa
gtgatatgataattttttttagtgttgggcacttaaggggaaaattctacaaaagaaatacaacttttgctaggacatctctaattttgatattcggaaaaactataatctaattttttttatatacgacctatcttatagttacatagatattttatttattttcgaaaaatttaaaataattcatgaaagttcacacatgtataaaaaaaaaaaacaaatgtaaaatatttaaactttgtatttagtgttgtaaattattaagaatttttttgaaaactaataaaatacctagctacaactataaagtagatcgtgatataaaaaaattgaattataattattttaaattttaaaaataaaatgtcccataaatagtgtttcacctttagcgatttctgaaaatatagaatattttacgaacatattaatgcagtttttttctcgacatctaaatagttataattttaaattttatatatgtaatacttacactataattatataatatatcttgtaaaatttaaaaatactcataacaatttataatacaaaaataaaatattgacataaaaaaaaaaaagacatacatacaataaactgtttgaatcttcacaatataaactattataattttatgaaaaatcaaatacaaaaatatgtatttaaagttccaaaataattacttttgttcttaattcttatttaaggtaacatttggttggaggtaatgaaatggaatggaatggaatggaa

SEQ ID NO: 169166 - DNA, 1037 bp, Cannabis sativa
ggattaaattgtaataaaatatacgtgagtattgttatggctattattagtgcttaacacttctaaaaatgtgtttatgtcattggatactttctaaatattattatattaaataatacgagatctgatttttatttaaaccaatagtattttttaatatacaaagtgaaatattaaaggggactagtagtgttggtacaattaagtatcagatctcatataatttaatagaataattttagaatatcactaactaatcgttaaacatcacttctaaaaagtgttaagtactactgatagtgtctaataataatatttttatacaaataataaaaagtgcttctgcaatgaaaaatgttataatacactaatgcctaaaacacttgtttcatatactttaacaaagtaatttctatgaaatatcgttaaccaatcaaaaaatgctacttataaatagtgttagacagtagtttatagcaatgctcttctacaatgcaccctaaaaaagtccactaacatatattttactattttactattacctccaaaaaaaaacatatattttactattttgacattaagagaaacgttttaagcaattttttattgtatagttgtgtgtactttatagttatttaatatataatgtaaaattttgaaaaatttgaaataatttacaatatagaaaataatttttaaatagtttattttacacacgtataaaattaaagagtcgcatgtgcaacagactgtttgaactttattttttgtgtgttaaaatttttcgaattttttaaaatttttgcaaaatgtctttaataactacaacgtatatgactaaaaaattcactgaaatgccaaagtatatataagagtgttccataaaattttaaatagaaataatttattaaaaaaaattgaagaaaaaaattacaatacattaatatagaaaaaaaatatcatttttacattttgaactttattatttacaaaaatactcttcagtaaaaataataaattatttttttaattatttt

SEQ ID NO: 169167 - DNA, 911 bp, Cannabis sativa
atttctttctttgctaaattgtgtaataaaaagtacacactacacaataatctcttcattggtgcaagaataaagaacattacttttaagcattagtggtgcctagcactttctcaacatgtcgcgttgcgattgactagcaatactccttaaaaactattatatgagactcgatagttagttggaccaataacgatattaacacataggaaggtgctaggcaccaccacggatgctttagcatttctcaaaaataaattatttcaacgtacatctccatcccatttattaattttttcaaattataatgttcgaaatttgtttattttttgaaagtaaataatgacactccactaatatgttttagctagttctcttatcagttttttactttattcgttttttactctatttttaaaaatatataactaagaaacaaatcgcgtttcgcgtacggttatattttgtttagtgagatattaaattttaattttttttaaatattgtttaataatatgaataactatttttttttattccgaaagtaaatttaaatatagtaaaaaaattcataacaattgaaaaaaaaaacaaccttaataatcattaattaagtgttaaatttttttttaccataagtctacttttatagttcacatgtcatgaagtgctcatttatttatataatctcattttccttcaaaaatatttcgaatgatacaacaatagagatgtatacatatatattaataataagataagatagataaaatttttacaatcttaaataaaaaaaatgtgaatgacaataggagcaaacttgttctccttcatcccaattttgattttattttccaagcggctgaatgaaagtgaagatattgttacgttggtagatatttttgtagttt

SEQ ID NO: 169168 - DNA, 1710 bp, Cannabis sativa
ttgtgtgcacttaatcaaaagaaggaaaaaattacttaaggagctttagttcttgaggttgtgatagggtgcacatgagggatgacatgaaaaacttccatacatatttttttactctgtgaaacaatattaacatagggggtgatggatccattaaattatataatttcaattgaaaatagctcatgcgtagagtctagttctttttgaacttttggtttccctcctttcagcttagggttttacggttttggcttttaatatcttttcctcgagtgtttgcttcagtgttgtatgtttttcgtgtggaatgtgaagtgtgcttcttgttgggggttaaggagaatgttttcctcagtgctttagttttctttgtgtagagtgtgaagtgtgcttcttttggggggttaaggagagtgttgtcccctgtgttgtttgtctatctttgtggttgttctatggcgttggataatgggaaggacgttgtggattcgactaaagttatccatgtggagtcagtggatgaaaccatgaataatgttttgactcgtgatagtgccatggagatggagctcctggagctctttgaagacattactttggaagaggtggttgctaacagggcttgtgtgggtaaagttattggatgtaaggatatgcctgcctcggtggtgaagaaaatccttaccggagtttggagaagactaggtccctgaagaatgaaaaagtgcgatgaaggtgtgcttggtttcttctttgagaatgaggatgattgcgcttttgtcttggacaaaagaccttggcttgttaatggagtgttgctgaacctgaaaccgtggccagttgagagggaagtgcggacgggggagttcgaggtcgcaagattttgggtgcaattccacggtttgcctacaagatgcctttcgaatgacaactctccgatagtgcaaagaaggtggggtcttttgtcatggcggatgaccaaagtaaaacagagcttgttaggaggggatatattcgggcttggattgatgtttgggttgctcatccattccctgcggggttctttttaacggcggatgggaaatcggagtcctgggttcagttcaagtatgagaaaataccccacttatgtttcaattgcgggagattggcaaattgggataaaatctgccacagtccgatggctatgcttactccgaagacgggaaaggcagtccagatgtatggtagttggatcaaaagcgaaacggggaagtccaactgttttactggaaaagggtctacacgactggtcattgaaactacgactgtacttgaatgggaactgaactaaaaacgcagtctaggtagctagaaaagaagaaatccatcggagaaaaaaggggaacctgaggcgactaggaaggtcaaagagctggtttctgcagtggagaggacgtcggccccggaggtggtgagctgtcattcccctcggacgttgcatgactgcacagattcgtacgatggagtggaggtgaggaatgatagggagaatgtcagaaatcgtacagtgggtaggtgcaaggtggatgacgtggctgtgcagacaccacctcgtggggaattagaagcacgtgttctccttgatattgggcctaattttttaaatttaccgcagcctgattttgccttggtcaataatgaggaatctgttggaaattattttac

SEQ ID NO: 169169 - DNA, 968 bp, Cannabis sativa
  modified_base (728)..(728): a, c, t, g, unknown or other
aatcaatctattaaaatgatagaaaaatcattgtaataaaacgctacttttttttttttgctggagaaccattctctaaaaaccagaaaaccagaggaaacaacacacagtcacatggccacaagaggggccaagtcctcagcagtaaaataaccagaaaaagagttacgaaacgaccaatgcgcaagcttgtgagccacctgcacactagcacggggctgccacacggtctccacctcaggaagctcatcgagcagttgcaccagaacccagaatagaccagcaagacgccaatcaggggcccttcgtgcgtgtaaaccgtgcaccagcagctggcaatccgagactataacagcctgcttccaatccctgcaaatgcaccatttcacagcattaatcaaagcccgcatctcaacctccagcagctgttcagagtcaaaattcacagccatggcctccagcaccgacccctccgagatggacgctacacagctttagcgagaggacacttaaagaacaaatgatgagccgaatcctcctccacaccacagagtacacatctagcatcattaccaaaaatcctttggagccggcttccgaaagggattatatctctgcaaagtttccgtaggaacattctcagacactcagtaatctggagtttccaaatccgaatccaaagctgatcagtctcacctcaacgacccttgataatagacttatacgcnaccctcggggagaacaacccatttgtagcatctttccacacgaggagatcttcctgcgatctaggcaaccgccctatcaagttcaaagaactgggcacactagggacgaaccatctatgaaccaatcgagatatccactccccatcctcatcaagcaaagtagagaccttaattaagttctgaacacacaatggattgaaggcagctctagacatattccagtctagccaaggtatccaa

SEQ ID NO: 169170 - DNA, 1181 bp, Cannabis sativa
aacaaaagaatcaatattaatataaagcgtaaaaaagtacaatagttatactctaactttaccaatattactattttaatatactcatttgtgtcactaaaataagtatagataaaataataataagagaagaataaaatgagaaagtgattttctactctctctctaaaatttgatttcttttacaatctaatggggcctatttatagtgaatatatgttctcaattttacttttacgtgtgcaagtgagtggaaaagatgcttgcaaaaacagaggagttgatgagaatgtaggagacgtgtcattgattgaagagaaaagtgggaacaacctgccacgttttgataccatgataccacacccttgcatagaagtgtgtcacaacaagttatgacctttgatattgaaagtgtagagttgttggacttggtcaaagtcattgggcttttgaaatgaaataaatgggccgaagcttggaatggatggacatagagctccatatacatatgtatatatgttgatggaagctatatgtcgataggttgatctaaaatggcacaaatcattctcccatgttgggcttgggttattgtttccttttataaaaagtaccaatcaatgaattggttttcaagctccaaatatgccaacatttcattaacaaatctgacaatagcacaaaaccaaaatacattaaacattcccattaaattatttttttttaattaaaagcatgaaaatatttaattaaatcgattttatacacacaattataaaatcttaaaatatataaaaatttgagtctcaatcatctaaaaataacgcattacatatcctaaggctatcatgcataataaaataccaaaagaacaacaatctaacgtaggaattaaaggatgtacaaagcaagaaataatgttcatgcattcatggaaatatcaacaaaatcaagtgaaatagcaagaatagaaagcttacccactacaaaaaactattgagaaagaatgtgggaagcttgaatcatcaaaacgatgcaaacatcttacgagaatgatgcttgatgtgttcagccctctagagagaaggaagaacttcttcaaatgcaaatttttagggagagaagagaaaatgtaaaaagtgaaaagttaaaaaggcttccccccccccccccaaaaaaaa

SEQ ID NO: 169171 - DNA, 691 bp, Cannabis sativa
atatccaaagctctcttagcaccacgagatctttcattcgcttgatagaaaagaaaactgtcatcaacaaaaaagaggtgtgaaatagttggagctattcgagagacaaccaaacctttaagacgtcctatagacttctcgtattgaagaagtcggggcagacccttagaacaaattaaaaacaaatatggtgagagtgggtccccctgacgaaggcctcgttgaggaatgactgaacctgtaacatccccattgatgaggaatgagaaagtagttgagtgcaaacaagtcataatgagagtaatccaacgaatattgaaacccatttttcctatgattgctgctaaataggaccacccaacacgatcaaataccttgctcatatccaatttaagagcagcaaatcctttggaacctcgcttttctatgtttaatactatgaatgagctcaaaagctacatgactcgattagtacctaaagaaatctacaaatataatataaatattattattgttaaaaattaaatttaaataattatttacaaagttaaacttataccccacattaataaaaataaatagtgtaaacgacagaaaaaagacacttaaactggaaaccggagccaacacgccacgaacttagaataattagcttttttagtccctgtacttatgacactatactatgatg

SEQ ID NO: 169172 - DNA, 701 bp, Cannabis sativa
ccaaaagagaatacgaagtgaacctttataaaaaatattaatttcacttttggcaattttttttttttgaaaatcaacgtttatatataaaataaaagttaaactttatagtcattacaaatgatagtttttggtatagaagagggatcaacaataccagtaacattgttagcaaacgtccatttagctatgttatggacaacaaaattacaatctctaaaaataaacgaaaaattacaacttaacaaaaaagtagaaagatgtttacacttttggcatctttaatttgccaaaattattttatagtttattatttaatttcgcctgaggtgcttatttggtttctatattttgtctatttggcttttatatttttgtattaattgatttatatttggaaggaaaattgtttagcttttgtatttatagaaaataaggtataaatggtaagtttgatgactcatattttctctatctaatatatatttgatcttgttttagttttctaatatgtctgattagatttttccttttctataaaaggaaagtcgcacaactgctcacgattctgtaagtacggaaacaaaaatttctgaggtgaatgaagatctattttaggaaattatttaatgagttgttgtcttgttcagaccgtgtgtgagctgtcaataaggtgtatattgattatagatacaccttat

SEQ ID NO: 169173 - DNA, 702 bp, Cannabis sativa
ctggcggtgacggacgatggacagagccaagcttcgttggagcttaattagattgtgcgagtcgtttggagctaagaagctctgtggaccatggtggtcctccaccttcattcacgttgtcgaccactgaccatggaaggccagtcgactgctcttgctccaacagcgggatcgtcaggtccctacaatagtcattggtgcaaagccgaaccctcaatcgggttctctcccatttgtgtacgtgcatggctttgcatggagcccatgcacacgtgaaaaatttacgtggctcacttttgagcctcatggcttgcatgtgcaatccttcagggttcgttgatcgtcattcgaggtcttaaacttatcttcttgttgaggttggggtttactccttaaactcgagcttactcaagaatgtagactttgtggacttgttatgttattttatttaacaaaattttaaaataaatttgaaataaaaaaattacatcaaaacctatatgttatacccgaaattcggctaccatttcaacggaaaacaaacttgctgactataaggccttacgcgagatagagacatacaaacctatatgtatcagattgagaagaatatagatcaatgcatgaaacggtaattatatttgaaaatagaataactcataaaatgcggaaatgatagagtatatttacaacttgccgact

SEQ ID NO: 169174 - DNA, 1109 bp, Cannabis sativa
ccgccgctaataacagtagtattagcggcagaccacaatgtccgccactaatggggcggtttatttttcgtgttaagtccgtatggtgacttaaattactacactaccaatactaataagtaatatatatgtggaaagtttatttcctcataaataatgaagaaatataaataaaaacattgtgaccacaatagcataatttgtctccaaaaattgaggcagcctcaaatattgatgtgattcaatcaaaaatgatttgtgaaacaaagtgacctctccaccaataatcacatatagttcactttctaccattagaggtgtgaattaatttttctcaaaccaacaattttaagttcatgtgtttctttgtctttatccgttattagaacactccatcaatttgtttacttttattttttaaaaatattttactacaactatatatacttttttcgattttatttcaattactttttttaatataataatcaatttcattactgaaaattaaataatacattgattattaaataaggaggaaatttcttccaacctaaaacctcgttttctatttatagtgcataatctcaccatgttttgcggtattaccatttcacattacatgttgaagacatacacccggaaagatagataacaaggacctaatagaactaaaaaataacttcacccgaacacaacatgaagaaaagaaaggctaaaatataattatatattattttaaatatcatcatacatcaatttttattttattttatttatatcatcgaaatattatatattatttattttatatattttatctaacaattactaatattcctaaatcttttaatatttacactatctatttatatataatgtcaaaatataattatattttattttaaaatattctgaatttgtaaaataaattaaaatataaattaattaaaaagataaaatataagtttcaaaatatattataagaatattggtaaatataaatagctaaaaaatattccaaataagagaaataaagacactgtttggctttacagtttaaaaactgttttctattttttaaaattgaaaacagtttttaaaaacta

SEQ ID NO: 169175 - DNA, 1485 bp, Cannabis sativa
  modified_base (1344)..(1346): a, c, t, g, unknown or other
ttggccagaatttaaatatattctgtttaaccacttaagtaactgaatttaatgtaattaaaaaaatgaatggtaaaggaaagagaaattacacatctataataatttgattttgtattagggatttggacaaattaagtcctaaatggttacaagttttcttgacatgcctaatattttcttatgtaaaacttggggtgcttcctttcagtaatcttttactttatttttctcttaaattatctatagatataatagatttgaaattttaattattcgtttcagtgcaataactttagggtgtgtttgataataattatttaaactgttatttttttcttaatttgaaaagtaaatatatttttaaaagatatgtttaataaaactgcttttatttagaatttgtttaaaatatgaatcatattttttttttttaaaaataataattacttttaaatttatcttaataatttttttactcagaatctatttggtacttttttattatttatataaattcacttcattttcaaaatagttaaaagataaaatataaagaatgtgtattattaaagtaggatctatcaacactcagggtggatggcgaattagtttggatggatgattttgctccatttctctatgatgtactaaattctgattctattcaatgaaagttcactgtcaaaaagaaaaaagtaggatctatcaagccagataaaataattcaaaattgtacattatgaatagtgttactttgcgaaacactattcattcttaagacattattttaataatttctctctcatctttctaatttttccatttaatatttttaacattcttgtttatataaaataaaagatattataaaatataatatttaaatgatatagagaaaaaaataatgtaaaaaatataaaataatgtgttaaatataaaatataaaatataatgaagttgatgtacggtgtaatgtaaaagcatgagttaaaatagaaaaaataaggctttggtgaggtatttaaaaaaatcactacaagaaatgtcacttttgtcagcacatttttgtgctgacaaaagttggtattgcactggtaaaatagaatttacttatgatgtgttggcaaaaggaagttggcaaatcaacgttggtattagaacttttgccatcataaaataaaaaagcactggaaaaaataatttttccaagtgcataaatacgccggtaaaagttagattttaaccactaaaaatgtacgctggtaaaactttgaccactttgtcaatgcagtttgcgaaatacgctggtaaaagttatttttaccagcgcagtagcgaacnnngctggtaaaagtgacatttcttataatgaataaaattgagaaattattgggactgctcttatatctccacttgaattaaagaattaaaacacaatttttattttgttttataaataaataaataaatagatcggaagag

SEQ ID NO: 169176 - DNA, 528 bp, Cannabis sativa
caacggttttcttttgtctaacttcaagactaaacgatttaaccaagttttaggataattttttagtataaatttatttattttatgattatgtaagctataattgtttagagccatttataattttagaaaattttgaatagtttatcatactaaaaataaggttcaaatattatattgtatgtgtaataaacagccatttaaactttatattcgacatcataaatttaaaatttataaatgattctaaataagtacaagaaaaatgaaactaaaaaatattgaaagagataagaatacatggaaacatcaattttaaagagtgtaccacatatttttccattactttttacttctttttatcttttatcaatagtcaatatataaattaaggttttcatgagttgttgctttttaaaaaaggtaaatataattttggaccttgtgtttttgtaaaagttattgattgaactctttgttttgttaaatgacaaaatggacccggtattttccaaaatggtaaaaata

SEQ ID NO: 169177 - DNA, 572 bp, Cannabis sativa
atacaggaaatctcgaatcaccttctactatgtttatccgcaagattaaaattatttttcttatacctttcttgtgttctttttcagctttataatgaagttggaacactaaaatcctttcttcatcaagattgttgtacagtagaactattaaataagtggtaagaaactgtttatgtattccaattaagaagaaaatcataatcatttggcattccatcatataatcagactgttgtactgtggtactaaaccattgaattgctactctgtgttcagatggtgagaaggagccaaagggagatgccaacatgattatgatgaatgtatgtgaaaatatgacttgttaattaccctatatggttagacattaaatctaatatctaatggtcaatctcagacttgtatgaggtccctctttgtatctaacttcatatttagtatcaaacattcattctcattctcattctcagtgtatcctacgagttttaatttgtgtattgtatgaattgtcaatacagcacaaaattcagcaataaaattagaacaaattaattaatcttttaccaaag

SEQ ID NO: 169178 - DNA, 1313 bp, Cannabis sativa
ataccgtgtggttgccccccaagtgattgagcagacttagtctcttggtcacttgaattcaccaagtactatagaccttgtctgtgtattttcttggagggaactgtttgtacgcatgtgaaactaagaataagattaactataagaagttaccttgttagcaggttgtttgacacaatactaaattgaaacaccatgttcattcattaattggtcttaaatatgtgttgttgatgtgcaacgtatattttttgtgtaacaaaagcttacaaatcaaagtcttcttttaaaaccacattttggctacccctacacgacataccgtgcaaggtccatcactgaagagtgatggttatatagctctttaatttttggctacttttgcacgacatacagtgcaaatgcattactgaagcgtgatggaaatttagctttttttttttaattcctgcacagtgaagcgttataggaaccattactaacgagtagtgttttgtatgagtgggctactagtagtacttaccgagatgttctccattctagtatcttggtaggagaactaactccaggttcttattgtactcgtcaggcttgtacgcaccttcacttgttatcttgtaacttggtgcaaaccttttcagtttggtccatacttgcttcaggatcctcgatgttaaggaatattcttcagagcactaagtcttttaggaagaatttccttttcttgacttgtttattaaagtacctggcaactttttgttggaagacatgccgctttaagctagcttggtctctttttcttctatttcgtcaaggaattgctagcaaggtgtggtttacttcttggtcttagtggaccaaaagtacccttgtctgagtgtccttttggcgaagacatactcaattggctttgcccctgacatgattatcgtatagccttcatgcactattgtcaatagctgttcaacttccttcttgatatcacatcttagaggttgtattgagataccacgtctgtacgttaccccgactaggattagacacctagcagctttccccctcattcttactttttggcaaggttttttgttcagagtatgctactatgggtgtcatccatgttggattgtcatccagcatctctatttcttttgaaatagtgatgtctggttcttttaagagtagaacgggtaccaaattttccttgtttgttaaggcattgctgggtaactgagcaagtacatcagtcatcgcgtcatctttagaagcttgccttatagtatagcctttgagtttgttggaaattattttac

SEQ ID NO: 169179 - DNA, 618 bp, Cannabis sativa
cttttgaactcttggatgactgtaagactttatttttactttatgtccattttacacttgggagctagtcttggtcaagtggttcttcctactatggtgagtagatttttttgctttgcttcttatgtatctttagttttaaaaattgaagctggccgagtgactcttgggatcactctttggccaaatgacttttcccactatgataagcagattttgatttgagagaactatttgagtggtctcatccttttacttggatgtgagggagcctattgttactttaacatgcttcaacctcttaattagaactttcaccattgcatgcgcttgcgaacgtttgcttatgcttgagaggcatccctctctttctagtataatgccatgagtgtttcctttttaaacctctttcggccatatactccttctaaggagaagtatatttatttcatcatctaagggtagctaatccttgttgacttaaaagaaatttacttctcctccttatcccccaagtgtgtagcgtcattcatgacgctgtacacttaagttttattttctagttccttttcttctctttttctaaggaagatattattagatatgcggtgtattaat

SEQ ID NO: 169180 - DNA, 768 bp, Cannabis sativa
attattatattttattttcataaatagcaattaattaaatttaatatttttttaataaaaaataattttatttattgattaataacataaaaaaaattaattatacaactaaaaatataaataatcaaaataaaaataataaatataaacattaacctagtatctatattcatatccaaattaataccatgtaaggtttttattctgaaatgttttagtaaaacagaagttaatagaatatttatttgtatttttaggttacatatttagtaatttatagctaatattaatatttgagtgaaatctaattgaagcagtgtggatttttgtagtcaattaaagttattgatgaggaaaggaatcccaatcaaattgagattttgttggtaatttttttttaactttataaatacatattgtctcatcattataattaacataatttttttatttgatgatttattttgcattagaaatttagagagaaagatctagtaagtttgtatattgcacaagcaattttgttattttttaattttctcaataaaataatttggtatgtgtactccaaaaattattatattaaattatttaaaatttaatagtatggatataagatgataggtaagattggtgatttaattaaggtgtgtttggtatgctttctataattattttttttttcaattttaaaaacagaacataaaagtatgttgtgtaaagtttattttttgattttatttaagttaggtctacatctagagttga

SEQ ID NO: 169181 - DNA, 1245 bp, Cannabis sativa
  modified_base (862)..(868): a, c, t, g, unknown or other
ttaggggcatgtgttattaggatatattttccctccctcgcgagaaggactacactaaagaaaactcgtgatattaaaaggatctcgcacttttaggtaaaagagacattgcattattaaggaaggaacctcacatatttagtaaaattgcggtgtcaactagaaaatgtgcgaatacataccaatcgatggaaataacagtcaaagcattcaagtgctattaaatcgagtgttatatttttactatataaccgttgtattaattagtgcaattaagtattattattatttgtaagtcccattatgactattattttgtaactgccacctactatctataagtagaggtttctccctccattattcaaaggaggttgggctgatataataaaattacaaaacacgcaatttctttcaacaatggactaagcaggcttagctcaaactatatattaaaccactataaacacaatgcataagcagcataacctgtgactcgaacccaggacctccaacacacacgcaccctcctatggccacttgagctagcctcaagtggttgacacatatattaggacatgttatattattttctttccccgtacatgatgacacatgcacgaaaatgaatttgcatcatttaatatattatatgagaaatgctaaaagacaccagtagtgtttagtactgtcttatgtatatcagtagtgtctagtactgttttatgtataattattggtctaaataagtattaggtcctatataatttaatatagagcattgctattgctattagacactagtagtgcctagcaccttcgcgatatgtcgcgttacgattgactagcgatactccctaannnnnnntatattaaattatatgggacctgatacttagttggaacaatagcgatattgacacataggaaggtgataggcaccattggtgccctttagtatttctctttaatataataacttttagaaaatatctctaactaatcgcaaaacgatatatctagagctagttagtactagtaccctccatattatataactataggagagaacatagatatattatcaaatcaaagagataaagaaagtatactctatatatgtatctctttatataacaaattaaattataaattttatacaatctcctaaaacacaatatattaatatttatggaaggctccagccatgaagccagtttgctagtgatgatatttttcatgtcc

SEQ ID NO: 169182 - DNA, 789 bp, Cannabis sativa
tgccatcaaagaactctaaaatgatctgagtcaggtccttctttctgaataggggtaatggttccttctgccatttacaaagttcaccccgagcttgatttgaattccaaataaaatcttgtcaattttaagccaaaatcaaagagtaaggccctttgtgtgtataattattttggcccaacttgcttttgtccaattccaacccctctgctgatattaaattacccaaaaaattattagggcaccacaaaatcatagtatctctgtaagaactcatgtattgcacatgattgagctaatttatgaggctgagacacatgggtttatcgtagacaagaagactcaagtgagcattattcttgagtcgctcactcattgtttcaaactattcgccacaaactgtgtgatgaacaagctatagttcaacgtgactcaattgatgaaggagttgactatatttagaaaccttaaaaaggataagtccaagaaaggtgagtcaaacaatgttgaagaaaagtccaactctccttattcagataagaaaaagaaaatgggacagtaaggacaacaacagtggcaggcccaacccaaaaggcaagaaggcacataaagccaagaaaaataaggccaaccctaagcccaaggacaagaagtagaaaggcaagtgtttccattgtggtgtgatgggacactagaagagaaattgtaataagaatatgtcagagctgaaaagtgtaaatttgatctacctgttcttgaagctaatttagtgaaagatgataagtcctt

SEQ ID NO: 169183 - DNA, 742 bp, Cannabis sativa
  modified_base (682)..(701): a, c, t, g, unknown or other
gaaaaagatttggctcagcatgtttaattcgatatgggtaagagaagagctcgactctgtattcttaaaaaaaaaatattcaaaaccaagtcaagatgatacagatcaactccttcttcttgggccaaagatcttaccgtttctgaggggaagatcaacctattatccctagagtaatttatatccattgagtgacaacccttccgctcggcaccgtcgaatcacttgggttgcccaaaagcagtatataaggcgtacccagtaaaacttacaagtaaaccaaatataaatttgagaactataattgctatttctattattatctaccatttgaaagtatatgagtaggactaaaattctaagcgttcatagctcagaaaccacacacagacaaacacatggagtcttagtccaactcataaatcttagactaacaaatatacgtgacatacacaacttgcatgaagttgagagctagattttcttcaattgtttgtctcttgcctttatctttactcaagttaatttatgttataacagaaattcaatgcgtagtcttagcattcaatttgtattactgaataatttcatttttcaatttgactattttattttactaagttcaatattagttagattaatacaaaagaacagattgctgtgggaaattattttaccaggnnnnnnnnnnnnnnnnnnnntatgttgattaacaccctaattatgaactttctaaaacgat

SEQ ID NO: 169184 - DNA, 759 bp, Cannabis sativa
tgttctggagcttattagaagttttaggtttgttttgtttaagaaatgaggttttatgaaaatcttcagtagaaaatggctcaccatttttctagaaacagtctaacatttttagtaggtaaggacctaggaaaaatgatttgcctttttttggggtattttcacgaattctcatttttctgtgttttctcaatatttagggtattgccacgctattcattgatagagaaatttttagtttaaagtttaagtccctgaaaagttatttagcctatcacttaccaatttatgtatgttgtgacttaggggcctttaaatcgtcgatcaacagtttccactcaggttaactagcacacttgaattcagaattgaggtaagaatagtatagtagttgcatatatttttacatatttttcgtacatgttttatgattgcctaatagataacatatgagtaagagtggtattagtgtacatagagttacattcaatactgataaatatatgtttggcaatgtataggttgacgctatcacatcagtacgattagagcactgactataggctaatattatgggaaattgtactgtcgtacgaacattacagaccttatatgcattggaaatgggataggattgtgattgggtgtatgggtgcctaattataatccagtttatatttatgttatatttatgcttttcttactgagtctgtcgactcacagttctacgtttatgtgtaggtaaaggcaaggctaaag

SEQ ID NO: 169185 - DNA, 660 bp, Cannabis sativa
ttgagtttaaaatttcaaacttgaaaaaaatcaactagcatgcatcaaaacctattccattccactcaattaaacataaatacatcaaaggacacagcaacaaacacaaacagcagctacagcaagtaaaattccaaagcatgcaaatattcattttcttaaaactcaaagaaactagcaagagagttgcacaagggttaccttagcttggattacactttgcattgcagaaaacactttaattgaatggacaaaagcatgaactctagctggttctagaggtggtccaaagagagagagggcttgagaggaaatgggattttggtctttctttgattttttccgattttgcaacataaatgataaaatagttttcattacttatctcagccaaaaataacgtatcatacatcaattaatcactaactactaagtccactaaaggacaaaagcttatggggcaaaatggtcattttgcccctcccacactaaaagggttaaaaagcacttaagggtatttttggaaaattctaaattcccgaccagtctcgaaattctcaatgtctaacaataccccccgctatactaaaatactagactgcgattctactaagccatacaccgtgttccatattgacgggcaccgaaaatgcaaaatta

SEQ ID NO: 169186 - DNA, 1119 bp, Cannabis sativa
aagacaaaatatttttacatggttagagtattaaaaacctctagtctattagtcaacattattatggctagaaaagtctttgagtattaccagggtcgcccctaggcataggcggcgggctaggcctgtgcctagggcccacactttatgggggcccaaaataaaaaataaaaaaaattattaagtttttatttaagtaaaattaagtgtactataaacaataaatatatatagcttagttggttgaggtgtatgacatattatacaatgtcatgtgtttgaatcccaaaatactctttttcaatatttttttatatttatatttccaagggccctaaaatctaattcgccttaggctcatatattctcagggctagccctggaaagtgagtattacacaagtgtttctaaatttacgaaccttatttcttgccttagcctgtaagaaataaatgcttaaccctttgcatgaaggattatcattatatttataggcttagggttcttgtctgtaaacattgtccactaatggggtaaatacaaataacatatggactttgtgtccatctggtgcaatccggcccatgacgcattgattttctggtaacgtggatgccacatcatgttgatagttgtcaaaacgtgtcatatcttcatggattataaagacacataaatgcttgattgaaaattaccttatttttttattcaatttacttgattctcggatatgctcttgagaataaagtcctaatattgtgggatttaataataagtgagtgagatcccaagcttgacatttggaggctcattaattaccaattcaggaacactgcgttgtgctatccggaagcctgctttgctgggtctttatctcgcttggatgaggtgtttgtgcagcatccgagtgtcttgacttagataatgggtccggtcaataatcttgattgggcctacatttaggcttgtataagctgaattaaagtcttggaattacatgtgtgctccttccacaaatacggataatatttactgtgatatctcagaaaataaataatatttaaataggtatattttattaaatatgtaattatgttggtaatgaagtaagattatgat

SEQ ID NO: 169187 - DNA, 914 bp, Cannabis sativa
taactttgaagttcttatgtgatgagtcacatgaaaacatgatgcaccttgttgatatagatagtaccatcaatttattgaagtattcttcaactatgtagtcttatacctacatagtctcatcacacttgacattcccttggtgatgtgggattgcacaacttaccagatattttttcttgtgggtcacgggactaatgacggttatagaagttgaggtttgggatctaggtctgaggtcaaggtccgtgacgggggtcgggggctgggatccaagttagtttgcaaccgagatttgacatctgagtttgaattatggcttaattggatgacaggggtcttaaatattggtgaataaaaatgtaaaaaagaatttataattgaaaagaaaatgcttaaataaaatttgaaagtaatttatttttactttcaaaattttcattcttaattataaaaataaaagatacaaatagttttacaaatttttttttttccaaaattttttcacttacataataaaaaataaaaaaccatttaaaaatattaatacactccaattaaatgttttgggcttgttcaggaaccattctaaaaattgtcttttatttttttaatcaaaaatttgaaaatacaaatgaaaattgtgtttggtaactccatttctttttttcgtttttaaaattaaaaaaaaaatagagtaaattttaaaaatatttttttaatgattttaaaaatttttaaaaacacttgttttttttttcacttttgcttctctctctctcgttagtcaccttcttcagatgaatctttttttgtttttaaaattatgaaacaaaagtggttacagaacacacttttattttttattttaaaaattttaaaacaaaagtggttattgaacacatttttttttt

SEQ ID NO: 169188 - DNA, 587 bp, Cannabis sativa
attttcccttacaatttcttgacagtcgtagatacttaacgttaactggctggtaaatacctacgtgacagactctactttgtccaaaactaaaaaattaaacaaaacttaactcttaatttgaatattaaacttaaattcaaaaaataattcataacgaaaatacttaaattttagactttcactattataaaattattcttttctacaatatgaagtttaaatattatttaactaaattgaaaattttatattaattaacggtcctaggcactctataacaaaatagtgtaacagaacgctgcaatcataatttaatagaaatagtaaagtgtatgctaaagttactaaactttgccaacttatttttagggacatgaatcgagactgttaacaaaattcttaatgtcgtaccatcaaattcttataatgttggaatggacgttaacttaatttacgccattacagagtttaatgatgttatgctcatgccttcaaaaaaaaaaaaaaaaaaagaaagctagaatcatgaactaaagtttgtatgtttgtaatgttagataattaacaattaacccaagatctat

SEQ ID NO: 169189 - DNA, 725 bp, Cannabis sativa
ctacaagttttcgataccttgcttcgtcttgcaagtcgttttcagcatgagcacatagcttggcattagcttccataggtgttgagatgggcttacactcgagcattccaaatctttacagcaaatctttagcatacttttgctgacaaagaaataagtcttccttagctcggtcaacttctaattcaagaaagtgtttcaattgtccaagctccttcatttgaaagcgtactaataggttctcctttgtttgacaaatttttgcgtcatcatctctagtgataatgagatcattgacatatgccagaacaatcgtgatttttgcttcccttaccttgacgaattttaagcttgaatctgtatgtgtcatagaatatttgctttttactaagaacgcagtaatctttccataccatgctcgtggaactttctttaatccatagagcaccttttctagtttgcaaacatagtagggatttgctctatcatcaaatcctcttacttgcaccatttatatctctcggtccagttctccatgtagaaaggtattattcacatccatctaccatagcctccaatctttactagctactagtgctaacagaactcgcattgttgtaatcttagcaacttggctaaatgtctcgtcataatttagcccatactgttgagagaatcctcaagctactaactaagccttgtatctttcaattgagccgtcagga

SEQ ID NO: 169190 - DNA, 1018 bp, Cannabis sativa
tggctggccaaaggttggccaagtgagggtgttattctgccagaggtccctggccagttccccaagttgttgcttgccagagtctggctatttccaccaccatgtctatgtggaaagacttgtccaacttcgggtaggggaaggtctgtcctagttcctaaagaatttggttgaactgtttatctgtagaccctactcgatttaactgccttatcatgtcaccagcttctctgttacagcattctagctctgcttgatgagatcagaagatgtactcctagtcatccatccatctcaaaaactcacgtcgctattgtgcaaatgcatccaaccaatagcgtgtggttcttcagtttagctgacttggaagacagcctctctaagtttggccaacttgagatcttctcccaaatccacgtaaggctcgcgaattgctggcttgctgattcctgaccccgtttccctagcataaaattagggactagagtcaatatggtgctcaggggctgctccacgttggccaaaccctcagtacaaggtgccaaaggtggatctgccccaggcagcagaggttggccattggaaccaaccgggttggcaatgtcaacctgaccagtcgtggtggtcaagtttgttgtacctgccgggttggaagggttggccacattcgttaaattcatggacattccagttgtggctagaataaaaacattaggatcaacattcatagggtcttaaggaacacccgatgaggtaggagttgtagctggcccgatgaggcaggagttgtagctggcccgaagaggcagaagttgtagccggagttctccttgtgtcaaccatggtgttagatcaaataaattgacaatgctttcaatgaaagcaccaaactgttgacctcagatttggtcaaccgacaatagagttgtatttatgactgatactacaacgtgtacacaataagaacaaaaaagtaaaaagacacaatattttcatagaggttcgacccccttagtta

SEQ ID NO: 169191 - DNA, 1302 bp, Cannabis sativa
attctatagaaataagctctagctctatgagaatgaaacaattgatttttttttgataatatagaaattaacaattaattaacaaactttcatttaatgatgtatatataacattgaatatatataagtacaacaatatagatattttcagaatctagaaaaaaaaaaatatatatatatatatatatatatttagagattttagcgtacctccaaaatagtatcaaagagaaaatacataaatttttctttaatatattgaggagggtaaacctcaatacctttttttggttgtgcatgaaattgtgaagaaatgttaaaatggagaaattagaattgaaaaattaaaaaacaaagtaaatagataaattagaatgaagaaatattaaagtgtcatccccaccagctccaacaaaaagattattgaagattaagaggagagaatgccacttcatctaaatttatatagatcacagatatatacataaattaaaactaaaattatactaatggcataaaataagaatgtcacccaagaataatgtgctaaatggggtcatatatcattactttactatgtcgtgaacaaacttattgtctcctggctttcttcattctcctcacacaacacaccaaagtaatcaaatgcataagaagaaatataagaagaattttttaaaaaaagaaaaaaaaattgatcattattattactaacataatgtgtggtctcttatgattatatatgtatatatactgtatatctttacaaatctagagccacttgagaaggaaactcaaaaatatttgtgttttgctttgtcaaatcagctctcatctcttttagttaacatataaacaaatataacacatgataaattaatagttgatttcttattttaataaaaatgtacactactcgtataaaaaacaattattggcattgatatatatttttgtaaccattcaatataaaacgttttcttagtttaatatgaaaccaataaatatataactaaatgcttaccttaatatgcatacactcaatagtcattaggttctttctttagttgttattcttttcatattcttattttggaagaaaaaaatatatagttataacaataaaaataatactaaagtcctttgtttaattattattaatgataatggatgataactcatacaattattgttattttttgaggaatggttttgagtttcatttgtaatattgtaataatgtttacattattgaaagaaaatgagaaggaaaaaactaataacaaataaaaaaaaaaaaaa

SEQ ID NO: 169192 - DNA, 530 bp, Cannabis sativa
gtgatactctgtgattgcagcacaccattagctgctgtgaggacttcaagtcttgacaccacctctcaaacgttggggtgattgtgtcactcctagtttggaaatcagcagctgaaaccttgatggtgacagagccttggtgaggcaatccgcaacctggtctgaagaaggaatatatctgacttcaagttcctttttcagtattttgtctctcacaaaatgaatgtcaatttcgatatgtttggtgcgggcatgatagacaggattcgaagccaatgcaccagcacttacattatcgcactaggtcacagaagtttgaggcagaggaaattttaattctttcaacagagactctatccatgtaatttcagcagtgacatgagcaagggctctatattctgattcagtgcttgaccttgagacaacggattgcttctttgatgaccatgatacgagtgtgtctccaaggtaaacacagtagcctccaacagaccttctatcatcaatacaacatccccaatcagcatcag

SEQ ID NO: 169193 - DNA, 510 bp, Cannabis sativa
attcactcttaaaggcatgctaaactggattagaagatacaaaacttctaaattcagaaaagaagtttatgttgcagtagttaatgctattatttacaacatatgggtagtaagaaaaatgatactctttgcaccaaaaaaaaatgtatattatatatacagataggattgtaaacaataccaaatgtatagttaccaatagattttccttttattttatcttgatgattgatagatagatcttcccattttaaataggaactgatcaaatctggttcagccgtattaaagccaaaattttaattgggtctaagtggctgtgagtatttagttattgtaatactttagttttgagcagtaaaattcatttttgattacaaaataaataaataaaataaaataaaatgatatattgtccctacttaaaactatctatggtgaaaattagataaatttgatatttgaatggagattgcctttgacactatgttttatctaagaaaggttttg

SEQ ID NO: 169194 - DNA, 2168 bp, Cannabis sativa
  modified_base (2120)..(2120): a, c, t, g, unknown or other
acgaaaatctgcgttaacacttagaaaatcaaccacgtaagccaccatcatcatcaagaaggagttgttgccatttttagaagaaattaaatgcagaagaaaaaagtaccaaaaaggaagtaactaaagaggaaaccacccgaaaaagaagatggaggacacaagcttcatttgtttgattttctctaatctttcttatatttttctcctttctttaaatacttgaagtttgttaaattgtaaagaattaggtagcaaccatggatgaactacttttattttggattttgtttactggtttacatgagctaagcctcttgagacttgaatgactatgaatccctatgcttggtatgattatttttaagcatgtttaaccaattttgcctttgttcattcaagtaagcttgttgtttaatgattgttattacttggccatgagtaataatttattaagctagatatggtttcgaaaaggctagatctagtagttacaacttggatgctgcaagtgaataccaggtttttcttagtaaatgaagtaagaatatttcatttgccttgcataacttgagaattgatgtttaaatattgttatgcaatctggtttgatatagtaatatattaatctaagtggtagaacttaaattgtgagttttggaaaaatctcataaatatagaaatttttttttaactctacacaactttgctggaacaatgctgaaataatggtgaaaaactggacagattcaacatagggggatttagttatcaagtctatttttccatagatactttttcttgtggataattttttagtagtaattgtgttattttgaatttattttcagtgttactaatttgttttatttttatcaatcatccattcattttgtttaattttcttttaaaacaccttaagttgttaactagttgattttacatttattttatttacaattcctgtggagacgatcttacttatcaatatattacttgttgtcgattgtgtgcacttgcgtatatattaattttcacaacaagtttttggcgccgttgtcggggattgaaattaaaaattgtgtattatcaactattttgcaatttatttatggtttgaggttctaacctcactttggtgcgttgtatttttcttttacaagtgtaatctagtgcatgaacgagcaaaaagaagagcttgagcttgctcctattgaccctgaaattgaacgcactttcagacataggagaaaggaacaaaaggctaaaaaatgctgcaatatggccgaagggtttgaagttggggtgcccataatggtgccaatcttattgccttggctgatgataaagcccaagcaataagagcatatgctgcccccatgttcacaagcttaatttgggcattgtgagacccaaaattcaagcacctcattttgagctcaagcccttcatatttcaaatgctccaaacaattggtcaatttagtgggttgcaaacggaagatcctcatctccatgttcactcattcttggaggtgactgattttttcaagctacaaggagtatgtgaagaggctgtaaggctgaagttgttcccattttctttgaaggatcgagctagagtatggctcaatacccttcctcccgattcggtgataaattggaatgacttagctaaatttttttgagaaagtattttcctccaacaagaaaacaaagtttcgaagcgaaatcatgtcctttcatcaattagaagatgagaccactagtgaagcatgggaaagattcaaggagttattgaggaagtgtccacaccatggtatttctcattgtattcaactagagacattttacaatagtctcaatgccgcctctcggatggtgttgtatgcttcagccaatggagccattctttccaagtcttacaatgaagcttttgagattttggaaatgatagctagcaacagctatcattggtcaaccaatagagctcctacaagccgaaaagtagcgggtgttcttaaagtagatgctttggccgctctaaccgcttaaatgacctcaatgaccaatatttgaagaacatgaatgtaataccccggaattaagaaatggattagnaaaaccctaactagataattatgtataattgaggaattatattattat

SEQ ID NO: 169195 - DNA, 621 bp, Cannabis sativa
taaataacaatgctgttttgaaatagtttagtttacaattcaaatatgtgacttttgtaggttagggtagatcttgtgggctgtgcatactgcacttatggatagaacacgtgggttaaagtgatctcctagactgtacaaaccatgagaacttaagttggtgggcttatactaattacagttaataaaattacactgtatactcattttatatattttaatttttatctttatttttatattatttaaaatatacttattttcataaatgatgtccctattatatcattagattaatataaattatgtgttagatttaagtagaaagtgaagatatattgggcaatacactcataaaaattggtacattttaatgaaatataatttaagaatatttttaattaatagatacaaaaagaagtattcctcaacttattccgttaaaatttgggtagattataccaactttaactaaacaacaaatattctttcgacagaaaaaaataaaagaaactaaacaaaaaatatggattcgtcgttgactacacaaataacaagtatttagagaaaattagactctataccctttttatattattctttttcatttttaccctcttt

SEQ ID NO: 169196 - DNA, 761 bp, Cannabis sativa
tgaaaaaataaaaatattttctttgaaaatcaatgaaaatatatgtcagtttttttcttaataaccgacggcataacggactacgacattagttattagtgaaaaacagacaccacatagtcagttaattccacaaggcctcccctgtgtcgttggttattttataaaaagcgacagcataggtaccccttatgccatcggttgataagacccacctacagcatcgcccttgaactagtctcatttttgcccaaactggtgccaaatgccccaaaaaactgtctttaaagtccctttttgtcgtagtgaatgttgtgtggtatagatatggttagtgttatttcgggtttggataatgcacttgacctatttaactgatacaacttttttttaaaaaaaattcagccgcttttctattagtttcacattgacgcaattgtaagtgtggtttacaactgatgcaaaagacctatgtgtcattttaaaattgatgaaagattgtgttggcgtaaaactaatagtaatttttcttttaatcaattgtattagtcatgggcgttgatgaacgtgttgaccaacaaaaatatcttattttatagtagtgaagtgttacaaataaataagtttatgaatatgtaactttaaaatataattagtataattgatgtttgctaatctagaaactttctttggtgacgtggacatcaatatttgacccatggcataaaggatgacatcacagagttgagttgacccaagtc

SEQ ID NO: 169197 - DNA, 866 bp, Cannabis sativa
actgtgtacacgcacgccataacaaattactaacctttgaaggaagtttcagcttccatagtttactccagaacgcatcaatctcttcatcaaaccagttacttttttaattctgcaggaaattataggctgactttacagaatacacacctgaattttcgaaagaccaaaacagttggtcatatgcagcagtattggacagagggataccacggatgagggactgatcccttgcctcaaacaggtcagcaatgatctccaaatcccaacctgacccatgaattgttgaaatttagtgcaactaaaaacaatattgtatagcttggtcttattttttgaaagctgatgttagttgatattggagaaattttaatgatatttccaaagcagtaatggcaaagttcaaggctagtaagctttattagagtcttcttcattatgaacatgtgacttacactaaacctaaacactggttcattctgtgacaagcagtgaatgtccatttgttaattagagacaagttgatgactttcaatatccattcagattaaattttatgtcctttttgtgagcaagttcttgagagtcattctcatttattctttgggtgcaatttttctcaaaaagttgtgcagggtgttcatggttggccgcttgggtgtactttgtctcttcagttttaaagttggctaacttagattgtgataaaaaatagttgtttcctttctaatgttatttttgctgtagttgttgctacatattataatttgtgaaatttgattttctatacttaaacattttcaaaatttcgtttttgaaccaatacattttacactatgaaaaatatgactcttttttcaaaactc

SEQ ID NO: 169198 - DNA, 633 bp, Cannabis sativa
tatatatatatatatattatcacctccattaaatatatttctctattaaaaatattctttccaattgataaaaatattagaaattaagaaaaaaatttaggtgggagcaacactttagtagagatatttcttttttgtttttttaagggtaaccgttataaattagaaaaaaaatattatatatatttataacagtttaaattataattataataggcattagacatttggtatgttattgacaaattttataaaatctacagtataaaatatattattcaaataatcagttgtatttatgtttgttttattttatactcatataacataaccatttttaattttattgttgcgctttgtaaattatacaaaatttttcaaaaacatatcacatgtttattataattataatatacactatcatataaaaaattttgaaatataatttatctaggtatcaaaaaaaaaaaaaaagaatgttcttgcattatgggcagagtaatgcccctatttaataagaaattttctatatatatatgagtaattggtaccgaaatctccttgtattaatttttatacattttttttttttgacaaaacccttttaaaaatttatttatttttttttttaca

SEQ ID NO: 169199 - DNA, 1300 bp, Cannabis sativa
ggtactcgattgaataataccacactttcccatctctttgaccatttgctcaataatgtccttctgaaaataggggtacctataggggcgcacattaacaggtgctgaacccgattgtaaatggatgcgatgatcaacttctttgtatgggagcagcccttttggtttgggaaacacatcaaaatattcagtcaacatgcttttaccttgatggggaaaattagcttccatctgaggtaatggaaccgactgtgactcacaactatccatgacagtcattaaacgaaacaaacaacgaacctcaccttcccacaacagcgtcacaaactgactataagataactgatgtgtggaaacatccttagagactgctaatttgactatactcccctgcctagagaactccattgtcaattatttatgttcatggatgcaagggcccaaggtctgcagccattgcattccaagtaccacatccaaacctgaaataggaagcatatacaaatccaccacaaaatgatgaccctgtaaaattaattaaacctctttgtaaatttttgaacatagcagagaatggccattgcccatatataccttgaaccttttagtttcttcccaaggtaattgcaactgagccgcgagtgtctcttgaataaaattgttgttgctgcccgtgtcaatcaagacttccaatgattctgcaccatgtttagccaaaatacgaaaaatccgaggattagaggaatttgacaaagcattcaggctaacctcgtcaactggattgtcatctaattgatttgattccccaccatctgaaaagattaatccctcctcttcttcctccgtgccacataaaaccagaacccgatttttgcacttatggccaaagctatatttctcatcacaagtaaaacaaaggcccttatctctcttttcacacagttcagtaggtgagagacgtttaacaggctgagagttacttcttttagtggaattagaactggagttaatcgatggagagccaacaccaatagttgcactagccccctgaagcattggtgacgaattctgaactgatttagaaccctaagcagctcattaatttgatccccgagaacgcaggagcatatcatcattacgatattcgtacagttgtgccttagccatggcatctgccagattggagggagtagcaatcaaaagttccttacgaatttccaccttcaatccccacacaaaaaaaatgcaagaacatctgctctgggacaccggtaattcgtgtcattaattcttcaaaatc

SEQ ID NO: 169200 - DNA, 1611 bp, Cannabis sativa
  modified_base (1582)..(1585): a, c, t, g, unknown or other
tgaattttgatttgtttattatgtacacgttttataaaactcaacttgaatattaaataagaggtattttcaaaaaaaaataaaaaataaaaaataaaaaataagaggtggtgagtgagttacgacttaccactacacattccaataaaggtgatgagtagtttatttatttaaaaaattcactaaaaatatgggaaacattatttatatatataatatataacttaatttatgtaatttggacaaatatattagaaaattttatagtgtgctcctaaaagaattatagtgatatatttttatttgtttgaaatattgagaatttttctagtgtaattttttaatgtacattataattatttaaaataatttgtaaaattaaaataatttacaaaaaaaaaaattaactcattggaaataagattcaaacagagttcaaaataaattagactatatacatgtaacaattctcaataagtattatcaattaatagttactaaataaatttaagtataaatgttaattttgaaaacgattagattttgattcaatgttgaataatacaaaagaaatttaaattttcatgcttaatttagctgcttaattaaaaaatatatcatattttttatactatatcaaaaatatatttatttacaaattatatttaagtcaaactcaatttttttaattttattttttgttgaatttatttttttcagctattttttgttgaatttatttttttcaaccgatggaataactttacgtaaaaatgagaaatttttctaattagatagaaaaattaagtataaaagttcaaattttcctaatactatttattcatgtgtaataccgataaatggtttacctacttaaatggtgcttctagaatacacctccttaaccctctatctattttagaaaaaaaaaaattagttcaatttttttcatatcgtttacattatagttatttaaaatattttacaaaattttgagaaattcagaataatttataacataaaaagcattgttcaaataacctatttcacacgttataaaataaaataagtcacgcgtgcaacacactgtttgaatcctgttagcaacatgttaaattcttttgaattttttaaaatttttataaaatgtcttaaacaactacatcgtatatgaccatgagaaaaaatttaatcaaaaaattatttcagatattaaaatagataaaagtttatattttatagagtttattgcggaaaaaccctctcaactatcatcccgcttgtacttaactctcaaagctcaaattttggtggtaaaactctccaaactactgaattgtaagcaaatttaaggtgtcatctattttttactgttaactgtcaacatagattgcttatgtgtacatgtttttacacgtggcacgtttatattggtacatttaatattattatttaataattataaaaaaaattataatattttatattttttatttaatttgaaataaaaatattaggtaactaatataaacgtgacacgtgtacaagagtgtacacataaacagttcatggtggcagttannnnatgataccttaaatttgttaacagtt

SEQ ID NO: 169201 - DNA, 561 bp, Cannabis sativa
tgccagggtctggcctaccatgtttctgccaatgtctggtaagtcattttccttccagggtctcgcaaggcatgttcctgccagctttggtaagtgttgggaaacctttccatgtgctggcaagccttagtagttgttcgccagcctctgtacaactttccttgcaaagatcaagctttcttggtcgatcagaccatttctttgtgtgatagtcacctttgggcgactagtttatgctcaaaccttggccggacatacaagctcctcttggctggcctatgtactccctctgggtggccaaacatggttgtgtagcttcttgatgactttcttaactcctctcgcttgttgcttgacatttcttacatgccttgtaaggagactttatcctactattgacaaggttgtattccatgtgtccttactcttggcttatgtggacgtgtcacatcaggtggaaaaattttgggataaagaatattagaacttagcaagctttagataaaaacataaatatttaaagagttattgtaacgccctaatgctaaggcacgctacagt

SEQ ID NO: 169202 - DNA, 1457 bp, Cannabis sativa
aaaaaaggggccccccccccccccccctcttgtattgtgtatattatctccatctgttatggtcttatcaattccatattcggcattaacttccccaatatttccatcttgctcctccaagctaagagcctggaacgtattctccattcttactacaggatgcacctgctgcttttcacttctgtccacttttggcccttttgaaatcttgataaaaccatctgcatcaggtacattggcctatctattgtcatttttcactacccactgttgttttaaaggagcagcttttttacaatcttctgcagaatgtccaattctcgagcagtgggagcaagtaatcggcttccattcatatttgacgctaacaaaagtattgagaccatattcattttcaaactctatcatactcgggagttgttgatccatttgtacctcaattaacactctagcataattcagcctctcccgatccttggtgatagaatcctccatgagaggcttactaagttgcccaacaatcttaaagagtgacctttgaccccaatatttcaattctaaatcctcaagctgtacccaaattgggacacaattgacatcctctttcttgaaattgacattagggtcctaaggtttcaagattacaggtctgcgattgaaaaaaacttatcccccattcatgacctggtctctgaattctagggaggtaaaccgaatgataaagattccatgtgacaaaactttcactcggtcaaccttatcatgccaaatcatttttgcaaatccttcaagcacgtgcaatggtggattaactccaagaacatagcacacaattgaaggattccaaaacaaaatctcctcttcaatatcatcaagagtgattttcactttcccattaccctgctccgtatccttaaaagagttctccaagttacgcatcacagatttagaacgcataatagggggaattgagttcttaccttgccgtatgtcactgttacattattgttggccatgaggaagtgaatgaaatcattctgagcgtcactcctagcctcatcctgcctttgaatctcttttaatgaagaattgggagatagaggttgaaaatcatggcgatcttttccctggttgagacgttcttccccttgcaaaccttcctcatccgagacctccaatggctcgattttagtaattcgccccatagaaacagaaatatccacatcaggaacaccattaccagctttcttatttgaatttttagcagtcgatttagattttccatggtttttcgatcttgttttagccatagcaccagcctctcagctgtaagagctagaaccaaagaaaaaaatttattttagttatatttaattctctaaattcaaagattaagaatataatgttagaaatatctaaattttaaattaagatattatattatattatcttattag

SEQ ID NO: 169203 - DNA, 595 bp, Cannabis sativa
ttttgaccgtacaacccttaaaattggactgcttacaaaattaaagtgctatctattttgttttgtgtattaattactaatatagactgtttatgtgtatatttttgtacatacgtcaaattaatattattacaactaatattattaatttaaaagtatataaattattaaaatttataatattttttatatttttaaaatattttgtttttatttttataattttatttaattttaaaatgaattttaaaaataataatattaggtttaccgatataaatgtgtcacgtgaacaagagtgtacacatagttcaacaatttaaaaaattttattgctaaaatttaaatttaaaaaattaaatacaagtaaaaaaacaattaaaaaagttttaccgcaaaagaactcttttctatttaatcaggaaaaattaatgtaagttgatttggatttgtaagcatagtacgctagactacactggtagttatttgttgtgattactttaaaagtaggaagatattttgaaatgatactcttactattatttaggggtgttcgcggtgcgggttgtgcggtttttaaccattttttcaaacc

SEQ ID NO: 169204 - DNA, 535 bp, Cannabis sativa
aggatgttctcgttaaggtaaaaaatttagttttcccagctgattttatgttctagacatggaagatgactctattccatgcacaatactggtattgtttgatagaccatttatgagtacaacgagtatgaaattggatgtcaagtgaggaacattaacgatgaaatttgatggtgatcaaataaatttcaatgtatttaaatttgataatccaacatcagcaccagaggtattgtcaaagtcgagctaacaacattgaacaaagcgaacttacgagaatttttcttgcccttttctttttattttgcattaattttatttgactgagccttaagaacaatgcttatattaagtgcaaggggagatcaattgttgtgtctatctagtttttttttcttagttgtttttttttatcttttttttttagtttatattaatttttcttactttaattttagtgagtgtgggttgaatgaaattctgttgacaatgattgctcatgtttgatatatatttttactttgatgtcttatgc

SEQ ID NO: 169205 - DNA, 551 bp, Cannabis sativa
aataaataaataaataaattgatgtgatgtgaagtgaaatggaaaaaaaaaatgtattgaaactcacaattcaagtcacgtgactgcacgaaattgatcagaaccctgctaaaggctactagggctcagtgatgtgtttcgaccaagtctgtgcagtcacgtgaatcgagatgcgagtttcaattggggccaaagactttttattaggtaccttcatgcattgacctcctagaagagtacagccaacaacagcaccatagcaaaccataaattgaatagggccaacataataacgaccccatttaggccctgccatgacatatatgtaatactaatttgttagcaaaattactttattttttacatcacaaataataataacttcatcttattaactttgtctctcataataatctcatattctagttacttgaatttttaaattagtttatgtacaaattactttggaaatttctctagtagaccctcataaaaggtcgttttagtagattttttatctgtttcattatctaaaaaaaattaagttaatt

SEQ ID NO: 169206 - DNA, 735 bp, Cannabis sativa
cttatgtctcaattaggtgttctggagctttgtatgtaatttggaatagttttgagttgtgaatgagatttttggaaaatattgagtagaaaatgacaaaccgttttctagaaacattctaccatttctagcaaggagagaccaagaaaaacgatttgcattttttggagtattttttctaaagtcttgtttttgtcattttatcaatatttagggtattgccacaatatttatcgatagaaaaactttaaattttgagtttaagtccttgaaaagtgatttagtgggtcacttaccaatttacgtaaattgtgacttagggccttaaatcgtcgagtaatagtttccactcaggttgactggcacaccttaatttggaattgagataatattgatataatagttgcatatgtatacatgtttagtgtacatgtcagttttcgtcagaataacatatcaaggtatcagtgagatgtacataggtcgcgccgagataccaatagatatgtgttaggcatatcaataaccatcggattaacatatcaagatattagtaatgtgtacatagagttgtactgagatatcaacatatatatataccaggctttgccattcgaatgttctagagctagtacgcattggatgcaagatagggtcgtgattaagtgcatgggcgcctggtcacaatctagttttatgtttatgtttatgcttttcttactgagtctgtcgact

SEQ ID NO: 169207 - DNA, 642 bp, Cannabis sativa
ttggctcttctctgcttatccgaaggctaccacaactgagactattgctgttcaaaaggaggcaggtgttccccccaatcagaaacattggattcctcctacaagtggctgcatttgtgtaaatagcgacgcagctgtcctagacaatgttgctggtgtggggctcgggttcatctggagaaaggcggatggccaactcctctctgctgggatgatttatatgcacagcatatgttcagtaaagatggctgaagcttgggctattttggaagctctgaagacaccgccagctgctgagacaaaccagattgaaatccaaatgtattgcaggatgttggtggaggaaatcaaagaccaggggaaaagattcactgctgaaagcaacattattcacaagatccacaatgtgctggaaacttttactagtgtcaatattattcatgtaaaaagaaccaataatgaatgtgcaaatttgttagctaggaaatgtctagatgataaaaccacccagttttttgacaattcttttccgtattgattagccaatttttgtaaggctgatcatccggttgtggtgtagtccattttggttctaataaattttctttcaaaaaaaaaaaaaaagaaatgcagttatggaag

SEQ ID NO: 169208 - DNA, 1818 bp, Cannabis sativa
  modified_base (882)..(892): a, c, t, g, unknown or other
  modified_base (1326)..(1331): a, c, t, g, unknown or other
tgactggaagctttgtgagctagacactttctagccaaagcatgagcaacctcattagaggctttatttacatgtaagaattttgtacaaaaattagactcaacagtgagttcgaatttgatgaagcaaaacccccatcggacccaacaggtctttaccttggttaatggcatccaccaccaccttgcaatccgaccaaatttcaactttgtgagggttttccaattgcaaaaattttaaagcttccagcactgcttgcgcctcaaccacttcgatctatagcaccctggaatgaagatcatgttagcagaacataacagcccttgccaatctctcagcacaacccccattcgaatcccttccaccccacttgtaagagctagggtgccagaagcaaggcctagcgctcaggttgacacccggggctggtccagtgcccaagttgacacctagggcccagcgcccagattaacattttgtcaacttggaccgattctgataatattttttgagaatacttccaagcatctttttcattttatttagaaaatattgagattcaactattgtcttaacaattattgtgttgacaaattttgtctttaacaacttttgtttttttttctatttaattaatttgaaaattatttatttattataattattattttgcgaattcaaaatagatttttccgaacaacattatacaactctttattcatacccttgacagtgatttaacttttatggtggcaattcagagatcatggaactataattttaagctccaataaactagaaatttaatgagtctcattaaccaaataatcatgttaatttattaattccatgattactccactataaatatggaattgaacnnnnnnnnnnnatagaattatatttattgagttttgctgcagtgtctatggatctaattaattcgagtaattagccctccttatgtcggttcgtaattagttttggtcaaattatttttttacccttctaataacttatttatcatttagtaccattaatttactaatggaagtataatttagatcccatctaaatttatgtgcaacattccggttctagaattaacacataaaggaaaccaagattcaatccgtttggaaagtcaaaattctataattgtagatcatgttcacagccatccacattattagattctcaaaacagaagttataagaatcatcttctctgaaaaacttgaacgagtgaatcaaagacactaataacatgaacataagttcatgattactcagaatttaggtcgatctactattgatcatcgttatnnnnnnaattaggtctttatagtaaataataagtttgataaagaaagctttattcatatcggtccttgtcatggctaagtgattttagttctttgtacaactacaagtcacaatctcatacatgaataaagattttttttatatttatatataaattattcaatattaaatatttataatttaaatgcatatagcaaaatattcaacagatcttatttaataattagaaatatattacaggcttttcaaggcataaaccctaatgttctcccataaattattcaatattagttttcttgttgttttcatgttatttttatgaaaaaccgtaaaaatgttaaaaaaaacattatttaaacgtaaaaatgtaatttttttataaaaaatggtgtcttatgtaattatccccaaaaaataccaaaaatagtaatatatgtaaatttttctaagggtaaattgcggcataaatacctaatgtttccgattttataca

SEQ ID NO: 169209 - DNA, 653 bp, Cannabis sativa
  modified_base (427)..(428): a, c, t, g, unknown or other
  modified_base (536)..(551): a, c, t, g, unknown or other
tgcattgaatatttcattttcttctctagggactttccttattgcatatcctttgagcctactttataagtcttggatcttgctcaattaggctatcattcttacacctcgggttgtatactcacctaggacttgatttatgactagctatgagtcattgtatatgtctaggtggtcggcctgtacttcatgcgctagcattaggccagcaattagagcttcatattcaggctcattattggaggccttgaaaccgaacttgataacaccgtgcaactgtcgcccctagggtgtaatgagggcaatgcctgcaccgaatagttggtcagtgaagcttccatcaacgtgtaatttccaggttaattttgcatgctcttgttcctgctcttgctctcgcttgttctctggctcttgcttttctcctaanncttgagagatttcaagagatatgcatgtacattcaggcataaattcaacaagagcttggctttttatggccatttttggttgctattattggaattattttaccaggnnnnnnnnnnnnnnnncaagtatgttgatttaacatcctaatatgaacttctaaaacgatagaaaattaaacacataagagtatgagaaatctgacattgggtgcaccggaatatatg

SEQ ID NO: 169210 - DNA, 1133 bp, Cannabis sativa
tattttaatgtaaaggaagagttaatttaaacttcttgtgcttagctcccccttaatatatatgcatataattatttttaccattttacctttccatatttatttgtgaccttttcttgaaatggaaatgctctccctaatgatactcaatattgatctaattaataggtggaaacataatatcatcaatgctataataatcaaatcaaatattacaaaccatgatatttttccacgatgtctaatttttatcccaagatatgtttttgtgtactgagattttagaaaactaattatatataataagaactggtgaaataaataattaaaataaaaaaaaagtataaagacaaatagttttttatgtggttagggcgttaactagccttagtccatgagtaagtattattcagtagttttttagcttgaaaagcctttaggaatacagtgatataagttcttaagttatcctgagcaagtattgtaggagaattttgttgaaagttattttaccaagatctagatttactaatatgtacatatgtttgaatatattctataatctaacatcctaaaaataaatttcctaaaataatgtaataaacacatgtaaagttctagaaaaccttacattggtgtcagcaaaatattatggctcattccattcatatctctaacccttgttcttttctgtcgtagagtattgccaagatttgaacctggatctcctttagtaatccaattcttcacaatcttccacaatatgattgagtattgacttgatatgagtgggtagggtactcttcactatagggcacttcaaattttaaaagagagaagagagaaagaattcgaaatagagaggctcttttttatttgacaaatatgtttgatgtaggttatcaaattaagagcctatctatttataggattttatatagggttcagatttaaattatatggaattaaaaaagataaaataatggctaaaaactcatttaagtggtcaaccatgttatgggccccactagtttcatttttttccatttatataacatcttatatttttctttcacaaatgctatattttaattttaatcctttaaatatcaaatctatttatttaataatta

SEQ ID NO: 169211 - DNA, 1050 bp, Cannabis sativa
taagtttaaattatatagtagacactaacaattttaatatgcattttttagtactattgcatatgttaaacttaatgacaacagaaagacaataaatactatcatattcacagatatagtagagaaaacattttcatatacaattacccaactaaaaaaatattataattttaaataattaatatacatatacttatcaatcataagattttttttttaaaatatttatttacaccatttactatcttcttaaatagaaaataaatactttctgcatgaacactgcaaacttgtcgaaaatgccatagatacataatctacaaaaaaaatagacaatctaattatatgtggatccagctagaatgaaaagtacaaaatacaaacattacattgttgtttctcttgaataaaaaaaatagaactcaaccattataaatatattttgttattcttctctacagattttacacatatttttttttcaattatcaattctttagaaattattttttattcatcttttatgactttccataattttaagcagggtttactttattattctaacattatctataacctctataaaagtgagaatatttttggactttcactaaataaattacacaattaacttttactagatattaaattacaagaaaaaaaaaatcattattttgataaccacaaaataaataaatttgctaataaaacaaccaaatatacacaattatttaagtgaatcttaatctttccctcctattaacatttttttattaatcctttcaattttttttttataatcttctataataatttttctttgtaacttaaattatgtttttaaaatacttattttttaaaattaaaaatttatttcaatcctagaaataatttatttattattttatttaataaaaaagacaataaaaaaaaaacatacatttgcttatacaagtgtcttttattactaagtagcaacctagaatttgtatctatttttcatgatattatgcatgaattagatatatcatggcgaattcttcagaa

SEQ ID NO: 169212 - DNA, 1465 bp, Cannabis sativa
ataacttttcattacctttgagaacatttgtgagggtgacagaaagcaaggcactttaattacttagaaatcttcttcattaattaacatgttgtcaaatatgatgagtggaacacattcataaaagatgggtttgaggatccttgggttgttcacttcataaccttagtatttggtggttttgatgtagtttattttggttgcaacaccaagggcaagaggcattcgattcgaccaaagattttcatttcaacaatttccttccaagaatgtgccttttgagatctcttagtgatacatctctttcaattttgaagcctattagcattgcaaagggccttcatgcaacgccagagagggtaaaaatttaaaatatggtaatttgaaaaatacttacgtttttgtctcaataaaataaaattatagcacttttagaaaatcacaaattatctttttaaaataaaagaataatttatgatttagatatacggtgacaacaaaaatttaaaagggataattacatgaggtactattttttgtaaaaaaattatatttttacgtttaatttatatatttttacaattttctttgaaaacaatacgaaaataacaaaaaaactacatacaagtaacatgaaaataacatcaaaacaacaataaaaaataatatacagataacaaaaattcaacaataaattaataaaaatacaaataaaaagaccatattttctgtaagtaaaattaaattaaaattctatgaaaccgtatttttgtaattttattgttatttttgtgtatttgtgaaataatctcaatttgaaaattgtattttgaaaaatatatttggagcctttttagaaaattcttgggccaggatgtggcctttgggctagggcccagtacgctccacccatgggacggtttttgcagtgaatgaaaacaattaaaatggtgaaaaagtgcacattttatcttcaaaggcttaaaatttatttgcggaaaactgcacactataaattatggggataagttgaaaaatactactttttttatatctattaattaaaaatactattatattatatctttttaaaatatacttatttttttttgaatggattgcccaatatacacttactctctacttaaatctagcgtataatttagattaatctaaggggtctaatggagatatcatttataaaagtgggtatatcttaaaagatataaaaatagagatatgagtctatcatgtaatttcctctaaattatgcttataaattttttgagtacgtatagagtcatattttttccgtaaaattttaaattaattaattaatgttagtgttggggtataaatataaatctagccacggaatcaatgatcatataaaaaagggtaaataccattttggaccctgtattttgcaaaagttaccaattggatcttctattttgttaaatga

SEQ ID NO: 169213 - DNA, 595 bp, Cannabis sativa
taaactaagcggtctttacaccgtgcaccaagacgtcgggcagagaggaaggggaaaccggagataccctcccgttgacttaagacacaaaatcaacgaaaagccagtgatctgcgagatcacctggacaaaaagaaacgtacactagcgatctccgtcgggacactgcatgaaggaattttagcaaaattggcgatagtgcgcaaagacatcgctcgggtctcccggagtcaaaaagtggatgacttagattccgactacaaggactgagagcatgcactcgacacatattggaagcagagctccccaaaaactttaagatgcccgagatggcagcatacaccggggactcagaccccaacgaccatttgtctcgtttcaaccgtgtaatgacggttatgagggtcagtaatgacgccaaatgtttatgctttccgctaacattgagcggatccgcggaagaatggttcaaaaaattgaaaccacgatctgtggattactggaacaagttgcaatttagttttcagagacagtttgtcgcagcgagaaagatcagtcttgaagtcagcgccttgactaacatcaagcaactacc

SEQ ID NO: 169214 - DNA, 1057 bp, Cannabis sativa
ttctaataaacttatttattcataaatatattaaaacacaaatcatgttgagcaccttagtggtagatttcactctttatcattcaacatgcctcgtaatgtttctaataaacttgatttattagtacatccattaaaagttgtttttattttgtattacataatcttaatggaaatttagctgaaatggatcatttttttaggaaaaattattattagaagtgtaaagttttatgtttttttttttgaacataataaagttttatgtttcatgagcattattttgagtagggctatacataaatttttataaactgtcaaacccaaacaactcacgcaaatcaaaccaaataactcgacgaaaaatactaaccgaaaaactcgatgaaaatataacttgcccaatctttatattggccggattgaaaataataccaacccgtccaatcaacctgaactaatccaaccaacccgattaagaggtttttatatgtatatttatgaaatataatctatagataatataatttttatacatatttataaaaaaataaaaaataaaaataaaaaataaaaatcaaacaactatatttcttttatggtggttaatttgagcattgaattcaatttttatatttactctattatcacaattagttaaaatataacaattgaatgtgaaaataaatgaatattagtgctaagtttggacggattaacttgacttaaccgatcaatttattggacgggttgaagttttaccttttcttaattgggtgggttgcacttagatttttgtaactcaatttttacgttgggttgaataaaatatagcaactgatcaaaccgaccaacgtacactcctaatttttttttgaataaaagcgtaattatcataaaacgaaaatgttagacctcacggtcattacaaaataagttctttggtaaggaggaaatcggaatagagtcgtacaactggtgggtaaaagcccacttagccacattatgggcaacaaaattacaggacctactaacattagaaaaattacagctaata

SEQ ID NO: 169215 - DNA, 522 bp, Cannabis sativa
aaaatgtaattaggataagaatccgcatcggcttgtccattaatatgactgctgttatgacttttggtagctagttcgagtctttccagaacgcaggggataatgatgttgtttgtcgtgctgctacagtgtggaaagctcgcaataatgtcgtttggaacaagcaaatttcaacggtgaatgatgttctagtttctgcatcagttactcttgaccattggagaacagctcaggataaacatgctctattatcactctcgttcgagaacaacggtgatggggttgagctttggactaaatcggcattaaatcacatcaagattaatgttgatgctgctttattctatcaagacgctacacacgacttcggtattgttgcacgaaacaacccgggacacctaatcgaagctaaaacattcagctcagatggtatttattcagctgaagtggtagaggctttggggatcaagaaagctcttagttggattaagagcaaaaattggcataatgtagaggtcgaaa

SEQ ID NO: 169216 - DNA, 779 bp, Cannabis sativa
gctcaagaatatttagagcaggagagaccgcgcaagaagaagaaaactctcccgaccaagcgggtgccaatagaacatgctattcagattagggaacctggtgtgcctgctcggccgtcgacacctgtataaggaaagggaaaagccgtcctggaagagtaggaagactcctcagacgatgatgctccatccgtaattgttcggcagaatgctcccatcagcgtgcagggtacttcaacttgcatttattttttctgatctttatgtcttcacatattttatgtcttcttctgactgcattgctttattcgtgcagaaatgtctcagaagattattgaggctttgcagaagagagtaggagatagctcaggcctgtctcctccggccaaaaagtctagaggtggtgagaccccgtccaaggagaaaatgccggttgaagaggtcattgatctctctgaagagaggccagttgtggaccttttagcccagaaagtctcgaagtctaaaagttcccgaggagggataatggacgggtccgagtaagccaagactggatctgagcaggtcaggagtagattcaaacaggttagggcccctgtcacaactctgacattatgcacggaagctacgagaggcaaagacatgcttcaccacgacgtcggtcggtcgcttcctgaagtgagtgaaaaactgactggggcgtacagtgaactgtccttggagcttgtcttaggaggagtcctgaaggagatttatcgagtaagttccctctatccttt

SEQ ID NO: 169217 - DNA, 566 bp, Cannabis sativa
aagcaatttggcttaaaggtttaactcaagaaattggtttcaaatccaacaatgttactattgaaaaaagtgatgttctcgttgatttattgttaggattttattagtgctattttaaagtaagtttttaaagtatttttagtgaactttaattgcgttttgtataattttatgtttttggttgttaatgtttttggttgtacaattttacaattttacgcttttgtttattaatgtttaaagtcaagaaaaaatgtacaaaaatgaatgtcgttagagcacaaggaaaagaatccaagaaaaaaatccagaagattcgatgtgattggagttttcaaaattgaaaaactgaaaaaaatttgaagtagcgccacaaaataaaaattcaatgtgagggtgctaaaatgtaaaaaatcgacagtaaggtcgtttttagaaggtttagaagccggcctcaacattgggattcaatgttgaggcatgggatccttggttgttttgttctatgttattttttatttgtttttcagtttataattattttttaattatcactaactcaaaaa

SEQ ID NO: 169218 - DNA, 733 bp, Cannabis sativa
ggatttggagataatcatatgcttggattcaagaattagaatttagaacatgtttttgtttgattatctttctatagtagtggaaggaaatagtgattggtgatgtcaattataacccatttttccatgctttgttgccccttttgaatgttgaccaaatgaaaagaactgtcaacaaaccggctgaatgctctatttgcttttgtgttccaatacggtgagactcagtctaagccctctatagatgttccttttttttttattttgagttcgagggtgtgactggtatcgtatagtagtagccctaggaaactttacacgaaaatgtggctctttagtgtgtcgacttgggccactaatgggccttaaaggccggataaattcaagaggtgtgatactagattttgagtgctgatttttattttatttttatccagcacacattgaactatcatcgagggaagcagcaaatgaggacaatttcgtaaactatcaagtacttagtttgttttaaagcaataaaaaataatgagtgataattaggacatcttggtcaaccttcacttttgaaattacactatattggaattttttgaatagtttataaagttcttaacatttcaatttactttaaaaacttcaaacataattttaacaatgtaaactatttgaatttttttaaagcagataatattgtaagtataatgaacatttgatttttcttttttttttt

SEQ ID NO: 169219 - DNA, 1041 bp, Cannabis sativa
tggtaaaataatttctaacagtaacttcctttaggaaaggaccaggagcacgataaaggtcttgtagatgttggccacatcaacatctttcaaaaatctctccatagacggttacaccttcttctaacacaggatcaaattttgtcccccgtgctagatcattgtagtgcgcgcacaaaagtcctcacaagcagctgtacaccacacgatgaagaaggttcttaccagccaatggtcagatcgtcctttagtagtactgaccttggtggcgtatggagtacgaaatcctaggtgggtaaagggtatgctctttaccccatgtctgcctataaatagttctatttttcttcaagaagagagagaacaacttcttacttataatcactctacaaaaaatccaagtaaactctctctgaagagaagcactgtgagcatcttataatttcataaacatttgcccaaagaggccaatataataaactcgtggactaattatcttcaacgcctaaatcacgtaaaaatctgtctgtttattatttattatcatttatcttttctaagctttaactacatttagtttccgaagaactcgataaacaacaggaaaaaaaagaagtaaaatgtttcctcaatattatatttctcctaaaaagaaagtcttgtcgtatgacatgttggtaaaagttctctcaagtttttaaggtttttcttttgtctcttgattttcatggcgtctagtagtcaacatgatttcgatttgaacgagcaatacgctcagataagcttggatgatgaggaggaaggagtcttgattgggggggatgatgaggctgaggatgttttattcgatgatcggtggtgtttggttgggagatttcttacgggaaggccggtggactttgatgcgatgaggctcttgatggcctcactttggaaacctggcaagggtgttttcatcaaagaattgggcccgaatagatatctatttcaattctttcatgaaattgatgttcaaactgtcatcgatggcagcccttggac

SEQ ID NO: 169220 - DNA, 1061 bp, Cannabis sativa
ctaattagcctttattttattttaaaaattaaaatttttaatatcagaaattaaatgttacttatttcaaaagaaaaatgagagagatacaatactaaattactataattgagtgaaccactgcaacatatgaaacatgttatcgaattgaaatgtaataccatgtaaaaattgttatgaaaattggtttttttttaattaaaataagtagcatttaatttctgacattaagaatattaagttttaaaattgaaaaaataaatgtaatgcatctatgttatttatgagttaacgaaagtaataataacatgtgtaagagaattataatattggatatttttatctccaaaaataaagatataatattaaatatttatgcaataatttatcctttaatttatgtatttatattctacattttccttttctgttggctatacctacatagactggaaaattagtccattggaggctgtattatattaattaagccttttaaaaccaatgtctaacttctgtgcagtctgcattgtaacaaatagaatatgaaaacgatgtcaactctaaattgtagagtcggatgatggaatacaaaatccattattattttatcttatatatttttagaagaattcctaactccattattaaatggataaaatatttgttttgggtcaaatatgctggccttgtgatacttccaatccaagtgtctaattctgtcccattttcaaactttcaaagcaccaacctcaagtcaagattattgggacgtactagccagcatcctttagtaattaagcctgaactccctcccgtatatgcaatccaaattagataatgagaaaatgtcagctgataattaattttgtcgaaaaagttatagtaaggaaaaaaaaatggttccattttatagaggtcatggtgccacccattaaagaaattaaaagcataatctggcccaaaacaaaatttagactttttttttaagggattgtttcacaaaaacatacaaataataaaaaaaattacaaaaatacagttttatggaattttaaata

SEQ ID NO: 169221 - DNA, 668 bp, Cannabis sativa
ccaggctgaggagcctttggttgggcaacctatggctggccagggtgaggaaccctcggctagtcaggatagtgagtctaaggccgagcaggctaaatctactgttgggcgaagtaaggctaggaggcagtataagacctgtacggtgattcaaggcaatccactgggtacttatgatgaggttgggcgacctttaaatgttaggggtcaactgtcagaggttggggttaaccatgttgaggaagaggctctcgagcatgggtccttgagtctggagatcaatagcgctagatgtctcctccatcttccctgtcggctcataatcttaaggagatcaaagaataagggctcgttggaagaattcgatgtgataggcccactagggttcaattggtgcatcgtctgccaaccatctagatggcatggtctggtcctcatactgagcaaggggtggtcttgccattgcatccccatcttagggacatagccaacttctttaggctgtgtctgactcaaagaagaaggcaagaaagcaagaaggaagatgaggatcagagtccaaggcgagaataaccagctcaaacctattgaagaattggaagaggttattttagatccaaataatcccataaaatgtgtatacattggaagaatttggatgaaaaact

SEQ ID NO: 169222 - DNA, 568 bp, Cannabis sativa
atatagatccagaggttggttaggcagaggggcctgaggtcgaccagggggtcgagggttttgacttcgaatctgaggtggaggaggttgcgcctattagaagagggacttacaaaacttattctatcattcccgactatcctctgggtggataaaatgcttatggagagtcgtttaataggcttggttagccttcaatgatgggtctagatcatgtcttgatccagtcttttgagcctcaagttttggatgctagatcacatggagatagggggttctctcttgcatctgtcctctctgttgaaacttttgaggagttactagccaatgatctagggaggtaatcattatgagatacccaatacagaccagagagcacatcggcttgcctttggttacatggcatgattggagcatcatatacagcaggggcagtgttgccgcttgctgcttacttcggagacatcgctgcttatttcgagatgtgtacaacacaaaccaccctaaaaagtataaagtacctttcaacaatgtttgttttgtatgcggagctaggctggcctcagcc

SEQ ID NO: 169223 - DNA, 823 bp, Cannabis sativa
gtcataaactcacaattatgactagagattatgcaatatactcagtattaggcttttttgtatgtgtgaaaacaaaatataaagattcatgcaaagccaaagagataacattaacaagccatcaaccccaatcgctctatttggcatcgaagacttttaaatgaggttagtcatctaataatttggctattaaaataatgttttatattattgaatatttctttgagatattgaatataatgtggtgcaaataaaattttaaatgatattattgactgatttaaaattgatattcgaaaaatgatttttttttaatttgtatacttttgtccttatttcaagttattccaagttttagtaaaacaaatggaggcaatttacttgttaataaagtcaatatagttacgagcatactcttttatttgatgattagatcctttgtgtttattatgtttatatgggtcgtgcagtaaaataactaatacaagtcaatctagttatgaaatttttcattagtattttatcttcttggccgaaatgtattggttgtcaatattgctcttcatattaattaattgattggaggacaaagtgattataatttatattttcattgccacaaattgcatatggggtatgcttgttcctaagctacaagggctacttttttcatttaagtccatttagaagttctaccttgtgtttcccctaaggtgtagagtgtgctccatctatctatatatctatataattctattgttagggatggtgatgtggcatcttctatgagttttcttttcaattttctattttttccaatttt

SEQ ID NO: 169224 - DNA, 512 bp, Cannabis sativa
tgaggtacgtactacttacaaattaattttgttatactttcaagttttatttattaataaattttattattaataaactattggatgcttctataatcaatgcatttcctgctgttttggcattgttcagaataaaaaaaatcaatctatattttcaattatgattgtggacgctatagttatttaacatatattatttaattttaaaaaatttaaaataatttacaatataaaaaatagcacatgtatataaaggagtcacacatgtaaaagactgtttgaatactatttttggcgtgttatatttttttgattttttttaaaattttgcgaaatacgttaaataactacgactattaaaatattagactaaaaaattctcatgtatagataggaagatatcggtgcattcttttttaaaatgcattgttatttcaatacgaaaaatcttacttttagtcacaacaaaaaacttgtgattaaaaataaaaaagttgtcattatatatatat

SEQ ID NO: 169225 - DNA, 695 bp, Cannabis sativa
tactatcgtttttgtgactctatatattatgggtcacactttatttagcttttgaagcataagtgcttgctcttttggtgttattttttgactctatagcttgatcccttcctttgtcatgttgggtttcatttcatcctcatgaagtgattctaaccaaagaaaaaactcttaaattgacgatttgtcgtttgatagtttatataacgacaaaatttaccagggaacgacaaaaaattacggcgaaactcaaataagaaagataactactgtaagtaaatgtaacggatcatgtgaaatgaaacaaaactagaaagcaagaagaatatatagagaagccgccacggattcggacttgcccaaaactcaattatatagcttcgtagaagaacgcaccggagcaccatcttccttcgatttccgatcaaagtaaccaaaactcgagattttcttaaggcggcgaagttctcagtacgtttcagctcaattcattattgggatttttgtggcgttggattcaataaagtgaagatggcgatcaataatccccaaatctaccatgaaaggcaaaggcttcaattctgccttttacattcgttaaacaatctctttcaggtaccctttcacgaacttcatttatcttcactatcttatttgtaatttcggttccaggtttttttttttttttttctgtt

SEQ ID NO: 169226 - DNA, 711 bp, Cannabis sativa
aattaattagtctgggcaattataaatttaatatgtgatatgttttaaaaagtcttcaaatcaagctgatcattatgtttgagataagagaattaaaaatatagtatagtccgtacttctctatctattgatagtatgtataatttcctatgttaaaataaataataaataatggcttttgcaaatattcctatatattataaaagcaattataatgttccttcaataataatttaaagaaaaacaattaatttatatatgtatatactaatataattttttttccaataatttatatattttctctggatccaaaccaaacaaagcaaatctttaatttataagttgttttgatgtcggaataccttgttagaatattataaatttattagaattatcaaaactataaattctctaaataattctaaattaaaatcaatatttaaataaatggataagatgatctcgtctcaccattaattcaaattattcaattacaaaattattctatataaactcaaattcaattctcaaatatttaaatgtttattgtgaatcaaattttgatctttataagtataggaatgatcaatatttgtttcccattaattcttattttttttgaacaatcccattaattctcgggataattttacaaatgcacaaaaacaacaaaaatacggtttcactgaattttaaatatttttacga

SEQ ID NO: 169227 - DNA, 1223 bp, Cannabis sativa
ttcctttcttacgcttaaacgagtggataatctcctcgaccaaaacattattgtcattgatgcttcgtcctggcacaaaggccgcttgagtagggaaaatcagtatgggcagaatcggcctaaatctatttgcaatgattttcgaaatgaccttgtaaaacacgttacagagagagataggcctaaactgtgagactttcttagggttagccaccttaggaatgaggattacatttgtagaattaatgcctctgtgcatggaaccagacagaaagaaatcttccacagcctcgcagaaatcactgccaaccgaattccaataatgcttgaagaacagcacagacatcccatctggccccggggctttcaggctgcccatgtagaagagagtttgtctaatttcctcagggttcagaatgataaccaaatcattctgctcctgggtggtaagatggtccgaaaccaagtgatccaagcactccaacggcccataggtcacttgtttaaaaatgcttcctagaaactccgagaattcgttaccaatatctcttctatcattcagccacactccatccttattcaaaattgtcccgatctcatttcttctatttttaattgtggtggttgaatatatataataattattacgtatatacaataattaaaaactatagttattcataataaatttattaatataagactatttttttttacaatttaaattatttatattactaaatttatatataaaaaaaaatatttttaagagtcttactattctaataacatatcatatattaaaaaattattacatttttaattattttatataaataaataaatttatcatcaatatctataaatctatatatttatatataaaaaagtaaagtattatttcatgttatcttttttatttttaatatttttaattttcttttatataaatgtggtaatttgagtccttagttaaaacaatctcacatggttaagatactataatgtagattttgtataattggttatcaataaataaatgactatttcttctactctactttctgacaaagttagtgttacattattttggtgggtgattaatgagatttgtctttcccaattagttatagtttttattttctttagaaaaatgcaacaaatatattctttcatttttcaatctttgtcaaaacttcaaaattataataaaaataaaaaat

SEQ ID NO: 169228 - DNA, 525 bp, Cannabis sativa
  modified_base (427)..(431): a, c, t, g, unknown or other
ttatgaaattaattttataattttcaattccgtgttgcttataatttattattggatatataaatatcacttgtattacttcacaatattttatttacatataatttcgaacccaatatgttcaaacttatcgattcaaacctttttgtttttcatttttttttgttacactaattcagatctagccaagcgtatgcgtttatacccaaaattaacactatagatcgattagaaatccatgccgatcttaatccctatattttctgttgatttctcgttggtttttagccaaaattatgtggagacccgctgtgtagaaactgggttgcatgacccacttcactcttgatttaaggttgaagacaaccttttgcagcgatgcccattctcgatatagcagtgtgttacgtccagtctatgatggcannnnncaagctaagagatgcccacaagttggccaagtggtggtcaagtggtggcgcatgttgtggtgcatgcaggtggcatgctgatgcttagtttgta

SEQ ID NO: 169229 - DNA, 993 bp, Cannabis sativa
gtatgtatattaggctttaagagcaagtaaaggaacatgatcacttattcaaaaaaggagcatgatctacaaatctacatatagcaatcaaaattagcagtggctggctaccatgagtattaaagcaatgctttctatatataccctatgttcaagctgtcaaacaccaaagattttggactatataattaaagaattaagtgacttgttaagtttggtttagtggaattgacttatagattaattgccattaaaagggtaacaagttaatgattatttaattcgaatgtacatcttgatagtatggtaacactcactacatcatttaaaaattaaattaggacagttgtacttaaattgtacattatgatgtataattaattagaggagaagtgattgctccagtgatgagaattatggtatccatttcaagatggtgtctatttggataaggctctgataccatgatgagaatcatgagattccatctcaaaattaattggtgatgagtggagtagcccatgttcagaggcggagccagcacttaaatactaggggggccaatcataacaatttctgaaaaatttatattgactcccttaaaagattgttttggtacatcttttatttgtttcccctaaaaaaagtttttagtttattttttttataagcgcgtacgttttcaaaaaaaatctaaatattttacaatgccgaaaataaaattttaacaattgcttaccacatgtataagaaaaaacagacacgcatcaacaaaataattgaatcttattttaagtactgtaaactatttagaattttctaaaaattaaatgtgattctaaataattacaacgtagacaattataaaaaaaaaaatcaaactaaaaaattcttctagatacaaaaacagacagggatagaagcttctattctaagggatctattatagaattatccaataatttttgtaccatgtaatatatatatatatat

SEQ ID NO: 169230 - DNA, 781 bp, Cannabis sativa
cctcaagtaaccaatatagctagatgtcgtactgagtgttctaacaatactcatactcgcagggaacaggcaactgaataaggaggtctcgacctgaagtagcctacacttaactgtgcatgaaatagggagcccgttgcccctgatgtcatttgtcaaactgagagaagagaggagagaccgtaggaacccgcggagtcaggcccaaccgcaaaaagaggtaaacgaaggtggttctcattcatcttctacggatagttattctcctagtatttataccagtttaagattcgtggaaactcgacgtggaggtaggtgccacgtgcatagaggtgatctctacaatcatctcaacgagattttcagtgcaatctcaatcaccaaggaatcgcaatgacattgaagagctccgtgatccccgtgcaggcaatcaaggcactcaaaatgcaaataatgttactaatctagtcaacctgccaatcgtaccagctacgaccacagaagtagtaatccctaccaacacaagagcacttggctctataccagtagcaactcagaccaaccccacgctaccaggagaaattgaccaagaaaacctcttatgagcatgaagggtaatcgcgcagtagacaaagcccatttacaagcttcatgggatgacaccgtttacagaagaggtgttacaagctagatttcccaaaggcttcagattctcagaattgctcaaatataaaggtggtactaagctaatcgattatttagataaatttaatacgattat

SEQ ID NO: 169231 - DNA, 1328 bp, Cannabis sativa
acctggagatgctccaatagatgagatcaagattgttactaaagtacttggaaaacggcgtgattgcattaaaggggtagggcgcaagttgaagggcactcctgctatttttgcctcatcttcccaatcaccgctaacccatgcaacaacatcacgtccacaaatgccacaagagtttgttcaaggtgttgctcaaactgttaatgccgtaatgaagcgccaaaacaacaatctgcaagcgattcgtcaattgttgcaaaccatgtgccctactgcaaccattcctgaatttgaagatgccaccgttgatgtcaatgagctttttcagacgattatggcacagttccagtcacaacaacaaccacaacaacactctgaatctaatggtgaagatgatactgatttaggagatgattagtacttttgtatttaactattttgaaccatgattgttaaaaatttctaactctaaaatacattttgttttaagttaaaaaattaagtactaatagttataaaatgatttttaattagtcaattttaattttaaataatataaattattattaatataaatataatagtaaatgtatttttacatacttattgcacaacatatcctcagaatagttattggtagtatatttttttttattctccataataaaaattgcgaccatgtatcgttgcaatagctaatgtaattcaactttttttagaaccagtactatgattattgcgacaataagttgtcgcaatagggtacaattttaaaattaaacttgctatattgagacaactagtcgtcgcaatatgttcgaaaattggttttttctaaaaaatttcactatctttttagagacaagtagttgtcgttatatataacactattgcgacaaaggccaaagtcgtcgcaatatagcatctacaggcacgaggttattgcgacgactttattgcgacaatatattgttgcaatgactttattgcaacgaatttaaatcctgttgcgactaatattgttgtcgcaatagaccctttttcttgtagtgtttgctttctcggtttcttacttgaggcgggtattttcctgttgggagtcatcccggtgcttactcacaaccttgcattgtgatagtagcttgtggacctctccctctaagtactcaagccgctcagagagtaatcaattggaagcaaaagaagccaaagaagcctggagaatttgcaaacagatggatatgaaagaggtgtaaaacagaataatataattataataacaaagccaacgtaccatgaagtggtagtccaagctccttgaaagcatc

SEQ ID NO: 169232 - DNA, 594 bp, Cannabis sativa
acttttatcatcatttaaaaaaaataaaaacctatcacagatgtgacatttaaaaaaaataataacatgtcacagacattttatacaataaaaatgaataataatctcccttaagggacacgcaacaataaaattggcaaaaaaaaaattaaaagaaaatcgatgcacaatattaaaaaggtagtaaaattataaattattgtgtggcacaataaaaacataataaaattaaaaaggtcagtatacaatgtaaatttccagaaatattaactttttcccactatatattttttgagaacttttataaaaaatagcaaaaaaagaataaagtaatataaagcaagtgaagttgtttgtatgattagatttttggtgcacctctcttttaaaaatatatatatatatataataaaaataaaaaaataattgttgcacctaataaatatttttattttttattctctgtgtttaacatagtttaactaatttgcaatatattttaaatgtattatagcaaattattaataactaattgtatattattcattatttaagtttttggttttcaaaaaaaaaaaatctattacaaaaaat

SEQ ID NO: 169233 - DNA, 691 bp, Cannabis sativa
atcataaacttcctcataagtcacattggtcgagattataaattttccaaagtaattactaggctcctcgtgatatatcttggttcagattatatatcttctaaggtgataagttgaaccaaagtatattccaagaagtaagctttaatttaaatatatgattcttcttctcatacccgataaccttctcttgattacatctatatcactttaatataaaagaagaaataattttctttcttttatatctgagctgattacgagtactttagtagtggtttatcagccaatcaacgtctttcaagatgtaaatattaatctcgaattctttattgaacgagccaaacgttagctttgtaaattacaaaatttgatacacgtgtcatataattaaacctatttatttatgggattttttcaataatgtacttaatttacaatttattaacggaaataacgttaattaatctaatacaatactaataacgtgacacatcatcatcactaccgtaaaatcaaactaatccatcccaacctgcaatttcgctcatcaatgcgctaatctactctaaaaatcacgggattgattttcctaacctcgcgtgatttataaacaataaaagaaacttataaatctataactcaaactctcagaattcaaatcaattcttaaaaaaaaaaccattaacga

SEQ ID NO: 169234 - DNA, 625 bp, Cannabis sativa
atcaggccccatagagttcaaagctgagaaaaacttcatccatagtgaaaggtttagtaagtgactcattcaattcaggactaaccacagtgggaatgcatgagagagtggtatgaagagcagcatcatcaatttgagaagctgagaaaatatcatcaaaataatcctggacaacagttgctatggcagtcttggattgcactttttgtcccgaagcattgaaaagaaacttgatattgttgtgtgatttccgtgcagatgctttagcatgaaaaaacttggtattacgatcaccgctagaaagccaatcgacccttgatcgttgttgccaataaacctcttcttgctcaagtaactcttcaaggacagattcaacactttgcaaatcttggacatgttccctggtatgtacagggagattatttaattcagcaacccttgattgcaaggtattaatattttttttcatcttgccacatttgttgatatgccagctttgcaggttttgtgcacatatgtttagattgtgtttcatagcagtaatcgggtctgtagcatggtcataggtccaactgtttgaaatgatttcagcactctcggggtcagcaagccacaacttctcaaa

SEQ ID NO: 169235 - DNA, 1315 bp, Cannabis sativa
  modified_base (1274)..(1275): a, c, t, g, unknown or other
taacggttgattgaagatgatgctattcacattatccatttttagctgaaatacttttagctttggcattttaggccagttaagaagcctagaaatgccaatgtttgaatacaaagaaagttttccaatgacgtatggataatactcaaaaaactaaacctgcaatgcataaggaaaaactaacaacctataaaacctaccatccttatccttcttcctaacagtcataatattgacatcaatcttacccttaagagattcaatagtcatctcaaaacactccgttccctacccactcattataatggccactattcataatatcaagttctttaatagaaataacctttcgaagaggacctcccagaaagtaacactgaacaaaatacaaaacaaccaacttgactgcaagatcaacattatccctaaggttgttagcagtaaaggtaacttaattcgaattcctggtaatttcttttattaccctttaaacaatgttcaactagcatattcttatcatgtttgaactgaaatatatccgactcaatgtggtaatctagacctgtgggtaaggcaaattcctctacactaaatctaagaaacttcctagcaacagatacctagaattccatctcattaggttgttgaacttccctcaataacagaccatgcaatacttgaaaatgaataatatattctgaaattcgaaggaagtgacccaaaatagtttgagaaaagattttcaactgggttggggttggaatagttttaatatcattaatggatgaataataactagaagttattaatttagaatgataatgttgtgagcacctatatttacatgtctagtcgtgggaaaataaacatgcaaattttttttaaaccaactcaaaaataactagaaaacaaaaaaagaataattaaaaaaaagtctacaaacctcaacaacaatatcattagaaggctcttccaacccaaattccgtaagaacattcagaataggggattttcccttcccctacagaaaaaaaaagaaaaaaaggaaaagaaaagaatacaactgttatagaaggtataaatccactcaaaacaacaaaacatacaaataaaaattaaatataaaacactataaattataattgaaaaaaatcaaaacacaataatataaaaaattaaaaattaaacacaaaaaccctaaaaaaacacaaaaataaacgattgacctagtcaactttagctaattgaatgaactcatcgtcaagttcaaaatnngaattagactcttcctccatagatcgatgacatttagaaa

SEQ ID NO: 169236 - DNA, 1644 bp, Cannabis sativa
aaaattctacacctatgtacttttatttgttttggcaatacagaataattttttaatcaatttttttttatggtcatatacgttgtagttatttacaatattctatagaattttgtaaaatttgaaaaaatttaacacgctgaaaaataaaattcaaataatatattacacgagtgattctttttattttatatatacttataaaataatctatttaaatattactttctatactataaattatattccatatttttttaaaatttttacatgatgtcttaaataattataatgtatacgattataaaaaaattggactgaaaaattctcctatatgccgaaatatagataggagttgcattaatgtatcctttttatgggggtcaatgtagaagtaccctaccatatatattggaatatattgtgcccctaaaaagagtacatcgatgcactccctatgtgttgtcattctgaaatctttttagtctaatttttttaaataatcgtatatgttatagttatataagacattttgtaaaattttgaaatattcaagaaaatttaacttaccaaaaataaaatttaaatagtctattgcacgtgtgtatttttttattttatacgagtgtgaaataaactatttaaacactattttctatattataaattattttaaatttatcaaaattttacaggatgtcttaaaaaactaatgacagtccctataatactatatataatgatatctatttttttttaaaaaaaaaaacttatatatatctgacattaaatatggatatcgaaccgaaattattaatttgacgattcttttttattttctgttaaagttaacgattaaaactaatactgttaaattaatcaattaattatctttttttaaaaaataattttaaatatctttaatttatttatcaaattataacttaaattattatttaaaagtatcaacaaaactagataattatttttttatataatttttaatttaaatttaaattagacgtaaatttatttaattaatcacactttataataaatctattacacatattgtttaaatatctaaatttatttattttattgtttgattaaattatagttaaatgtattttcttataaatataaatttaaaattagattatattttatatatttgaaaaatataattaaattgtattgatataattattattatttaaattaataattaagtaatagcaactctacaaacatgcatggtatgtttctaatatctagcatacatattatattaatgtggatatgtaagaaaaatgatgttctcttttttaaaaaattgtaattcaaatttaaacatactgtatatatttaaatatctttttattattatttttaagcttatctctattatattttatatataattttttaataatatttttatattaaatgtggctatataacagaaattgttgttatgttttttaaacattacaatgcaaatttaaactcactttatatttcttttatcttttattttatattaaatgtgccaagataacataatatatatttaacattgcacatatctaaaaaatatcttcctactattttttttttacctaattcacatatttaaaaaaa

SEQ ID NO: 169237 - DNA, 904 bp, Cannabis sativa
caccagtaatgcatagacaaaccactttgtgcaagcaatgtgaatcctgtttctgtaatatgtcggtgctttctttcagcacgaccgttttgctcatgatcatgggggcaaggatgttggaaatggactccatgttgggatagaaaagatgctaaggatctatactcccctctgcagtctgattggacagatttgataggtaaaccaaattgtttttcgacaaacactttaaattggagaaatgtgttgtatgattgagacttaagtgataatggaaatatccatgtgaatctaccgaagtcatcaatgaaatgtatgtagtacctatgtccttctttagaaggagtgtgggaaggtccccacacatcagtgtgaaccaattcaagtggttgggaggccctagaatcagagagggaatatgggagtttgtgacttttaccccttttacaagcctcacagaatttgaggtcttttatattagttggtatttgtaatgtggccaagattttggcaagaacattaggggcagggtgacctaattttgaatgccacagattaatattagatttttcagtgagataaagaactgaactagtgttattggagttaaaagaagttgcatttttattaataggtaaactattacatgaggaagatgttgttggagcagtacttttattacaagactcagtaatacaagatgtaacttctaaagaactctcagggactgttgcagaagacacagcagtcaattttaacttggtattggttgtggcaagatgacaatcaagatgaactttggagatgggaaaggaactgtgagactgttgcgatatttagcacacgcaagtgtacgtatcgtttaaagtagtagactcacgaggagtgaggtcgatcccacagg

SEQ ID NO: 169238 - DNA, 618 bp, Cannabis sativa
agagagagagagagagagaactttactttttctcgtaatttcccttatctattttcttaatgaactaaatcatacaatcaacataaatcaaaacttaggagtttctactaatttcaccacaagacaaaatttcaataaatggcaaattctaattttgccccttgcttcacacttaagtaacctatacgtctaggggtaaattggtccaaaactataaccttgcctaaccctaatactctaaatatcaatatgtgaataccttactaaataaaaggttctaaactcacccatgtgactctattgatcatccgtcgcatttttcatcgtaaccgagcaaaaatcataaaaattataaattttgcatataacataaataatacccttagggcccgtttggtacgcatggctggattggattagatagactaatttgtccaatccagtgtttgaacatgttagaagtctggataactaatccaactaatctcatttgtctggaattatttatcccatttagtaaggtgggataaataatcccatgcaggtgagattttttttatcgttttttaaattttgactttattaatatattttaaatttaataagaatttaaatgaa

SEQ ID NO: 169239 - DNA, 1990 bp, Cannabis sativa
tactctcttcttgttttgttttaactctaatattactgaagtgcttgaaataaagaggtagtgaataaaatcatgtagtgttgcttgaaacttgtacatcataatcaattactagaattgctttaaccacatctttgtttctaaatatattttcagaatgcatttcagtgatattaacatttttagatgactcgtttatatatctttttttcaattttagaatagagctctttaaatattttaagtggttatattactattcctggctcctgctcttgtttcttatcattttccctttatgtgaaaatagctcaatcactgtacgcttagcattttaaataaacagaaaggacacataaataatcgtaaattaaagtggaaatgtagaatatctgaaattacaccgttttgttttaatcatgacataattacattaacagattcctttgaagtatgactttgattatcgttatttcaaaacactatcagattgtagcaagagagcatctaactaactattattatttttatttaaaataggttatcgatggactagaagcccattgcagaaacggctatgttgatagtattgcagctattacaaaatctttatctgggaacgctcgccgcttggtttttaatgattgtgttagttcttcacatgctgctgttctgcaaaagctcattacaggaccagtccatagattatctctaaatgattctcataaagtgcatgccttatctagtttttaacacaaaaattgttaaaaggtatgtaaaccagagtaacaaactctagaaaccacttcagaataacttccatcatttttaaattttattctactattctagcatcgttgagtgaataaccaatgaagaacagaaaactaaattcttcgctccttgttttgtggatcatgagggaataaaatgttgattttgaaattaaaagataatagcatttactattctgcaatatttttgcttcagaaatttactgacattatgtgacatagtcatgtatttttgtgcagagactgatgtttttgtcttggttacttgtccagtgttgaatttgacgagatgggatgaagcggatggacggagggtcaccttagtttccttggcccaaatgctttcaactgatttaggagattaccaatttgtaatgttgtactcaattttgttttctggatgaacagtgcttattttctcaatgctctatttattttgaagaaagaaagaaaagaaaaatcagcacaaatggtgtatacgtggatagtcccaattttgttttgtttatttatcacataattatatttttattaatcaaagatcactttggtgctatgaagatatatagataattctctattacatatggctatttattgatctgttttcttgaatataaagtcattacttgcgtctgctgggtagaggaactgaggaaggcaaggtgaggagaggattattatatggatttcattgtgtggttgtttagtagtagtgagagtaaaagtaacttgtcacataagtatagattttataagagaagtattttgattgatttgtacattgttctaatattatcagaaaattatatatataaaaaagttcttagttttgatttcatagtattcctactaaaccaataaaagataattttattttaggggttttttcatttttatattttaaaacaatttttttttacagttttacggaattctatatagaaacccctattgcaactagcgttgcaatttaaattgcaacaaaaaatcgtatagaaacccttattgcaactagtgttgaaatcattttagaaacccaaaccgtaaatttgaaaaaaaaaaaataaaaaaacaatatatgaggtaatttctctttaatttaatattccttaatttctctcgtacttaaaaggctcgttgtattgaattggattatatatatatatcatatttttatataatactatgttaaa

SEQ ID NO: 169240 - DNA, 586 bp, Cannabis sativa
gtagaaagcaaagattaaaggtaaagccctagcatctttctccttaagttttagtgtttttcctttaaaattaagcatgcaaaagttgagatgtgcttctgtccaaaccctaagggttctaggttattttttgaggttgatttaagatgtttgaagttgatttatgttggttttgagagttgattgtggtgttaagaaagtttgagttggcacaacaatagtgaattttaattctgtgagctttggctgctgttatttcttgggttatgtttattatggtttaattaggtgttcaggagcatggtgtgaaaattggagtagaattgagtgagatttaaaactctttgggatttctacaaaaaaaaaatagtccacccttttttgtagaaacggtgaactatttttctaagcatgatcccagaaaatagtttagcattttggaaatttggcttcccagtttaggcagttttgggggcctctattttcatgtttcctcgatatttaaggtatttcctttttatttatcaatatgaaaacttttagttttgagtttaggtctctgaaaagggttttagcaagttgttta

SEQ ID NO: 169241 - DNA, 763 bp, Cannabis sativa
gctttttaaaatataggttatgtcgtccagtgtcataaacaattatgggttatgcggccgtgttgtgtcataaaataatataaaccgtgcctacaattatagggtaagcccgacacagcccccaactctagtagttttgcgtcgtgcttggatttgtattgtactatatttgagttggtctattttttttgtgtttatttaaatagcctattttttttatagggacttaaattcgtgcttcatgtttttgtattttattgatgtactaattattaaaatgtgcattaatattttaattagttttatatcaatttttagcaatagttacacataaaaaagttataattattagaatttgaatgttattataattttaattgaaaataaaactagcttctaatgtgtcgtgttttcgaggtaatttatattcgtgcttatgtatcgtgtttttgagtttttcgtaccgtgtcgtgcttaaattcatatcttatggttttgtcatgcccaaatccgtatttttttgttcagtgttgtgcataaacacatatatttttatgtcagatcgtgctcatgccgatttcgtactatgtcaaaatgcttaattcatatttacagcactaattttgtgtgataagtgattttataatataactactaatgggcatttttacataaatgtatacattttttttaaataattacaaaaaatgtgcaaaaaaacacaattttaaaaatgtacacatttgaaaatatatttacaaaa

SEQ ID NO: 169242 - DNA, 797 bp, Cannabis sativa
taaagattaaaaatattataaatatataaaacttattcaccacacgtcttctcggtggtggaagcttattgtcgacaagtatcattccttcatgcaccttgcttagaccctctccttgaatctgcgatgggtggtgggttttggtggccgttgtttgatcttagtttctttagttcaaattttacttagattttttttagagcaaactctcttgctaataaaaattggagaattttagtaaagcatatcagaactgagaatgttggactaggataaaagcagatcagaacggagaatgttgggctgggagtgaattagaagaagaagaagaaagataaaaataatagaaaagataaaaaaaaaaaaaggttaattaattagtttttaaaataatttatttatttgtttgtttattttaaatcaattttaattaaaataataattttaaccaacaaaaaaattaacacatgatatttttttagaagaacaaacgaaacaattaaattaagtacataaagactaacgagaatcttcaacttgggatttttaggaatttataccacattttaatatcaacacgtgatatttaaagagaaactaacccacctgttaaaaagataacgaacaaactcataagaatgtcaaacttaaaaattattacggctattttttaaaattaaagatttatctacactaaaataagctttttaaaaacttttgctacaatttttctgcacattaatgatggcaaactttcctttgcattaaaagtactttcaatacttgatttgcgcaat

SEQ ID NO: 169243 - DNA, 750 bp, Cannabis sativa
tttgatgatacccgattgcctgcagcagttcgtaggaacttgatagtgttattttttttcctggccgaggctttggcatgaaaaaacttagtgttgcgatcacccgattgtaaccaatcaatccgtgagcgttggtgccaataagtctcttcttgttccaataaatcatcaagaatagcttcggattgcttcagattttgcatagcttcagcatttcggtgtggagcattgttgagtctctctacttgtaagtgagcttcagagatttttttcttcatattaccaaacttaccaacatgccatctttgtaggtttgctgcacaatcttggaaattaccaatcacagtagcaatcggatcagttacagatgaagagttccaacttgctgtgatgatttcattgctttgagggtcagaaagccaaattttctcaaatcggaatcgactttttcttttttcttgctgaagccgagagtcaatggggtggaaaacagcaaaaattgccctatggtcggagctaaaataatccagatggtgaacttgaggtagagaaaaggtgttttcccaaaggagattgacaaagaaccaatcgagtcgctccttgatcgtgtctacaatagtccgattttttatccaagtgtaggggtcaccttcatagggagtttcaagtaacttacaatgatccgaagacttacggaactcatccatttgtgtttcattccctaggcagccaccacttttattttcattg

SEQ ID NO: 169244 - DNA, 691 bp, Cannabis sativa
aatcctaatacattatggtagtaccaggatgcaaagaataatgagtggtatgcgtttctttgagaatcttatttctaagttccacactaattggaacacaaactctggttctatacaacaacatcccattacctgacactgtaaaatctttaggtttatcagataaaacctcttcttagatctttaataattctgaatcagttaattgagctgctttaattctgtctaacagatcatactgcaatgtcaaattattaagtttgcttacaataaactcactacctgatctgaccatatcatctgctacgtgaggtgaaatcttgatcatactagtcacttgcccaggacccttcttgctaagggcatctaccaccacattgaccttccggaatggtaaatgatttcataatcgtagtctttgaccaaatccaaccaccgtctttgcctcattatcaaatcttttcgagtaaagaaatatttgaggctcttgtgattggtgtaaatctcacacttttctccgtagagataacgctgccaaatctttaaagtaaaaactaccgcggtaagctctaaatcgtgattcaggtatcgctgttcatattattttatttgaccggaggtataagcgataacccgatcggcttgcatcaaaacacaccccaaaccaagtctggatgcatcacaataaacc

SEQ ID NO: 169245 - DNA, 688 bp, Cannabis sativa
ccgcctaggagagacaaacctaccgattcaaggccccaagagcataatcattactatcatgctgatgagcaagttttaccaggtcactaccttagaagggatgaccagaccaattttcgactcgggccagaaggaagaaatgaagatgcacctcctccgcatgtagggggatctcaagggtatgtcccccaataccactagcacggaagagtctaggtatatgggcggaataagaacaataaccagcaaccccgacaagatcgaacaaggtcttagagtgatgagtcatgtcttaataaaaatgatgcggtgctgaaagttggccttatgacaactgtcaatgaaggcgcgataatcgccaagataatatgcccagcaatggtaataatcaccaggataacgtgtttaataacggaaatcctcccaagccagagaggtccaccagccaaaactcaggcaagaagcctaaagcacactcagttttccaagaaatgagacccaggcgtggaaatgatcttcgagataatttaaatcgaaagaggaataatcgggatggacattttattcccccgcataattatagctagggctgtacaaaaaattcgtaaaccgcccaaaccaaataacccgcccaaaccaaaccgaaaaaaccgataaaaattataaaccgaaataacccgaaaaaatt

SEQ ID NO: 169246 - DNA, 1112 bp, Cannabis sativa
ttgatctgtgctgaaggattgtcaactcttattagaaggtatgaagaaaagaaatggcttcatggttgtaaggtggcgaacggtgctcctatagtgtcccatatgcttttcgcagacgatagcttgttgtattgtaaagctactaatgaagaagtgttttatatcagcaagcttttgcaaacctttgctgaagcttctgggcaacgtgttaattttgagaaatcaacagtcttcttcagcagcaacacccacactccaatgcgtgaagttatttgccaaaggttagggatccaggaagctaatgaaaacagtaagtatttaggccttcctagtaccattggaagaaacaagaaggtggtcttcaatttcctaactgataaagctcaaaaacgaatacaaagctgggataataagtttctatcaagagcggggaaagaagttctcattaagtctgttgttcaagcgcttccaacttgtacaatgaatgtctttcttattcctattggtatttgccaagacatagagcgagctataagtaagttctggtggcggtcaaatagcaacaaaggaattcattgggtaagttgggataaactgtccaagcacaagagtgatggaggtatgggttttcgggattatagagattttaatttagctcttctagctaaacaaggatggcgtttactcacttgtggtgatagtttggttaggaagatttttaaagcaagatattatgccaatgggaattttcttactgcaacattgggcagcaattcgagctatatttagagaagcattcttgagtctcaaggagttattcgttcagcggctagaagggttgttggaaatggatcgcaggcgagcattctcaaagacctgtggcttattgatgatgagaatccctttgttgaatctcaacacccgggtttggttgggaaaatggtcaattcattaatgaaagtgggtgaatttgaatgggatgatgaagttttggtagatgtacttactgctcgtgtaatgatcgctctagaaatgtggattagaaaaggcaattaacactaatttttattattttattaatatttgtgaattaatttttaatgtggacccca

SEQ ID NO: 169247 - DNA, 568 bp, Cannabis sativa
aaaacatactatttatgaatgttctcaaagagattatttttttcttgtaaggaatatgttctcaaaaagattgaaaccattaagaaaaaaaaaagaacctctcaaaaaatattaactcccacaatacattaattgacacaatcaacaattttttttagcattgttataaagtgtcacagtgtccaacattttacaattaatgagtacaatttagtgtcaactcttatatattttacttttaactaaaatatataaaattagataccaaaatatatcaataatagtaagtcatgtcactacaagtctcttcttccttacttttctagttttttttactaaataaaactctttggctaaaaaataataatgacacaagtaagttttttactaaataaatttaattttttataataataatacttaaattatatttataaattataggtatcattatttacatattatttttttatttctatatataaataatttttaaacaaaaaaaatgaaaattaaatattattaccatcacaaataaaacatgaaatttatttgcaattcatcctgc

SEQ ID NO: 169248 - DNA, 608 bp, Cannabis sativa
tcaaccatggatcccttggatggattatcaagaatttgcagattttatgcatcaactaagaggtaacagatatactatcaccaatctagcagatgtgtcaattggaaatgaatggaatgtggagattgtaatgcagatttttggctctgaattgggacctcgtgttcttgatattcctagaattcctcatcctttctcggatcagattttttggaagaacaatcaaaagggccaattttctgtcaaagcagcttacataatggatcaatcgtggagatttgccccaggaaaaaatatttggaagtggatttggaatgggaaaattcacccaagaaattctgtaatgctttggagagttttaagtgaagcaattccaaccaggaaccggttgccttttattcgagagaagacttgctgtttatgtgatatgtgggaggaaaatgccttgcatctgtttagagattgtgccttttccaaggcggtttggctagggggaaattatcctttaaggatagataatattcctgacaattctatgatcagctttgtggagaacctgcttgtttccctctcggattgtaacagatttgagctgctaaatctctgtg

SEQ ID NO: 169249 - DNA, 1137 bp, Cannabis sativa
  modified_base (625)..(636): a, c, t, g, unknown or other
acaatcatgaatcttttctaaaatattttagtggtgaattcaatcgtgcatagagtgaaacatacacataaatcaaaatagtgatttacatagaaatcaaacacacaaatcacataaaatacctcattgtctaacatcacttcaagcacaattcaaaattgtattatcaaccaatgctttcaacaagatattattaaaactcataaaaataaattcaactaaaaaaataggatatataaacacgacagttattttccccacacttaatataaacattgttcttaagactcgattaaataaaattaatgcaaaataaaaagataaagagtaagaaaaattctcgtaagttatcaaagatttgttctttgtgtacttatcaatggaattgaagaccgttaggtcttttttttggcaatttaattgttaaaatattttttaattaatgtgtatttttattgagtatttaaattatttttattatatcgattttgtgcatttaattactcttttcttctaaggaaatattaattctcagttgatctattttttaggaaacttcttgtaagagaatgaattctcttatagaaatttgtttaactttgggaaacttgactttccctttttnnnnnnnnnnnnttcagttttgcctttattagaacaaatcaaaaaaaactttatttggcatgtttgaagtccaaattcgtgatcttggttcaatttagaaaatttattttttggtcctgatttgctgccgcaaaacccacttctgatgctacaaatcagaaattttttaagaaagttttgtacagctcagaaatcatttttgtggctgtctctagggctgctgtgttctataaataggacctagagagtagccaaacatttttatctcttcttttctcatattttcatatctttttttgtgagaagaatgtttcatttgtaaaaacctagagtgttcaactaggttttgattttcttattatgatatcatactatttatagaataggttgaagagaagcttttaacaagtgcgagtctttgggagaagaatttttcaagtctcattttcgggaggaagtgagcatatatttttgggagaagatttgtttaagccttacttcggaaggaagtaa

SEQ ID NO: 169250 - DNA, 620 bp, Cannabis sativa
gaaattagcttagtttagtttagagagagaaagagcgttagggccgccgctgatgtttcgtgagagagagagaaacgttattaagtagaaagaaaaaatttataaaaaagaatgaattttaagagtgtaatatttaaatattgaaaaaaaaatagtgaagtgctacataaaacacaattgtcaacatattattgggcttaattaaaaattattttaaaaataaatttaattatttaaaaataaaaaataaaaatattaatattacatataaaacgttaaaaaaatctttctgaaaaacataatttgttaaaaaaaatcaaatgcaaaactataaatttcaatattgaagccaaaaataaaatacaaaccaactcccataaatctcatcaataaaattaagaaattctatattcaactcgaaaatctcttacccattaatatcgagcttctccaaccagatctggtcgactagagcgagggggagagagataagagaatcatggaggagcttatggtttgagaggttttgagggtcggggaccttgattatgggcagggccggccctgaaaatttatgggccaagacgaattaaatttttgggccctcaaaaatatatata

SEQ ID NO: 169251 - DNA, 599 bp, Cannabis sativa
caaacatggaaacttgttcaagtggaattcaatatgttggctcatatacatgctgaatttggaggtgtagagaaaatttgcacatgctcattttaattttaattttaattttatttatttttaaagagaatttttataatgttggtggtgggtttatttaaaaggaaaaaaaaaaaaaagaaaatctcaaacgaaattaataataaagaaatgtataattattagaaaaaaggttccgaagtcatgtttattaggatatttatttgcatatctttaaaattgtcacatatctcccctacataaatatggatggacccacattttacaaccacgtttctcacgatgtttttatagtgtacaatgccttcgcatttaacaccgtctcaaatctcaccaaacaaacaagatgatcttcttatatcttcattttttttatattttttttttgcagaaatattattttcaaatttaattagtagccatttgtacttaatttaggttttatgtgttagaatactgtaaatctgtatatagccctaataatttctaatttggcccctcatcaaatcagaaactatctaattggtatccacatatta

SEQ ID NO: 169252 - DNA, 1183 bp, Cannabis sativa
gaaaaaaaagcacttgaccgacaaactaatagctatatatagaaagtgtgtagtcatatcatcgataaaattattgccaccaatatacttatctttgaaaaaaaataatttgttcattattaattataatgataagtgcacgaaaacatcacaaaagttggcgtcctatttttttttgttaagcattgttattgggcaccaatagtggctagcacccttaaaattagttaatgatactctcgaaaagttattatattaacacgtaagaggatgattagtactactggtgccttttagcattttttttttcaatatattatttaataaaataaaattgatatgaccccgtaataaatttgccaacttttatgatattaaacacatttaagatcacatttaacgtcatttttcttaaaatatgacaccaattttaacacttaacattgcgacaggtgtattagttgctgttctatacttatattgcctaaattttttcggaatagtttgtcaaatgatagtacagtcttttgtttgtgatatttgatttaattaagcatatttttagtgattttaattattgtataaaagaaattatatatgaaaccaatttttcaaataattatgatatttaatttagtaaatgattcactatttaaattaaaagaaaaaaaaaatatgttatcacacatataatatttagatgcatatttttactacacaaatcattattttatagtgtatatatatacttttagactttatatagattcattacaaaaaaatttacttttagtcatagtgactaaaagtacaaaaatgttgtaactaattataaattattattcttatattgtgactaaatagtcagtgactaaaggtatttgtcacaaaaattacaatttgttgtgaataaatgtatatttagtcataatatttgctgtgactaaaactaaattagtgaaaatttgtatttaaatgctatgttttagtcaaagataattttttgttgtgactaaaagtcacattaattcacaaaaaatttatgttgtgattaaaaaattatcactaaaagtaagtgttttttcgtagtgattatcagccaataaaaatgcatcagataatgaattatatataagtgtgtttggtgcattgtattacattatattatattatataatattat

SEQ ID NO: 169253 - DNA, 620 bp, Cannabis sativa
tttttttttttttttggtggaattttgtgagtgaagatgggttatgtgcatgtatcttctgtatgggtttgatagaattcgacaattttacttggggtgcatttagttggaggtaataaaataaaaatgaaatcaatttttatttcattttttgcatttggaggtaataaaataaaatgaaatcaatttttatttcatttcttcatttgataagaggtaataaaacaaaatggttgtatattaaagtattgtttcaatgattggttttactattttggtggaaattctatttagaaatgaaggtaatttttgtttttcatttttttttcatacatattaaattttaggtttatttgtactgcaggtccttaaactatacatgttttaacaagttggtcctcaaactttattttttggcaaattagtctccaaactatataagttttggcaagttggtccccaaactttatattatggtaaattagtccccaaatttttatttctttagtaacattaagttcctactattattgacatttttattatttattttatatactttaacttatgtttttgtgttaaattcaaataattttatttttttaattttaatactttga

SEQ ID NO: 169254 - DNA, 544 bp, Cannabis sativa
tgcagtggacgttgaggatggcgagggaaatgggagattgatccacgagggtggcattgggacagtaacctgttgctcaggttgatggttatttaaaaaaccagcatgaaatggaaactctttctcgttgaaaatgacatgcctagaaatatatattcgaccatggggactaagacatttgtatcctttgtgcacattgctatatcctagatttacacacttaatagaatgatattgaaatttgtgagtttgataggtgcgaagacaagggaagcaggccgaaccaaacacctttaaaaaacttatagtcaggttgttttgagtgaatgatctcaaagggagttttatgattaagtacagaagtgggaagtctattaattaaatagacagccgtctgaaaagcatcagaccaatatttcagaggcatggctgcctgtgcaagtaaagtgagtcccatctcaacgatgtgtcgatgtttacgctcagcccgaccattttgagctgaggtattgggacaagaatgatcaaacaatattccactttg

SEQ ID NO: 169255 - DNA, 1156 bp, Cannabis sativa
aaagatttggtcattattacttataactgaaaatatcattaatacaaaaaaagaattagtaacgtctacagtaatatataaaaagtttttttattctgtcttctatccttaatatattttaccataaataatatacagtaagacattcaattatacatattgcccataaaattatattcaataaaaaatatgtactctaatccaattatgtaggtagaaatgaagggcttattttgagagctaaaattatattactaacaggtgctgcccattttactcttttccaaatgtttgagtttatttgattacagtggttggtctgaaaagatgaacaaagcaaaaatgtcatgcaagacatttgtggtttgaacattgaaggtatccatcgtgatcattatcatttcatcttttttcaagtttcgtttgttttttttttttcctattactttaaaaatagacttctaaaattatgagtgaaagtcttttattttacttaatattttatcttcatatatatatatatatatatgtcttatgattatgggtgaaggtcttctaatttatttaatatttttttatatctatatatgtctcatggtgaggtttaatgttcttaaaataagtgatcactagaatattaagtaaagtcaatgtgtataaggctttggctcacaaagaaattaagaaaggacgacaagagcatgaagaagcaggatgaaactttacttgaagaactctaagatcatacaaaatgagatagtaatgtctccttatttgccaatacacaaaagaacaacaatgaagtttatattagctattcgagatgataaaaaattcttattgtattattatgtttagatatctttttaaaatcactcccatattgtgctactgtatatttggacatttatattcgaataaagttccacttttatgtgatctcttttattttatttttctctcttttatttaaaaaccatggatacatcaatttttttttataattatttttatggcataagttatatataattttagtactatatataaattttgcatgctccaatcatttgtaacaaaattcatatattattaataattacatacaaaacatattgcttataaatttatttcatttttttactcttaacataat

SEQ ID NO: 169256 - DNA, 648 bp, Cannabis sativa
tgttcattaaagatggaaattagattatggtcaatggtcatttcatataatattttcaccgaatagttgattgacatatcaaccatgcctctaagattcttaaaaaaaatttacctaacaacattatcaacagcaaaattatataatttcaaactaaaagcaaaattacaattcaaaaaattacaagaaaaatttattataaataaaaataaaattatcagtacgccagttaaagaaattctcaatcaaaactttaataataattactgaatcgctctcgataataataaaatagtacgtccactcagttaatgtttgaagcgctagcacctccacttcgccaaaaggattagggtggacaattaattattttaaattttcatagtgaaataatagataattaatttcattaattaattccaaatcaaatattgtaattagttggttaatgacatatagtaacatttaactatactcatttattatggatagtgatctctcactgtattatagtttcttatcagactttattttttattgtgacatatatatatatataacatgtaattatttctaatcatctagtactttatatattattttttaatttatggtttgagtttttaaagtggtttctttggtggtttc

SEQ ID NO: 169257 - DNA, 633 bp, Cannabis sativa
ttatggtcggtttattcagttagaacaataagaggaaagtcagttagttaattctgtttttttccatagtttttggacaatctatatatatatctgaaatctcactcccttgtgagtaacttgtatccaatatttcattagaccaggataacaaaacacattctttttcctcaacaaagtctctctatcttttttctttctggtttgaagaactgtgttcagttcaatatacaatcatgcatagttaaatgcatttgttgaatcgattgttttcccaataataactataaagtacatctaatataaccaaaagtaacgatcataaaagttgtattctacatgtcataacaaaaaattgacataactatgaagtatataaataaaatgaaaaaataatataactataaagtatgtaaataaaactaagtataaccaaaaagtaatggtcatatagctagaagttttatatcctacatgcatcataacaaaatgtaaggaactgtgtacttattccttcaatatattagagttcacaaaactggtccattcattttgtacaagtgtattaatattattagatatcacaattttaaaaaattctctcgattagggggagagaaatacagttgggat

SEQ ID NO: 169258 - DNA, 1372 bp, Cannabis sativa
aaaaaaaaaaaaaaaaaggaacaaagaaagtaaagaccaaccttcaaatttagacatggaaaatatgattttacagagatagaaaaggaatcgtataggtttttcttaaaaataaaatatattaactcgtataatattaaaattaatattaaaaagaggggtaatctagtcatacttgaaagttaggtccaccaaagttaaagataaaacaccaagtgtgtagaatttgtaaataaagggtaccaaataatcatttttagaaacataaggtatcaaacttgtattttgataaaacttaaggtactaaatatatatatatttactatttgtaaataaataaataaattaaaaatataaaaacaataataaaaaataaatttaattaattgaaaaataaacaaatataaatattaaaaaaattaaaaaaatattttcatttgaaaaaataaatcaaaattttttcagcttaaaacaaataataaatttaatattttttatattgtatgtgataaagtagaactaatatctatggatctatttcttctcgatctcagtgatttggtagcttgtgagtatggatcttagataatctttgttgcgggataacaattttgattgagagagcacttaaggaaatgagaggaaaaataagtctacatatttatttatttatttttactaactttatttattgtaaatgtagataaccattaaaaaaaattatggagatgatagatgataccaatcggtgaggaagaaatagacggatctgacacgtgggtgtgtaatattgtaaaagataaaaatacattaactctagttaaaattaataaagttataaattaaaaagtaaaatgaaatataaatatatcaacttataaaaaaaaggagggtagggtccacctgagcattcttcattagttttataattattttttttaatatttgttagattttaaacttgtatgtatataatttttaaatttttaaataaattattaaataaaaactaaatatttaggtctaataatttaaattaaggttataagtgtaataatttcaaaatatagggttatatgtgaaattatttcaaagtataagattatgtgttataatttcaaattataaggagttttgctacaaatattaaaatgatttaagtggaaaaaaattaattgctaaaaaaaccttgtttactaacaaattgcaaaaaaaaaaataaaattaataagaataattaatttaatttaaaaataaaattaatcttaattaaaactttataaggaaataaaatattaagttactatcaggttacatattattttttatttaatttgtaaattaatcagaatcattcaataatgatcaaatg

SEQ ID NO: 169259 - DNA, 676 bp, Cannabis sativa
actgaattatcagaataataaaaaagaaaaaattaccgcataatcgctattgacatgagcgagtccgactttagtggtatccttaagagcaccataagctttccgccaagtctgaagcgttcccattttctaaggcactcactaacctttttaaggcgttcaccgctgagatcggtgtctttgtctttctctctctagaaaatcggaggaaacgtgggattgagaccttgaatttctctggtactcctcctccgatggttcagggggggcagagaaagggagagagaaactaggaagacgaagaagaagaaaaatagggattttgatgcgtatttacagcctgcaaagcaatctctctctctctcttcttcttctgctatggtgttttgtttgtaattcgatttcttttttttctttttttactaatttatttttcttttgaatattatatatgacttttttttcaatattaataagaataaaataaattttatttatttatatatttgacaataataaataaatattggttttatttttgacaaatgaacttatggcatgtttattttacagtattcaaaattgaaataaattaatggagaaatataacggaataaataaaaattaatcagaatcaatatttgtaatatgttaaattttttttagaaatggaata

SEQ ID NO: 169260 - DNA, 659 bp, Cannabis sativa
tttgaaataagttgtatgtaaaaattatttcaaaaattgtgattgactgtaataacattcattatttttttagttttaagaaaattaaattggtagttggttggtaatctaaaaaaatatgtaaataaatatttgaattttttttggaatcaatgatttgaaatttcaaaaaacataaaattattttttcattttttaagtcaaaaactaaaaaatttatttggataatttagttcgtaaaaattctcaaccacgtattttatatgtatcctgtaataccctactagattggataagctattatgttttttaattactatgcacttctttaataatcaaataattattaaaaaacatgaataattaaattttttataaattaacttaaactgaattgaatacatacaatacatattacgagatcctatttaaaaagttaaaactgctttccaaaatatatgtatacaaaagttatcgtctcgtctagcgactatcaaaataaaactcggatgtcttgaagatatgaacactccaagtttgactgtctcaaaatgtacaatctttatctagtccaagctcactactgcttaacctttgatttgcctttgcctacacatataaacaaaattcgtgagtcgacagactcagtaagaaaagca

SEQ ID NO: 169261 - DNA, 921 bp, Cannabis sativa
  modified_base (811)..(815): a, c, t, g, unknown or other
tctaccaaagaacccaaaagaacaaaaacaactgtaaataagaagaaatcatcaaacaactaactatcgagcctacaaaatctcctgaaaaggttgctcctactgtggcaagcgccagtgaatagccccttgggtctgttcaccaggtgaaattctctagttctcacctaaagatgattttcctcgagcacacctgccctttgcccattgaagttggcacaaaaggctctcaactctgctcgctgcatgctaccaataattggtggcattataagaccttcgagtccagtgaccgggatttaattaataaaggcagcttcgagagtttggtaaagaagatctatgatcttatgcaattagttagtcctttctttacttattttcttccatttttcattatttcctatacactttctcttactcttttggttttattccttgcacgcatctcttttgtcctttgttgctcaacacagaggtcttcaacgagttgagatgcttgaaacagagctttaccagaccacggagcatcgcgaagccattgctaagcactggaatgagtcgcagtctaagctctctcaggttaaacaggaagcaaaagagcaacaaaggactgttaagaccgattttgaaggtgccccaagaagatccaagaactcgaggaggaaacaagactatccaagccaaagctgaaagaaagcttgaagaggctaaagttgacaccaaaaatagtgtcaataggattgcgaggtggtctatctatcaagcttggttagccagtcccaagatggtgttatagtgagatttctcnnnnntagaaactcgagaccagactcctccttgaaggacacgtgtatgcagacttccagtgaaggctgaaatgtccaggggagacttctcgaagtttagacctcgcccagg

SEQ ID NO: 169262 - DNA, 1292 bp, Cannabis sativa
ttgggtaaggggatggggaaggcaagaggtaaaggaagccaggaagctggtgcgagtggtagtagctgtgcgggcctccatgctaatacgaacaagtctcatatttactttggtagagtcgatgaagcaagaaaactggttatatggaatttggttccttatgatgagggtcaattccctctcaagtatcctggtgtgacaatgaggccaacaaagtggaaatcagtggatcgtaatcattttcttaaaacgattcaattaaaacttcacagatggacaacaaacacctcttgtttacaagtatagtgcaattgattcaatcagtgttactgggcattcgttgttattggatgagtatcattattcttccacagaaagtagtcaagaagcttgattaactatgcagagactttttgtggggtgtgaaaggtaactctagtaagatgcatctagcttttaggaatcttgtttgcaaacctaagaattatgaaggtttgggtttttgggaaggaaccaagtgggttcgattgctagatacatttgggctatttcaacaaaacaagatgttctatgggttaaatggatcaatgctatctatttaagaaaccaagatttttgggtggttgataagaaaggtgatgtgagttggtactagcgcaaacttttcaatcttaggagtgttttcactcgagacacaattctagatgctgggaaagggagaagatttcatgtcagtaagctttacaactcttttcttactccttatgctaaagttgataattataaaatgatttggtgtagattatccataccaaaacataaatttattctctggcaagcctcttataataacttatcaactagagatcacttgttggcagtgagaattgtcaagaattctactagctgcctacttcgtgaggttggtgttgactaccataaccatcttttctttgattgttcttttttcaagcatctcatgcaagctataaattcttggcttgacaatgctatttggccagagtcttattcgaattgactttttgtggttgaatgctaatcgaggtcgcagtctgcttcatagggttgttgcggctgtttgtgcgataataatttattttatttggtgcaatcgaaatgcttgtatctttgagcaaaatgttttttttttgtttcttatgtgaataatttgattagagttacacttaacgtaaaattactacttgttaataggaggaatctctttgagagggaccaacaaatctttgattttgtttgtaacatgtaagtaa

SEQ ID NO: 169263 - DNA, 852 bp, Cannabis sativa
ggtgtctacgattgaaaatctatcccctctctgtaaaagggcttcagagttttcaaggtcatgcatgcttttattgaagatttatcaaggacttctcaaagatctctaaaccattttccaacctgcttgttaacggagtaccctttgagtttggaaaggaatgcttggaggctttttaagcttttaaggagaagttaatctcagcacccatagtcactacaccgaatcgagagttgccatttgagctgatgtgtaatgctagtgactaagccattggagctattttgggtcaacgagttgatagggtatttcataccatctactatgctagtagaaccctgaatgatgctcagttgaactataccactaaggaaaaagaaatgttagctattgtgtttgcatgtgacaagtttaggccatatctgattgggaataaggtaatagtgtatacagataattcaacaattaaatacctaatgaccaagaaagatgcagaaccaagactaatttggtggattctttgctccaagaatttgatattgagataaaggacaagaaggggaccgaaaatctagttgctgatcatcagtcaagacttgaattggaggagagtcaaaattcaaagaagttgcagataaatgaagagtttcctgatgaacaactatttagtttgagggagagcttattggtcacttggttcgcagattatgtgaatttcttggctgctaatgttacacctatagagatgtctcgacaacaacttaaaatgttctttttagaggtgaagcactactactgggaagagccgattctttacaaacactgtgctgatcagataataagaagatgtgt

SEQ ID NO: 169264 - DNA, 1293 bp, Cannabis sativa
tatgtccgaatgcgtattggtttttcgttgaataagagtttgtttgtgggtcgatttcaaccgagcgatgggaagcggttttggattcaattcaagtttgagagattatcaatgctttgctatggctgtggtagatggggacatgaaaaaaaaaagaattgtgataaacaagtagtgatggaaaaggatgagaatgagctgctggttcctaaatatggcacttggttgaaggaagatgatcctacaccaaattgctttgtggcgttcaaacaaggccaggtgaggactagtgatatctcggtggagcaggaggaatcggagagggaggttccattggtcaccaagcttggaaaagaagttcatttgatggagacgggtgatgggaggtccggcgatgctgaggtggtcggagaactgctagtggaatcggccattcatggcgatgctgagaattcggggatcgtgggtgataggttgggcaaaggtggttatgatttgggtacgtgtgaaaaatcaaatggactaaagatcaatgtgggccgggcctgtgaactggaggttgtaagtccaaataaattaagtgaaatggtatttggccgattgggtcgtgatgctgggttacaagggccacgtgatgctggattacaagggccacgtgcaggtcaggtgggtaatattcaaaaggtgtttgagctgtcgactggaggctttgaggataggcattcagagcttaaaaaacgcaaaactcatggagaaggtgatgctgacgagattgacagagcaagaagatattttaacaaagggaagcatgttcttgaggatgttggatcaatttaggaaaatggtgcttttgcttatggtgtttcgaaagatggggagggggctaacagaccgaatgggagccaaaggaagaaagtgtcaattaaaaataaagctcggcgacaggctaaggtgaattcgggggtggcaattgttgggtgtccatcagtggagagctcaaagattcaagcttcggccgaggagggggcggtgaatttggtgttcaatgccgagagggtacctcaacaagtttctgggatttcagatttgaattctgcaaatggggttagtatttctacttctgtggatttggtttctccaatatgtattgatgaagcggcgagccttgtggaataaggctgccgagtgcaatgaaaatcttgagttggaatgtccaaggcattgggaacccttggacattaagagcacttcaatccacttgcgggagtttaacccgagtattgtttttttggc

SEQ ID NO: 169265 - DNA, 609 bp, Cannabis sativa
aacaattgcattattttgtagtgttgtccacagtaacatcttttcctttggtgagagctaatgctgtactgaagagaagcgctagtagtactagttttagagtgagcaatatcatcataattaattgatttttcatgttcttaaattaatcgttgtctacttagaaaccattcaaggagggaggtagtacttcacctgcttacttgtcatgcaacaatattaatgatttcttatcaatatgtagctctagcttctaagcttccatcttcctcctcatcatcagcctcaaatattgggtcttaataaagatgatgatgcttttttaatggtctcatgaggaggatggagatcttctttattgatgtcaatatgtcctagtgtgccaattgccaccaatccagcccatcattcacttcctcttttccatgctgaattttcttgctgcactactacttctcctcgtgcctctacacgagataatcaaatgtaaaattattgattattaagggcgcgtttagtaatacatttttaattaattttttgtttttaaaattgaaaaagtaaaaatatttttctaaattatgttttataaaattattttttattttt

SEQ ID NO: 169266 - DNA, 678 bp, Cannabis sativa
gattttaatggtgcttagtattatcttgtatcttatattatatttttattggtgtgattaagtatttgattttacataatttaaaaaggagtaattttattaggcattagtagtgcctaacaccttctcgatatgtcacgttacaattgattagcgatactctttaaaaattattatattaaactatgtgaaacccgatacttattcaataccaatagcgatactgacacataggagggtgttaggcaccactggtgccttttaacatttctcttttgaaaaatagcttttaaaaaatatcacattactaatcgtaaaacatcacttataaaaaagtactggccaatgacaatactcctttgaatattctcttcttacacattatgcttactcttaatttattatacacgacatatttatttaaagaaaataggaattaatagcattttattgaatcttatacaattgtttattaaattttagaaaatgagaaagtagtgcagcttacataaattaagaaaaaaataaagagaaatatactctccatttttccctccaaaaaaagccacttttagtgataaacttttagtcacaacataatttttttgtgattaaatgtgatttttaatcacaataaaaagttacttgtgactcaaatatagtatttaagtacaagtt

SEQ ID NO: 169267 - DNA, 528 bp, Cannabis sativa
  modified_base (489)..(493): a, c, t, g, unknown or other
aaaaaaaatggtaaagaacatgtgattgaaagctgttttaatggagcaatcattgggtaaaattttttcactcagtccaatcatttgggctgaagtacttcagttgaccaatgtactcaaaaataccaaataaagcaaacatgagttaatcattaggcctttaagccttcagtctttagtcaactgggccccctacactaagtacccagcccacttgcctctcagcccaatactcaaccctacattacatccatcatcatcatcttcatttcccttccaatgctcaaccgttcaccatctttgtcctacaccgagcctccatccaatccgaaccagcaactccacgaacccccattatcctaaccttcgcctaactcaacccagcagctgaccacgaagcaaaccccattcaactcagcttcacttcaccccgttcactccgcctaacccgcaccaccatcgaacccactgttggattttgtgccctannnnnaactcatttcaatataatcagttttacttattaat

SEQ ID NO: 169268 - DNA, 2030 bp, Cannabis sativa
aagaggcatatcttatttaccgtgcgggccaggcagcaaaagataaccctaaggcagccaattccacagctctgactaaccagaacaccgagaccccaacctctaatgaccaagtcgatatgtacaaagaacctgggactcctgctgtgtgaacctctcttttcttctttttttttatttgttcggcccatgggcctttgttaaatacaatatgaccgaccaagcggtctttaaacttggtaatttttcattttattttgagacagctagctgaccgggcagcctttaatctcgggtttatatcgtgcttttgtcatctttttttttttttaaatgaatattttcccttgttttagtaattgcacgtgcaaactgctatgtttttttttgagcttgttatttaccaatgctttgtacgggtatagttgcccccaagtgattgagcagacttatgactcttggtcacttgtattttattagtttaatttttgtctgttcggcttgtgagttcgagcagaccctttgtacacattttgatggtaaattcataacttgctataaaattaattgacacaattagaatgataattaatatctttattcatttattggtcagaacaattttgttaccatagtaacttacatttattgaattatgaaagctattatatgatctaactgatctttagctaatttaaacataaaacaattgcactttaaaaactgtactttaaagatggtcatctgacctgagtactagtcattttatctaaaccttttagcgggatccgcccagaaggccatctacttaagagtaaatcttctagcattgtgtacttaaagtggtcatcagaccttgtacacttactggtagtatttcctcaaatgttccccattccaatacctttgtactagaacgaacttgatatttttgtcatatcgccctgccttatatgctccagagtctgtgacttcgaccacctgatatggtccttcccaattaggcccgagcacaccaaccatggtctcttttgtgttcaagaatactcttctgaggaccatatctcccacaaaaaattttcttgccctcacttgcttgttgaagtaccgagctacctttagctgttgtgctactagctttaagtttgctgaagctcgtttttcttcaatctcgtcaagtgatcctgccaaaagggcacgattagcttcttgatcgtaggtcaatcttctgtgggacagagactctaattccacgggcaacatggcttcataaacataggccaagcaaatggtgcttgcccggttgttgttttctctattgtttggtgtgaccacaatacttatggtagttactccggccagttccctttagtttcttcaagtcgttttttcatggtgtctttgagtgtcttgttgactgctttgacctgaccatttgactgagggtgtgctactgcggagaaactttttatgattccatgaaatctggctgtcaaactatttgccattgtccgaaacgatcttgtgcgggagcccaaaccgacatattatgtttttcaccacaaagttcaatattttttagatgtgatcattgctaaaggcttggcttccgtccactttgtaaaataatcaactgcgaccactgcatactgtactctgcccttgctcttgggcaattttccgatcagatctattccccaaatagccaaaggccaaggactttgcatctgaattagctcgttgggcggtgcgcgggggatcttcaaaaatctctggcatttgtcacatttctttacgtaggcctttgaatcttctattattgtcggccagaaatatccttgccttagtattttctttgatatgctttatcctggtacatagttgccacagaatccatcatgcacttcagacaggagttgttcaacttcttcttttgttacacatctaagtaatggcatggagaaacctcttctatacatcacaccttctactatgatgtatcgtgcaactttcatcatcatctttcgagc

SEQ ID NO: 169269 - DNA, 2484 bp, Cannabis sativa
aaaaaaaaaatgtagacaatttatagaataaatgaggatatgaagttcatacgaaggaatagtctaatcttgtgaaatcccaaagttgatatctttggttataatgttaagaattaatgaaggttatctaagaggatcaatagaatattagaaacatactgtgagcatatttgataaaggttagatctcttcccctgacgaagtgtttgtcttaaagtgataattaaatattctattggttaggtactttaataagtgtggtatgagagaaatattagacacctattcactggagtaatacaggtgagaaaagagtacaatggaccaaaaagacccgaggaacataaaaaaatcatggagtgaatctgagtagtatgctcacttcatttagtacatagaaaagctacactgatttaaagcgtaggaatatcaagttctaaataggagattttgtttttctccaagtatttcctatgaaagagatatgtagagatggaagttaaaccctaaattcattagacccttttgagactggagtaagtagggcaggtagcctattagctatccttgactcctgcattgtccagagtgtataatgtatttcatatctccatgttcagaaaatatgtattagactcgacccatattctgagttgtgacgatgttaagcttcagtcaaatttattatatagaaaaaacatcatgttcaagttttgatctggaaaaagaaagtaatatggaatgagacaattctactagttaaggaagtactgtaaagaaacagcaagatggaagaagcaacttgagagttagaattgtgaatacgagagtaatatcccgaattgtttaggtaaattttgaggaaaaaatttctataaggatgggattgttgtaatataatttatgctaaattaagttagcaggatcataatcatacccattactacttaattaacccataatatataataaatccttattattcgtaatttgatttattatatattatgggttaattaagtagtaatgggtatgattatgatcctgctaacttaatttaacataaattataaattttactataagtggataaataagcataatttattaattacaaattacgaaaaattaattgaaatatgtggatataatgtaatttatttgtgaaataaaaatattttcaggtttgttgaccctgaagactcggtaagtggataaataagcgtaatttattaattacagagatttatttgaaatacgtggatataatatgagttattgtgaaataaaaatattctcagattcggcgaccctggagacctaattagaggccaaaaatagcaaaataattttagttagaaatattaataggattattaagataagttgattttagaaatagcagggtattttagagtacgcagagttgaccaaatactctagaattaaagattttttagtagctaagaaataataaaataattattaataataaaaaatttattaatattactatactattatataattgttatactattataactgttatattattataatattaatattattaaaatttattgttagataagtttataaataaaatagtataaaagaaccctccattctctgtcgaacaagatcctcatcctttcttttcattttatttgattttcaacccgaaacctagcgatctaagctctagcagtagcaaaatagcaaatcattgaagagggaaagcttaaggtatggtttaattttattttaagttgaaaaatgattggtttttttatagtgactttgtgatttagaatagttacggagcttttgacttcgtagaattgttatttggtagttataagactagtttcgatgtttacttgttgaatttgatgtgattttgagttagaaatcgagtttggaactttttaaatcttagtctgaacattaatggcgttttccgtttaagggctcgcttttaattttggttagttggaattgtagtagatatggtatatatgtgtcctgtaaaatttggaatgatttggatagatttgggggtgtttcgatgagtgaaaaatttggaattttcgtgttctaccatttttgaaaattcttaggagatcagaaatagtatttttatcataacttcttactcgggtgtccgttttggacgttctatataccgtttcgaagcttgaaacaaactctacaatatggtttatgttttagaaccaaaatataagtttaattttagcatatttataccgcgaagtttggttaaaaaccctaggttgtcttatgtgaatattaagtagtgttttgggataaacagttattagcttaccattgttgtgacatagggccaagattattagggatgtttctccacttgagttggccgacatgcatactactttaaaacttgtttgataattgtttgagaaaaaattaataaattacacatgattttgagatatg

SEQ ID NO: 169270 - DNA, 1351 bp, Cannabis sativa
  modified_base (1133)..(1134): a, c, t, g, unknown or other
ttttacaattaaattgattcggttcaattagattaaattgaattttgtccatgagttattgctatggtggcttttgatggcatcaaatatcatcatgggttagttgagggaaaatggtcttgttggaaagttgctgtattcgttgttctttatttagtgttttggaccttgttgattgtaattttcactggattcctaagaactttagtaccccatcctttagggatttaacacacccttttgttttttttgttttttttgaaacacacccttttgttttagttataatgaagtttcttctttaccaaataataataataattaggggtgtttatttgaccacattcaatgtattttaaatctttctagattcaatataattatatattaaatgttagattttatcactcgattcgatcaaattaatatggatgttagattgtattgattctatccgttagatatattccatgtatatctattgatttaattcgtatttatctaatatttattggatcgtatcgaattcattcaatgttttagatccatctattggattgaactggatctatctaattcaaaaaaaaaattaatattaatttacatatatacatatatatatttttacgtataataacataaaatttaatcactcattcaaaataaaaatattaattagttcgattgaatgttggctgtattggatttttaggcaccacatccaacatccgattcgaccaatctaatactaaaaaataacatccaatttgatccgatcacaattagatatccaatatttagcaatcaattgtaattgaattcggtaagttgtcattagattagatcgatttatagagacccccaataataataatttaagagttttataagctaaaaaataactattaaaagtagggatggacaggattcaatccaatcaaatttaattgaactaatctaatttaatccaattacaataaattgaatatttaattacaattagattagattggatgttaaaagttagattttaattggattaaactgattattaaatgtcaatctcaaaatttttctaaaaatcgatcttatctaattacatcaaatgcatattaaaaaaattatttatattnntttatatataataaaaaatattttaattatatttgtttttgtttttttttaattgtaatactttgttgtcttgtctatttaattttatgatatttgattttattttattagttgctagtattgtaatgtagtattaatttaaattaaagtttatttatagttttatttttaggtattttttttcttcatatttttaaattaatattaaaaattaaat

SEQ ID NO: 169271 - DNA, 1172 bp, Cannabis sativa
  modified_base (1116)..(1124): a, c, t, g, unknown or other
gtaagcatcaacgtttagggtacagattacctaagaaactttgatctttccaacaagcttcctaatctaagcctaatgcatactttgcaaggcgatgggcatcttcactatcccatcttgtaatgtgcatgaaagtagcattaggaaggaaagacagcaagctttttatcttctttgcaaacctattcaagagaatgttatcaaaaaagtcttcatatattaaacttgaaactgattatataacggtctctgctaactgtcattagtttttcacaaaaaaaaaaaatcatcatgggaaaacataccttggccatacacattgagagtaatcactttttttcctaggctcaaacataaaaaaaaaaaaataataattcttaccaaccaaacatcaccccgtgctaatcctaaagatatctctgaattatgaaaaatttcaagaaactgataagagaatcaaatcacattgacaggatttttttaatgaaaaacataacattgttagaatttttctcgataaatttgtggggctaatatgcatttattttaggagatttttttaaaaaaaaatgtcatacatcgaaattaaaagagagacaattggatttgatctttttactagctaattaacactgatccaatatgtagttaccaagtactgtaaaaataaaatacctgaatatcttgattactattgaatgttaacaaaacagattaatgattcttgttcaatatgagatttatttttgtttcttttgaaaaagaaaaaagataaatctaagtcctaccctcataagccaagttagtaacactgataaaatatatgcataggttgatcaatgatgagaacaaaattgagacaagaggtgtccaagacaaagagaataacccaagctaagaaccatcaaaaatacagtttatataaaattcaagaccaccaaccaaaaacaagaaaccaaaagtagatccactacgtatccaaggccttgagaaagctttcaaccgcgttgaaaaaccaaagaacgtaacataacaataatgcaatcagaatcaacgaaacaaataactaaggtgtcatttggtaacacttttattttctaattttttaatcacaannnnnnnnnaaaatttttgtttttaaaaatttagtttttcaaaaacaaaaatacgtt

SEQ ID NO: 169272 - DNA, 1643 bp, Cannabis sativa
  modified_base (1616)..(1616): a, c, t, g, unknown or other
tgcatcataacaagtatcttgtttaaaagtaagccaaaccccgttggaggaccaatttgaccaagtggactgtaagtttctcctccctagtcaatatatgtagccaagtctttcaatccaccactaaatatgcttgagggccaatatccaatatgatcataattctctccaagttgaaaccaccaatttctagtagttggatcctattatatcatgtcaaacaagtagaaaataaatacaacccaaactattgaatataagccattttttttttaatttatttattaaaaaaatattcaacaaacttggtaggaaaaaatatttaaatgaaatatttaattttatttacccgatacatattaattggaagttcccatgtaggtaaattaccagggtgagtttctcttacagtcatttggatcataggttgagggtcaaccaaaacaaacactgggcacactgtaatgaaacaagataattcaccagcctacaaaaatattgatacatgagttacacataactacacaacaaatatgaaaaaaaccttaaataataacataaaattagggtaacctgaaaatatatgaagatccgagttttattatccccgtatacactaggatttacctaatggataatagcacaacaaattaataagtaaaaatatattctaaaaaattatagcttatctaaaaaactttattatatatttttagcactaatgaatattcatgagaaaaaaaaaacttactccccaccagcttgaatggtatcaagtccattttgtaattttatttgaccgaaagtatattgtgagccagtaaaaacttacaaatatacctccattgcatttcttggttggatgagatgtgtaaacaagtgcatgctattatattccaattcaaaatataattatatttcaattatagagtacaccatttaatttgtcaaaacaatatgtaaatctaaaatatgcatacatgaaaagcaggaggagaattaattcttgaagcatatgactttgtaaataatttggctctaataagatcttccttcgtacttcttcttattggaataaatccaattggacatttttcaccttttaacccactatttatcgatacttgtttcacattttttggaggcttgtcttccctaaccatcgggttgggatgagaagaaggtcccatctataccacaaaaactcatgcttatttactatggttttagaaaattaaaatataatgagctattagagagtaattatttgagaaaaacatacccgaaaatcatatttgtgattcttcaataaaggatgatcaaatgctggttgttcgtaaaaattaatacaatcacaaatatctccatgttgtgtctgtacataacacagaacaagttagataagtaggagataaagatgaagatgaaattattaataataataaaagaataaaaatacttttatagtctttattgatgatttgttcaatcgtcgctcaagttgattctctattttcagaagttcatctcttaataattttgttggttcttcttgagattcacaataatataaaaataggaaatttacaaaaatactgaaatttgggttaattttnacaaaaatactatcacacggaaatttt

SEQ ID NO: 169273 - DNA, 991 bp, Cannabis sativa
acagtaatatgtataataaatattacttttttttacatttcatttttaatttaattatcaaaaataacttttttttttttaaataaaagatgcatactttattaaatatccaaacgaattacattcattaacgtaacaggggcattagattccctgtacatacaatcagcataaaaaacggaagctctagcaaaatggtgagctacacgattcgcagatcgttttataaaacataaatcaacatcacttaagtttgaaaacaaagattggtattctgtaacacaaaaaccaaaagttgaatgaagggaaattgaacttctgattgcttgtaaagttaccaaactatttagactcaacaacaacaaccacacattggagtgttcataataagatttttctttgttcgggtatgtttgtaatgcatacatttctctctttctcttttcttttgttaactttaaaataatctatgatcatgctcgtcgttacttggttaatcctaaaaataaatattgtgatttactctttaatataaatatttcaaaatatgaaaagcatatatgttttgctatttccagaaaaaaaaaaaacttggttactaatatagtaattatttactgttcaataattgttttgaatattagttcatttattttgaaattttgttaactgaattacgttatattatacgagaactaataattagtttttttttttgaaaaactaatcattagttttaaaaataacaaaatatatataaaataattggtatataaaaataatagcttgtgatattacatgacaactcattagtttcgaaaataacttcaaattataaactaccacaatataatttaaaaataacatattaattattacgatataaataagttttatgaggtaattacattatttgtatttttaaataatttctggatgagtggtattagcttttttatggaagaaatggaagtacaaatttgatggatga

SEQ ID NO: 169274 - DNA, 505 bp, Cannabis sativa
ctagcacccacaaataatgcttcacaacactatcatgttttcaagtgatgagagcagattgttagttggtgttaatagttggtgatttggtattgtccatcatcaccccctttcgactctcgagactcaaaatatgtgttgtacccttaatttcagattcaagccctttcaagtttgagcttattcttcttcgaacaagtaacgcaattgtttattcgatattgtgtaacacgaattatatgtattctgtttatcctctgtttctgcatatacaatacttagtcttgttattactgattgagttagttgaggcagttatattagtttaggttgttagctgtctctttgttttgggtagttagattagttgtgattgtcctgttatttcgctgggacttctctgaccgaccttagctgtatatatatgcactttacttccctgtaatatatttattcaattcaatcaaataaactcttttcatgttacattgtctcttccgcaata

SEQ ID NO: 169275 - DNA, 1966 bp, Cannabis sativa
gagcctgactctgatgctgttcagaacatggctcgaaacactgagaagtctaaaggcaaagccattgcgggtgctacgcgttctgccttcactcctcactctgttatggtgggtgactccctcaggaacatcctcaagagagcccgtgctggacctgtcatcaatgaacccccaactgctgatgattcctcattccaacaggcgggtgttgttgagcgaccccgcccagaaaaatgattcttatatgagttggaatgcccgtgggttagggagtttctaggcattccgtaatctctcccttatagttaagaatcataggcctagttttctttttgttatggagtctaagttgttaggtggtcattgtgatacttttagaactagactctcttttgatagtgcttttgaagtccctaggagtggtcttagtggtggacttttgttattttggaacaatgatgtaattgttaatattttgaactactcctctaatcatatagactgtattgttacttttgaagataatgtaactactcatatttcctgttattatggctctccttatgtttgtgataaaattcatacttgggttctcttggatagactttttgataatgcccctcaactcccatggcttgttctaggggatttcaatgattatctttcggttgctgatagaagcagtaggtcttctttacctcactatgctatggttaattttcaagcttttgttaataagtattccctagttccaatccattttgttggcaataagtttacttggaaacatggttccacctttgaacgattagattgggggattgctaatgataaatggtttcaccattatcctcaaacactcctccatcatcttagtttttatggttcagatcatagggttttaaagttagttctgtctgatgatagtatgtttaaggttaggaataaaaggtttctttttgaaaaccattggcttacagagccctctttcttcactactgttaataattcctggtcttcgtctaattctggctctaattccaaccccttgtcgagctttcttaataagcaaagcacttgcattaatgctattcagacttggaataaatccttcaatagtttatcgtttaggattaaggatattgataggcagcttaatggcatctcttctttccttcttgcttctcctgagcagttgtctgaagtttctagccttcaatctcagcttgatagccttctttataaacaagagattttttggaaacaaagatccaaagttcattggcttcgggctggggacaaaaataccaaatttttccatcataaggcttcttctcgtaaaaaaactaactttattaggaagcttactcttgatgatggtagtgttatttctaataatgctgccgttgaagctgaaatctgccgttttttctccactctgttccattctcaaggtagtagcagggatgctgttaacctaattctttctgatgttactcttaggctaactgctcaacagtttgcctctctttactcccctttcacttctgaggaagttcggacggctttgtttcagctttctggggataaagctccgcgttctgatggtcttaatgcctatttttaccaaaagaactggagcactttaggaggtgatttgtgcactgcacttcttgatatccttaataataatgccagtatggcttctataaataaaacactaattgtgcttatccctaaaaaatccaatgcttcttccctgaaagaattcagacctattagcatgtgctcaaccttgtataaaattgtttccaaaaccattgctaataggattaagcctattatggaggatattatttctcctactcagagtgcgttcttagctgacaggcttatttttgataatattctcattgctcaggaaatgatccatgccattaaccataggaaaacggggaaaattggg

SEQ ID NO: 169276 - DNA, 507 bp, Cannabis sativa
aacattgcttgcccagtctccatcaaagaaccctgtgatagtcattctatcacagtaactgatgtgaagcccttgagtactagttccctttaggcatctaagaattctcttagccccactccaatgagtagtagttgaagttttaagaaactgactcagagagttgacaacataactaatgtctagtctggtgtggcatagatacttcaaagctccaatgagacttctgtagaccgtggggtttgtcatttcctttccatctgaaattgatagagatttgcctgctgcaatgggagttggacatggtttcagattttgcaagttatttttcctgagtaggccttcaatatactttgtttgagttaaatacatccctgtttaatctcttactacttcaataccaaggaagtagtgtagtgccccaagatctttgagagtgaagtgagtattaagttgctggacaaacttgtggagattgatgtcgttgtttcctgtaacaataatatc

SEQ ID NO: 169277 - DNA, 581 bp, Cannabis sativa
ctttatgtttggggtacattttttgttcagtcccaactttaacatgtcttaattagtcttttttgagtattgctattaggaatgtgaatgtgttcaacacttgcattgtgagtagttagcgattaacgattatttataatgtttagcgccttaactttaaaagcttgtttgtttctcttacaaatgtttctatttctttatattgcattgtgagtagttagcgattaatgattatttgtgatgttcaatactgtaaaaatttgcttacttctcttacaaatgtatttatttcttttgttaaacgatctgttaatttagtggtctataactttgttaaagctgctattttattttctgatcgtcgtttcagtttggattccaactaatttgttaccttatttggtagcagaagtttctgattaataaaatttcttctattcaaaaaaactttaatttaatataaaatatagtaaagattaaattatatactacaataaatattattttttatttattattttactatttattaatgtaattaataactgttggaaatattgtgaatattttaacaaaatata

SEQ ID NO: 169278 - DNA, 940 bp, Cannabis sativa
  modified_base (870)..(873): a, c, t, g, unknown or other
gtagcctaggaattttcttgaagaaacagaaaaagaaaattttgtaggatttaatttcatgttataattttcaagtacctcaaaagcttgttgtagatgatcaagatggtcttgggaacctaaggatttgactagcatattgcctatgtagacttccattgtatcacccaacatattcacaaacatctgacttgcctttggtacgtggcccctgcattcttgaccccaaagagtaagaatttgtagcgaaagattcatcgtttagtgatgaatgttgtcttctcctggtcatttgaatgcatgaggatctgattgtatcctgagaaagcgtcaatgaaactaagtaactcgtggccagttgttgcatatattatcatgtctatgtgtggtgatgggaaagaatccttagggtacgccttatttagatcaataaagttgatatagacacaccacttaccattcttattttttaccataacaacgctagccaaccagtcggtgtagtctacttctctcacagatcctatgtctatcaacttttggatctctttgttgataaatcagttgtgttctggagcaaattttctccttttttgtttgaatggaggatggttagggtctacctgcaaattatgaacaataatgttatgattgatacctgtcatgtcctcgtgagaccacatgaagatatggtggtacttctttaggaactcgatgagtcaaacacggaacttaggtgttagctttgatcctatatggacaatatgttctagaaagtctttgatgatgcacacaccgccgagatcttccatttcaggctcggtgtgtaatgactgctttagtaatgtggattagaaaaggcaattagcnnnnatttttattattttattattttattattatttgtgaattaattttgaatgtggaccccaatatttag

SEQ ID NO: 169279 - DNA, 573 bp, Cannabis sativa
tttcgtctgcgatactatacaggagagaagagaccaaaaattgaggagccccacctggactagggagaagatctcaagttagccaaacttaaagaggtcgtcttgccaagccaacctaattaaacgaccacgtttggccgagtgcgatgtactcgcttaggatagacgcaaattctttaaagaaccacgtgctgctaactgcaatgtattcactcagtagagacgcgaatttctaagatggatggatgatcaagagtacatcctttgatatcctaggcagagttagattgccgtaatagagaggccagcgaactgatagggcattttaactagagaaccaatagaggaggctaggatctcattagagatccacttcatggaagacttattgatagataagggagggtctatcgacatgtcaatcaacccagttccttaggaactaggacagatattcccttgctagagggaggacaaactttcctcaaaggtcaaacgacaaaaactgccagatcacgacaacaaccggcatggccagttagggatctcaggctcaataacagccccatcgac

SEQ ID NO: 169280 - DNA, 669 bp, Cannabis sativa
atcaattgggtagctgacattttactggattctggtgagtgggaccttcataagctgaaatccttattagatgaggacacggttcgtgatattttgaagggggtatcccttctggttgtgaaaaaaatagttggatttggaccaaagaccattcgggagagttctctactaagtctgcttattcggtctaagcattttcccatgctcctgatcgtgttgtagcaccttttctctagaataagctgtggaaccccaaaggccttgagcgccacaagtatatgtggtggtgtatcctttttaatgctctcccggccatgcaattttggccaaaaaaaatacagattagtgacacgtgctgccctctttgtgaggtaggagtggaaacaactgaacatctatttctttattgtaactttgttgcccacctttggagatcttctctgtggggcttaatgccggtgattgattctggtgggaggatgtgggattgggtaaaaattttgtgggagttaattataagttctaaccacacttttagaaacacttttcaatttttaaccatcacttaatttttaacagtttaggtggcgtttggaaacacttttttaattagttttatgtttttaaaattaaaaaaagtaaaaatatttttcaaaaacatgttttata

SEQ ID NO: 169281 - DNA, 706 bp, Cannabis sativa
tctttttattattgtaagataccattagggagatcaagtatatgtagaaatgaaattggtttattttattttctgtcagtagttgaatttgtgaagaaggctataattttaacacatattggatggagtagaatcaatggtgcacaaagcatagaagtggtttcgtgctcgttttgttgatttgatttttatgtcaataatgtattccttcaaggcactaccaataaggatatttttatgtcagtcacaagactttattgataataatcattctaacacgaacaagctccttcagttttcgtgtagacacatttttattcaaaatttcatcgtcaagcacaaactaacaactcagtacaagaacaaagtaaacttctaattaggaatggcaaacgggttgggtcagcccgacccatccagttagcacccctgaaccggattgggttagactcgaactgattgttttgccttttttttaccacttttttaaaatgaggtcggtaatattaattttgattgaattaaaaaaaatgaaaagaatccaaaaatatatcttatccaagatcaatatcaatctaattcaacgtgtactccatacatccgatactggtaaactttgactatactttggagaagacataacacttatccaatgtgtaaatatactttatcgctgattatcatgtcagtataaatctagtgaact

SEQ ID NO: 169282 - DNA, 711 bp, Cannabis sativa
caacccattttagagtaaagtaagtaaaaacagagaacaaaaatatgagtcttattttcagttccaagaaaaatatagttcaattacagggaagaaaaagaagcgtcaaaggaaaaagctaattactttttttacattggaagttgtttaaaaatatttgttgtataaagtacgagtattcgtattgggtaccggtggtgtcaagcacctttaaacgtctcgttttaagctagcaatattttctaaaagctattatattaaactatatggaacctgatatttaattagaccaacaacaatattaatacgtgggtgggtggactgataggtggactgatgcgttttagcatttctaaagtactataccaccattaatctatgtgtagagactagagatagactgtaaaatgaaactaatccagtaaaggaaacacacgtcaatccaatccaagtacagtgatgatcaccatttcaatcactttccagtgtccttgccaggcaccacctactactaccagttacaacactacttgctatggcccatgttagcaacgtggtgatattttatagttgattaattattttctataatatttataattagagtaaaatatgtataatttgatattaaattacacgatattagatatcatatgggtgttaagtatcatgtcctttatcatttttcaagttaaattgtatgtttagcat

SEQ ID NO: 169283 - DNA, 1411 bp, Cannabis sativa
agtgcaactctaatccccaaacctcagcctaacctggagcttaaatcctaacctaacacaaactcagaccaggtcggggctctgatcgggacctaatcccgaaccctagactcgagtcagactcaaacctaaacacgactcaaatccaatcccattcctagccccaaacctcgcatgatctaagcctgaacctcagcctaatccaaagcccaatccccacccggtaaaatatgtgtttgtaattatttttttaataaaattttacttgatttataatagtcaaaatctagaagacaaaattaataatgtttaacatcagtgtcaaaaatgttacatcactattctattatctacataagactaaagctaacataaacaccatgtttcagcaacaagaatagtttagaagaattttaagattgagaaaaagttaggtgtaaaaattgtatttgttattttatttttatttatgtaaatatatgtgaacaactatggtatccacacaaaaaataattaacgaaaggtataatctaattgagacaagtataacacacatatatattatatatatatattgcatatttgataagaatcactttaagaattcacagtgtagacctcaacaatcattgcaggcacctcttcaaaccaggatagcttattgtctagcctaagagcatactcagccaatccatgagctgcagagttattattgcgagccacatgtgacaaagttgcctctagaaattttgacaataaaactataatatcagcaaataaaaacccaactcattgaaatacttttttctccttattaatagccatcaccaatgataaagagtctgaacacactgcttgaacatggatcccacaaaagtgagcccaattaaggccaactagcaaaactaacgctttaaactataaaatagaaatcccccctgtacaaacaaaaacaaaaaattgatatcaagttagataacaaaaatactttaaaaattacaacatacaataggaaataaaccaattacaaaggtcctaaaataaatttaatcttcaaaaaaatcattctactcctacacagaagattaattactgttgactgagatttttggcaactagcttaatatatgaatatcgataataaagtgtgtttaacagaagatatttttacatagttcaggcgttaatgagccttagtccacgagtcacttctattggcattgaaggttacaaaaatggtagatttcctacagagtttgacattgttctagcttgatctaaaattcttggatcctttttacagtgtacatgttaccctatttataggaaaatatatgtgggatttttggaaaacaaaggctcatgaggttccatctcaaaactaatggtaatgagtggagtagctcatgtt

SEQ ID NO: 169284 - DNA, 593 bp, Cannabis sativa
  modified_base (399)..(411): a, c, t, g, unknown or other
atgatggattaatgaatacatgcacatgcaaataaaaaataatattgtaaatgtcacgaactatgggcagccacaactcaaatgtcacaaaattcaacagccttataaatagtaggtgtatctttttcttgtattttccatttttccatctatatttggttattagatttgtttggtttggcacgacttactattttaagcccagccagctcaagggttagcaaaaataggtaattgattatagacctaggcttcttcttaagccaagagaaatgctaacgctgtcaacatcatttgtaatataactattgggtatcactggtgcctaacacctttaattgggtattagtggtgcctagcacccttaagacgtgtcgctttgcgattggctagcgatannnnnnnnnnnnnattatattaaactatatgtgacccgatattaaattagatcaatagcgatataaacacgtaagatggtgcttggcactagtatcttttagcatttctctataaatatttttatgaggaatgtaacaaatatttttacaatacacggcttatttaacataaaaaatatatatatatatacttat

SEQ ID NO: 169285 - DNA, 651 bp, Cannabis sativa
taatataatatattgattaaatattttatgtgtaataaattaataagtgtgtgtatgatttaaaaaaaaaattgtgtacatgtcaatttatatttagttgtcatcacttttattatgtccttttcgatgatattagttgtcaaaatatttttaatttattgtaaataacttttgagaataaaatatacgaatacatgccacactagttaagaatatttcagtttatccattcctcattctaaggtagcttcatttttatattacggggaatgttataaaccaatctcatttgagctaggagtagaactgacaatatagagtagtcgggattaatgggtaaaatactttgggatttacttagaaaatttggtctatcatcctcattcactaattgggctaaggcataacctattactgggactttctcttcgtccaccgctaacccaattgcatcatgatcatctatatcctgaccatagtactcctctgcagcagcaacaagaacgagagacgaggcatccgaaacctctctatcaaaatcaccatccatgtacataaagaccacaccagtcaacaccactattgttatggattttccaacacgcaagcaagtatatgtatcgttcataagtaatagactcacaagagtga

SEQ ID NO: 169286 - DNA, 1420 bp, Cannabis sativa
ccaagaatcaagtcaaaaatctatgtgatacccaataattctcccaaaccaggtacacgatttttgatggctacaacatgcttttccccatccaaaccaaagtgtcttggtgcaatgaggtttgggagagattcaatacccccaaacatagcttcattctctggttagcagtgcagaaccggctcaaaaccagggatagattgcagagattcaatttggtatctgatactgtatgtagcctctttttgcaacaggatgagtcaagtgggcatctctttttcaagtgtacatactcccattactgtcttctacagataaaggagtggcttgcctggaaagcccgagcatcagacctatcccagttcctcaaatggatacacaaagctaggatcagcgagtttaaaaagaagacattggtagttgttgctgctcatcttgtttacttcatatggcatgtaaggaatgaccaaatattgaacgaccatacagaaaatagatatgtaattgtacaaagaaattaaaaatagtgtcaaacatagagtagaattgttttggccaaaatagattggtcaacaagatagagaatgctttcaaaacttgtgaaaaagatgttcttgaggtcctttgtcaaaaagatgctctttctttgtaaaagattgtaaataatttgtggaataataataataaacttcctgattaataaaaaaaaaataacatggcagcgactccatttgatttaatacatttagacatatggggaccatttcatacagtaagtattgaggggtatagatactttctcactattattgatgatcacataatgttcacttgggtttatatgctcaaaagcaaagctgatgctgaaaaatcttaccacatttttatgctcttatattaaacaaattttttgcctctataaaaggcatcagatgtggcaatgcaaaggaactacccttacagtctttctttgcaagaaaaggtatcacactacatcattcttgtgttgagagaccccaacaaaatttcgtagtttaacgtaagcatcaagacaaattaaatgttacgcgagcacttgccttctagtcacgtttatctctcacatattggagttattttatacatacgtaagcatcaacacaaattgaacttttatttgataaaattttacacaatattttacttttttttccctttttaaattattattatgttttcttctcttagcactctatattaaacactatttatttttaacttatatatgacgtttgaaaataaaaatacaaaacttaaaataaaactaagtatacgtccaaagcacgtaacaataacctagtatagatatatagaatacttctcaataggtattacccattgatggttactaaaaaattttacttataaatattaattttaa

SEQ ID NO: 169287 - DNA, 577 bp, Cannabis sativa
aaaaaaaaaaaaaaaagtaagtttcattttaaaataaatttgagatcttgctgatggctaataaaacccttcgaacgggctaaattgggaagtatatgctaaaacccctaaaacctttgttggaagttgcaaaatccttcctttgcgaggtctgagtttctggttctctcaagtagtaattcccctcccccacattactctttgctctgtttggtgctcgagaaactgcgaagcaaccttattgtacaagtataacctagattaaaggtaagcaattccagttcttatttcaattgtttgtctgttaaattacaaaatgaataaactttatgaattacaaattttggtagtaatttataactgttttccaggaaaattgttgaccttttcttcaatttggaaaagcgaaattgggttattgatttgggtagagtatagccagagccatgcagtcagccagtcagtttatgtttgtcatgttatctttaacagtttatacaactattatacatatagggacatgattttgtctcgtgattgtactttcacagaatgtattctgtgatgtacggcagcc

SEQ ID NO: 169288 - DNA, 837 bp, Cannabis sativa
  modified_base (752)..(753): a, c, t, g, unknown or other
tccatatttgcatatttgtctttaaacttgtagagagcaatttgtgattttatttcggtggctgcatctattattatttagattgcctacgtacccttggtgggatcaagcctttcgtagttcgtaataacactttgagttttttttgtgcttctttattccatgctcaagctttatgcttccaaatacattttagcttcttgctttgcgtcatggctttttgcctctagttctcgctttctgctttgaactttgagctttttgctgctctctttttctttgagctttcacttttttttttgttgggctttcctttttgctttgcccaactttttcttgagcattagcctttttgcacgttgctcaattttttctaagcttttgctttctacggtgctctattttccttgagcgttagtttttttttttgtgctcaatttttcctaagctttagctttttgctttgcttattttttttcgagcgtttgcttttgtctttgctctcaatctttctaagctttagctttctgctatgcttaatttttttttgagcattttctttttttcttatctctatatttttttttttttttgagcattcgctttttgcttgctatatttctttcttgagcgttagctttttttttttttgctatgctcaattttttttttttaggttgcaacgagtgacaacctttctcctcatttaaaaggaaaacctatccttagttaaagacacaatgtcacaatgnnctttttgaaattgagactctatttggatctctttcggtagtattttagctttttctttgtctttgtcatattttacaaagatag

SEQ ID NO: 169289 - DNA, 1225 bp, Cannabis sativa
tattggcaagcttgacaatttaagctacttagatgtctcctcaaatcgtcttactggatatatctctcatgtagtaaatctacaatgcccgagcttgaagtacctagatatttcttataatatagatatgttattgaaattcgactcaaaatatcctatcatcccctcatttaatttggcgaccataaatttggcttcttgcaagttaggtcctgaacttcctaattggctcctaacccaaacaaatctcaaacatctagacgtgtctaattcaagtatttctggtcctcttcctaattggttcccaaatataactttcaacttgaaatatttaaatatgtctcacaaccttcttagcaacaccttggccaatttttcactttcacaagaaaataatgtaatagttgacttaagttcgaaccagttccaaggttctgtcccaccttctcttcttgttaacacaacccgcttgtatctttccaataacaagttcactgaattcagttcttccctatgtgaagcaaaagagcaggccaggtcaacagaaatacttgacctctctaataacaatttatttgacaatattcctaattgttgggagaatttcacacaattggttgtacttaatttaggatacaataagttatctggaaatatccctaactctattaatatgacaagtattaaaactttacaattgaggcacaataacttctcaggaaagtttccttcatcgttgaaatattgcacttcacttgaagttctagatttggggagcaacagtttggaaggttcaataccctcatggattggagaagaactaaacaacttagtttttctcagttttaagtcaaataagttttatggaagtatcccattgagtctttgtcagcttactcaaatacaaatattagatttctcttctaatgatttatcaggacccattccttcttgtattaaaaatttcactgcaatggttcaaataaattcttcagagacgaccatctcttcagacatagaaaaagattatagaaaatcttgtaatcgtgcttgtaatcttgattccatttcttatgaaaataatgcatcaatcacatggaaaggggcacaacatgagtatgtgaagattttgggattactaagagttattgacttatcaagtaacaaattgaatggagagattcctatggaagtgactcatctctctcagttgggtgcactaaat

SEQ ID NO: 169290 - DNA, 986 bp, Cannabis sativa
cgattcaagtatctgatctagcaggacggagcgggcggatctttacatgatttgaatcaagtcggatcatagccagatcagatccaacccgatccatttacactcctatgagtaatattatgatacacatacacaacattatatgatccaactgtagttcatgtcatgagtcttgttgacaaggttaaaattcttgatgattcttgtcgattgctgatcatcctatggagaagagtgacctcataatgcatctcttgaacgaattgggtcctgaatatgatccaattgtagttcatgtcatgagtcttgttgataatctttcatttgactcaatccaatctttgcttctcactcatgagagtcacctagaatgtcattacactattagggctccttcgtcgaccatgactgtaaatctctctattgggtcatcaagatttgggtctggttcttctactggttgtccctctggccatggtggatgtggatatggttttggctatcccaattgttcatcaaattgtggaagtgggtatggtggtcaaggcagtggaaactctcgacctctttgtcaagtctgttataagattggtcacacaacagtagtgtatcactacaggtttgacaagtcatttgtccctcccaagattggcgagtctcaagaattcttgactgggtgtaaaacgatgattagttcaactactcgcccaatacaatccttgattttgctcatgatcaagattggtatgcctatataggggcgaattaacatgtggctaaaggcatggagcaccttgactatgaggccccttaccatgaacatgagtctcttgctttaggaaacgggaagtaactcaatatttctcacattgataactcttccttacctaggggtgttcattggatcacatccaatggattttgacccatccaatccaatccaattatttattggatattggatttttccatccgatccaatccaa

SEQ ID NO: 169291 - DNA, 790 bp, Cannabis sativa
acttggagttgtcatcaccataacgaagccaattgattttgctaagttgttgcatatagttggcatatcttttatgggctgtttcaaattgctccttagacgcttgttcttcagcatgcaaggtgatatttgtaggattactagcaagacacatctgggtagtattgtaatcatctttggctaattgatagatctgggtaatatcgccaaattcctccatgctaaagcccttaagacagtgtttcagtctattgagtttgcacatgattttgctgaggtctttgcccatcattcttttactccagttagccatcacagtatctttgaagctagggtgatccatccaaaagttgcaaccgtttacaacccattttgcctatttctaacttcttgataacacaatagttgtggtctgagcaagtgtcccaactataaactccctcgatgttggggaagagatcgaaccaactttcattcttgaagactctatcaagtttagaaaaaaatcctatcacactgttcatgtttgttagaccaagtaaaattggaaccgttgcattttaaagcatcaacctatccctaagagagccaattttgagcatccgcaacttctgaatgagccactgctttacccccaactctgtcctccatattgaacatagcattaaaatctcccaagatcaaccaaaaaatctttaaatgcccaaaaccacttagagagtcccataatgatctcctttcaccaacaatattcaaaccatacacagcagtgagaataaatatagaattc

SEQ ID NO: 169292 - DNA, 563 bp, Cannabis sativa
  modified_base (508)..(526): a, c, t, g, unknown or other
caaaccttcaaaactcaaaggaaataagttttagagcttacctcagcttctcctttccaaaagctttaagctaaaccttgaattcccaggaacaatcatcaaaaagagtagaatgaatccttggttccatggctgatagaaggaaacgagagagagagagagaaagttagaaattgggttttctcttgaattttctatttacataaattaaaagtaataaaatattgtattattgttcttttacttagaagaaggccacctgccacctattcttcttatgtaaattatcaaaatgcccttttattagaacttaagccattaataggcctagaggtaaaatagtctaaaactataatcctacctaaccttggtattctaaatatccaaaatgtttatcccactaaaaaaataggttctaaacttacccttgtgactcaaacaaccatccatcgtattttctgtcgtcccgagcaaaaatcatagaaattacataattcatatttagcannnnnnnnnnnnnnnnnnnttaataaaatctctagaattgaaaaattataactcta

SEQ ID NO: 169293 - DNA, 566 bp, Cannabis sativa
cgtagattttagttcttgtatatttccttcgccggtgatggttgcgtctcttgtttggtttctctcaccaaacgattgggtcaagatcaactgtgacattaaagttagtaataacttaatgtgcgtggtagctttggctagagatcacaaggaatcgattttgtgggtggctagcaacatcctcaacttctttgaccctttggaatcagcggcctgtttgttagtcttggaatcagcgaccctttggaagcatttgtttgtgataatagagagtaattctgagacagtgatcaacacgttgaaggaaacttcttccatttggggtattagtaagtatgtgcttcaatgtaaaattctctattgattagttgtaatttttcgtttatatctagactttataatttcacgacccataatgtggttaagtgagcttttactaataatgtaactggtatgatccatccgtccttcatacttaataatttattatgtaacgaacatcaggtctaactctatttggctttaatatatttacgcattttattaaaaaaaaaaaaacataccat

SEQ ID NO: 169294 - DNA, 714 bp, Cannabis sativa
ttgaatctgttaaaatttgaagagaattatgaatagatttatttatttattttagtataatgctatatatgaatatgtaattattccatcacgcatatatataaattaaatttcagaaactgcagattgtttttataattaaattcgagatcaatgtatgagcatattaatactttcagacttaaaataatttatgcgggtttgagattcttatttttctgatccgttgagttctagtattaatgaagcttttgtgttttgtttttacatttagtttctgcttcatatcactgtcacattaataatagttttttggtgttctagcgttgctcttgtacatctcatggtaggtttgttgttgctcttcgttttagcccgtgtacagtataaaagagaatataaaaacaagacgatataaaagtattttttcccagtataaatgtatttcttagcctattatacaatgtatacctaactttcccttaaaatatttatcagaacaaacccactgtaaccataaggctatgtttggtgggagagagggagagtaggatggatggagagtttagagaggatgtggagtaagagggatggagatgattgttaatctcctttatattgtttggtattaggtgtgaggtgagaagtattgagaaaaaattgattagtaaaattacaaaattgtcattttaaaaataaaattttattattttt

SEQ ID NO: 169295 - DNA, 631 bp, Cannabis sativa
  modified_base (576)..(604): a, c, t, g, unknown or other
cttttaggtacgagtagtacctagcatgtccaatgttgaacaccatccttataaatgttagcgatatttgtaataattattaaattgaattatgtgattcaatacttaattatactaatgatgatacaatactttaagtaatatcacgtaccactaatactttttagcatttttcataattactaattatccttaattaaaaacaagatatgacatatttctctttttatcttaataaatatttcaaatttagtactccactaggacttgtatatatatttgacataccaattccatatattttgaaatatatatattaatttcatttaaaagttgaaattttgattattaaaatagaaattttgctacaatgtaagtgacataacaataagaactggttaagatacaattataaagataaatgctaaatgacataacaataagaactggttaagatacaattataaagataaatgctaaatgacatcagaagtactactaggagagttatattactatttatataattaaaataatggatcttaaatatttttatttagggctcgtttggaacgnnnnnnnnnnnnnnnnnnnnnnnnnnnnnattatattgaattgtattttatgcaat

SEQ ID NO: 169296 - DNA, 590 bp, Cannabis sativa
gaggtggaggagaccggcttaccttcgaacaagggcaaggggaagggaaaattatagcatgtaaatctgcataggaagaacaaatatagttaattcacatcaacagtatatttattatgtactttgtcatttcaatctaatttgttttatgatcgtgtatgtatattgtaattatttaggagtgctcaaattgttttctttcctaagtaaacttaatatattttcaaatggtacattttaaatttttttaaaaaaatatttatagttttggaaatttatgttgaacattaaggcaacttttttataatggtattatacattgtaactatttagaataatttataatttttagaaaattctgaataatttatatggtcaaaaataaggtttaactagttatttattaagtatgtaagaaaaaatagttgtacgtacaataaaatatttaaactttacttttaacattataaactacttgaaatttttttaaaaatttatatgtgattctaaataattataaaatacactttcatgagaagatttaagactaaaaaattctcttaaataccaaaatagataaaaaaaaaaaa

SEQ ID NO: 169297 - DNA, 1108 bp, Cannabis sativa
  modified_base (591)..(595): a, c, t, g, unknown or other
  modified_base (745)..(748): a, c, t, g, unknown or other
attcaattaataagtatgatgtcgtcctgccaacaaattataagactagacgtaaaagaatttaggggctaattattattatttatttgaaatgtaaaattatgtaatatgttaagcacacaaaaaagttgcaattaatatttttattcaatatcttctctttttctttttgaggtttttctgactgatttctcttgatttttttaatgagataaattagcattctgaaataaattagcattgaaataaattagcattctgaatacaaaatattctaaagtttaggagaaattgggaaattagagatgctacaaccagcataaaataaagactatctagcaacataatgtgcaacacgatttgctgtttgtttaataaaatataaatggacattaggcaaagataataaaaggacacgacagtttcttgaaattttaatttggttgttttttctaaaaaaaatacaattaatagtatatatatctttaaaaagttaattaggatttttaccccctaaactttaacatgtaccaaatcatgtcccttggacttttttaaccgttaaaaattccctctgaactattgagattnnnnnatttaaggacttttgtttaatttcattcaattttactatttcaatgattgtttatatactaaaccatactcctcaaactttgatatctaccaaatcatacccatcgaactttgacatatactaaattatgccccctgaactttcatccannnnagactttttttactaaaattagataaaagtctttaaatccaaaaatctcaatagttcaggggatatttttaacgactttaaaagttcaggggatgatttggtacatgtcaaagttcaggaggtaaaaatcctaattaatctttttaaaaacaattcatgctcattattttctttttgacaaaaaatcatgctgatatatattttttttttttttcaaaaaaaatcatgctgatattttaattagtaattaattggtattttatattttattaaaatataaattgtgattacctaatatttattatttaaattataatactattttttttttttatgaaaacaaaataacaacttcattaa

SEQ ID NO: 169298 - DNA, 783 bp, Cannabis sativa
  modified_base (734)..(741): a, c, t, g, unknown or other
gggtgtggaggataaaattatgtggcattactctaagaatggggagtatacggtgtgtagtggagatcggttggcccatgatatgcgagaggtttctcatcaatcaaatgataaggagaaggaacggtggtggaagtctatgtggaaatcgaaggtgccgccaaaagttaagcattttgtttggaaggtatgtcattcgtggcttccaacgaattatgctttgtctaagcgaggcatttcggtggtgcctacatgtccacgatgtaagggaggatggctagaggagggtgctcatgtcttgtgggattgttcatggagtaaggaggtgtggaaaacatgtggtttatgggatcaagtggttaaggttagatcaagtgatgtgttgttagttctccaacagcttcaaaaggtttgttctccttccacctttgattttattcttgttgtttcatggcacctgtggtcggttaggaataagtatgttcatgggggttatcctcctaaggcgggagatattgtggagtggtatgggaagtacgttcaggaatttcagcaaggtgttgggcgatctaaagggggagggactcggcaaaagcaacgatgggagctgcctgctgttgggtgctttgcggtgaatgttgatgcggggttttctttacaagaggcaggggcgtctatgttggaaattattttaccaggatcttagatctcctcacaagtatgtttattaacannnnnnnnatgaacttctaaaacgattatgaagtaaacacatataaagta

SEQ ID NO: 169299 - DNA, 1074 bp, Cannabis sativa
tctctctctctttctctctctattttttaagtttaataatttgattttaattatactcactatatatatagtgctcaatcacttcggatgttgaacatggaagatgcatatttttggaacgatgtaaccatatttgaaacaagtgtagctgagaaactctcatgtttggttcatttgaatataagttgtgtcaatataaaaccctcagctattagggcaattggaaatcactgcaagaatctagaaagattggatagggcgtttgttccagttactaagagtgttggtagagatgaagaggcttttgctatagcatccacaataatgctgaagctaaaacatctaaacatttctcatacgggcgctactactaaaggtgtactcaaaattctcaatagttgccctcaacttcagtacttagacatttctgaatgttgtgatgatatcaaagactctctacatttgttcgacagttttaggccttgtttgaagattgttgccaatttcatcgaccataaggcgttcgctatggaactcgaactcgaagatgatgatgacgatgatgaacctacttccattgatctgaattatgctttgaaagtcttggaagaagttacatcgaaatggaattgacttgacacagatttgtactggcatgctattgtatttgtgcatgttatatcttaattaattagtttggttttatcaatatttgggttttgagataaaattccattattctcaattgattgttagtgttgttaaaatgtgtgattttatattatattcagcatctaatattcttctcaattccttttgagataaaattccattattctcaatatgatatcaaagctatatcttttgcgcgcaagtattcgatttgcacctataaagatagtgaccatgtccactctgatacagttcaagattggtgagcaaaaaatagccatcatcttaagggggaatattgtgaatattgttccacatggaataaatgacaaagtattgagccatatataagaatatgggctactccactcattgtcaattaattttgagatggaatcccat

SEQ ID NO: 169300 - DNA, 772 bp, Cannabis sativa
tgtcaccaccaccaccatccacaaaatcaaccacccaccacaaccgaaaccaccaccaccatcaccactcgtctcgatcttagatcttaatccaagatcttacaaagataaataaaaaaaaccaaatctaatctagagaagaaaaatatcagatccaaaagaaagagtgaaaatctcagatttagaacttggaaaacttcagacctggaggcttcgagaactcaaaaacctcatggtgaggtcatttccctctgacggtggcctaaacagagcaggccgagcggttgagcaacttttacattcgcacgggacagagaaaggtcggagatgtattgttagtggtcggagatgcgtccttcgtggctgaagatgtttgtggccaactagatgcatcgtttatggtcgatgttgggctcgccaacgtcgatgtacaactgggctgacttgggcagaggcaactttctcttctcgttcagtctctcgcccgatctacccatattgttttttaatttattttttttgtgtttgaatttgagattgagattgattatgaatttttgttattatttttagtatttttaatctgaaatatgtgaaacatttcagatgtaagtttatttttttagatatgggtttgtttaattatattttgatttcgatttgaaatcttgacaggtggtgatgatggtggtagtttcgattgtgtggtgggtggtgatttttgtggatagtggtggtggtggtaggtttgatgaagatgaagaagaagaag

SEQ ID NO: 169301 - DNA, 1189 bp, Cannabis sativa
gtaaaggcttacaaaaccatgagtcgagcttttctctcacaataatcgtacatgtcttgacgatcttcatatgacaaatctagcaactctgataccaaaaattgtaatgccttgatacttaggcgcgctacagtgattttctaattaacttgccacctttgctaatcaaagggttttcctcgaaaatcatgccaaattaaaactttgactaaaattattaaactttataaacatatatatatttacataaccaggatcctaagtttaaacttttacaatcatatccaaaatattttcacaaaaatgtcgcattgtgactacaaaatactatccaagatgtcctgagaccgaacactccaggtcgcaccgtcgcgacatgtacaatcatcatccaggctcaaaactcactcctgttcagccttcgcctttcctttacctacacataaaagtagcatctgcgagtcaacaaactcagtaagaaaaacatataacaaataatatattaccgacttgtatctagacgcccatacacatatcaacaaggttgattagataagtaagaacattcttatctaatcacattaattactaaataagtaaaggcttgctgaatcgtgaatcgagcttttctttgataatgattgtacatgtcttgacgatcttcagatgacaaacctggcggctctgatacttaggcgtgctacagtaattttctaattaacttgccacatttgctaatcaaagggtttttctcgaaaatcatgccaaataaaaactttgactaaaattataaaactttataaacatataaatatttacataaccaggatcctcaatttaaacttttacaaacatatctaaaatatttttacacaaatgtcgcacagtgactacaaattactatccaagatgtcctaagaccgaacactctaggttgcgctttcctaacatttacaatcatcatccagcgtaaagaccgcttaactttaatttggaaattagcagatacttagggtctaattaggaaacttgtatattacttatgaatttttcagtttacggggatttatttaaactcagaatgcatttgatatatcatatattaatttttatttttgcatgttttgtgcccgacaatattggaacgcggtgtttggctattagaatcatattttagtatttttagtat

SEQ ID NO: 169302 - DNA, 677 bp, Cannabis sativa
  modified_base (634)..(645): a, c, t, g, unknown or other
taggatcaaacattcaccgttaattttttgggggggttcgaaagagggcttttttctctgaaaaactcaagcaactcaaaaatggccaaaagtgtttattagaaaacatgttgagtattaataagaaaagagacaatttgtttgcttcggatctaagggcttggattgagtctaagaaaacacaaatctcctaaatctaacggtccaggaatgtgaaaggaagtcatttaatggtttcactaaaattgtagggactaaccttaatgatggcatgcgcatcgaggaacatagtaatataataagccattaatcctaaactagagacagcacgtactctaaaaaatcgtgttattcacacacatcagtagtcagtcgacatgtggaccacattaatagaatatcaaaggttgggacatctttgcatcatcttacatcaaaatattaagaggttatcctagttcgtggtcccaagaatgatcttcaacccgcatggagcaccaagccttcgcgactctcgagcctcgaaggcttaaatattatccacgttttcggatagctataaagtgggccactacaaaagcccaacaaggagatgaggctcattcaacaggtcctaattgttgggttttatgcnnnnnnnnnnnntccatttcaatgtaatccattttattcaacat

SEQ ID NO: 169303 - DNA, 615 bp, Cannabis sativa
agctcgacatgccctttcctcatttaagttcagtagactctctttatgtaggtcttcaccattcctctttctaacacccatctttatttcctcctctgtatcaatgtttcttggcattgttgtcttagatgttgcagcacatggatggataatagaggtgattagttgaggttttgtattgcttaaatttaattgttcataattgttaatgacaggatttttagggatagtacctgtaggtaatcttctttggggaatggtggtctctcgatccatggtgtttatttccatggaatgtgcggattggatagaattgtcctctacatctgttgaatggtgtgttttgttagcctcctccctttccttattttcgtttcttcctgttaagtccacccttagccaagaaccgaaagcttgagaaagtttcccatcttcctttgtcacggtagcccgagtcatagaacattgtttcatttcgtggccaattaatccatagttaaaacacatgtatgggagcctatcatattgaaattgcaaccaaatccgccttttttcatgtggaaaaagatacccaggaaaaatcttggattgaatggagctcctcactttgaattt

SEQ ID NO: 169304 - DNA, 1023 bp, Cannabis sativa
gacgctcttccgatcttgtggttattcaggcttcttgttgtaaccgacaaatacctgagatgcttgggaacagaggtctggcaacagcctaaaccagaacacgaggtttgggccgacaagtttacatttttgttgcagatggagatgcaccctctcccgaaattatcttgtgaagcgttcatgaaggccagcgtgtcgcaaccaaaagcaaagagcttgttctcagaatctgagaacgtgaaggacttactcaaacgtatccagggtgagtttccaccaattaagttaccattcttacggtaacagtcgtaggagtagaaattcttaacattcatggtggcatttttcacatcgatgctgctaacttctatgcctccatacattagtttaggagaaccagtagaagtgttgcatttgagcaagaagttctcatcaatatctttactaatggcgcagttttcgtcgtcgattccgaaggggtatgggacctcaacatctccacattttttctcacaattgggcgactttaccatagtaagacctgctgctactgatgatattgatgcccgtaacaacaccaaaaagaggcagcaccacaagtaattattcttcttcagtacttccattaataataataataataaatgatttattatgtagcataagatttcttttttcttgtgttatatatagtactccagttctatcttcctttactaaaattttttatataatatactaataatttaaaagaaaaattacataaatttcatatttacttttgaattttctgtgatatggaaaaattttcatttttacttttttttttatttacaaaaatatttttagtaaaaataatttattgtttttctagtttttatataattatttataattgtcgtgtgattatttttctgcttgtttttacttcttttatagtttatttatagttattgtgaaattaatttcttgttgtttcttatttatttattttttcacttttattgagcaaaatatattttt

SEQ ID NO: 169305 - DNA, 794 bp, Cannabis sativa
cttaaataattaaaatatatatattatcacgagaaaaatagactaaaactgttttttagatgctgaaataaataaaaaatttattagaaggaaactttaagagaacctcctacataaatttcctatatatcatccaagacaaatactaaatttatgtcattaaattcagaaacatatactatatgaatagtatatagtttgcattattattatatatgttgcataaattgcattatgtttatgaactttcccccattcaatcaaacaagatcaccaactcatttataacatctcactctctctatatatatatacatatataaatataaatatatcatatatgtagggctatttgattgcttagtttgagcaaatctaattattagaggattgtttttactaaaaatgagtttcattataaaaggattgtgtgttatgatctatatattctggaaaaagttaattatatatgtatatggtctatatatacagttgtattatatgatatatttatatatatatatatgcatggcccatataatgtgtcatgtttgtgaagcaattaatatttattatagagatcagtgggggatcaaatatcaattcaactcgtgtttttctgtctattataagccagttgttagagtgtatatagtactatatatatataaatatatttgatgtgttgatatatatgcatatttataaagttgataataactcaagtcaatcaatgttttaattttgacagaaaaaaaaaaaaaaaacacaatattttttaaaattttatttat

SEQ ID NO: 169306 - DNA, 619 bp, Cannabis sativa
atgacaaagtatggaatggaaaaaatgaagatataaatagagtaagttgtacagtcaaagaaatggttaagctagaatttatagtgtttggccgagaaaggttgggttaaatgacttggctattggttcaaaaatttatagttgtaaaattaatttttgacaatagatgtaaactgtaaaaaacaagaaattaatatgtgaggtcccattgtggggatgatctttgattgtaaattggatattattggagtaatgaaactaaagttgattcatatcaaaaaagaaataataaataaataaatatttattgtttttataaaatttgtatataatttaaaatttaaatattcataaccttttttttttggttgaaaattttattcaactacaccaacttaacctcaacaatgtcagcaatatataaagggagattagactctaaaaaatatagagcaatttgcggcaaaatacccttatgttttaatttttatacacttaaccctcttatcttttttttttttgtagcgaaatccccttatgtttttatttttatacacttaaccctcttatctttttttttggtagcataacccccttatgttttaatttttatacactt

SEQ ID NO: 169307 - DNA, 575 bp, Cannabis sativa
ttgatatatctcttcatcttcatcatcgtcttatttctaggtttactttatattttctagccacgaagttagttaacgagttctcaccgtcaacaatggccatcaatgtggcatgtcgaggtcgttccccaacagtcaaagctaattctatcatcctctctggttgaattaagtcactggtgaacgcatatatcagtgaggcacagggttttagatccttaagtcctagtcccatcttttttatggctgtgaagtataggatatccactgaactcccattatcaaccaaagtttggtgcaccctggtgttggccatctgaactataagcaccaatgggtcattgtgcgagaaatgcactcctcttgcatcttcctctgtgaaagtgactaagtcactttctcccttgaaactcttcagaggtctattctaagctccagacctggggctctcgccttgcctctcaagtgtacttgtctttccccttgcaagtgtcccctcctatgccaggtcctcctatgatagttctgttgggttttgtgccctaaataaaacacattttaatataatcagattt

SEQ ID NO: 169308 - DNA, 756 bp, Cannabis sativa
  modified_base (695)..(697): a, c, t, g, unknown or other
cctaagtcctgtttgggcccggggttcgagtcccaagtttgggtcccaagtttggtctaggtctaaatcgggtcccaagtccgggtcggttttaggtctccgatttgtgtccagggtccgagtccaggttagatatcgagttctggtctgagtccaggtccgagtcgaagattggggttgatctcagatcctgtgtaaaaattataatacaagttaatacatactatttcttatatattaaataatacaacttacattgtattaaaaaaattcatcataacaattaatacaatccattaatttatccaaatataatattacttatttatttaatataatataacccttatacgacctactaaatgagacctttataatttgtttatctattgattcaggaaatcccactatttcatcacttcatggtttattgacgctatctctcaacctttatttaactgcctacttagtgatcccacagttcctcgatcacatgatcttatagagatggattctatcatttgctatattttttatgcttatttatactccaattatttactcttctaaccacaatatttctatctttttctcgagataaagttttgtactcacttcatcaatggatccttctcatatttcacctaatctccctgtagctcacttctccttggagtatacattggaagggaccnnnattgatcttagataagatatcataaacttaccgttaaatctttctaagtcaatatcaat

SEQ ID NO: 169309 - DNA, 689 bp, Cannabis sativa
cagtgaaaatgcctgcacgtgccccgaagggttctgatgacatggcacctcaaaggaatacaataataattacagccgtcatttcgaaatcttcgacaagacaaccaagagtcaccatctcgtgacaaccactcgcctgcctctctctcatagtttccctcatgacatggctatcaatcgtgaaactaggggcatgtgttatagtgtgaatttttcacctagaaactcgagatcaggctcccatgagaatgatgcgtggtctcacatccctcgaggattctgagctataagaaatgacctctcaagaataaacctcacctgaaccaaactcagggagatgatgtgaccttgacagagtttagtcgtattattacgtctcgcttgatgtaggaccaagaatgacatgttcaagactagcatatcccaagatatgtgcgatgtctatgaagacttctcctgcaacttagtaaagatcgactctttatttagcaagttggtctgaatgacctaacgcgctcaatgacctgataaagactcgcatgtcctgagttattgatgctaacaaggtatctgtatacgcgactcgatttggacgcagataccttaacacaagactcattagtcttgtgttaacaggaacacaccctaagcctgcgagcttatgctagtatatgaatagacaactcgca

SEQ ID NO: 169310 - DNA, 743 bp, Cannabis sativa
aatattcctgagagagtctccaaccactacagtttggggaaggagggcaaccctcttggcaccaacgactgcttttcctttggctttttcagaagctcttgggctaatcccctccatggcagtgccctcgctactacaatcactagttgttaccgtagcatgctgggtagcagcaaatggtaagtcacaaaggacagcagagggaaagccatcatggttcaacggcgaaccatcatgtgaggcaccaatagaactattgccatgatcaactcccagagagccaatctcagcaacattaccatgagatacatcaccaaaagatccagagccaatgtcctcggtggtaaggaattggctcacagcagcagcaagagattgatccacattctcctgctgaacaggaagttcatccagagggaaggaatttgaaagatcaaaggggttccttttgaaagttgatttggcaggtgctttaaggggtattttgtaagggagagatggtgggaaagcacgatcatcacatttttgaagataggtaatacactttgtaagtgtatgatcaaacataccacagtgataacagatatttggcaaattctcatatttgaaagtgagccatttctcacgatgaacactcttgaaatcaacaaggatgccacgagtaatgggtttagaaatatcaatgagaacacgaaccctaagaaaaagtccagagacttttaagagtgtgagcttgtcaacct

SEQ ID NO: 169311 - DNA, 722 bp, Cannabis sativa
tttattaaaaattatattgtgacaaaaaaattatcactctaatttttttttaatagtgataagtatatatatattaatattaattattaataaaacatgcattaattaatgtttgtgttaattggtatattgtttgaaggtatgatgtggccctttcagttaatactggtggagtttttaacattttgagctttgcaaacaagtgtatcaaattgaaaatgctacttcatgtctcaactggtaattatatttttttacctaatttcatcaatttatatatatagattcactactactactacttacattacatacatttatgtatataattatttataaggtgttggaacccttaataagagcattactacttaacattttaattaaggtatctaagattatattataattaattagttatcgattttttatattatttattaaaaaaaatgtgagatctaatattaatattattttaagataatttgtttgacaaaaataataaatattaattggggttgcagcttatgtatgcggtgaaagagagggagtgatagaagagaaaggttttaagtttggtgattattatgatttggaaaaacatcttgtggcacaaaaattgtaccaacttcaacaacaacaaatttcaaccacaatgaaacaatttggcattcaaaggtaataattaattcattattaattaattaattaatttattaatt

SEQ ID NO: 169312 - DNA, 943 bp, Cannabis sativa
atccagactgaaattcttgccaacccaccggccaaagaagtcagacatcaagatcacttggtacctcagtatttaacaaattgggtgcggcccatgacctcagggctgacctgaacacgagaaggggtctggattcagcacgcggatcacccttctccctgaagatcgaagtccttgaattactcttgaaattcaagatgccgacattaaagatgtatacagggaaaaaagacctcttatcacaccttatacattgtgagatgcagatgcatctgcagggggtacggggtgatgtgcggtgtagaatattccttgctacacttgtagaggtcacccaatagtggtactttaagctatctctatgaaattttaattcatgcaaggttttctcctaagaattccacgcatagttctctttctcccatcaactcccctcgaaccttgagggcgtagtcaaagtaaaagaagtgctaggagaacccctaagaccctatataagcaggtccatgacagaggctacaaagtttaaggggttaattgaggagggaaggttggctgccatattggggggcattgagccacttggggtactatggaaagacattaaaagatttttcgccgtggggtccatggtaggatttattgaccgagcaaatgtatttattaagctcgaggaggctgttcagcatgttaacactgtgcgacatcagaaatgccaacaaaatatctcatcaataggggcacctgctcataattaacaatatcctagcagctcaacttcgagcgggaaaaggtctaataacgttggcaggcaaggtatcaaaaagaagggaaagtttactggcaatgcgtaacacaaccctagggaaaatgcctcaaagtttactactttttaagtcctaactgacgacctagagacaatttacgcaacaacccaatctac

SEQ ID NO: 169313 - DNA, 1975 bp, Cannabis sativa
ctttttgaggacttagactcaaaaataaaactttttgtagtctataaataccgtagcaatatcctaaatatctataaaataacaaaaagaagactttagaaaaatacccccaaaaacggcacatcatttttctaggactctacttgctaaaaatggtagatcatttaaggaaaaatagttttgctattttctactggacattttctaaaaatattactttcaacccaaatctaccttaaatattctacaaagctccagaacctctaaattgagtctaacaaacatactccaatcaataatttcatcattaatcttctaaaacaaaatctaccactaaaggggtcaaaagtttgagcttaaaagctaaactcattctcaatcacaacaaaaactaacaaaactattaaagaacaacataaataacagaaaattaactccagataacatcaccaactcatcccaatacaaacagaaataaaatcctataaattgcatgaaaatctaacttcttaacttgaaaattcattgggaaaaagagagagaatcttacctcaaccatggttaataaaaacctttgaattcaatgctataacccccttgaattaggtttgaaataggtgaaaaagatgagttccttggatttctcctttggtcgaacacaaggagagagaaagagaggttttgcttttctatttttggtttattaataaatgactaaaactccttttttgtaatcttataaatttaatttattaaattaaaataataagatcgtagcccactataaagctctaaaaaatacataacaaaatcaataataaacttgggacagaaaggccaaaatgccccttacttcactaagaagtaatcaacacacctaggggtaaaatagtcctaaactgtaaccccaaataattctaacattccaaatatttaactatcttgccctgctatttctaagaaccatatctatgtgacctaaattggtcaaatcgtcgcattctactagtactagacaaaatatgtaaaatataaaatttcatataatatatataatacacatagaatttaaatatatctctgtaattaaaaaataaaaatctaatgcctaattgtctactaagacacacataatgataattaaataaaataaacctttaaatatctactaattcccataataaaatcaagcggccattacaattatccctccattaaaagatttgtcttctaaatataacctaaacaactctggatactaagccctcacatcaaactccaatccccaagtggcttcctccaccatactatttgtccagagtactttaaccaacactatagtcttgttgagaagaactttatctttcttatcaaggatctacactagttgctcctcacaagacatgtctagttaaagctctagggcttcataactcaaaatatgtgtcggatctgaaataaatttgcctaacatggaaacacgtaatacgttatgaactgctaataatgttggaggcacgggtagataataagctaccgattcgaccttcttgaaatcttaaaagtccctataaatctaacttgccctttttcctaaaacatttaagctctttcatttgggacacccataggaagacatgatctcctacttgaaatttattatttatgcgtttcagatctgcataacttttctacctactttgagtcacaagcattctgccttgattttctctatcgccttattaagtcgttgaaatgatgttggacctaggtattctctttctcttgtcttatcccagtgaattggatatcgatatttttttccatataacaactcatagggagccatcgctatcatactcctataatgattgttgtacaaaaaatctgttagtggcagatacgtacaccaagagccttcaaaatccatgacacaggcttgtaacatatcctctaatatttgaattgtcctttc

SEQ ID NO: 169314 - DNA, 528 bp, Cannabis sativa
acatgtaaaagtctgaaatttcttaattagccttaattatagtgttgaatgaaaggtgtttaatattttacctgtttaattttgctgtggtatccctgtgttttactttaaaaaagtatgaacatagataaatagatcagtcagaagttgtgaaatggaacttgaaaaatatatataactatttatacacaacaaaattctcaaagtaagctaaccatgaggtttaaggttttgtgataaattaagtgagtgggagtttatttttagtataaagaaagagaataattgaaataccattatgaaacttaacagagtcatcttcagcactgtgagaaatcatattattagactggtttattgcattggtggttgcttcaactgaaataaaagtgttgagtcatttagttaaattaaaactcatattttttttttcaatcatgttctaaaaacaatttatacatgtatatatatataaatatttatacctggaatgatgtatcgtttatggtgctttgaacaacctaaggt

SEQ ID NO: 169315 - DNA, 595 bp, Cannabis sativa
tttgggtttctgaaagtctaaaagcagttactttaactgctgtttaggtttctagctagtttcaatttttagctctgaaaaactcaattgcaagaagcaagctttagcaaagagagattcttcagaagctaaaagcagaagtaaaaatccagcaaactagtcccccataaactagctgtgagaagactccaggcactgtctattgtctttactctaatgtaactatgtaactttaacatttggacatatctcatatgggaatttcgtagtaatacatatctatattagtcatgcacaatgaaatcataaaaactgaaaccatgcatatattagttcttataaacagaatctacagataaatttgctgaccaaaaatatagatatataatttcatcaaatacgtttaaccatgttcagttcaaacaaagtctttgaaagtagtcatctcatattctcattgcattgcattgaaagagtctcgatcaaaaccgtgagattcctatgaataataagttgaatcaattattaaaaaattgcatcaaaacccaatcaacacaaatcaaaatcttcacataaaaagataagagagagagag

SEQ ID NO: 169316 - DNA, 709 bp, Cannabis sativa
agtctaaactagctccaacaacctcaattcaatttcagaaaaatagaaatcaactcaatttaaatctacagtaacctaactccaagttatacatgaatatctgaactttaaagcttgaaaaacacaggaataaagagggggaagctcaccttggattaagtcactaagatcttgataaaaccccccattgaattgaaaagaacaagctgttaatctctgaaaccctagttgaaccgagcaagaagaaggagaagccaaaatccccaaaattctaatttttctattctttgaaattatccactaactaaggttatttttatttacttaattcaataaataaaacaatggccagctgcccaaaagagagagtgccacctagctaagccatccaaaaagactaaaataccctcactaaggtatttaaatggcaaagtgacttaggagtaaaatggtccaaaactataaccccgacattctaagtgtctatctaaattgccccgctatttctaaaataccttaaaccataagaaaaagtgactctaccagccaaacgtcgcgtttcactgttaccgggcataaaatatgaaaatcatgaaatttctcatattacataaatagcacaccaagaattcaaatatatctccataaattcataaatcataattaaaaatctaattttgaattaaacctaattatttgctaattctca

SEQ ID NO: 169317 - DNA, 928 bp, Cannabis sativa
gtgtcataaattttatcctgattaataaaaatccatataataaaagagaaaaaaagggtaagctaatgtttaactactgtttaaatgagagaagggagaggaaaaagaaagaccttggattcagctactgttttgaacccatatgaatctcatacctttatcctcatcttcttcttcatggtttttcttttttttttttctttttttttttttttttgtggttgaggtggaaaatccatggcagaaactcaaacttgtccatgctttaatttcatttgaaaagggtgtatcctaggaatggcaaatggggtgggtcttccccgactcgcttctaacacgccccgccccgacaaactattgccccgccctgcccaattacctcaaaaatttaattgggtctgacccgacccgatttttttattttttattattattttttttttttgcaaatttacttcttcaaatatctgtctttcattttataagtgaattttatataaaatataagtacaggttcgaaaagtagtactaagttataataagtaaatttgaagaagtaaaaggtaaagaaatttatttgtattattgagcgcactatcaatggatgttctaaattaatatttctttctaaattccttttgcatatcttgttttttttttttttttttgatgagaaacatctcttgttatgttggcttctataagaatttttttattttattactattatctatcttaacctagttgcttatttttcatggattcattaaaacatgcttaaaaataaatttctaaaccagattttaagtaacaaaaatttctaaagatgttcatattaaaattaaacaatacaaaaaaaaaaaaaaaaaaaaagttttaaacaaatttccaattataatttgaattgagttgaaatatcaattacatt

SEQ ID NO: 169318 - DNA, 767 bp, Cannabis sativa
  modified_base (702)..(705): a, c, t, g, unknown or other
tctagcttttcattggtgatctctttctcatagtaatcggagtttatggattaccctaatcaaatttctggcctctcaatgccgatgtatgccatgcaaactacaaagctctcaaatcatatggtttccaagatagatggcatggtctgtgatttttggtggggctttgaaaaaggtaattgcggagttcatttaaaagcttgggataagctttgcttgcccaaatcccgtggtgggctagggttccgaaaaactagagagatgaattaggcttttttggccaaatggggttggaacttactgacaggaaacccgtcgctttgctaccgcatcttggaagctaagtacttaaaaggcaaagaattccttaactgtgactataagagatcggactcttggttttggaagaatgtgatcaaagctaagaccattttaagaaaaagtccttgcaaattggtctctgatggtaagacacgaacatctagaaggatccttgggtctgtcatggcaaaagtttcatcccattccccattaatcccaatgctccccatgttcttaaagtggctgaacttttgactgtaagtggggaatgggatatctagaagatttcgtgcctttttgacaaagatatggttaatgtaatcttaaaaggtgggcggccttccagggccatgataatgggattaatcaatatatgaacannnntttgaattaatcttataatcttaactttaatcaaataaggtttataaaagaggcataaataa

SEQ ID NO: 169319 - DNA, 551 bp, Cannabis sativa
aggccctctattggcaacaacgatctcgggtctcctagatcaaggagggggataagtgttccaagttctttttcacctctgccacaatcaagaatagaagaaacgagatcgggactatcatgaacaaagatggagtttggttgaccaatagaagtgatattggtaaggaatttttggagtttctaggaagcatctttaaacaaacggtccatggaccattggagagcttggatcacctgattctggaccatctcaccctccaggagtagacagatttggtgagcattctgaattccgaggaaattagacaaacccttttttccatgggtagtctgaaagccccgggtccggatggtatgtctgttatgttctataaacactattggaactcggtaggaagagattttgtgatgctgtggaggatttctttcggtccgggtccatgcacagaggcattaatgctaccaatgtaattctcatccctaaggtggccaaccctaagaaagtctctcagtttaggcctatctctctttgtaatgtggtctataagg

SEQ ID NO: 169320 - DNA, 829 bp, Cannabis sativa
acatgttaagaccccattggtaagccatgagcattttagtaattttgacccgagaaggggtaaaattctgaatttaatttatttacgtgtttatggactatattattatgtagcatgcctattttgtctgtttcaagtgtgttctgacaagttagcgcagtatagtcaaaatcgggtatttcgagccgaaccgggttcggggccgaaatacaattctgggataaattattggcattttaattatatgtgagaaatctgaaatttttttgaataattgttttgtgttgaaaatgacttaaatgcccttgaatgtttacttgcatgttatatggccctaggggcattatggtcattttggacctttgatttatctacaacaaaaaaggggaattttaaggaaaataagaacttaatttctggtttttcttgcacctccaaaccgaccccctctctctctctctttaaacctatctcaaagttttgtgattttggtgagaaattgcttgaagttcaagcttgaattttggtgtgcttgtgtttgattcttgcttgaggcttgaggtagcttttcaactctgaaactttgatattagtagctgaaatttatgttggattttatgttttgagcttggaatgctcttgaaatgcatgtttgataatattagtgtgattttgatgccttatgcttgtttgagttagaaattggagtaggatgcttgagttgtgttggtaagatgattttaggggttttgtagatgtttttaatctgttatacagctctaattttagtgttgtgttttgggatttgaagattcaaggtgtgagtttg

SEQ ID NO: 169321 - DNA, 1252 bp, Cannabis sativa
  modified_base (574)..(575): a, c, t, g, unknown or other
atcatgaacagacgccctagattttggttgttgttctttttagttcttctttattagcaagtggacaatctcagataaagtggcccaccataccatgctagaaacaagtattagcccataactcaccatgatggggcttcttgcatttgtgacactctaggtaagatctgaatgtagacccatgaccttgacgaccacctttgtttctccaaaactttctattacatctaggtgttccagaatattcagctttccatttgtgatctgggttgccaatgtcattctccttactgacactacaacccacactagggttcaatgccgtggtggcttccttagaagcttgctctttaattacatgttgctctgcctattctacaatcaaggataactcgaccacattcttgtatattgtgtcgtgatcgatggttatctttaagtctcgattgatagtggcatttagtccccttacatatttttgtttctaagttaaatccattggtaccagatcaccagcgaacttggatagagaatcaaattccgatgtatactcgaccactgtcttcttcccttnngtcaacttcacaaaatcttccatatgtgaagttcttaccgcaatgttataagttttttttttcaaacatgctcttaaactcttcctcagacatggtgctaatgtcttgggtctgacccacagtatcccacaaacacgagcataatcttgtaacatgaatgcaggacaattaactcgttctatccctatcacccccatgttatttaggatgctggtaatagtagtcatccactattcaatgttgataatatcagtatctcccaaaaacgttagaggttgcaacttcacaaaatgttcgaacacagaatctcgatatggtagaatgaatcctgggttacctaccactgtaatacaagctggtggtccaagagaggggatttaggtgtgtgttaaaattttaggcaagctcctttccgggaggcgtaacttatgctaacatccagaccatgccctttccttctatggtcacttggaaaggaatctttccaaaagtttatgaagggtaggttgaatttagtagtggtctcccagctttcacgatggaaggcctcttcagtataggaattcaagccaaggcttctgtcccggcctggcccaatagatattattgggggcaggcctgatctgacccggtttcaaatattaaaaaaaaatctaaatccctaaaaaaaatcccaa

SEQ ID NO: 169322 - DNA, 2161 bp, Cannabis sativa
  modified_base (950)..(957): a, c, t, g, unknown or other
gtatttggattgggaagcacgtcaattgaagacatttattcattacaataaaaaattcaccaacaaaagaaacccaagtcgccaaattgcaaatagaaaaagaaacaatcatatgtatacacatatataagtacccagtagcgtttttatcaataggctcggattcgattgagggagcaaaagaagatgagtcggggtcggacgccatggatcgccatttaaagctcaacttatgcctagtagcaacaccaaatctagagttggaataacgaatattatagtgatttactggggttattgggtgtgaaagagccaaagctcgacccaaacaaagcatattctcttctcgcaaagggcagagagcccctgttctgttatgttgttcagcgagtcgactgagtttggaaagtcgggtagagaagaaagaaagagacttaagacaaaagtgtgggagttgtcacttggaggagttggggtcagtgcggaggaaaatggaggactcactatgtttacgtggcatcacaccattggattagttttatttttcttgtttatgttatgcagcataataaaaattattggagaatttgagtggagctcgcctccttcgacccctccaacattgaaacttatgtcctctataatttattagctttttggattattttaatatttacagtgacaattatccgttttcatatatatttttaggttttttttttaagataatcattgtcatttttctttttatatatatagattttcagaaattttataatacacccacttaaaaggatatactaatatatctccgaaataatcttttagtaaaattttagaaattcggaaaaatttaacgcaccgaaaattacgttcgagcagtgagttacacgagtgactattttattttatatacgtataaaatagactatttgaacattattttctannnnnnnnattattttgaatttctcaaaatttgtaggatctcttaaatagctataacggacatgaatatgaaaaaaaaatagactaatttttttttctagatgctgaaactagggttatacatcgatcggtttggtcaggttatagtgtatttttaccaacccaatataaatgtcgggttgtaaatatctatttgtaacccgtccaatgaaaaaataaaaaaattataacccgctcaatgattttcgtcagtttggtcgggttaacccatttaaaccgattttttttcattattgttagtttttggtgttcaaataattgatttgaaaaaataaatgtatagtataagcctttcaagattaaaatatttatagtttaaagtaatgttaacaaataaatataaattgaataaacattaaagtattaaataatattttttaaaaaatacaataaaaaaatttactcatatgtaaattttaaatttcaactaatattcaaatacaatcaaaattatcaactataaattttaaatttcaaattaaatactataaaatacaaactttaaatgtaaaatagtttaactattaaacataattgatatattacattgtagataagtttagtaaaaatatgtaaaccagtttattcggtttgttcgggttatttgggcgggttagaataatattcaacccacccaatgtattcattgggcaatttgaatttttcgtaaagttattcaggttgtattttttgtcggtttattcggtttggtttggacagtttattcgggttgggcggtttgtaatattttttgaacagccctagccgaaacaagtagagggtgcattagtacatcccttttagggggtgcattgtagaatcagcctatacttttttatggaaattttacataaatatacattaaatttaaaataattatacaaatatctttaaaaattaaatattaaacaatatcgtacctatttagaaaaataaatataatattttttttaaattagtaaatatatataattttaaaaaagaaaaatatttttttgaatccctgtgctaagtggcccttggcacaggactatgcgcctaatatcgtgccaaatcaacatatatatatagaacacttcttaatggatattacccatgaatgattactaaacaaatttaattataaatattaattttaaaaatatcaaaccat

SEQ ID NO: 169323 - DNA, 926 bp, Cannabis sativa
aaaaaaattattatttcaaaatattatatcatacaataaatttttttagggatctattacaagtttcaaaaatataaatttatacaaatatttactaagaaaaaaaataattattacaaaaagaaaaaaaataaaaaaacagtagttgaagatgcttgaaccaccgatcggaagacgattaggagccatgtccaagccttgaactactatcggaccattgagccacctcgtcgaaaatctaacgcctctaatcggagacgccttgcaccgcaccactccaccatgttatcgcctctctgtacaccgagcggcgcagcgcctccaagcgtttcttgtcgaactccgtcgttccacaaccacggccggcatataccagatctggctcaatcgcttgaaagagagattacgatgcggaggtgcgacgtcttcaagcgactggaatagagaaacttcatagtaatcattatatataaagagagtgagtgtgtgagagatgagaaaccagagaacaaaaaaatataaagagggagaagatgaatagtaagaggaggcggctagggttttaagtgtgagtggtaagagattagatttatatatgtaaaattaataataataaaatataaatataaaataattttagttagtttttttatgtactgaaaatataaatacaatattttatgaaaaaaataataaatataatatagataattattgagaagtgggaaaggacatagggagacgtgaagtgtttaatatttttgtataatataattatattattttaataataataatagtatataaaattgaaaatagagaaagtttgaaagagttgggagttgtgttataagttatagaaagttaggcactatctatagtggtgccaaactttgtggtgcctagaagctattattcttgtagtg

SEQ ID NO: 169324 - DNA, 706 bp, Cannabis sativa
  modified_base (635)..(667): a, c, t, g, unknown or other
gatccttaaacaccaattgttggcgttggaggtgcccacgagagtggacgattattctaaacttctttttgatcgtgtgaaattttgggtgcaactacaccttattcctatctcttgtatgacagaggatatgggaaaataacttggtggttttcttagttccttgaccgaagtggacttgaattctttgggtgattgtcttggaaagtttctccgggtccatgttggtattgacatttcaccaaaaaaaatccaccctacattattttttttttaataatctcaaaaaaattaattaattaattaaaacatcgattactcagataagcttgctagcgaattcgtcaatggtaattccattagcaggggataaagcagagtttacaacaagcacatccaattgagacaagcttcttctcaatttcaaagctaattttattttaaatagctccccattttttcttttctcaaactcttattctgcaatagtagcctcaatctcatcttccataagcttaggaagcaccaccacagtttctatacatttcaaacaccctccaacttgtccaccgtgttgaaatctgctaacggccatagctaatgccctgtcagttactgttgggttttataccctnnnnnnnnnnnnnnnnnnnnnnnnnnnnnnnnnttattaatatagatcagaaatagcatttaatgttgcatg

SEQ ID NO: 169325 - DNA, 1137 bp, Cannabis sativa
  modified_base (459)..(463): a, c, t, g, unknown or other
  modified_base (654)..(654): a, c, t, g, unknown or other
aaaaaaaaaaaaacaaaaacatgatgactaagtgcactctcatcaccttccctactctatcttttaaatacattattaaaactcttttttttttttttttaattttacattacaacattaaagatagaaatttggcctccagggacaaataccacccctaatggggaggggatacctgaagtaggttttggaagggataagaggtgatactatatttaccccatattgacatggatatataattttctaaatattattaatgtaattatattaaagttattcgctagtggttacaaaattaattattgattaatttttttttaggctaattagcaatttttcccccgaactttgacatgtactaaatcatgccccttgaatttttttggccattaaaaattccccctgaactgttaagattgttaaatttaaaaacttatctaattttagtaaaaaaannnnnacatagatgaaagttcaggggcataatttaatacatataaaagtttgagaggcatgatttggtagatatcaaagtctggggaacatgatttagtacctgaaacagtaaaattgtatgaaattagacaaaaatccttaaatttaacgagggggaatttttaacggccataaaagttcagggggcatgatttngtatatgtcaaagttcggaaaaaaaaattactaattagcttttttttattattgtcataataaatactttttcttatagtattctacttatttattttgatttttagcattttatttaatttgttattacttacgtacgaacttaatatcaatatatacgattagttatatttctagcttatttgtattttacaatttatagtagaatataaaatataaataatatcgattagataaaatatttatttcaaatttaacaactcttctttattttcattttggattattattattattatcttcatgtgtatccatagataatataggaatttttctaccccaaacccgtcaagaattaagctgggcggggctggggcatgcataaatggagatagagaaaggcgacgggattagaattaggggtgttcatccgatccaatccgtatttttttagtcaaaaaacatccaatccgcactaagtgc

SEQ ID NO: 169326 - DNA, 1100 bp, Cannabis sativa
caccataaattgagttcaataccaggctcattaatacgtaattctagacagaagggcagagatgggagcataaatagggagtagaaatggggttggggtgcattcctttctcattacccactcaatttttatctctaaatttgtgcttcaatgcataattataaaacttgatacaaaatttaatatttttattaaatgtatagaagaaataataactttttcattattattatttattatgtaaaataaaaaatatataaataattcttcattaatgttatagttaaatatattaatgaaataataaaaatgataaaagacaataataaaattgtacaagtgatacaaattttttattactttttgacacagcattagagtacatttttaccataagtgagttatattttaggagatgctcttagaccatctccaatggaagatctaaaatttgtactgaatttgacacaaaaaatgagtttgtgctatatatttagcccactatttacaattgtgctccaatgcacaaaatgtaaaataaagaaaaaaacaattaattatattgatggttatttcatattttattgaaaatatacaaaatttattattttttaaataatagtaatatggtaaataaagcaaataaagtttagtgaaagtcaatgaatcacaatagttagtgacattatagtaaataaaaaagtagcatttttgtgggctaaatttagcacaatactatatttggcacaactgttaacatgtgtcaaatttagcgtactttttagaacaccattgcagttttttaggtgtgctaaaatatattaatataccacctttttttgcaatacattagaagtgctcttaaaatcttactttacatttaaacctaattacaaatattatgctaaatataacattgtttattaattttttttttttaccaaatttatgacaatgtctagtatgtatgttgcatttgtttatgtatagatagaatagggaaatttgaatttctatgcatgcattaggggataatttttttcctaaactaatacttttctacattgaaaatatatgatcacttttccaaaaccccaaaa

SEQ ID NO: 169327 - DNA, 1276 bp, Cannabis sativa
  modified_base (1235)..(1244): a, c, t, g, unknown or other
tcaagatgtttcttgagattatcttttagggtcttattgactgctttgacaaggccattttcttgaggatgtgcaactttcaagaagcttttcacaatcccatgtgtcgcgtagaaatcagtgaacatttgcctgtcataattttttccattgtctgaaaaaatcttctaagaaagtctgtactgacatatgatgttatttactacaaggtccaaaaatttctttgaagttatagttgccagtggttcgagtttcgtccactttataaaataatcaagagctacaactgcatattgcactacaccttttccctttggtagctgttctatcagatcaatcccccatatagaaaatggccttggactttgcatctggattaatttgttgggtggagccctgggaactttgaaaaatctttggcaattgtgatatttctttacataagcttttgaatcttctattatggtcggccaaaaatatccttgtcaaaggattttcttagataaactttgtgtaatatctcaattagcctattgattaataattagggtttatatttttattatgggctaatcaggtaataagtgagattatgatcctactagtctatttcagcataaattttaaatgtgttataagttgataaataagcgtggtttattaattacggagaattatatagtatgtgtaaatttaatatgaggtatttgtggaataaaaatatttttcgggtttaaaaaccatggagagtcaatcgagggcaaaaaatatcataacaggtttaattaatagatttgatgcgaatattataataagtttatagtgtaagtattgaggtaattagatgtatgtggaatttgacctagtttcctagaagtagaaattttttagtggctaagaaattataagataactattaataataatattttattaatattaattttattattattttaatattatgttattattaataaagtttattagaaaaacttatatgattatatgtgtatatatgttatgttttaaaatatatacagttacgaacgaaatactcctccttcgctgcaacgaaaccctcttcttttttaatctattttcgttgattttcaatccaaaacctattaatttaagttgtagctgtagcgggatagtaaatcattgaagaggcaaatcttgaggtaaggattagttttgttttaagttgaaaatgattagttttatatagtgannnnnnnnnntagagtagttatggagattctgacttcataga

SEQ ID NO: 169328 - DNA, 1092 bp, Cannabis sativa
aaaaaaaaaaaaaaaaagggagaatcaagaaaaataaataaatagaggtattgaagcttttttagctaaaaaatttctaaattcaaaagtctaagaaattatgtaaatgaaatacaaaaaatttcattatcatttgctgaaacaaaatgtattataagatatattagataacaatattataaagggtaaataccattttggatatgtgttttgtaaaagttactaattggcaaatagaacattgaactgattttttgtgaaatgaaaatttaataataatctgatctaaatgtgttatgacaaaattatttacattttatgtatctattcgtgttaagaattgtcttcaagttgattatattaaaaaaaagtggtcaaaaattaagctctggatcctatttttaccattttggaaaatacattgatccccaaataatttaaaccttatacaataagaatttaaaataaatacataatgaatatatgttatcacaagtcatgattgaaatgtatattaaaatctgccatagtaaaaataaaaaatatgtgtatgtgttatgtgtatctttttgaggaaaaaaatgaactaaaattaattatatagagagagatagaaatataatggagattgaagaatactatatgagaatgagcataactattagacatatttgatgagagagaaagattaaaaatctataaagaaatagaaaaagaagaaacagagagaatattgaaaatactaaataaaaattgaggtattgatgatggctattgatattactgctattgctcaagaattaatagaacaaaaaaacaaatatgattagagataaatgaagaacatatgcaaacacaagaaaagaacacaagaaaaaaaaaatagaaaaaaaaaaaaaaactaaatcttacctcacacataattatgaaatatgaatctcaatatagaactttaaatactgatacagtggaactgtaaatccacctttgctaaattgactcggttagggttgtattatataggtatgtgttgatcgaggttttcggcaactagtaaaatattataatactattgagctgtaagaaagtgag

SEQ ID NO: 169329 - DNA, 1203 bp, Cannabis sativa
tctctctctctctctctctctctctctctctctctctctcttacgcacccaactactttctaaccacctccgtcaactgtcggcctctctagctttagcgccatgatcgtctccttaaggtgtatgcacattaatgtaacctttagacataaccacatcaattttgatagctttattttcgcaggctctatttattccaacttgttgaattgtatgatccatgatcatcctctttgctcccagaattgtcgccagaaatgttccagagttgaacaatcacacatctccactgcctcatgagaaaatctctttctgtgaaaaacgacatgtcgttttgcctcgtgagaaaatctcttcagccaaaccatcacattttattaaaaactcaaaaatctcaaggattcaatgctattttcggccatggaaaaaactaccaaaaagaagtgctaaaaacttcatcaaatttcaaatttcaagcaagaaaattgcaagaggaagtgtagagaacctacccactatgaagatggaaacctcaaagcttccaagtaatttattcaattttttctttgtaaatatttagattatttcttttgtaaataatttatttttcttgtaatttaattttgcttgtaaatggaaaaattattattgggacatattgtaaaatgtgaaaaaagtaatgattgggaaaaatatttttgagtttttggaatgtaatttcagtataggcatagtatttttggtgacgctgcgccaagccgtcaacaacaaaagcaagacccgaactacagaagaaagttcttaccatatgatcataccgctagaaacagggggcaaatatttacccaaattttaacgacgatgacgtgtcaagagtagcaacacgtgacacaaaaataccgggactaaattaatgatgaatatgtaaagtcatgactgttgggatgactgtcaaccataaacggtagtcatgactgttagagtggaagtcagacggtcacccttacctctagcttgagtaagatatgagtctccaagaaggaaaaatgatgggctaacaccttcgtaagcggaatgaacaatcaccacacacttacggtagtcaaaccagtcttgggggtacatactactacccctacctcaactgcaatgatctatgtgggatttagtctaggggtacacccaggcccggccctgggcata

SEQ ID NO: 169330 - DNA, 594 bp, Cannabis sativa
acaggtgttggaaacaccacctccaccttcgcggcggcttcaccaaaccatcgtcctcttacagcaagaaattgcacccagatagatcaatctcccatatacttcaatcacactcttttaatcaagcttaatgatcattcaagatgttggaagaaattcgagtaaattaactacaaaagttcattcaagatgtagctccaccacctccattttttttagatgaagatcaagttgctcaagtcttcaatttagactatctgaattgagaggcacaagatcagttactggtctcctagcttctatcctccatgaacaagagctcgctcacacgcatagtaagttgtcacacaacgcgtcaattctggaatgcattggagaaacattttactcctcgaagtctcttttaagattttggagttttgcaccaaacttcaaaatctcaggaaaggctatttgtctctcaatgaatatctactcaaagtgaagcaacatattgatctacttgcgtttgttgggaaagttatatttacttatatgtatatttcaaaacttatatgtatatttcaaaattttataagttatatttataaaatt

SEQ ID NO: 169331 - DNA, 1050 bp, Cannabis sativa
cgtacgaaatgctttatagaagaaagtgttgttcactcattcattgggatgaagccagtgaacgaaggtaccttggacctgatgcagtccaaaaaacaagtgaggctattaagaaaattcaggctcgtatgcttgcctcacggagtagaaaaaagagctacgctgatccaaagcgtagaaatattgaattccaggttggagatttggtcttccttcaagtgtccctaatgaagggaattcagaggtttggaaagaagagaaagttgagtcccagatttattggcccatctgagattctagaaagggtttgtcaggtaacctatcggctagccctacccctacattatctggagtccataatgtgttccacatctcgatgcttcaaaaatatgtgtctgacatgactcatgtcctaacctatgaagatatcgagcttcagatagatctttcatacgaagaacaaccaactcagattctagataggaaggaaaatgtgttgtggaacaagactattctgctagttgaagtgctatggaggaatggcaaggttgaagaagcgacttgggagttagagtcgtagatgcgggagcaaatatctcgagctatcaggtaaattttgaggataaaatttctgtaaggaggggatagttgtaatatcctgaaaagtataataatacttaattgcacaaatttgattaaatattgataaactgattttggagtgagattataatcttacttaagctaaatgtgtaataattagtgtgaatttaataaatgattagataaaacgtaatttattaattacagaaagtttatcaaattgcgtgggtatagtagataccatttgtgaaataaaatattttcaggtttgtcggctttggagactcaacagagtggtcgaaaatgtcactgcaattaagttgtgttgtattggaattatatcggactacgttaaatgttgagtaggttgaactagaaaagttaggaaatgactgaaatacccctaggttatattatagttttaagttttaagggaggggtagaata

SEQ ID NO: 169332 - DNA, 1348 bp, Cannabis sativa
cctctctctcactctctaaccgaatccttcttcttggagagacttatgatatgtgttcaagggagaaaaggaagcaggtatatatagattcccttatatgttattctaataaagatgcaatgtgccgattgttgacctattagggttcgggataggttcgggtttgggtttagatcagggtccgaggctgggtccaggtttgggttcgggtcaagtttggggtaggtcagttcggaattgggtgcaagagccttgcgttgggaccaggtttgggtcaaagtcaaggtcccagttcgggtctaggggtggggtctgagtttgggttcgagtagtttggggtccaggtctgggtccaattctaggattcagggtttggatctgtgttcatgtctagggtttgggttttagggtccgggatgcgagtttgggtccgggtccgggtcagggtgcaggtccaggtccaggtccgagtccagggtgcagggtccaaggtcgggtccacgagtctaggaaaatagatgtcaccaatggaaggagaggtattcggaccagaccctgacctagtacaccgcacctgttagagaaaacacaggaacaatcacagcccaaaatagaataagtacctcgaactgagactaaaaccatggatctaggactaaaaatagaggcaaaatgaccttctcaaaggtcctaacgaacaaaaaccatggaggttcgactggcattgtcaaacataattaagacacccaataaaaccaaaaagaggaaccaaaagcaaatagtgagaggagaccacctttcatggatagacgacggtcgcagttcctttggggattggtgaaggtttgctggtggcagcttgaagcatcacacaaagacgcaaagatgcaaagacacaaattaaggccgcagtaacctttgagaattggtgaaggtttgttggtagatctctattttggtgttgatggtgtatgttattgcattgatggttgtggttataatagtgatgatcacgatagtgatggtggggtggtagttgtggcaatggtgatggtggaagtggtgaagctgtggtaatggtgattgaggtggtggtaatacataattagcgagtaagataatatatacttagtcatattcgtatcttttcatttattgcatgtgatgattgggagcttgaagaaatttccatcgataatgatgaagcagttgataatgatccaaaggaagcagtggagagaaagagagaaaagttaggtttttttaattttattcaattaattgattattttttgggtcaaagaatagaaactttagtgtgcagtagtcaaataagttggtattttgt

SEQ ID NO: 169333 - DNA, 580 bp, Cannabis sativa
gtcaaatgtttggatcaatgttgatgggatgagttatcacagaggggtagattctgatcatgtctccatgtgactaggcaaaaaggtccaggtttgcccttaaaaatcttatcaataatgattttatttctggctttaaacctttcccgatctttagttttctggctaaagaaatgggatcaaccaccacttcctttaactcttctatagggctgaagctgtctataggatcccgaaagtaaggatctatgtatgcgtccccactttgtgctggacttcattgccctttgctggcctcttcttcaaagctcttgccaggcatcttctctttgttggcgttaaacaaggcaaagttgtaacagtgatgggaaaattgttggtcttctcttaaatatcctaccccatgccttgttaggaatttcaggcaaaggtgatagatggatgttactaccctcaactcgtatagggttggtcagcctatcatggagttgaaagctaagggaacgtcaattatgaaaaactacgccatcagagtttagggggttggattttctccaacaatgaggggtaatctgatata

SEQ ID NO: 169334 - DNA, 1327 bp, Cannabis sativa
ctactcttgcaatatctttaaatcttgaattacattgatgttgtatgagattccaactcacaagctgactggtaatctccttgatcttactttctctctttacaatgtttctttataactttttcactcccttctctcaaactctcttttgtttttctcactgaagaatctcttctctctctagttctctttggactcatttcgtacgttatattgtattgtattgtgttggattatattttattgtgatagattgtactgtattgtattagttaagggtgttcatcaaactacttacaccgcacaaaccgcccacaccacaccacataaaaaatatagtttgaaattctgcaatgctgttgtggtttgcattttttgtcaaaccgcgtggtgcagtacagtttgtagttttgaatttaataattgaggttcaaaccgtaccacactatatattacaaagttacaaattttacaatatcatttttattttttttatataagaacaaatatatatatgtatattacattattttcttagagataattcaatataataagttgatgattaatatatatgctatgatgttaaaactttaataagatattttttttgtattgttgaaactttattaggataatttttaaatttttattataatatttgataatgatgatagtgtaattcgctcaaatcgtaccacaccacattgtatttttgcagtgtggtttttacagtttttagatctcacggtgcgaatgcgttttgagaaaatacaaaaactgcatatgtggtttggtttgaaaaaaaaggctataccgcaccacctgcaccgcgaacacccctagtattattattaatattagtattatatagtacaatactatgattggtatagacttgtattaataagttgtgtaaagttataatatattttcaataaattcgaccccaatgctgactccaggtcaggtccggatccgaggtttcggtctggggtccggggttcggagttcggggttcgggtctagtttcgggtccgaggtccggcacccgatcccgttctggatccaggtcccaatctaagtttgagtccctaaatttgggtcgaagattggggtggactctagatcccttgtaaatattataatacaagctaatacaaaccatttgttatgtattgaataatacaacttatattgttattaaaatttttgtcgtaataattaatacaatacattattttatctaaatataatgtcatttattatttaatataatacaactcttatacacctaccaaatgagttcttggagttcaatcttgct

SEQ ID NO: 169335 - DNA, 591 bp, Cannabis sativa
aaagttttgtctatgacacaatctaaaatattatagtaaagatagagaaaaaaaatgaacttaaaagtatttacactagagactaattttgttttgtcaaagttactatttatatttgttatagaatacacaaattcaatgtttggatacttttactgctaataaactactttgggtatttacgtataagagatttataaatataagtatcttaaacgtaaatattcttataggaagaaatgaagcatacaaacttagatagattttagaatagtaggctggtgcggaaatgaaagataaacttcaaaaagtaggcttataaggacaaaatgggttggctctattattattatatgggctgctggctgctttgcaatttgcaaaatgcacctcatcgattaaagtcacacttacaaaatattagaatttgggataattttttatcatacagatttttttttttcaaaaatactatattttattaaataacagtgaaacacaaaacaaaataactaaaaagacatctataaaacatccgtagaataaccgttaaaataaacaaaatacataatataaaacttacacagtatt

SEQ ID NO: 169336 - DNA, 733 bp, Cannabis sativa
gtgttccacctgtggagatcatctccgtggggtatctatcctttgtctgactcacgtatccgaaagtgggattgggtcaagttcatttgggatataaagaataagggcatcaatgctgatgaagtcttcatctatgcttctgtggtagtggatatgatttggcgagtgccgaatgataatgtgcacaataactttttaaataatgtgaactattgtgttgaatatatccactatttttatgcagatctgagaggtaatctccaccctgttattacttcaatccagaaggaggattggctaaaattgaactgtgatgttaaagtgggattggaaagttcttgtatcgttgtggtcgctagaaaccactctgctgaggttggatttcttggacgcttgttgtggtgaggcgactgcgtgctgcttagcatttgagacggcaaagatcaaagggcacaagttcatcatcgtggagagcgactcaagagtggtgattgattcccttaacccgttgtcttccggttgagaggttgagaactaatctttttttttgcctgagactctctagatgttttgatggttgtattttcacttgtattcccagatcatgtaattttgccgcccataaagtggctaagtgggcttttacccacagataatatggtagcttatatttttttttttattccgacagacttattttgtaatgaccgtgaggcctaatttttagtataaa

SEQ ID NO: 169337 - DNA, 1226 bp, Cannabis sativa
tcactatagttgactagaactgatgttagtcaaagttagttgttggttatgcatccccgatcgtcccatcgtgactactagtggattcactatagttgactagaactgatctttgtcaaagttacttgttggttacaaatcgtcaatatttggtatcaatcatcattgcaagttcgtttccataatgactagtggcattttatgatggcctgtgctatccgttattcatcatcgtcccatcgtgacgactactggattcactatagttgactagaagccatctttgtcaaagttactcattggctacaaatcatcactattcagtatcaatcgtcattacaagtctttttccataatgactggggcattttaggatagcacgttggttactattcatacccgatcattcttgcgagactaatagtggatcactatagttgactagaactgatcttggtcaaagttacttgttggttacaaatcatcactatcgggtatcaatcatcattacgagtccgtttccataatgactaggggcgttttaggatggcatgtgtgatccgttattcatccccgatcatcccagcgagactactaatggattaactatagttgactagaactgatcttggtcaaagttactcattggttaaaaatcatcgctatcgggtataaatcgtcattgcaagtttgtttccataatgactgggggcaatttaggaaggcacgtgcgatccattattcatccttgatcatccaagcaagagtactagtggattcattatagttgaccaaaaccgatcttcgtcaaagttactcgtaggttaaaaatcatcactattaggtatcaatcgtcgttgcaagtccattttcgtaatgaatgggggctctttagggaggcacgtttgatatattttgcatctctgattgtcttgtcataactactagtggattcactatagttgacaagaacttatcttggtcaaagttactcgttgttttaaaatcttcactatcaggtattaattgtcgttgcaagtccatttccataatgattgggggcattttataaggcacatgcgattcattatttatccctgatcattccggcgtgactacttgcaagtcccttctcatattttctctttagattattgtgagaatgtctagcatttttggctagtttcttagataaggtaaatgataatcttatatgtgaggtaata

SEQ ID NO: 169338 - DNA, 2393 bp, Cannabis sativa
atgtcaacttgatgatgggtatgttacccaatcattcacattagtccttctttcgtctattatttgcgcgcgggtcacattttagccaaatatactttgatctagtaggtaatgattatgtgtttcaaaattacgaaatcatttcataatcatcatatataatatgcaattattctgagtaaatgttattacatctactgataattagttcagcttgtgacaatataaacatgtacattatatactagggcaaattacatacaaggcatgtgaattatgtttttatatgtatatataattattaataattgatattattagtactaaaaataatttttaaattataacatatgtaactataaaatttataaatatttcaaataaattatttatatagtataacttttatttatttgaagaattttttaaattgattattattattaagggtcttaattttgtttatttatttataattttaatgtaataattaaaatttatttgtactagtatataagcatgaaactaaattattgcatcccctaatgttactgtttgttttgagttttaggatagtttgtgaaaaaagttgtgaaactcaagattttaaacggtttaacattacattgtaaaagttatgtaagactcacaaaaaagttacacattcacattaaaaaaaaaaaaaaagttacacattcacattaaaaaaaaaaaaagttacgcattcaatatacatttttactcttctattccctacttcctataccaaacaccccaaggcaccattcgcttaataatccttctcgagttatactctcaagtctcaattaaactgattgctattaacaaaattataattattcaaatatatatgtttgtataaaatatatttaactcaaactcaatgttatttaactcaaatttttctaatagtatccatttattttattaggttgatgttataattaattttttaattagatttaattaagtgatgttaagttcgattagagaattaattactttcaaaatacattttatatattatgtccaaacatttatttttaaaaaataatgatagtgatagatacaatatttttaatttgtagttaggagagtgtggttattataaagtgtacaaattattagaagcatatatatatcattaattatttttaaaacaaaaaattaagatttaaatatatatattatatatagatgtgattgtatatatatgtaatttttatttttaaatatatgattaaattaaatttttttatataaaatatctatgtaatctttacttttaaatataaataataatattataaaattataaagaatattttgttaagtaattgaaatattcaattaaagttaacgtagaaaatttaaaaactccgttaaaccaagaattttgttacatagcaacaccttatatagaataaatgtatttaataggaaattaagttcaaaataaataaatagtggtttcatatctccatcaaatattttcattatcaggattgatttaatggtggaacagcaaaagctcccgcccaagacctcccacctaggttcaaaaaactatttaacaaaaaaactttaaatttatttttttaaaatactatattttgtgtttttactattatttattaaaaaaatactaatttattttttgagatactatacttagtattttattacgaaaaatgtctaattatattttcaaaataatatattttaaatttttactactatatatacaaataaaacataaactttttcctaaaaaaatctcaattaaattttttccaagagtaccctcaattaacttgagatgatctatgagagtaagattatatttttgttcaaagtgatacaaaatggctgtgatgaaaatgacctttttatttatttatttttatcatttgttagattctacctagctacacacagtttaaagtattgaatttaatttttacatataatatttgttgacatattgtgttacagtattaattaaatttattatatacacatacagattttatatatatatattaaattaataagtcaagtatataattacgtattaattatatctattaatgagctatatatatattatttctcatctcagcatttttgtgtgattgaaagtaaagtcatatttttataattgcataatattattttgaatgaattaaatataaaaatattaaactatatataaagtcatatgcataatattattttgaatgaattaaatgtaaaaatattaaattatatataaagtcatatatatatataaaaattggtatatatttatatattaaaagtgcctatttaacggcatttcttagtttaacattcttggtttaacagaatat

SEQ ID NO: 169339 - DNA, 1567 bp, Cannabis sativa
gtagtaccaatcaatccatttaaagtcctctttaattgtatagttacatatatacaaagtctcagaatcatcacacttggccttccccaggtgatgtgggaatgcacagcttacccggtatttccccttatggatcacaggactactgaatgtcacaaataaataagtaaatatatttttagtacaaataaatttattacagagtcttttattcaaaacaatttttgttaaaagttggggttgtaccagctttaatttttaggtgtactttttccataaattcttcaataagttatttttgaactgtttaccaaacacttttttatcacaattttttttttcaaaaatagtttttagtttttccaaaagatgtactaaacaggccctaaatattgcatatgtatatattgagtattttaaactaatcgttttttttttaatattgtgaatgaaaatgagatagtaataaagttttaattagttaagaaattaagtttttaaaattttgttagtctaagatatgatttattatatatgtatatgtagactttttaaaaaatagatgagaaaaaatagtttttttttatttgcttattaaatttaattttttttcatttatattcatatatttttattactaactagttacttataaatgatataactatctaagtagtgaagtagttaaataattaaaatttaattttatcgtatttcattatagcgtaggttgtaagctaattttcaaggttcctaataatttagtgttgataagttttatagctagctacagggtatatacatgaccacctttgagttgaaatgggccatagacaaaaaataattaggctctactataaagataaatggtaatttaaaaattattaaaaaaaatatattttttaaggtatttcttttatttgggcccctaaaatgagtgggccctaagcgcgggcctaacccgccttagcctagtgccggccctgggtatatacatttactaacttttgttattaattaattatcaatgcttagtgaagtttgaatatcataaacattcatccgtagtaggtcttgcgatatatattgtactgcggttagatatgtgaaacattatacacgttagttgattttaaatatcttaaatatttagccataataaaatagattttatgattatatgtactgcaatcggataagttaacaaattatcaataaatcttattatcactatgatgaataagaacaaatatagataaagtaagggctctacttaaccactagtgttataccaatatctcttccctttccttacacaaaaaaaaaatatctcttccatttccttacccaaaaaaatatctcatccatttgcatgtgtctttatctagatatctaaggtctaccatataatttaacgtattcattttgaggtctctaggtatctagttaatgaaacatgtgtatctttatatattaaaagtgcctatttaacgacaattcttggtttaacagaatatactttacaaataaaaaaatattctgttaaatttaaccccaaaagaaccat

SEQ ID NO: 169340 - DNA, 798 bp, Cannabis sativa
tgggaagtttagtatcaaaataacatccagagagtagcaacaacacctagcgctcaggtgatgggctcctaggtgagcctgcatccaagtggtgcattaggaaccactcgagtgaccaccatgcattctttgaaaattgaagggcaactcaagggcgctgatagttgtttacctggtcactatgtactaggattgttgcacaccgtgcaatattttattcaaatctcaatcgatacaactcagtttgatgtagttcaaagtgcattagaaataattttggatgctatttggatgagtgtgtcacaagcacattaaaatttgggctccttcatattgaaaatttagttgcaagttgatgtacgaatttaaggtatcagagcacctgaattcgatttacggacaagattcaatctcccaaatcaacgaccaccattcaaaataagatgagcaatctcaaccatccaaagatggcatgtcatcattaatgttctcagatcaaccaaaaaaatattcatggaatttatttttgtaataatttatttattattattttaattatcatcttctcctataaataggaggttaatgcaattcattttttttacaatcacatttattctcttcagagcttctctgtgtaagctctgaagctcagattctctttagaaatctaagctcttatcctctttgacttcatacttaagctctaagtcaattttttaatgctcctggctgacaacaatgctgaaatttgattaataaaagctcaagtagatataaatattttttttttttttt

SEQ ID NO: 169341 - DNA, 572 bp, Cannabis sativa
acataacatttatctaaggtgtaaatggccccttaaattattttcttgcactttgactctttcacactaaatttctaccttcattccttgtcatcttgtaaaagtattagtatcacttatacctaataacaatgctcatttaaatataatagtaatcgattatgtgtctaaaaatgagataattagatttcaacattattttaagaaaagtggtttgaatattgtttttcatctacatattcttctgcccatatgtcatcataattcaatgggaaataattggtctgataataatagctgctaacctaacaatagaaccaaaactattggtcaaagcttttaaaacatataccaatttcccttcattaactactatcttctaataaattataattagaacttagaagtggaaaaaacgaaactttaacaatcaattatttataaagtaaacgaggggtcagattttctttgttatttaactcttatattagtctcctctcatgattaattaatgaaagcaaacaaaaaaaccttaattaaaaaaataaaattaaaagaatatataataataa

SEQ ID NO: 169342 - DNA, 1151 bp, Cannabis sativa
gttagtaataatttcgagtttctttctctctagactttaatcttgcttgagagtgatggtatttttccttcgaacttactttctcgggtgatcttcctctttttagatacacttcttctctcttagattccttttccaattgtaattcaaaattcttcgatttatgtgcgccaagaacatcctccaatacagttatgtctctaccatacttgatggctttcttgacttcttgatatacaattggaagcaaactcaacaagatgatggtcttatttttttatcaaccttgtgatttatattagctaatcctacaataatctcattacatctatcaatgttatcatctagagaaaaggaataaatcattctaaaatcgtataacctttctagcaaattaattttgttagcaattgatggctttatgtatagttcttccagcttgttccaaactcctttggttgtcttctctgcgataagttttcttcgaacactgtttgacagatacatgatgatcgtgtagtacgacatctcctctatttctgcgatttcctctagtttcttctcggccaaaagtttctcaactccaagaaccttggataacttctggtgcactaggattcctttcaaactttctctccatagtgcaaagtctcttgttccatcgaacttctccaattcaaatcttgccattgatgacattaaagttccttcaagaattgcagcggaaagaatcttgattctacgttgttgatcgattaccaagctctgatttgtggaaaaattataactaatggtgtaaaatcaaatcaactaagctttaaacaatcaaacaatcagcagtgagaagattaacaaatcacgaccaataatcagagaagaatagggatgaacttatagtataaaattaagaaatgattaaagcagtaaaacaataaagtcaacaccaatatatatactggttcaagtctgatagatcgatgtgatctattgctctactccagatctagaacaccaccaaatcctctttattcattgagcaagaacatgtacgatacagttaagattgattctctgatgagttctctcaaagtgtttcaactctcacactcttacacaagaattttcttcatttatagaagattcttcataca

SEQ ID NO: 169343 - DNA, 745 bp, Cannabis sativa
agcttacaaggacttccctaaaatgcttggaacttttttaaaaatggcaatggactttacctaatacatgacatcttcctattacacaaccatggtataacactcttaataaaaaatggcaaacagcataacaggcaggcagagacaatattctattattatatctaaatggatatcaaatacggtaagtctcgtccttttctgtgttcaggttggatggaattagaataaaaagtgaaaatacaaataaaattagtgaggagaaagctaaaaaacttttactaatttgctttgtcgtctaaaagttcaccaagccacttctcattaagtttagtttcattaattggtcataccttggtgtttataaacgcaacaattatttcaaattcacacgttattgtctgcaatttgtcctatacgatccttgactataattttttgtcaagaagttgccataggatatccattatccaaactcaatcacacacattgtatatccattaaactttggcatcacattttttatcttagaaccacaaaaaaaaaactcaatgcatacggatagaaagcgtgagttttgatcaaaacaagaatcacatacactcgcaaccccaacctttaacaaaaaagtttcaatacaaaaaaacaaaaattcccaccatatcaaaaacttaaatataggatcaaccataaaacaaaaacgcccagaaaacaaattaacataaagacagactacaaccaacaa

SEQ ID NO: 169344 - DNA, 915 bp, Cannabis sativa
  modified_base (833)..(873): a, c, t, g, unknown or other
cttataaacagtgcgaaaacaaaccttgttcaatcgttctttggtctgcttttcttcttccttaagaatttcagcaagcttgttcttgaactcattggcttggtcttcaatgtctttctcggctttggcttttgcattctcggccacctcttttgccttctcggcttcctgtttctcattcatggcatgttgttacgccttctcagcttcctctttttccttcacggcctcttctctcgccttcttggcttcctcttttgccttcacgacctcctctttttccttctcagcttccttctttgtgttctgggcttcctccttcactctctcggtttcttgcttgaggtgagtattctcctgttgggcgctatctcattgctcactcacaaccttgcattgtgattctaacttatgaaactcgccctccaagtattcaagccgctcattgagtaatcggttggtagcaaaaccaccaaaagaagactggagaaatgcaaacggatggatatgaaagaggtgtaaaaaaaaagaataatattttgtcaaaaaaaagaataatataattataataacaaagccaacgtaccaatatgtgatactcaaagctctttgagagcatatcgtttgggctcttacgtttgagaaaatcccattcagtggaaaaaagaggttgatgttgacgccaggcgactccaaatgcttccaaaaattgagacccggggtcctctgctgcgaccgtcagggtcccaatggcttggctcgagggagcattaccaggggtcgcctcggggcgaggagcattggcctcgggaatgttgggttttgtgccctannnnnnnnnnnnnnnnnnnnnnnnnnnnnnnnnnnnnnnnnaagatcagaaataacattttacgttgcatggttcacatgatt

SEQ ID NO: 169345 - DNA, 544 bp, Cannabis sativa
tctctctctccctccggcgcagcttactgcccagtccggcagagccctaatctcatcgtcggaggcccaaagggacctcatcaatgccttcgccgttccccaaaatcccagagcctctccgatccctggctaagtgctcccttttattggctttaattgtacacaactggtaatccgcattgtcgccgatgaaatgaattcccgaaccaccaccgaaggacatcactaccagaggtttgttctcctgcttcaacctttgagttcttattttcaattttttttttggacacacattcatgcaatgctctaaacatgtatatatatgtataggctcataaaattttagtgatgaatgagaattcagagttgtatttatctatattgtagtaaatgtgtctaatttgaagtttgataataaaaaaattaattcatcaatttcacttttttttatggtaaatgtatcccaggaagtagaggtgtgaatgtagaggtgaggtataaaaatctaaatgggaatggaaatggaaatgagaataggaataga

SEQ ID NO: 169346 - DNA, 1417 bp, Cannabis sativa
acatcacattcatatattctcatctcccgtcccccccactggattgatcaacaaactgcagcatccaattaatactactcactattattcttttgtatgtaattaaacaaaggtctctggcgagaatttgatgatgaaggtgttaactctggtgaagggactatctaaggacctacgtcttcaggccatggtgagtttcgcagcagtgtgcgatacggtgtggaatcatagaaacgaaatcattcatggggggaagtgtggggatactcatagtctgctaaaggaagtgtggaggaaatttgttgattttggaggggacaaagtaggagaggtctcggattccaggggtaaggtgttgacaagacctttggttccatatcagtttaataaaatggtgatggttgatggtgcgtataaagaaagctggtgcggaatggcttgtgcaatgttaatttttaacggtaaaagtaacggaacctaacaaaaatggcatgattatgtaactgttatattttagggggaatttttagcaagtcgtatattttagatggcagaatcaagtagtgttgaaagttcatggggtaaaaatactaattatttttaatttttattcatttctattgttgtcacccttaaataaaccaggcatgtttgacattgtattttaagttttattttcaaaattatgtttttaaaaaatgagaacaaaaagtattggaagttttgaaaatacaacttgcatttgattggtgtttttttgaaatggtttttattttaattttttatttattctctaaaaaaatacttcaatactttgacaccccaatatgaataagactcacgatccaaacctggtgagttttttgaactagactatagacctaaacataaatgttagccttagaccctacctaaaccggtaactttgacgctgacccaaaactcgactcgtacttcagacacaaacccagatgttggcccctgggcccggggccagcccagattaacctggacccaaacctagactcaagcctaagcctcaacccgaaccaggtgccggacgatgacctggacccaacccccgaactcagaccctgacccaaatccaaactcgggtataggactcgaaccccaatatcggacccagacccaatccccaaacacggacgtagactcaaacctcggctttgaaccttgatccggaccctagactcaaaccttgacctagactcggactcagacttggaccaagaatctgaacttgacctcagacccggacccttaaacccaaacctcagccacaaacctacccatggcccgaactcgaagctcaggctcagcctcgactcgaacgcatacatggactcgaacctagacatggaaccccagacccaaactcgacctcagaactgaaccc

SEQ ID NO: 169347 - DNA, 515 bp, Cannabis sativa
ctccttcttattttcaaaggtttccagagattcaaggctgcgttttggatcgattttctcacgggttctgggttttctctgcacctgcgactggtttcttgtgattgggttctcgtttctgtttgttgtgttttcatcggtgaagcacggagtcaaaggtattggttccctcgttgatcttcctaggtttccagaagagtcaagattgtttctggggttgcttggttgcgtcgagagtgtcttctccttcaacgccggttcttgcgggttcagcagagttttgcgtccttgggattgcgtcagagtgtagatttcgttgttgactggttcttgcgacggggtctgtttgggttgcgtattgagaagattattgtgtgttgggattattgttctcagttctgttgttttttggtttagatggcttcgtcgagtagagtcatggatgatatggaatttcagtatgggcatatagaattagatgatgaggaagaatgtggttttgagattgaggacga

SEQ ID NO: 169348 - DNA, 1019 bp, Cannabis sativa
gcttatataagtagatttatgacaaaagctaccaaggttaaggggttgaccgaagaaggaaggttggccgctatactgggaggcattgagccacttggagaactgtggaaggatattaagaggctgaccataggatctatggctgaatttttggaccgagcagatggatttattaagttcaaagaagctgtttggcgtgtagacactgtcggacaaaagaagagccagctacgtaccacctcggcatgagcgtccgctcagagtccacaatatcctggcaattcgaattcgaatgggaagaggtctaataataatggtaggcagggcaacggaaagaaaggcaagttcactggtaataccgaacagcaccccagggaaaatgcctcaaagtttactgccttttatgtcctaacagacgacctagagacaatatatgcaacaatacagtctatggtcccatacaagaaaccctctcccgtgaagaaggacataagtaaaagagatacatccaagttctgtcatttccacgcagattacggccatgacacaaacgagtgcaataacctgaagcaggaaattgaatttttgatcagaaagaataacccacacttgtaaaagtatgccaaggccggctagaatcagagggtcgcccaaacagacaataaccagaaccaattgattcatccactagtgaatgggcatttacaagttattattgggggtccacatcctactagagactcgggaaaagtttgagaaaagtatacccgagccttgcagtatgaacaaaaggaaacagttttggccatagaggagagaaagccaaaaataccacgggtaggggaactcacaataactttcactgaagcaaatgataatcatgtccacttcccacacaacaatcccttggtcgttgaaatacagattacgaataagacagtggcccgaatcatgacaaacaatggagcctcttcaaacattttgtttaaaacaacctatgagaagatggggcttcaact

SEQ ID NO: 169349 - DNA, 680 bp, Cannabis sativa
ttgttggagacattatatacataagcatttcatatgtatggtggatccgtgggtgaggtttctttctctgtagtaatctaaatggagcatcataacacattacacttaatataacaaagcatttgttctcactaaacatagatttcataatagtataccaataaaggataaaagctctcacacatatacccccgtcattgttattgctattttcactttaccaaataattagaaaaataataggattattcagccatgattttggatcaaattgtgtgtaaatgccattaatggagctatgatccagtggcttgatggtaaccaactcaaaaagtctgatgaattcgatgagaagatgaaggagctaggctgagagccaatcatcgccaagatggaggaagatgctccaccatccagcggcggcggtgttggtcctgagattgaagagctcgactaagatcttattattggttttgaactcactgctgctatcgtttgctgcattggttacagatggctctggtttatttggttccaaattttagttttattttcaacccaatttattaaagttttttatatttcgacgttttgtgtacgattttacttagtattattctatctattttggtgctaaaaaaaagaggcttagaaaaaaaaaaaaaaaaattacatcttta

SEQ ID NO: 169350 - DNA, 617 bp, Cannabis sativa
cagaggtttatgaaaataatttgagctcttgtagcataagatacattatttgcaacaccatgactaaaatgcaacatatcatctataaagtaaagatgatttaatttaagatcaacacaactttcatggaacttaaactcttcctcaatctagtttaatcatacaattagctttagcattcttctttctataatgtctaactagatcctagcaaaccatgatgtcgcaggcaatgaatcttccattcacaaaactattctgattcagggccacgagatccggtaaaaagttctcaatctcgaacatatcattttagtagctacttgataaagtacattacaacaatcgatggggcaaaagtctcttattgattcaggatatttacccttaggtataagagtaagtgtagttgagttaagttctttcagtatctaccccgaatgtaaaaaggtaacatcacttcactgacttcattgtcaactaagtcccaattatctcggtaaaaatagttactaaacccatacagaacaaaagctttatgtcttgggatactgaagattataattttaaattactatatattagatttttaaattatattacagtatgatatttat

SEQ ID NO: 169351 - DNA, 1083 bp, Cannabis sativa
tacatttatatacacgtttgaattgagatttattttatggggacttatgaagtccctcacctcatcttgaggtgtgtaacaccacaaataagacaaaaaaaaaattattatggctaaggtatttttgacttcttaaagccggtttgcaaccggatagtacatattatgtgtcagataaataattttttattgattttctttattttaccaaataatttaagggtattattgtaagtatgattttttggtaagatgtattttttctaaactcatatgtattggaagagatcgagaatgtttttactttttaggaatataatagctgttaatttctcattatcaatataatattgtttctagccaaaataataaaaataaaaattgaaaatgtagcttttagtgtgatgcagcccattaaaatttttttttctaaaaaaaaaattaacaaaaaaacatagatcaagtttgatggtcgaataacttggtaattacaattatttgattgttatttaatgtttaaatagatatgtattttggtctcataaattttggtccaaaaattcttaaattagtatgatgttaaatatttcttctcaactttgaacattacataaatataaaactttcaataaataattaacacttttactcctaaattattattattgttaaataagatttattatttattttacaataaataataactaattaattttcattaatatctaaaataataatggattaaataaatattacttttcattaaaataatatatttctctctcataatattttttaataataatattatatttaattaatatatagttttaagtgaataattagatagttaaataaatttaattattatacaaataataatttatttaaaattactattttaccctcaaaaataatttctcataaaaattaattctttcttaataattattcctcaaattaaacttttctctatactgtatggtatagggtgatctaggaaccacagacatatatttcgaagctccaataacttgaactcattaatagaataacttagtttattaattctattattac

SEQ ID NO: 169352 - DNA, 705 bp, Cannabis sativa
aaattttgtgatatatgatgattatgtactacttatacatttaatataagagaaaaattctaagtgataatttcgattcagctaaacaaaaatagacacaaaaatattaaggactcagagtcatcaaacaacttgaggttagcttaagtggctataagaatgtgcgtgtattgaaagttttgggttcgtaccaaattatgtattgtaatatataactacttaaaaaaaaagtactgcaacaaaaatatgaagaaaaaaaaatcatattcatcgccactaaaattgtcataggttttgcgtaaattattgaaaagctccatcatgaacttctaagttaacaaatacaaattaagaatgtaataagcaagtaattaaaattgttaaaaactatttctaatgagaataaaggtatcataaaagaataaacttatttcctaaacatgttctttaactaagcagccttaaatatcatttgaagttgccaaaattctaaatcttttattacaataactaaataactttaatactcaagaattaatattagaaagtctaaatagctataatatacatatatcagacaaattatgatatttgtaactatgactgtctaaccactcactacaagaaatgtcacttttgtcagcatatttttgtgctggcaaacgttggtattatgctggtaaaatagaatttacttgtgatgtg

SEQ ID NO: 169353 - DNA, 630 bp, Cannabis sativa
ttagccattttaccgacgatttttgcccgatgttcagtcctagttttagccattttaccgacgattttttattgtcacctatactactagttttgcaacggtttttgtggtgatgtcgatttatgtgctaaagaagcttcagactaaaaagtggtgatagtagtgatcttctcgttgtaaattttgtagtctgttttttcttcgaatgactagaggatttgacaaaacgtgccaatgtaacaatgtgatagatagaaaattgggaataagtactaaacaaaccattatatatttttattttatttgacagagccaaccctagtaaaagtttgggacaataatataatgaaaattttacaatgctctttttaaaagaggtgcattgatatattataatttaaatttgttttaatatctaaaataatttttttgtcaaattttttctcatagttatatatattatagttatttaagatatttaacaaaattttaataagaaatttagaaaaatttaaaatttaacacacttaaaacatgattcaaatagtgtgttacgcacgtgactattttattttatatacgcgtgtgaaatagacggtttaaactttgctttctatattgtaaattatt

SEQ ID NO: 169354 - DNA, 1190 bp, Cannabis sativa
ttgagtggactgagtaagaggtgatgtgggaagatggatatgtaatgggagtgtggagtatgagtggggtgatttatttgagagaggtgtgtgtcttgtttgatgtggtgaagtagcagtggtatttgaggaaggcttttctactgggacattagagtcaatgtcttcgacattcacataagcaccattatcacatcctgaagtaacagtagacaagtagggtaaccattgtgggtattgactgggttgtagtggagtatctgtgtgtgcactaggataggtgaaaccactagcaaatggaaaatcggtttcatcaaacgaaacactgcttgcaatgtatactcgacccgagttatgtagacacaagtaacctttgtgactcggactatatcctatgaagacacacttagcggatctgaactgaagtttattggtgttgtaaggtctaaggtaagggtagcaggcgcaaccaaaaactttcaggaacttgtaattaggagatagaccaaataacttttgaatgggacatttgtattgtaaaacaggtgtggcaaggtggttaatgaggaatgtggctgtttgaaaggcttcccaccaaaacctttgaggcatgctggagtgtgctaagagagtgagacctgtttcgactatgtgtcgatgttttctctcggctttcccattttgttgatgggtgtgaggacatggatgtctaaacttgacacctatggattggagataaggttcgaacttacgatactcacctccccaatctgtttgaatgattttaatggatgtgttgagttgtttttcaacttgtagttgaaagtttttaaatgtgggtaaggcttcatccttagttttgagtgggaatatccaagtgtagcggctatagtcatctataaagtgaatataataacgatagccatgtcttgatatcgttggggaaggaccccatatatcggagtgtatcaactcaaggggctgtttagactctttaagggcagcaagatatggtttatgatgagcctttccaagttgacaactttgacaaaattgcaagtgagaaggtaaagacttcttttcattaattaaaacatgtttgagtacattggaggaaggatggactaacctacgatgccacaaacttgattcattgacaaaaattagaaaacaagactcattagacttaa

SEQ ID NO: 169355 - DNA, 1452 bp, Cannabis sativa
gtaacaacaaactagcactctaatttatactaataacaatataccacttcttactataagaaaaattattatttataatatcaaaaaaagtattataaaaaagcttaccataatattttataatacagtaaggagtaagtcatgctactttttataatatattttctcttatgttaaagtattatcaaaagctcaattataacacaattttactattatttttatattttgatatgtttaaatgaacattatctatgttaatttttataattaacacaattttactattattttaacacgatcttgtgatgcttgataccataaggtatcttttttagctcattcttttattttagtcttttatgttagttttctatacagacttaatgaaactgtaatctttctttttctctctcccatcttttattcttttctataattctcaaataattatcaattaggagtagtgtgaaagaataaaatcacatgtttgtttctaaattttagtttttattacaacctcaaaataatacatattatatagtttctgtcatgttctccaactttaatggaaattctctctccctcacccatattaggtagagtgaaagggtttgaaattgaatgtgggaagctggtggggataactccataatgaatattataatctgtgtgaacatggccattctgattgacttttgatggggcatgaaatttataaattgttattagacactattaatgctcagtattttttataagtgatggtcgtcgattgattagcgatatttcttaaaaattatttattttttttcatttagggttcgttcggtattgacttctatggcacataaatatataatattttactataaattaaagtttaatataatattatatgaaaatatgatatataatctaatttaatataatacaatgtaatttagtaaacgtaaacgagctattaagcatttatatattataataatgcataacttaggactcgaacctaggacttccaacacacacacacctttctatggccacctgagttagtctcaagtggttaaaagctatttttttaaattatatgaaatttgatactaaattacattaatagcagtatgacaccgaggaggatgttaaataccaataatgttttttagcaattttctttttataaaagatgaaagaattaaattgtttataataagatttgaattcttaagcatttaactctatgaagagatttttgtaatttgataaaaactatatttggtgtaattttataaaaagaaaaaaaaatctaattctttacctctcacacatcataaatcttctcaattacctaaactagttcattacaatgctgagtgtcacgggctcatcttttcaggcaacggaacactcgtgcggcaccttgacttctctaagccaaggttaaccttccaa

SEQ ID NO: 169356 - DNA, 1372 bp, Cannabis sativa
ttcttaaacaaggtattaacttatgcttaaaggtagctaagggttatgagtcaaagagccctgactaaacaattataaatcgtcaagcttccagtagcaaataaaatacaagtcggggtgtaggaggtatagtagtaatggacaaagtaggatctgtttggtatgatttaccaatatatgtatatagtatccttaccctagaaacttggttgattaatgtattatgacattatacggttaacatgtcattaaatgtcaaaaaaaataataataaatagttgggctacgctacccgtgttgaggttgaactctttttgaaggattactagtgcacttatgatgttttggcgcttatatggtatgatcttaattaaaagcaaatagtttgtattttgaaatgaaagttggttttaaatatttggaaattttactagtgcaattatgaagttggaatttatttttgggaattaaagatctctacaatgtgtcagacataaatatggctagaataatatggtattataaataggaagtgatgtgatacccagagggctagtatattagaagaagcaattattgaacataactatcagaatctattggcatcagtttcaaacttctccactatagcaaggtaacaccaaagcagataaaagttagtacagaaaactagctaatctcacaattaatcgacttgattgaaaggagtaatggtggataagacaccagatgacaaattagcaaagaagatatgatagagtggtacacaaatcaagagactacaaaaggaaccaaagacaattatccgagaaataggaagacatgacaagtgcaacgaatgcatggataaaggaaattaggaggtgaatgttagataaaaaggtggtcgaaatggatcattaaatatttatatatagaagactttttaaagagcttccatgtttatttctaagtatcgtggaataagtatttatcgatgagtgagtcacaattatgaaactgaaagaatgacactgtagctttacggtgtaaaattaagtagattttagtatgtaataacattcaacgaaatattgggaataattaaagagaagtttgtataaagtcttctaccctactctttgttgtttgatattcttgtattgtattatgtgttctcaagtgacatgtaaggatgtttatagaggaataaatagtttcacgtttaatggcatgtaaggatgttcataagagaataaaaatttttataatattacgagcatgctattactagacttatgtatttaaagcatgtatatgtaagttattatgatggagtacattttggtatttaagtaatgtatagagaaataataatacttaattaagttgt

SEQ ID NO: 169357 - DNA, 576 bp, Cannabis sativa
atttttctaaatctaatctaaattatatgattcttttcttttaagtttaatctgcatatatacacgcatcgtacttctttaattaaaatttcttttattaatttcttagtatctcttatatttctatacatatataatctcttattttagaatttctcatgtgccttattgtaccattgtttatctttatttccatacaatatttgttctttttttctcactttatattatttctcatctttcagacaaattttatttccatttctacacttgaaatttttcaaatcctagaaaaacttctcttaagctccctctgattagagcttttctctttttgagtttattattttttctctttcagtattgaagaatattgtcccacatggattaaatgtaaaagcatattgagccatatataagaacatggactacttcactcattgccaattagttttgagatggaaccccataagtctcaacatggtgtcagaaccaaccgcaagatccagatggtttgaatcaacattcagaatttatttttttgtacttctcttttatcttctttcttgtttaatg

SEQ ID NO: 169358 - DNA, 1070 bp, Cannabis sativa
tagtttgtaatgcattttacgagttttttaatttttccactcaaaagtatttttttgtatttttacaaaaattcaaatagcaacccacataataatttaaatcgtaactaaaattcatatagcactcacatagaaattactagaacaactagcaaaacaacctaaataataattttttttaaaaaaaataaaaataacatataagataattctctttttttttttatcatccatccatagccctaataaatacatctttcactttatgaaaaattaaaatttcgtgctagtgtgaattgagtttgttacaatatacattatatagtgttatacctgaaattcgactgtacactaaaagttgacacgtgtctaacagaaggaaaatgaatcaactctaaggatataattatattatatcaataattgcatattaaataacttgttattattatgtagatatttgatagataaatattcaaaactcgttgactatatagttaaaagcgagacaagaataataactattaaaatacgattaacgggatagatgtatgccttggaatatacacacaagaatgagatattcatccactggagtagaataaatggaacaacatagctgcatcacattgcacatagcgagaagatcacctcgcattgttaatgccaataaaagaatatgacgagacaaactacttcccaacacacaacattttttcttattaagaagggcaaggaggataactcgaatcgagcgagatacaaccttcgaactcggtaataaccgcctaaaggataagagtaaaaaacaattgagtagttattagatattaatctacacgtgattaaataaaacgtggggattatccacgtttcatgaaccgatatattttgaatcaaactcaaaaagagtaattgccaatctatattcctataaatagaggcagatttcatggaaaaatggacgacaaaattgagagagaaaatattattattcaaattctaagattgtattctgtactcaataaatatcccaaataataaggactcgtagagcatgtaaattttaa

SEQ ID NO: 169359 - DNA, 936 bp, Cannabis sativa
ctatactattgtcaatgtggaaggccgcgtttaatgtaccggacacaaataagaaattaacaattgctaaagttggagatatgtggaaagattggaaaaataccctaacagaaggtatttttacattcaaagatgtggctcccaatcttctcgagaagtcccccaaactttatgaaaaaataatttatttacaagaatggagagattttgtgacctcgaaattaagtccagaattaaaggtgaagaggaagaaggcccaacatagtagggcttgtaatccttacaaccatcgcaccgaacgaggtggtataaggatggttcaagaatagatggtgaaagaggtcgaccacaaaattattgaatttaatagatctaaaatctagaaaagatgtcacatgaacatgaaaggtgacgtggagggcccaactgcagaagtcgcaaaacagattgtaagtttaaagtttaatttaaactctatttgttttgtttgtaggattaattatgcaagcaagtggaagagggtgttatacaactggaaggtaaaaaggacgtgctgaccatggcgctcgagacagatgagcatggtggtcgggtttgggccatagttttggcgtcacccaaaccaaatatttcaacacaccacgccctaacaggaaaaacaccaatgggtcaaaccaggcattatccgattttgagagacgcgtgtgtgagagagaggaaagcaaccataagctgtaggataaagtatatgagctcattcgtcttgttagttcccaacatagcagcgttgcgtctggttccggtgttggaggagcatcaaatgaacaacccaatgttgaccttgcctccaatctagtagcacagccgtcaggtgctgccaatgtctactctgcaccagatcccatagcacaacagtgtttggttttatgccctaaa

SEQ ID NO: 169360 - DNA, 1272 bp, Cannabis sativa
  modified_base (660)..(662): a, c, t, g, unknown or other
  modified_base (706)..(721): a, c, t, g, unknown or other
gtacatccagttttgtttaaatgtaagttaattagacttaaacacaacgctcccacatattgacccaaccagccaataatttaacttttgatttaaaaaggtgataatgaataatgatattattgaagaaaattcagataaactttgttaggaaatacttttacatgatttgtcactttcatataaattttaatatatttgattgagaaataaattaaatacaaattaagggtttgttttttaagctttgaattgatgtaatttatatatttgaaatatttatattttgtataggttttttttattatttatttaaatagtatgcaattaatagaaatttttccggaaaaaaaagtaagaatagaaatttctccagaaaaaaaagtaagaatagaaatttctccgaaaaaagaagtaagagaactgtaaaactaagagcatgttaggtattgttttttgttttcaaaaaattatttttaaaaatgagagcaaaaagtagtttttgaagtttttaaaaacaaatcatatttggttagtattttttaaaaacaatattgactaaaagtgaattggtttttaaaacagtttgttgttttcaaaattcttattttttgtaactttgttttttgaaaattgttttcaaaaaataaggccaaacannncaaattgttttcaaaaaaaaattttctgtttttaaaaacaaaannnnnnnnnnnnnnnntgatgccaaacatgcactaaataactgggaaattgagtgtggaaattagatttttaaggctagaatttgggggtagaccacattattgcacacttttatgtgataatatttatgcttagttttctatttatatataaatttcgattagattaccaaaaaaatatgatgcgcattttcagaaaattctaaattataggggtgttgataaaataccaaaataccataaccctaaaataatttaaaattaccgtgtaccattagaatttgctaaccactgtcacctcatgtggtcgagtacaaaaatagcaatgctgatgtttctaatatgttgaatatagagagaactgaattgaatgcaaaatatatattaaatgctagccagaaaacgacaaggccagttgcatgttgagtacatttaccttgatggaggcccactgactatgattaggattatgatcatcatcatcatcgagtggttgagaaactttaatttcggtgaaataagcctcaggagatctgggttctactttgaacttgttacagaaaggaag

SEQ ID NO: 169361 - DNA, 686 bp, Cannabis sativa
tctagagacccaaataaagaaaaaattctttaaaaaatacacatgttttttaatgattttttaaaataccatctatttatataataaaggcttcaaaaaaatttatttttcataaggcctaatacaaaactcaggatcgactctgagtacgtacaaaattaatcaatacgcgtgcagccatattgaccgaacaatgtatatgtatcaggaatgtcttaagaaaattagacaatagactagaaatatcttctcattttaaggaaaatagtttatagatagaaacaaattagaccttacagtcattacaaataatatttgtcgggatgattgacgggtcaatcatgccaattacattgttggcgtaagccacttagtcacattatgggttgtaaagttataaaatctagaaataaaaaaaaaattacaacttaaaaataaattaaagagcatattacattggtgaatatagttaccaataccccaactggaactggttccattcagcttattaataactatcttcgagtcactataaattaacacaaaatggtgcttcaaaagcacggtcttctccatggccaactgacaaatcgcagcttcttccatctggggatcagcaaatttaaacttgttagtaactactagagatggaaatttataccgcggggatggataactgcggggac

SEQ ID NO: 169362 - DNA, 621 bp, Cannabis sativa
cattcctatttttgaccagatgttaaaggagcaaattgatgatgtgagtatcgtgttttgttatgcatgtttcattgtgtgagtatttggagtatttgctagtgtaaccctctaaaactacaattgatgagcagaatttgttatggacgccatctaagttaatcgctcgcttggggaaggagataaatgacaaaagctctttcctctattgggcttataaggcaagtatttactttttcagtatattttgcatataggctgtgaagattatgtaatatattcttagtcatataatgacttttgctaaacatttggctttgtttacttttattggcaattatcctattcagcttgttcatttcattcttcgtgtgtcaatcaagctttgaagattgtttttttattttagtcaagctttgaagaaattagtatcaccactatccattacgctatatcatcaaaatacaagattttttattttcacattataaattgtgttaaaaatattttataatataaaaccttcaattgttgaaagcagtagctatttgttttattgaatttaaggtgacatttggttggaaggaatgaaaatatatgaataggaataggaataggaat

SEQ ID NO: 169363 - DNA, 800 bp, Cannabis sativa
acatgtatggtgaaggtcaacgaaacccgtgttgaactgcagaccctggccagcaattctcatgtacaaaagtcggttaggcctacacctagctactgtgcttggctggctaaacctacattgggcagggtctggccacctagtactcctccatggtcggccagacctgtaaaaggcaggttctggccacccgtgactccacggtcaactgatgctgactgtatgttaacgggagtagatcacaccaattgctagagtttggtggatctagatgcctgaagtgatcggtttcactccttgaattaccatcttgggtgtttccacccactcctagtccttgtcagttaaagatcgacctctaggcacctcgctccccttggggaggaaatgttgtactctctgactagctaagggtgctcctactagtggcttgctagccagtggttgcacgatgcgggtgttgctgagccagagatccttggccagccccccgtgtcgctagttgttgagatctagctattttcactgtttgacctttgaggaaaggtttgtcctccctctggcaaaggaagatctgtcctagttcctgaggaacttaacataagtcaagtcttccttgaagtggatccctgaggagatcccaacctcttctatcggttctctggttgaaccgtcttatcatatcgttggtctctcggttgcgacgatctaactctgcttggtgagatcgaaggatgtactcctggtcatccatccatctcaaaaatttgcatctctacttagcaaaaacatcgcaatca

SEQ ID NO: 169364 - DNA, 527 bp, Cannabis sativa
ctctttaatgaaaataactcataatggagtttctagaatctgcttccttcctaattcaaataataataataaatatttaattatgtcgttactaaaatgtgaaaggcgccaaaaataagcgttgctcggtttcttaatttagaaaataaaaattagtgtgactatattatacacatacatgggaaaattacattatgcaatacagtatttataaaagggtgcctaatctaaatacatcccattttatttatttgaatttttataatcacacccctttatattcactaaaaggtgtttagaatggattaatgttagcaaaaaaaaaaaaatagtaatattatcttattttttttggagggtttaatcttgaaatatcattcttttagtaatataaatacttttgaggaggataatattgatacattaaaaaatgttgggattaattattctcttccattatattaatttgaataatatttttgaattaataaataaatttaaggcaaaaaagactaattagaattttt

SEQ ID NO: 169365 - DNA, 631 bp, Cannabis sativa
attatatattttttaaatatatatgaattgaattggatcgattgtttttatatgtaaatcaacatttaatatttgtacaagtgtgaattttaaattttctaatcgaatccaactagcatatataagcatggatattcgtattttatgaattggatcatgcacatttaattgaattaggtatttgatgagtgcccttacatttatatgttaagtcactttttataagtaagacccaccttatataaaatagattagttgaaattatttgccacataagtgttcatcaaatttttgtgttgttgtctagattttttgtaagcttgacacgtggaccctagtccaggaaggtttgacacgtggaccccgattttgagaaggacaaactattctcgaccggacataatcattcgccctgaaggcctcctgctaagagtacatatgcggtgcagaaagcacaggttagggaaggctccgtgttttgtggtattcactaggcccggaggtcgaagcttaaaatttcacggaaagactttcccgaatatgccttcgcggaccattgaaggactaaggataggtgaattcccgcttggtgttgtggaagagctccatcgatacctatcaggttacaggc

SEQ ID NO: 169366 - DNA, 829 bp, Cannabis sativa
  modified_base (265)..(265): a, c, t, g, unknown or other
ttcaccaccaccaccaccaccaccaccaccaccatcaccaccactacctccttagcctcctatagtgtactccaagcgtccacctcctccatctcccgcttcatgtcttgcacccgcatcttcgtcatcagatccgaaactcagcgttgatattcccattatactacgtaaagataaacacaaatgtacatatcctatttcttcttttgtgtcttataatcatttgtcgtcttcttcttgttcttttattgcttctcttgattcnatcactattcctaaaactgttcgtgaagccatgtctcatcctggttggcttgctgcaatgatcgaagagatcaatgctttagttgcgaatggtgcttgggacttggttaattttaccttcaagaaaatgggccattgggtgcatcttggtatttacagttaaagtcaatccagatggaacaattgcttgtgtaaagaccagtcttgttgccaagggctatgctcaaaacctatggagtagactattgtaatattttttctcctgctactaaattgacttctgtgactgttcattttcatggtagctattcatcattggcctttgcatcaactcgatattaaaaatgctttttttcatggagaccttcaggacgaggtgtatatggagcaacctcttgggtttgttgctcagggagacccagggcgagtctgtcgtcttcacaaaacaaagtactcgttcttggtttggtaaatctagtcaggctgttgagaaatttggtttgttgaaaagtaagtcagatcattctgtgttttataaaagatcaactgctggtatcattttgtt

SEQ ID NO: 169367 - DNA, 607 bp, Cannabis sativa
gtgggatttcattttttattcaaataaaaatgtaagaataattattttttttttctaaatttttacatttattgaaatttaattattttattagattcgtcttattattctgtttattgaaatttttacatgtcgtcgtaaattagtaactttattcttaaaatttgacaactatcaaaccgtactcttttcaaataaaaacagaaaagattcaatatttttctttcgttaaatctgaaaaagttaatttaggtcttaaaaaaaaattatttaaaataattaaaaaattttaaaaagaaatcaaaattttaaaataaattcagcgatttaaaaaaaattaattaaaaaatttatttagaaataaaataatatattaaaaaattaatttttgtaaaaattaaattttattgaaataaatttgagtaaaataaaatttttttctccaaaaatttagatttgtttaaataaacataacattctttttagtttaatttttgttttttttttctaaataattttatatttttgttgaatttttaactattatttttttattttttaggatatgaatttgtaaacacaaattatctccacaaaatcttagttt

SEQ ID NO: 169368 - DNA, 694 bp, Cannabis sativa
ccaccaaaggactttatgtcgttccaagatttttgagttccacggtttattccacatggccggagcgacattacacaagggtgcccttccccgtgcttgaacgaggtaggccgacttagtggagaacactcccctagaatctttcgtccaaacccatctatctttaccctggcgattcggtttaccaccctttaaaatactagcaactgtttccctgtcaaagagactgttaagctgctggatgtcccagctcccatccggtaaaagtagttctgccacaagttctggttccttcggttgttatgattgggctttggaaagaaatcactcccgtggataatccaagggtcgttccaaatgtttgtatccctcccactagcaatatgtttgcaggcccctttctttaaaatttcttttgtacgcaccacattcctccagaaccaagagtcggaattcctgactgtacaatcaaaaaactttcttccacgaagatatttggcactcagtacctgacaacataaagacgtttcctcgttcaggagatcccagccccatttagccaaaagggcctggttcatctcttgaatttttctaaacccaagtcctccctgagatttaggtaagcagagttgatcccaggctttaagacagattccccgatttccttgctcacaaccccaccgaaagtctctta

SEQ ID NO: 169369 - DNA, 901 bp, Cannabis sativa
atcttctcaatttcaaggtccaattggtgtagtccaactgagatcatatccattttttatctcaattacagtggcttgaactattatgtgtttaagaagaagatgaaatataaaatccagaatttaaaaataaaaaaatggccccctcaaaatttcatattgacgtttttattcaaaagaacaacacatcagttgcttcaattgaaaaacaacctcaaacttgattatagataataacatagacaaagctcatgagtcatgatgaatgagatggaataaatctttttataagttaaaaaaataatcatataatatatattttactaggcacaagcaaagattattctatggacatttgtagggtaggcaaaacgggttagaaacgataatacgattagaaacctgcacgagagtcaattggtttaggtttgctttaaatggattcgggtcgtattcaggttgacttgtctaacccatttaataatcaagtcgtgtttgggtcgacacgactaaaacgaaattgactcgttaatgatttatttaaatttattttaatactttaatatgtcataaataagttataaacttgttgaatacttcataaacgtgttattagttgacatgtttaaacaaaatatacttataaacgggctatacgggtcgtgtcgcgtcaacatgtttataaacggattgtgttcgattttcattttctgacactgttattaaacaggtcgtgctcaagtcgagcatatacctattatacatgggtttcaacacgacacgaatacgattcgcgaacacgaattatcatcgctaaatatttgtactctcaataatagattcaatgatactagttttgcggtttaatggttttcatctccctcctctctttctcccaaaa

SEQ ID NO: 169370 - DNA, 578 bp, Cannabis sativa
caggagtgccaaaaaaatatcttttataaaaatgcagatgttattttgttagtttaaaaaataatttatgggattcatttaataaatatgaaaatagagttttgtgaggtaaaacattggatgacaagaagtagtgttgattgagtgtggattaatgccaccattccattccatggcattaccgggtgctgtgctttgctttgctttggcggctgtctgccaaagaggtatcctcttcctaagtatggacccatatggatttatgtattatctaatctaatatgtacggacgcaaagctaggaatatatattcacccaccatacttaaggatgcatttatattaccattttgttttatagataaactagtgctattataattaagataaatttttttatgattaatttacggaataaatacttatattttatgccgagtagcatataaatatctaagtcgtatttttaacggtaaaaatactttttgttatatttttagcagtaaaaataattattataaatattattattattttaattgataaataaatatttattatcattattattattgttat

SEQ ID NO: 169371 - DNA, 931 bp, Cannabis sativa
caatgttagagctaaccaaatgattccgtgggaaacattgtgcttgcaacaactggataatggggaccattttgtaccactcaaacacgtgtcacacaaaggttcaacctttaaaagtaggggccacgtgtcactcaaagcttgttcctttacgagtaggagtctgtaatatccgtatggaaaaaaggtggtagtggtacacgcactaccatgctcggatgttggagacaagatgtgatctttgtcagaaaaggcatagtcgccactttggtgacctggcatgtataaaaggtcgacatctcaagatggtaagtgtttgcgttaaacctttcaagcacacattcaggtgtgtccttagtgagcttcccttctcagacccctttgggtccgggagaagtattttttttttttgcgtccgagaagttaaggcgagtatgagtagccttccgtgtatccttccatccaggatatatcccaattctaggaagcctttcgtgatagagtagtatcaatgactttaattaaggaaggattaaatcaatgttcctcattgaatgccacgtgtcatacctttcagaaacgcggataataatgaaaactaatcaattattatttgtggtaaaaatgagaaattaattttgaatcttagaatatggccacacgtgtagggcttaacctacacatgtagggtgacatataaggatccatgatattttttttgattattttattattaaaataaattaaattaaattaacaattatattttttaattattatattaaatatattattagataatatatttaaaattaaaaagataatattaaataaaagttataattgatttctgttaatcagttatataatattttatatttgaatttcaattgaaaatgaatactatcttttattttataggattaaataa

SEQ ID NO: 169372 - DNA, 963 bp, Cannabis sativa
gatgatatataggttgttatttattctatgggttaccattggttgtcactcaccagtctctttatatatactaagacagtatttgatacgagttgttcaaaataatttaattataaaaactattatgaaagagaatataattttatttcaaaaaaaaaaaaaaatgaaagagtatatgattgtaagaaaatgtataaattatttttagttgtgtagggtaatatgtaaatatattcccattaattaaattatactatttggttgagtacataaatcttatatattattttgaaaagtaaaaataaaataattatttaattaaagaaatatatttattaattagtaaatattaaattttattgtagtttttattaattaaaatgaatatttctatatattttattaccatctcatttaattttatttttttatgtcatttatgtgatagtataaaatttatatataataaatatatattattgctaataacttaaaaaaattgatcttacagactaaatgtatatcgtaatattttgttcataataaatcataatattaataatttatttattaattcaaaaatattattcaaattaatgtaatggaaggggataattcaagccctttatttttaaaagtgtcaacattaccctcctcaatgatagttaaattactaaaagaataatatttcaaggttaaactctcaaaacaaataggataatatttcacattactttttccttcctaacattaacacaatccaaacagccccttagggtacgtaatgtctagatatattgtaatctctcttactttattgtaaataatattccgtaataaaagacatgtgggcctttcttatagggtacgtaatgttaggcccagtcctggtataggcggactaggcttgtgtctaggacccactagtctaggggcccaaaaaaaaaatttctcctcttaaaa

SEQ ID NO: 169373 - DNA, 578 bp, Cannabis sativa
cagctgctgcattattttgtgcaacagtatttggtacagcagtggcatgattttgctctccagtagtggcagttgcttgttcttctaactccttttcagttgtttcaactccacgagcagctgctgaattttggtcactgttatctgtgggatactcacaaataggggtgtcattaatcatagaatgaggtaaaacgatttgaataaaaggatcaagattattgtcatcagtattgagtttttgaaagggaaaaatgtgctcatggaacacaacatttcttgaaataaagatttgattagtattcaaatcataaagtttgtaccctttgacaccttggggatatcctataaaaacacaagttcgggctcttggagagaatttagtcctttgagccattaaggtagaggcaaaagcgagacaaccaaatgatctaagatgttgatagtcaggttgttttccaaataggatttcataaggagttttgtttcccaagagtggagttggtgtcctatttattaaataggctgaagtaagaatacattccgaccaaaatttaattggcattttagcttgaaaa

SEQ ID NO: 169374 - DNA, 722 bp, Cannabis sativa
atatgtatatatcaatattatatatttgacatgaatataatatattaaaattttaaaacaataaggatttagtgatgtattttaaaaaaattgatgtatatctagtgtaaaattgtgttatataaaatagagaaattaaaattttaataatatattttaaatgataaaatagaaaagcttttagaagtgctcagtgctctcacacatagcactcttgtcaaattttttattctagttttaaaatatcttaataaaattttaattttttttattttacatcaaacttttgcataacatcatatatcatctactctattattttctctacataattttaatcttatatttttgaatataatttattcatttcattaaatatttattaataaatataaaacaaaagaaacagaaagaaaacaaaataacaataataataatagtaataataataaatgattagctaagagataaattttagctataaatgtagagatgtacattagttaaaatattgaggtatttagctcatctagtagaagtgtcattttaaaaatttttaaattataatttacctttatagttgttatacctcgtttattaggattgttcgattatagctccattttcatttatttatttattttaaaaaattaaatatttatagaaaaaaaaaattaaggaattatttcacaaatacataaaaataaaaaaaaaattacaaa

SEQ ID NO: 169375 - DNA, 527 bp, Cannabis sativa
agttgtaattagcattcctctttttattttagtccgtggatgcataaggattagaagttgagggtttaaactttaaattagaggaagatgaagactgaaaatttgtcactacaaaaaaaaaatatctttagtgacaaacaaaaagttacttgtgactaaatatttaaatacaaattgtcactaatatagttttagtcacaacaaatattgtgattaaaaatacatttaatgacaacaaattgtgatttttagtcacaacatataaaatattatttataatattaatgacaattttttcaattttaatcacatgttttgttgtgactaaaagtgagatttttttataatgtatacatgaatccaataatattatctatggaattaaaatacaatttagttccaaattaaaaactgaagggatatgaacagttttatagctttttttaaaaaaaaataaataaattacacatataactaaataaattatattatatattaactattatacatttacattgacttgactt

SEQ ID NO: 169376 - DNA, 643 bp, Cannabis sativa
cagccagtctcgaaggggagattaattcattaattgagcagggtgtgtctactgaggttggtatccagggggagacttcaaatgttgctggtgtccaggggaagactaccaatgtggctgctgttcagggggagatttccattgtggctcagtcgtctgctcctgatggtggtgactccaggatacttggttccagtgctcctctggtctcttattccagcagtgaatgattatgatcatcgagggggagttgttttgtcttttggataaaatttgtacacagtgttaatattttgggtgtgcttgtgtgtctttttgtttgtggtttgtctaaacatttgtttgtcttaatgtggtttttcgttgatcataatttgccaagggggagattgtaagtgtcatgtttttgtgtggcaaatatgtaaatacttttgttcagtttttctgcatcagtatttgtttttctaacatcttttctgtggttagttgcatctgatctcactaaatctattttagtgccatgtcagctttctgcgtgtttattagaatgtgccagctgtacttagctggttggttagttagtcaattttcattatcttcaggatatatattctgttgtgtctggtgttctaactaactctct

SEQ ID NO: 169377 - DNA, 1391 bp, Cannabis sativa
acgcatatcaccacacatgatgtacgtagggctgaatttgatataattgtcgctctggttaagggtaacactacttcgaagtcatcagagtataagctagaataagagaaattttctcctctctcagatcgaatcaaggctttggagaccccctccaaattcaaaaatccaatgtggcatttgtacactggtaaagaagaccctgtctcctacatatacaacttcaaagtacaaactgacatgcaaggcattcgagacaatctcgttgttgaaactttctagccacgctattagaaacagcacaataatagtatcttaagctttccccgagatttgtcgattattgggagacacttaagcaagcaaattatcgttgattctccccgtcaaggcatagactaatcaagctcaacaatttggtctgcatcaagcagcaagaggatgaacctctaaaggattacatgcacaattcttagacacaaccaagcaggaaaactcactaaaaacaccaaggtcatagcaatggtagctggactaacaattttgagtccactcagggcagacttaaaactcaagtcagcagacactgttcaagagtttttagatagagctgacaatttcatcaagcttaaagaagctatcaagaaggtctgtagagttgctcaaacaaaagcaaccgaatacactttttatcctcttcttaaatcctaaatggacattgatgaggaaggtgaatgtaaagattgcttaattttaatatgaggattagcaaataattagagcttaattatgaaactagatttctaattacgatttatgaatttatgttgatatatttgaattctaggtgtgttatttactttatatatgaaattttatattttttatatgtttatgcccagcaacattagaacacgatgtttggccgatagaatcatattttcttatggtttagtattttagttttagcgggacaatataattagtcgttgaaaatgtcgagattaggcgggatattgtgaattgaccattttacgccttggccactttattagttaagttttatgtgagggacattttagtcattttatgtgttaagggttaggtggctccctctcatattggcagctagccacttagagattaaggtattaatgaatttttttttagttggaaataggaagaattatcaagaataggaaaaaatagaaaattagatatttggcactatctcttgcttcggttcagctgagaaccaagggggaaatcaattttattctacaatttaaggggaaaaatagtaaggttttagtgattctaacccaaggtaagctcccaagctcatccctttgtgattccttaagtttcaagctaagtttatgcatgatttt

SEQ ID NO: 169378 - DNA, 512 bp, Cannabis sativa
gaattagatacactatgagcaaattcgtgtgaattaaattgaatgaacactactagatttatgtgacattagtagtagatcaataagttatttgaaaaaaatgaacagaatatcactagaaataatatatattaatttttatagtttactgagaatttttcaacataaaaaaatttcaccacacaaaaatttaaaggacaaattaaatttattcttttatatattttaacaatatcctctaacttgtaaaagtttttttttaacaaaaaaaattactatatattttaatatataaaatgtgactaaataactcaattctagatttaacagcttttaaaaaaaatttgttaactttacgaagattatcaaatatatttaattttatattaatagtatgtaattagttttgtaacaccccactattttgtcttattttacaaaatactaattttgatgcattaattaaaaagattcaaagctatttgaaaatacacagtgggttttacaataaa

SEQ ID NO: 169379 - DNA, 533 bp, Cannabis sativa
  modified_base (270)..(273): a, c, t, g, unknown or other
attttgaaatcatcatctccttatgtgattagatagaggtggatgcacgtcttgatattcaaatagagatggaaagacaagctcatccttatgtgcaaacaacgacagaaagactagctctcactacaacagattttcacattatcggcggaggcatctgctggtattaatagggcagaccgccggtaataattaataccggcggaattcgctgataattatccgccggcattaattggtcgctataagtgactattagcgacgaaaatnnnnttccgctggtaataatattaataccggcggattaatatcggtggggttcgccggtattagtgtctgcacttttacacgcagatgcaataataccggcggaccctaatcattgttctgccgatattagtatttttaaatataaaaaaaaatattattttgattattttatataattaaattaattataataattattttatatataataattatttcataaatatattattaattaagaaattaagcattaaaattaattt

SEQ ID NO: 169380 - DNA, 987 bp, Cannabis sativa
ggtgtcccataactaaaagatgtcactcactggtcactgcacagtgggagtgtgtggattaagtggaaaaatgaaatcaactatctgaaagcatgtatcattcataccagacatctttttccatttatctcctaaaactcttcccacttcagggaaggaaattccggggttggttttcttcacattctgcaaccaacaaaaaaataatgcttagtaatgaatttattcctatgacaactgccttgctagattgacaaacatcaacaatttcattcgataaataaatacaagagcatatggtgaagcaaaggactgcaactagctagcttcgtgccataatgagaaggaatatgcatccaaataaggacatatatttagaaaacaaacccacctccctttccatttgtgagaagaacatgaagcctgacattgctcttcttggtgcacttggatcctttttcttcttcttcttcttctgttttttcttctccggcccatcttcatctccatcttcagatttcttgttggaagatgaaggttcttttattgtatcattctgtatgtgcttcagaaaaaggacatttagtttatttgagaataacacaaaaaattgaaaggaaccatcttaaataaacataatgaaataacaaaaaaagattccctacctctttctccccttcactatcaatagcatcagaatcagaatcatctacaattgattctgtagttcgtggaccattgtccattatgagccctccttgtgtcactgttgattctctagttttgaagaattgtatggttgatgttgcagctgtgttgttctctgtgttcacacataatggatactttataaaatctgtttcgtttattttcagatgcttataaaaacgtagactgcatcattaagtatttttataggtgggtagttttccttcacttgatattgtatctgttaagcaaaaatttttcatttagaataataaaaaa

SEQ ID NO: 169381 - DNA, 609 bp, Cannabis sativa
ttctatagattctaatcgtctcgttgggcttcatctgcatctttttcttggtggggctgccataatatttgaaagcatatggcgagaaagaaacaacttgtctcatgggggaacgcctacccctctccacaccatcctccaacatattaatacaaggattcttgaaattacggaagatgtgcgaacacagcaagttggtatcattgaatggctcccccccttccggatgggtgatgtgtaatacggatgtatctattgggaaacaccaggcggcaggggctgtgatcttcagaaatgaaacggggagattcatcaattgcttcacactccggttgactgtgagtgagccccttatcagagagatcatggttctttgtaaggaagccgaagaagctttaaagcaagggtatgcgaagatgatttttcagagtgattcatccaatgcaacctctgctctgaattctaatctgcaggaagttggaactcttcaccataacatttaggatcaagtggcgaatttatctttgtaatggctcagtttactctgtgggaagtctcctggatcccgaggagttgcaatggtgtggcccattcggtggctaaatgggc

SEQ ID NO: 169382 - DNA, 645 bp, Cannabis sativa
acttcctctcattttgtagcttggatggatttacttaagtatctctcattgttcttgacttgtcacaatgcaaaaattatggttttatatggttaaaatctactattttgttggaccacacaaaattgactatacaaacttccaacttcatatttcatcttccttatgatgatcagttgaagccaaaatcaagaggttttgtcaatgtcagtcatgggtcattgttggtttttaaccatgtgaaaaattacaaaggtagtttttgacttgaggcatatgcatgtattcaattatacatttaatgcaaggttgatatttttgtgtcttgtttatttgttcattccactatcacaaaatatttcaaaagtgaagagtgaaactctaaatagaaaaatagagagaatatatgttagagagagagaaaaagagagttcttacaaaattgtgagaaatattttataaaaatggtgaaactacaacactagtaagtgagggttttgagtgtattcctcaaataattgacaaaatttgagaatataatattatgtgcccattattatcatagtggaaaatttagggtggtttttatttttcacatgatcattttttagtgtgaaagatttaccgtggtttttattgtcacag

SEQ ID NO: 169383 - DNA, 702 bp, Cannabis sativa
aatagcatcaactctaccattcaactcttcaatctttttcgagaacttgtaatgtaattttagttggcttattacatttctgggaggcctatcatgatgtgtgtcacattgaaagcacatgtaaaataataacttgtttaagttaggaacattagtagtttgattgttgttattatctcttatctccatcatcacaattcttgtgttccattcatctaacacatcatctatgtcatatgacacatctttcagcttctctaaccaatctttcacattagtattagattgctttccctcagcatcacccaacaccaccataattgttttcagatttccttttaaatgctcaactgcattatggatttctgtaacatgtttaaatccatcggttaattcactacttagtgcacgaagcaatctgtctagaataacactggttacgatctcggccatgatatagttcagctttgtcctttttacctataaatcaaataaaacatatattattggactcaattagtagagctcaccaaaaaatagtaaatgggattattatgtgagccactttaatttcttttatggattaaaatagatatttaatgttatattcttctattattcaattacatgtaatctgatttaattgtgcaattattgattgatcatctttaattgttatctatgaattcgaatcaaaattct

SEQ ID NO: 169384 - DNA, 666 bp, Cannabis sativa
taaggagtaattgatcgaactttggattcgatcattccgcctcgaatgtaactgaaggattttgaggcatcttggaattacgagtttaaggagccctgatttcaaattccaagtcacctggtggaaaagcaatagtaacttgtagtaaaaatagtggcttagctaaatgaatatttgcttaattaggcaactcaggccgagcctcttctcgcaaacaataatgtctatcctctatgacttcactcaagaattgcctatagtaagtagatagctcttcctggtttgtcctaatggtgtgttctcgaatgatcttttcatcgttaattttaagtatggacgggagtttatggatttgaggtttaaatgttacgacctagtattgaggatagtctgattctaaagggtattgtcacaaagtatagtgctccaaaaaattcttggaaaaacagagcaccattaaaactaaaaacctacgaatgacgtaaccttaaaatttctagtcttatattactaaaaaatttatataaacccctctttcaagaaataaatgatgcaacaaaaacatataagaaactaaataggaagaaactagaagattaatgaaaaaatgtcacttactggttcgatgtaagaagttgggtcccgaagaatattttgttgaaaact

SEQ ID NO: 169385 - DNA, 765 bp, Cannabis sativa
tatacaatcattcctgttcttccaaatcaaataacatgcagtagcaatgaccgcatttacaatagttgaactcatatcaaccttgggggacagattcctttgttgaagctcgtagaggccctttggccagtttagactccccacccaactctctaaaatcccaattagctttttagtaaagaagcaatccataaataaatgattgtgagactgagaaaagtctactcaaatgatctcgagtaagaagttgatcattaaagatttgccaataactaaatctatcttttgggacaataagcttatgcaaaacagtaacataataagaaactttagtagccccaatcaaagcattatagaacatgttaaccttgaatttacctcccttaacagcttgcttcaacatgttctcatttgtcaaatttgttatcttcaacatcttcttaaagtaccaactcgtatcatgtttcatggggaaggattctgaccctttaggtaaatagaattaatccatttgacctaaagattatcttgtttgcttgaaacaccccacaaatatttagcaatcatagtagtgttccatttcttaccctctcgaaacctaatgcatccaatctgtttagaaagacaaactttttcccaggaaaggagatgaagtttgctcctattaccatttaaatcccataaaaaatctttacatctcttatcaatgggagcaataatcttctgaggtaaaatgaataggctcatctagaacttcaaatacca

SEQ ID NO: 169386 - DNA, 772 bp, Cannabis sativa
tttttttttttttttggaggcgagcccctcactcttttttacgccttagaccatttaccactgcctcacacgtgtgaggcttacacctctcttccaaatactgagacgcacgcaatagttaaaattatttctttcacttttgaatctcaaacaattcgatttgaaaatgaggcgtgccttgaggcacgcaatagaaacgcaattttaaacattggctgatattattgatgattttcttccactgtcaaggacaaatactgatgtgattttaggggttcaatggctgaatactttgaaaaaaaaccacccaccattggcaagaacacaccatggaattcaaggtatgagatcaaaaggtgattttgaagggtgatccgccattacataagattccagtttccatgatggcagcgatacaagctgagaaatttgaaattttggtggaattggggcacaccacattgttggcagcaagcgaaaccccgtctatgggtgtttccattttgttacaacaatactccaccgtgtttgaaaagccaaaaactcttcctcccttccgccaacacaatcatccaatcactttgcgtcccgatgcggctccagtgagcgtgcagccttatcgatatccccaaataacgaaaaatgagattgagaggtttattggacaaatgatggaagctcagattattcagaatagtaacagcctgttttcaagcctagttctattggtaaaaaagaatgacagaagttggcagttttgtgtggattatgg

SEQ ID NO: 169387 - DNA, 766 bp, Cannabis sativa
tgttaaattttgtctcaccttaaagcctaaaggagctcaaaacgcgtatgaataatataaattattccattttacaaaaataataaagtgaattattagtgtatttcttttctctttttgccccctaattttttggctttattatcacacaatcctttagcaaaaagattagatcacacacaataatatactacacaagtcaagcattcctaaatctaaaatccctttatctaaagattattaaactacacaattaggaccaacgaacttaacagaaaagtcactaatcaatagttaacgaccacaccgacttctttttttccacttaataaaacatattaactatgacttacctactctccccctagtatcaaagtcattgattgtatattatttgtctaaagtttttttttattattttttttatatataattactatttaccataatctaaaaaaaataatgtcttaatttggtgtctactacacatatatgataggcggactcacgtagtggcgaggaggcagtcgctccttgaaaaagataaacatgtatttttgttagttataatatatatttataattaaaagtaatatatatatatattgatatattattagttttgatataatttttaaactattatacatttatttgtatggcatgtttactaataagtaatgagaatcaatagtaaggtaatcattctcttacatttgtttacttacattattaaaattaggaaagggaaaacttgattaaataa

SEQ ID NO: 169388 - DNA, 567 bp, Cannabis sativa
gttacatttaacacagccaaccaatttaactgatcttggttatcacacacttggttatgcttttcgaatcagggacacaaattagtatttcaattagcaagtcatccggaagaattgagttgatttggaacattatcttcttcatagacttagtttgcatcaccattgctgtttcactaattattaacaaatcacttactctattattatctcttcactatagctataggggggacaattttttttaaagagtagatgtaaataatagatgtctaaatgttacttaactatatgttagaaagtttttacgattgttattattttcttaaaaaaaaaaattaaacgctctacggctctatatataaaaagctctaaaattttattaactatatataaactatacatctattaccttaataaaagtggcaatactttcgtccttaactaattgaattactaaaaattccttttattcgcaccatatgtattaacacataaggtaaagcattattaggttattcacttattctatattatccaaatcacctttattattattattattat

SEQ ID NO: 169389 - DNA, 936 bp, Cannabis sativa
ttaatcacaaaataaagtaaaattgtgtttaaaaaattttataaaataaaaatgtgatttgtaatcacttttattttttaaattataaaaacagaaaataaaattgtgttctataaaatttatttttaattttatttttttgattttatttaagtcggatctaggtccgggatcgaatttgaattcgggtcagagaccgaggttatggttagggccgtggagggaggaatttgggtccgggtctggtcgaagtctaaaatattgattaagaaaaaaaaatgtttaaaaatatattgaaagtgactttttttatttttaaaattttaattctcaattaaaaaattgaaaaatgaaaagagttttatagaacatgtttttgaaaaaaatttcactttttcaaatttaaaaacaaaaaactaattaagaaaatattaccaaacaccacctaagttaaaatatcttaaaattttagctcataaatatcaatatactacatctctatatttagccaagatttctctcttagctaaatattttttatttcatctttttctttcacatcatatatatttataaatacataataaattagatgaataaaatatattaaaaagtataatatttaaattatataaagaaaaagtagaatagttaatgtataacgtcatataaaaattgaaggtaaaataaataaagtagaatttaagtaatgtattttattagataaaatagaaaagctactcagaagctcttataattgtattatattggtgtcttgcactctttatataattgaaaaactatgggcaggggtggactcacatagatacgaataggggtatgcataaatcaaatcaatccaataagaaccgaccgatccaattataaccgaccgccaaacattggatatccaattgtgatcggatcagattggat

SEQ ID NO: 169390 - DNA, 696 bp, Cannabis sativa
agtcacggttcccgtcaatcacttttcctcgatttgacaaagtagaagtaccctgacctgctctgcttgggagttgattttagattaaagagctagttggtgtcgtgcggggacggctcaccccatccttatgaggtgtagaggatgaaaatggcagacaggtacttcatgcccttcaaagtaaactaggtcggacagaggtggtagtaatctgtaattctcccaaagtacggaagcatggaaaacatagtaacctgcttaaggtgagcatccggccaagtggagtacccctcccttagattggtcatcagctagttttgagagggaaggaagcaatctacatcccctaagtaaccgtgcttctacaaattcttctttttttccctagttaccacggatgggggagaaacttaccgatctcctagagcacattgtcttctttggggaacaaccttagtgtattccttagtgacgtaatcttcaccggcctccaggatttcaccagcctcagacacaggttggtcgtcttcgttaaatccaccaaagagcatcctccgagatgccccttcctcctcagcttcagaagtagtatcaggacggacctcgccctgatcctccatctcttggacttcaatgtccccagtagtatctgcctcttcagtagaaggtcgtgcctacttagcatttggcaaagta

SEQ ID NO: 169391 - DNA, 1389 bp, Cannabis sativa
aaatgaatcaagtgatcttataagtgtagaagatgaataagcaaacactttccttttctcatgataacattattatgtgcaaaaccttttatatatatatggaagatgcttcaatggttacatcaaatatgtaaccatcatggttacatttatgtttagccattagatcattattgaataattgtgattaatttactaattaaaataaagaaataacttataatcgtaactcgaaaatttatttccttataaaattttaattaatattaattatatgtaaaattaaattactaataatcattaattaatttttttaaatttgttactaaataataattttttaaaaattaacctttttggacttaaattattaaaatatttataataaaacaacttagaatttaaaaatattacacacataaccttaattaataaaaaatagtaagaataacctatttaatattctacactcaatcttattatcaatactttaagtactaaataagtgtgcaagtccaagattggttcaagtgatttaatttttttttctaaaaaaaaataaaatctaatagcaattataaaatgaaagataatttttttacaacactcgacacatttgtacttcattccaccctctctcatgtaattcttctttctcagagagaaagtcactttatcattccttcttcgcagttctaaattattaatatattgtatatgtatcatttgatttgagaggaatcataaaaaataataaaaaattacaaaagtttaaaaattattgatcgttttgattattgatcttgaatatatattattgaaaggtttgaaagttactaactgttatcggttattgatcttgaatgtgtgttattgaaaaagtttgaaagttaataattgttattggttattgatattgaatatgtattattgaaactttaaaaaatattaattgttattaattatggatcttgaacataacttagcaactgatgttattgattattattgattattgattttgactatgtatcatcaacaaagttagtacatcattaaaaatatacatatatgaaattgttagtttattttcaaattatgcctaaaacgatatatggataaaatgggggtttaaatatgatgtatagatcatgaattctcatattctagtattttgcactattcttagattttgtgattaattattcaaaaatatattttagaaagggtgaaagtttaaattttataaaataatagagttttattgtagatattataattaaatggcttaattattaaaaaaaatttataatacaaacttaaatataaaaataaaattattaatattaattgctaaagagtgtcttattaaatagagtaatttgcggc

SEQ ID NO: 169392 - DNA, 893 bp, Cannabis sativa
aagaaggggatgttgtcttctcgacgggtgagtttttttttgctgagatggagaaaggcaaatttgggtttcaggttggagggattagaggatggtgaggggcggtagatttggggattgtttcacgaaatggagaagattagctttgtggggggaagtgggggtctagcgtggaggagatgatgggaaaggtaggaggatgtttttttggtttcaggcgagtttagggacagaggggggtggtcgggttctggggggagtgtttctggcgtggagatgagatggtgatggagaaggtggcgctgggggtctgatagggatttggggtattaatttttttgttttgttttctatttaaataaacatgatgtgatatatatttaagtaaaaatattgtaatatgtaatacgtggatatttgatctcgtaccgtaagttagattatgcctgctgtagcaactttttcacaaaaatttagcaaaaatcttgctgagtgctcttttaacatgtaccacttttgctagaaaaatgctgcagcaggcggaggttctccaactcaacaaaaaattcttttgtgctccagagaaatgcagcagaaaaattcaataaaaaatttagcaaaacctttaaactcccaaatcaccttcaaaactccaaattgtgctccaaaaacacctgaaacatcaaaccaagtgtaaaatccactgaaacacttaaaataaaaataaacataaaataaaataaaataaaaataaagaaaaataaaaatatagcaatacttttttttcttttttttttacaaaaatatttacaatacttgttcttcttccaacattgggttgcctaaaaatagaattgacaattcgaacacaaggcaacccaaccaccttccgc

SEQ ID NO: 169393 - DNA, 820 bp, Cannabis sativa
  modified_base (780)..(784): a, c, t, g, unknown or other
atatatatatattcaaatagtcatgaagtcaacaacaacacgaaagtactactaattaaactaaatatttaactcccaacaaccaatcccctcaggcctcgacctatatagatattttacaagctatataaaatgacaaatataccctcgcctttcatttattgacataccatacattactactaatatactatgcttgcttattcctatatagttatactacgtacccaataccaatatactccccttcttcctaactatatacataccatattcattcattcatgtttttacattcaacaaggcttattacaattttttattataatttttagtccatttctacatttgaaattatatgttacaatatttttttaaattattttcttagcaatattaattagttatagttataatatattatttctttaaatttttgaataaatttataaataatttataatactaaaaatagagttactaatattttagtttatcacgagtgttttaaaaaatttaaatctattttcaacaccgtaaattattaattataaattttcaaaaaattataagaatggtgttttaaatataacaaataccacaccgtgaaaataaaaaattaaaaaatattctaatatatatttttattggatacaaaaactaactaaaaagattattaaaagattataatagaatgttaagatcagtactccacttctactttctactaatttccatatgtattgatgattctcttcagggccggccctaggcataggnnnnntaggcccgtgcctagggcccacactttccggggccc

SEQ ID NO: 169394 - DNA, 608 bp, Cannabis sativa
tcatccgcttcaccgccacagacaacccaaacgacatcacagccttataggccgaacctaacccgccattaccaagaacctccgccgccgctttcatcaagtcagacaacccaaaactacccttttcgtcgttcaccattatcaaatctccaccaccaccatcgctgcccttctgggtggatgaatccaaattcctccggttagagctaggcacgtgaacttcaaccacgccgtctgtggtttccctccccaactgactaaaatcgtcttcaatattgttctttgagctaagcagagcatatattaagacaatgaccatggcagccacgactccgccgacgactaatctgttgtcatttgtgtaattttcggtggcagctggcagagccggcgattgggtttgtacagtggagcaaactctgtccaatggcttaccgcaaagaccatcatttccggcgaaagcactagcattgtaagatgaaaagatgaccggaatttcaccctcgagcttgttattagataagtcaagtgaattaatactctgtttaaagataggaatcgagcctgtgaattggttgttctctaaatgaagttctatgagatgagtt

SEQ ID NO: 169395 - DNA, 645 bp, Cannabis sativa
aaggcccccattcaaagcagctgatattggagaaaaattgttgaactcgaagatgaatggaaagggaaagtcaaccacatccagtatactgctcaaaattgcaaagtttctgaagtatacaaagtgctaacagcagcagatgatttatgtcattggagtaaacaagtatggtcgaggatgaacattcctaaacatagctttctcctttggctagcaatgttggacagattaaagaccaaacagaggttggtcaagttttaaattacagcagatgctcaatgcattctctgtgaagattcagaagaaacatctcctcacctatttttctactgcagattttcacaagaatgcctcgaacaaatcaaggcatggctttgttggagggctgcaaccacatccttgcagaatgtgctccgctggattaacagagctaagataagtaagttttggaaagctgtttatgctgctgccattgcagccttagtataccacatatggaaaactagaaattataaaattttgcagggaagtagcaaccaagtgcaacaattgatccaagaagtaaagtggcaagtcaaaactaggatcacttgtgtgatgcctaaaacagtagcgaaaatagactatgagtggtttatttctttg

SEQ ID NO: 169396 - DNA, 576 bp, Cannabis sativa
caagtattaactttaagatggaatttatttatatagtaaataattttaatataggagcatttttcgggaggtctccatataaatatgtatgaggataatttataggatcaaaaataaaatccaaacattcatgcaactgaatttttaaattcttttcttaaaattgtaaattattcaaaaaatttaaaaatgaatcaaatacttctagtataattataatgaatactatcatataaaaaaatatatatatattttctcaaaatatcaaaaacatatccctattaatagagacaaaaatgatgtccctactataatcttgtgctatatatatatatattatattaccataacaagacatttgtttggcttggacaaaacaaaatggccttttgttccttctgtaattctttgatttactttaaaataaaatatactttattgctttgacattctaaatagatggcatatttaaaatacaattttaaggcaaaaacttgcattatatgtcaactaactatgattatgagactaattgtgcactgttaattctttgaaagtacgcaattcatggttaga

SEQ ID NO: 169397 - DNA, 686 bp, Cannabis sativa
tttcgaagaataactgaaaagtgaaagtttcacaaagaagatggaatttgcgttgcacatgtctatcctattatcattccaaggataaaatcacagccatcgcattcattaagatcccaaattgactgctagagttgggaccatttgttttctatactacaccacccaactaatccgatccaaaagcctaaatttattattcataaaatactcaattctggaaagtgggcacacttatacataataaattagatttgcactaaatattcattgatatataaaaacataatctaatctaatgtacattatatgtacttctaaaaaaattatatataaaactaatattttaatataaatttaataattaaaaataaactaattagcaactaaatctctttattcctttctttctataaaaaaagtaaaatttcaaactgtgaataaaaaatattttctattgaaaaaaatcaatgaaatttgagttataatatagatttataaagggaaatttgaatttctatgcttacattatggaataattttttcctaaaacttaaaatagggaatattagtaatatgggataacatttttttaattcccacaataccctccccatttgaaacctgatgtcctctctctctttcgcctctctttctctttttctctctcgctcggtgtcgcaccc

SEQ ID NO: 169398 - DNA, 852 bp, Cannabis sativa
ttgtttggttaaacttttgcttttagcttttaggctttctcttcttgaataagctactaggccttggttggttgggcttttataagttacttttggacttttgaagctccaaaagtacttctgctggtaattgggtagctagtgagttttaacttttagttttgaaaaactctaacagaagtcggttttagtagttttcttaggaagagcttctcttcatgagaatttaaaaggtagaaagtaaaagctcagtcaaacaaagcctaaagtgaattcggttaaaagggctttttagagctaaaagttgaaattcattagttatccaattagtagaagaagtgtatttagatcttcagaagactataagtagtttttaaaagcccattcaaccgaaagagtggtgatatctttgtttttttaaactcaaataattaggttagtgttgaatcacaaggtagttttagtagttttaagagctcaacttgttatggttagggttatgtctttttggtgtacattctcatgttacctatattacacacgcccattggtaatttggctttgttttttatcaagtaatttatggtaaaagtacttaggttgttcttttttagggtgaaaaaacctaggtatttaagtgtaacgggaaattaaatttaagtatttttgccttaaaaatttgataaatttgatcgtctttctaaatgttttgaccaccttttggaaatggaataaaagaattattaaagttaagggcaaaataaggccattttgttattataagatgtggatgttcactattaaaaaagctacatgttattattattattttttttgaatggaaaatgttca

SEQ ID NO: 169399 - DNA, 948 bp, Cannabis sativa
tgttggaagcgtttgttagttatttcgattaatattttcttcttcatttgttagttatcactttgatttttttttttcacctttcaattagtttttgttaaactgggtggtaatagtttaggagacacgaattaagttgaagaatcatactacttaaactttgaattcataatccaaatcgttatcaacatcggcttgaaatgtattaaacttaataacaagggagaaatgagaaaaaaggaaaagacacgagttcaaacctaagacctttaagatattaattgattgtaatattattactttacactaaaaaaaaaaattaccaccatatataaggaacgatagtggcaaaacttttgatgtagtttgttttgttgcacaaaaatttcggcaaaaaatgattttgtgatatttttacattattttttgctatttttgtcatttaatgttcacttaataatttattaagaaaatataaaataataataatgcaaagataaatataacatttaataataaaataatataaaaataagtaaattagcatgttaatcaaaatttaataataaaatattaaaaatagcacaattataaatataaaagtatagtatttattgtgatgcaaatttagaagtgaccaatttttcatgattttgaattttgatcttttttttttttgaaaacaatgacgaatatcattgataactaaatattgtcatacaggctaaaggactatatacaacccaaagaataaaataataaaaagtcatctagccagacaagttgttaatccatctgaagagcatgcccaactaatccatgtgcagtcacaatggccgaccaatgtacatagatcagggacactccaggataactgaataacaaacttgttacattctctaacaatgatcctagatcactaaaaaaaaaaagaatgtctcctagcaa

SEQ ID NO: 169400 - DNA, 603 bp, Cannabis sativa
gcataaaacccaacaaatattatcataaatcaaccgccccggaagaaaagcactttgattgtttgagatcacaaccggcaatacttctttaaatctattcgccaagaccttagaaattattttataaagcacattacacaaggatatagggcgcatatcagtcatagattccggatgttttttctttggaataagtacaatattagtatgatttaattctcttggaaaagattcaaacaaaaagaaattcttaacaagagtaataatatcattaccaactgtactccaacatttttgatagaatcccgacgtcattccgtcaggtcccggagatttattcgggtgcatttggaagagggcacgcctaacttcatcatcagaaaccggttccagcagcctgctattatgtgcggcagtaacagcagtaggaacacactgcatgacagccccatcaaccacggcagtaaaggaaaataacttagaaaaatactccaccataaccgaaggaagccttccttgccaatcaacccaagcatcagctgaatccttcaatttttgaatcgaatttctgttagataaattaacaattaacccaagatctat

SEQ ID NO: 169401 - DNA, 1316 bp, Cannabis sativa
  modified_base (676)..(695): a, c, t, g, unknown or other
aataccacatatattgaagaaataccataaagttagaagtgatgaaattagtagcaaaatctttttatgttttaatttttatcgctttgtttttttcttttccgtaacaaaacctctttttttttttgtaaatttgaggtatcaattaattaaatattaccgttaaataacaactcgataatcactatatgcatttatatgaacatgaaagttaaacgtcgagtgaatacaataataattcagttgttattcaatgttgcaaacttataaaaaaaaaataagtacacataaatgagttttgccaataataaaataattaagtataaaaaaaatttgccgtaattttgtaaaaatataaaaaggccacgtgaactcatgttccaaaaatagtaatgattgtatgcagtgagttttgttataataaagatatatatgggaaagggagaaatcgatcgatggaagaatgaagatcacaagaacaagagttttaagtaaccaaagatttagagggaacagtgatgaggttcaattaacagacatttgcatgagaagagcatccatcgcacatgctaaccctaaatgtccgactgcacaaagcacaccaaattaccaaaacacacaaccaaaaagaatatgatgattccatgcctaacatgaaaataataataataataannnnnnnnnnnnnnnnnnnnataataataataataatgtaatatggcttctgatatttctgcgatcccgatatataagtgaaatttatgtagtagctgttttttttcataaaaaaaataaaataatattactttattcataaattaatgtatccatttattcttagtctttgaaaaggaaaaataaacaaaatcacttgttataaaaatgttgaattaaattagaattaggcaaatcagattatttggaaattggacacattcaaagttatttcgttaaattttttactttttatttttggagtaaaaaatgtaactgttttaatataaacatcaattccaagaatttacatgtaacactattaccaaacaagctaatatccatcaattccgtgagatgagattttggtgtcaaatctcaagattccaaagttcccactaaatatttatttatgctttcattatgatatatatgaaatctagctctttcttcaagttgagacccctttcctactctctcatatataaatactactctcattgatcctcttcccatctcaaattagcaattgcttcttataacttctctactctcctcatacactccataaccttgttttcgtgttaattcttcgttgtcta

SEQ ID NO: 169402 - DNA, 846 bp, Cannabis sativa
aagagataatgaaaacttatgtctgactatagcgtgaataagttaaaacttgaagtgtcgtccaacaaaaattcctgtaattatgatctgatacatcgccttcgtatggaaccccaaaagcaaaagatcacatttgtttctccaaaatggttacaaaatttgatacccattcttccgtcaccagcgcctgtgactcttcttcctcctcctctatcgatactctcttacacgcacttcatctgcttctgtacatctttctctggacaccgcatctccgcctgaagcagaggcggagcacgacaggcgaagggtggttggactcattacacatggtgtgatattatacaaccatataatgtagtatttaaactgtacttttaatttattttcattcccaaaatatccttcaataaaaataaaaaaaaattaccccctctctcccaccacccacctaaactagctagaccaccattcgccacgacctcagccggacctcaacattacataatgtcacacaaacaaagaaaatcccaaaaaaagctatatcctaaaacccaaattcatccccaaacacaaaagtttataaatcgatctaaacatttcaatttaatcaaactttgcaattttaaagttgaaattaaagaaaaaaaaaacaaacttggttcggagttggtgtcgtggacgaaggcgaggaaggtgattagagactcgatctggggtgtctcgtgggtcttgtcggtcgttgggggtctcgtgggtcgcttgggtcgagagtggttggaagggttgtcgtgggttgtgtgggttcgaatggtggattggtgggttcaattctgggggccaggg

SEQ ID NO: 169403 - DNA, 781 bp, Cannabis sativa
ccactttgtttggtaatccactgccattatggcattctgtaccctaccatttcccgttggtagggaaccaatgaaatctattctccaaaccgtaaagggccatgggctagtcattagagtaatttcattaggcggggctcttggtatgttcgcgaatatttggcatgaatcacacttaaggacgtagtcttcacaatcattcttcattattggccagatatatccttgtctcagtatttctttgagagactcgaacctccggtgtggtctccacaaaacccctcatggacctcctgcatgatccgtctagcttcagggtccgacacacaccttaagtaccgcatgctgagccctcttcgataaaggacattgtccatcatcatgtattgatgagcctgatattgtaactttctggatacaaccctctcttagggactccttttgttatgtacctaacgatggggtccatccagttcgactcttactcattagtagccattgtctctttggttttgatacttggttccgtaaggtgcttgacaggtaccacccccaacctttctatcttgttgtttgaaactaacttagctaagcagtttgcctgagcattcttctctcatgggattctctaaattcatggagcaattccctgacaattgccacataagcagccattttttctccccgagtttggtattcttccgacacttggttaaccactagctaggaatcactgaaaacttctactcttttggctcctacagccttcgctaatctcagc

SEQ ID NO: 169404 - DNA, 998 bp, Cannabis sativa
aaatgggttttcacaaagcgaagggatagactacaatgaaatcttgtctccagtggtaaaacacggattcataaggctaatgccaagcattgaagcaatcaatgacctagagttagagcaactagatgttaaagcagccttcctacatggagacttagaagaaaacatcctaatgaagcaaccaaaggggtatgaagtcaaaggaaaagaagatcatgtatttcagctaaagagatccttatatggattgaaataattaccaagggaatggtacaaaagatttgatgagtttgtactcataattaatttcaaaaggagctcttataatagttgtgtatatatctagaaaaataatcactatttatctccaatcatatgttgatgacatgcgtatagcatgcaaagacatcctaaatataaacaaaatttaagctatgctgaacaagaaatttaaaatgaaagaccttggttctgcaaagaggattttaggtattgacatcattagagacagatacaagagaactctcaaactgcctcaaagtggttacatatctaaaatccgagacagattttgtttgaacaaagtaaaacctgtcaaaactccttacattctactattcaaaatgtctaaaacacaggcctatatagatgatgaagaagccaactatatggacaaggtgccttactctagtgatgtggggagtctaatgtatctaatgattttcacgaggccggatattagctacggtgtacgtatggtgagtaggtttatgggacaaccaaggaacatttgaatgtagtaaaatggatcatgagatatatacaaggcacaaaacaacttggattggcttatgaattaagctcaaattctatcaacatagcaaattttgtggattctgactatgcaggggtcctagacactagaagtgttgggttttgtaccctaaataaaactttatttcaatataatcttaaatattcatttatcaataaagaaa

SEQ ID NO: 169405 - DNA, 884 bp, Cannabis sativa
catggcctccgaggaatctcagactccagccgccagaactcctaacccagcaacaccagcagcagatggaggctctgctagttccggcatcaacacagcagcttcgtcatcgaccaacccaactatcgtggcaacccctttcagcaatacattaagtcagcctttcactctaaagttggatcgaaacaattttcctctgtggaaaacgatggtctccaccatcataagagggcatcgcttggatggattcttaaatggttcgaaaccatgtccaccagaattcttaaatactacagatgctactcaaggagaaactcctatgatgaaccccgattttgaagcgtggataactcatgaccagctattgatgggctggttatacgggtccatgactgaaggcatctcctccgaagtcatggggtgcagatctgcaactagtttatggactgcacttgaagagctatacggagctcattctagggccaacatggatgaactgcgaaccaagttgcagacagttcgaaaaggatctcaaaccatgacagagtatttgaagcaaaagaggatgtgggctgacacacttgctcttgctggtgaaccgtatccagataatcttcttcgaggtaacattctgtctggtcttggtgctgaatatctaaccattgttgttcctcttgaagcccgcacaacaatgacttggcaggaactctcaagcactcttctaagctttgacagcaagttggaacgcctcaataccttctcttccaactccaaacaactggacagccccagtgcgaatatggctcaaaaaccatatgctcctaacaacaactcaaatcaacatggcagacctggaaatcactcatcacaggggcgtggaaaca

SEQ ID NO: 169406 - DNA, 527 bp, Cannabis sativa
taaagtccttcgatccaaaatttttataaatcaaggtgggagcaggagatttttagtagcttaaaaagtatcaggtgcacgatttggtacatgtcgaaatttggggagcaaaaatcctaattagcctagatttatggctaaaaaaactcttaaaagcaaaaaataaataaataaatagatttgcactttatttaagtaaaaaaatagaattttttttttaaaagaaatacacagctcacattttaaaattctaaaaattcacatcattaatcagaacttgaacttgtagaaagaaagaaaaaagtctctaagtgacgttctgtgtctcgataactaacttaaggtttagtcccttatttgaagggttcattggttatgtcaatgagtggtggccatggtttggttgacaatgacgggtggttacctgggtactgtgagtggtgacgaatcgagaatctgtgtaattggaattcggctattcaggatcacaaaagtgtgcgattgaggtgtgtgtgtgtgtgtgtgtg

SEQ ID NO: 169407 - DNA, 533 bp, Cannabis sativa
ttgctttggtagactaaagaatgtccccacgcgctgtatgatcttgtagctttacagtgttccccacccgactacactaaaacttaccataccttacatattaatctttcctaatttcatatcaatcaattttattaactcaattgaactacatatataacattcaattaatcaagtcatagttagatttttctccaaaaccaactaattttgtattatttaacttttaataaaagtttgattacttttatttatcacaaatttacgtaatatcttgtttttaatttgtcacgcatatcttttgtttttttaatagaaatcatcctttattagacaactatctcagtcatcaaactaagtaacaaattaattggaacagactctaaactgaaattacaattagggaacattacagaggctccagcaaacttatgaaccatcatattagctgatcgtctaacaaaataaataaaaatattttatgaaacattaagaatagccttacaatcattaaccacttgaccaaacgtgga

SEQ ID NO: 169408 - DNA, 839 bp, Cannabis sativa
  modified_base (800)..(800): a, c, t, g, unknown or other
gtgcttgaaaccctagggttttcttcaagagaagacaaagaaggttcgagattgtatctcgagaagtctgaagtgttaactcagactttaaggttttgtttctttgccttttgggccgaactgggtctatttggactcttcttgtttttatttttgtcatttttgttgtggacgcgtgacttaaattgcttaaataccttaatgtgtttttgtgtattgattgtatattcttgagtgttaagagttgcagattctaacaatcaattatgagaatatgtatatgcattattaaaatttagagctaatatttgtatgtttaatgtcaataaactagaattttggtagctaaagttgttaaataaacccttgtaactcaactgtacatgtatatcatggcccataagcaatttgttttaaaaaaaaaaacaaaaaatgaattgtaactaagggagttatttacaacaatttatacagtttgggaaaaaattttgtaacaaaaaaaatcaaggacaaaactttataagggtcatagtttaggtggaaaatatcttatttattattattattattattattattattattagtattaataattatgccaaattgccaatactaatctactaagttattttacattaatatatttcttattccttacacaccaccatatattatttccatacggcaacagctttattaatttcttgaatttctttaattttttcaactcactcttttattttaatataagtccattccattcaaaataataaaaaatatgggtgactattcaatgnttacatttttattgtaaccatatgcttacatttttcttt

SEQ ID NO: 169409 - DNA, 1468 bp, Cannabis sativa
aaaatagaaacactttaaccttaaaaaatataaacaatataaccttgaaatggaaacaactagcattgaaaataaaaacaattcaaattaaaaatgcaaataatataacatcaaaatgaaaataactagcatttaacctcatattatatatatatatatgtgttgtgtttgttgtcaaaatacaaataaatatcataaaaaataaaagaactcacattgaaaatgaaaacaatttgaccttaaaaaatgggaacaacataacttcaaaatggaaacaagtagcattgaaaatgaaattattttttcctcaaaatagaaattttagtttgttgcgaaataaaaacaactagtatttaacttcatatatagaaaagatcaagactagaatgcttgcctaggtccagaaatacctaggtccggaatcagtgcaaaagactaatgaagctacagaaaagatcaaggccagaatgcttgcctctcagagtaggcgaaagagctatgcaaattcaaagcgtagaaatgtagaatttcaggtaggagatcatgtattcctacaggtatctccaatgaaggggattagacgtttcggaaaaaagggcaagttatgccctaggtttatagggcctttcgagattctcgagaaggttagattggtgtgatatcgtctagccttaccaccagcactttcagcagttcacaacgtatttcatgtctctatgttacgaaaatacatttcagatcccactcatatactgagttatgagaaccttagacttcaaccagatttaccgtacgaagaacaaccagttcagatcttagacagaaaggataaagtccttcagaacaagaccatagctttggtcaaggtgctctggagaaacagtaaggtggaggaagccacttgggagttggagtatccagagttgttcaggttagatttcgaggacgagatccttttaacggggggataattgtaaagaatgcttaatttttatatgggaattagtagataattagggcttaattatgaatctagattattaattatgatctatgaatttatggagatttatttgaattcagggtgtattatttatgtcttataaacaaatttacgttttttatgttttgtgtccggcaacataggaacgcgacgtttggctaatagaatcacattttagtacttttatagtagcaggacaacttagatagacattgagaatatcaagattattcgagagttcggaaatgaccaaattacccctaagtgtctttgtgactcatggtgtgtgtaaggggtaaagaggtatttttagccttttggacttttgtccttttgtgggactaaattaagagatatgttctgaatattattattattaacttaagttagaaatacaaaataattcatttttatccaaaatagaaagaaaccacacatttatctctccaaactctctctctctct

SEQ ID NO: 169410 - DNA, 912 bp, Cannabis sativa
  modified_base (851)..(881): a, c, t, g, unknown or other
tcgacataacatcgatatattatggataatacaaacagtgctataaaatatcaataacatgtaaatactttttaccaacttaaaataccacatcttagtgtattatcaagaatctattgatataaagtcaatatattatcaataaaaaagctaattaaaaaatattgagttaatattatccatagtatatcaatatattatctattgtttattgatactcttgcttgtgattaatttttaaaacattttgggtatttattgatagtgtaccgacatataattgacaattaatcaataataaggcttaggaaccaggtttcttcagagtctagagtttattgacaggatagcgacagattgtcaatattttgttgataattacactgattatttaatatttcaagcagattggaaaaccatcggcaaactatcgagagaatgtcaatatactatcaataaaatctaaggatgcaagaaccacaaacacaagtgttttgtatcaaaaaaatatctttaaaccattgataacacgtcgataaggcaaaaattaccatttttttaacatataaaaaacccacttgctactactcacttttaatgcaaaaaccagaacaaataagtagttttgaagaagaaatatagttcacaatacatattattacaattaatagtagaaaaaaccttaaatacgagctttgcatgttactcagttgtggtctgaacttccacagttgccgcagtttcagggtagcatcactcttttatcaccagaagggaaatatttctcccgtcttcttctagcattgctcttcctttgatgtaacaacctaactaacataggcgtattacgnnnnnnnnnnnnnnnnnnnnnnnnnnnnnnntaatcaacgaggtttatgaaaaacgtgatta

SEQ ID NO: 169411 - DNA, 753 bp, Cannabis sativa
aggttccacctttagcctccacatatgtacacctatgtagactgaagcaaacttccacaatcctcaatattctggaagcttgggggtaaatattattcgtatttctagcaagggatacgtggattcaagaaaactatttaaaacccatttgtgggtcctaaacgacatgaactaggtcgagcccaataacaccctggccttttggaaacacttctcgctcaaacgagtctctgccaaggctagtctatatgcagaaggatcttagctctatgtagctggaagaacctatcaatgtatacgtggaagccagctgtagttttccatttattgtttcgagcagaataaagaagtcactctccttaaatctcagacagagaataatatcaagctaaaatagggaactacataattgtagatcaagcaattaatatataattaattatccacaatataatagggcaagtagtaacagctgtgaccgtgattaacatgtcaagtcagtatatatacaatcactgcctcatgggctgggcttcacttgataagcccaaagtaatatattatttgtaaacaatccattagaggaaaagggtaactaagtataacttctatactctataaatgcgcactgaatccttcacgcgaagggttagaattttttaaatcacaagcttgagaagaggatagagtgatcatatcattacaattaggggtgagtaacggtgagtttggtcagttttttacacacaaaaa

SEQ ID NO: 169412 - DNA, 1582 bp, Cannabis sativa
gggggggggggggagatgatggtggtaagggaatgaagaagaatatgatgaagagaaagaaaaaaatggagaaaaagggttcggtgttgggttttattcaacattaatttttaccagtgcacttaggctcgtaggtaagagtcaattttgaataaaacctttgtcggtgcacttaggctcgctggtaaaagtttttccttaaattaaaaaaatgaaacacatcgttttattaattgtaaaaatttttgttagcgaacctaagtgtactggtagaacttttcacctaattttctgcgcacgtttttactgtacaggaattcaaccgccaaaaattttagtacttttgctagcatatttattttcctgcaaaagtgaaattaatatgccaaaaattaattaccttttgtcggcacacttactttcggcgacaaatgtagaattgaacagccaaaatttcccaccttttgtcggtaaaactaattcaacggcaaaagtaacttataccggcaaaataagtggtcggcatgagtgttacccaagggaataaattagctacattttttcggcgaggttcattaactacgctgacaaatgttgactttttttggtgcagttaatgaacttggccgacaaaagtcatttttcttgtagtggaaaactgtggaccatcttccctaaaatatacaaacaggctaagtgatatcaaaatatcgcttacacatcaaaaaatacatccccaacgtgttttctcactcacctagcgtccaggttgatatcacatgtcaaactggacactggatgtcaacttgggcgctgagaatgagatgtcaacctcctcgctgggtccagaatagccttcagtaaaatgaccttaactcactcaatattaatctgattgatgcgattcaacttgcatttcgaagctatttaagtgctctataaagtcctgtaccgcacctcaatcgaaattctgaatttattgactccaaattttaccccaatagagttacaaatttaagctacaacttacccgaaataggttctgttggcgcgacttaaactttaaaaattgacaattaacctctgaactcaaattcaaccgttagatcatcatctacggtaaaaaatagtctaacattattttttcatattttttggattattttattctcatttaataaaacatctttcacttataaaaggagagctcctcttgctcattattcacattcagaaaagtattcacaaggtcagggcatatctctctctagtttctctctctagaaattagagctttcacccttagccaatttccttgtaattctcgtgagaaataaaaatttcaagtagacgtagctccattaccatcgcaacatggggaatgaactactataaattttgtgtatttttctaaattatatacttacatttattattcatctcgccaatctaataagttgatgttggccactttcagcgtcaatggattggaatagtgttttctaatccactacaagcggcgggggtattagcggcggaccccctttttggccgctattggggggcagattttttttttttt

SEQ ID NO: 169413 - DNA, 705 bp, Cannabis sativa
gttatagcagttggttttagttgttagagtcggttagtcctagtcagctaatgagagctaagttgtttagtttctgctatgacttcggttattagtttgagcatgtatataaacacttgtatacactgaaatgaagcaaaattctttctagtggtcactactacaaaaagagattttagagaggtttttttttttcttttttttttttttcacttaccgttgatcttacaggaaattgaactgaatatcgctaaattagacttatatttttattaagtcctttttgacaaattagctaaaaatatattttttaattaatatgtatttttattgggtaattaaattgattttattgtaataaattcgtgccctaattgctccatttcttttatggaaagatctgttaattcccagctagttgtaattgtctacgaataagcttttcgagagaaattatctatttagaaagttgtcaatttttgaaaaacttgactttctctcttttctaattgatgattttggttttgcacagatcaaataaactttatttgacatgtttgaagtccaaactcgtgatcttgattcattttagaaagtttattttctgatcctgatctactgctgcaatgctcgcttttgatgctgcaaatcaagaaattttttaagaaagttttgcacagttggaaaattatttttgtggttgtc

SEQ ID NO: 169414 - DNA, 834 bp, Cannabis sativa
gttttggaacccaaatttaattttcgtgtttataaaatatcaaaatccaattcatacaatttaatttacaaaatgtagatattcacatttgtatagattaaattgaaaaatttaaaattcgtacatgtacaaattagatgttaattgatatacaaaagtaactgattaattcaattcacacatatatataatatattttcaaaaaaattattatacaattaatactttagtataaaaaattatactttacaaatttaatatatacaatataaatatattttgaaacttaatggatgaaatttatattttatttttatttataaagaaaatagagtccaaagtaaaattaaaaatttatttatacatataattttttttcttccttttaatttattattttttattttgtttattttaatttgttattagagatttaaaaaacaataataatttgatttaatttgttgttagttatttaaaaaatatttttaataaatattaaataattaaatattaaaaaataattaaaataactgatataatctacacttacttttatagatttgattgaagttgagttattatgcagattgaattagatctatgaaattcacacttagtgcggatctcggatcaaatgcactttgaaaaaaatagtgcaaatgaacaccctacttcaaatgaagtttttggttataattttggtactcaattcaaaatgtttattctttgtttttctttctttttctcttaaatatcttattggaaatttttgcaagcattgaactttatacaatgtaatgtcccaacaagaaactcaagatgtactccaat

SEQ ID NO: 169415 - DNA, 509 bp, Cannabis sativa
ttctcttctaacatatttctaccacattttctgttgatattttcacatttttcgtttggagaagaaatttaatataagttctcacctatataatttattataaaacgtaacctaattataggacgtcatctcataatcataatattttaaattatgaccgatgttatcgtcaatcttatattacaatctttcaattaatctttgtacctaataactagtattagaagatattattctaattttttttatagcgataggttcattatagttagaatgttattttagtaaatttttaaaaaatttcaaataatttataatgtcaaaaataagtttgatctttttttaataaatgtggtaaactaaaattttgaaaactttgtgtttgcagtttgatactgtaaactattcaaattttttttaaaatttacagagatcatattataattataacaaatattattttaaaaaatattaaaaaaatatcatcggacatattccatcatgtgatt

SEQ ID NO: 169416 - DNA, 1592 bp, Cannabis sativa
tagcctcattttactcaattctctctctaaaaaatatgttgtccccaataccctattcactaggggtgtacgtcagtcgatttagtcggtttatggtacattttattcaacctaatgtaaaaatcgggttataaaaatctaagtgcaacccgcccaattaagaaaaaagaaaatagtaacctgcccaatgaaattgatcgatttggtcgggttaaccagtccaaaccaaccactaattttttttatttttacattcaattattatattttagttcattgtaataatgagacaaatatatagattgaatttaaaattctaattaaccacaataaaaaaaacaacatattagtttcaacttttatattttttaaataatcatataaattatatgatatataagtatatatataataaaaaatttataaatatatatatatataaaatcctcttaatcggattggtcgtgttagttcaagttgattgggtgggtttgtattatttttaacccacctaatataaagattaggcgggttatattttcgtcgtgttttttagtttgtatttttcgtcgggttatctcggtttggtttgggcaggttattaggtttgggcggtttacaaaagtttatgtacagccctactattcacactctgtgccacctacactgtgtccaaacaaagtgtaggcgtcacctatatagggtgttgccactgattttatttttttggttaattaattaattttaaaggtaaatatttatttaaattcgaatttaaaaagtagttatagatattttcttatggttgagatattctctcaaggtagttaatagactctctcaagcagttgaaagattacaaaatgtattaaatatctctctatattacaaaatgtgaatcaacattaatcagtatggacatagaaccatcgcctaaaattggagcctcaggaaccagaggtaagacgctatcttaccatacttaggattgataaattcgctaagttaatccaggtcgaccaatcataaagaagttcaggcttcaaaagcagtcaatttaggttgaccagtggcaaaaaagtttatgcttcgaaaaggaaaacaaagctaaaacccaagaggctcaggtccttggaactaaaacctcagggaaccagaagtaagtaatttttgtttttccaaagaaaaaaataaaattgttgaaatctcatggtaaagaccattggaacaagaatcccaaggaacctggaagtaaatagtttattaataaaaataaataaagtttaagtataaaagttgaaattctaaggttcaggtccttggaaccgaaaccttaagaaatccagaagtaggctaacatagaaagtaaaaattcatttaagctataatctgcttaatgagtcaaataagaatgatataataaataaaggtgtttatgttgggattttatgccataaataaaacccatttcaatctaatatatacaaaatctggtaagcccagaatatatagtcattcacaattatagtaatgtcaacacagtagaatatgattgtgattatatgcttcaaaagacaaagtccctgattcat

SEQ ID NO: 169417 - DNA, 881 bp, Cannabis sativa
tgttaggctatttttggcttaagttttggatttttttatagttatttttttctttattattatttttgggatgattatacgcttatttttcttagttttaagttctcgggattttaaagtgcaaattctgtcaaataaaaaaagtgtgggacgagttgaaagcaaagaaaattataagtgaaatttcttaagcttggcacgacgagcaatactttggtcatgaccaattatcatcgcgatgagatgaagagaggtcgcgacgagcagtgttggcaaaactatggttttttcaactatacactatggtcgtgattagacctttcatggttgcaacgagatgttctgtatgaaaattatgaataattttataatttggtcattctgaagtgtaaaattgatttttataaaagggttttgaatttttatgctcattattcagaaatataactctagaaacaaagaaaaggacagagggagcgagtgtggcgatccaaatcaagttcaccctctagtactttcttttccctttttaatttcttatgctaatttttatttctagtttgaaatggatttgagtttagaagttattaactaatttcttaatttaaggatatgatgaatgttgattaatttttattccaattagttaatgtgatttgttaatctttctttctaaatttttgtgatttatttatatttatattaatacatgttttagatttgccacagtacatgattcatgatcctaatataaaatctgagaagtgaatattaagaatgctctaattgaacaaacataatttttgatgtgaaacgagagtattcacatagcttgtctgaccattagattattgcttaatgcaaactatatgttaatttca

SEQ ID NO: 169418 - DNA, 916 bp, Cannabis sativa
  modified_base (879)..(881): a, c, t, g, unknown or other
catatttgaataatactaatgatgaaagagacatattaatgagcaaaataataagggaaaacaactacgagaggagacatgtatgaggtgcacgtgacagatagagactcaaagaaagctgcacgtgggtcgcaccatatatgtaatatgtatatatattatcatgtatatatattatatatatgaaagggttttaattattatttgaattaatgagagagacaaagagatagctctaagaaaaagagagccatttttggctatatatgatgtattgcatgcatatcagaacaaattaaattatttattagatgtgaaagactcatataatacaaatcctagatatataaatatatctggtcaatataaaatgtggttatataagaattttttatgaaaaattattggatgattttttgtaaaaataaaaaaaaataacaaattattattattataaccatttgtacggtatacgtttaattaacaaagttgtgagttgtggttgaggatatatatatatactaaaaacttgtttgtgtttcatatatcgatctcagccatgtcactatcaggtttcatcattttcataaattcatactccaattaattagctagttttatcaataatttccacgcacaaatttatatgaaagaaatttattttaatattcttacctttattatctatagatataaaaaatactcctacttatatatttttctttctttttttacctgtactctcatctcatctcaaaattttttatttttttgttacttaattaaaatatcttttgtaaaataaaaaagttgttctacagttcaaatactattgtgtggtatatatttattctatataaaattaaaaaaaaaaaacannntattagatgttgccacgtaaagggtcagcattcat

SEQ ID NO: 169419 - DNA, 837 bp, Cannabis sativa
caccattttctctctccacgactcagttccatagatttagggtttgttttatttcagattttattataaatttattaaactaatttaaatgtaaatattttttgtaaagcaaacttaatttttactttaatggttaatattaggtggctatatttaataagatgaattgacattattttaaatgacgtgtcatgccatctggtgttcagtatgcaagataacagcaaggtacctacagaatgtctgaaagtaagtgtaacagaaggtatttatgcaaccaaaattttaacttaagtattaaattgtaactaaaagttaaactcaggtatttataaagcaaattactctcaaacttaatataactgtgaggagttgaattttctaaaagagaaatttacacaataaacttaaaatcggaagcttttttcatttttaccaacttttttttatttatattttttaccgattttttttttctagattttcatatattactttcattttgttttcttgtagcaagctcaatttgtaaataacattgttttgaaacaatataaacataacattttgtattattgttaaaaaagtaaagttattttccataacagcaatatcaaaataatattgttttgaaaataacaaaaaaaaaaacaacatttcatatttttattacaaaaataattaaaatgggtaaaaatgtaaaaaaaattactatttttatatatttattaaataatccctttataaaagtgatgtgctaaaaaatgcatatgcacacaactttagcactccgaattgctcttattgcccgattcaaaaacgaaaaaaaaaaaaaaa

SEQ ID NO: 169420 - DNA, 796 bp, Cannabis sativa
tgtagggttttgttaaaaataaataaaattaagtatatggtgtataataattatagtgctcaattatatgtccctattagttgtccaaaaatattgaaccaatcatagagtttggtggttaattaactctagattaataggattcggtccattttttgtttctttttcacaataggccaataggtcatctttaattataaaaatattacaatatttaatcaatttgtttgcactacccttttgtgcttagtttgaatttctaattacttttggatctctttttgctttttatactctaacctcaatggcaaaagagtttatggtttacactttgactattattgcttggtgttagattgacccctatattatatcatatatgtaaaaaaaaatggcttttttttacttattgaaaaacttttaacaagaaacaatgtcaaattctacaattttcagcaaaaaaaaaaaaaaaaaaagaaagaaactaatactacaaagaaattggcaggccatccaataaggcaggaggagcaacaaaagatattgtttccttccacacaagcattagactatctctaatagaaaatctaaaatttataataaatttaatacagaaaataaatttatgatttatttgacttcattatttataattatgctctaatttgtactaaacttgacacaaaaaataaatttgtgttatatttgacctactatttacaattgtattccaatatacaaaatgtaaaataagaaaaaaaaaataattaattaaattaaggctaattagaatttt

SEQ ID NO: 169421 - DNA, 921 bp, Cannabis sativa
ttgctcttacaatatatgtttttcaaatttctaatatagttttcttgttcctaaatatctatatttagtttagcattcaaaaaagccttttaatctatttttgtttttcatgattgtatatgttgcagttagttaggactacatatagtttattttggtctcttgtgaggaaagtagtttgcttagtgtactttttgtgctcgattaaccataataaaaaaaaatgatacattaatatcattcattccttccttagctcatgttgtgtaattgagtaataattcttagagtgttattggagtaacaaaattgtgatgaatatgtcttttttaatcctgtgtgaatagtttgaccaacgtaatatatattatatttttaaaattataacatgttctgagttattgcgtgttagttgtttttggtcattttattgttgaatcgattctatttaatttgttctaatattgttggaattgatttcttcttattttttttttttaattagaacaggtttttgagttatcctgtgttatttatttttactcattttgtcgtggaaacagttctattttaatttatgtattagtatttttgaaatagtgtatctcttcttcttttttttttttaattggtaacttatttctgagctattgtgtgttctttgtttttactcattttgatgtggaaccatttctgttttaatttatatatcagtttttagaactgatttactcttgtttttttcaattagaaccatttctgagttattgcgtgttatttatttttagtcattttgttgtggaactagttttattttaatttatgtctctgttagttttttatttagtcattttaaaacacgattcttgaattatttatttccgaaactgatttttgatttaattaattcaaagaactagt

SEQ ID NO: 169422 - DNA, 937 bp, Cannabis sativa
tttcgagtttatgcgctctgatttcacagacttaatgattgtttagttagattattggaagctgtttggttaccgagattatgcgagaaaattaagattattgtgttaatattgatttctcagtctctgctttcaaaatttctctcgtctgatattttaacttcacggactgtttgtttcgtgtctcctgagaaaattaagaaagaaaagataattgaaatgaaagagaatcagtacagtagagtatcgaaaattgaacacttatattaacttctggtgttctttggttctgatctagattttgaaaccgatgctacctgatccagctttctcagcttcatcagtaacctctcagctaacgactcaaccatcagataatacaatcacatcagagaatctcaaacaagctcagaccccttcctctcatggcggatttcatgaaattctcaattcaaaacccagttcttccttggaggctgagataactatcagttttctcaggaaaactaaaactcagctattgagcttatctgaattggatcctcattcaaagaagcttctggacacaatggttgaaatggttatagatatgatcctccaaacacaaactaaagaaaaggacataattgaagaactcatttctgcgaaaactgctcgaattgtttatgtttgcgttttgctcttggtgctggtaatggttgtgattcaaagcttgcttttcaactcatcaacatcaagaaactcttttggtaagccttctcctccaacttgaacttactctataatttctctttcatgtgagagacagacattgatcaattttccaattaaagacacacataagtatatattctattatataagtttttgaattagaactctgttttttctaaaacatattgaaaatcatatgaatcaaactgattgtgattaatta

SEQ ID NO: 169423 - DNA, 1213 bp, Cannabis sativa
atatggaggtgccttttgtttcttgataaaatatattaaaattactttaaatatctttatttattttctttttaatttttttattaattatttattaaaaaaataggtatgtattgaaactattatttaaaaaatatatacctaatcattcaaaaaaatatatataaaaatatataaagtatttatatatttaaatcattattaaaaaaaaaaaaacctaatcattcaaaaatagggtaagttcaaatataccctttttttcgttaactaaaaatagtcttattttaaattcaattgaaatgtaatcttttttataagttaattaccgattatacccttatataagggtactattcaggaaggtgaggaaggttttttttcataattgggatataacaaataaaagagggtataaattaaatatatagaaaagaaagggtaaaaatgaaatgggttaacaaaaaaagtatagggtacaatttccacttcaaaaatatagtaaggttggggtttaggttcaaggtaggcatgggcataggcagataaggcctgtacttaaggctcacctagcctaggcgccaaaaaaaatttcctttttaaaattacatttttcttttttgttaattttgaaaaataccacattttactctaaataagagcctgatttttttttcttatgacctactaacttttagggcccaccctgaggtctgggtacggggctaggttttgaggccaagtctaagtccagggttaagagtccaattctaaggttgagtctaacgtctgggtccaggtttgaagtcaggattcaaattctgagcttgagaaatctaaaaaattttctaaatattataatacaaattaatacgaattaattgttatgtcatcaattatatattgtaataattaatacaatataatcgcttatttataaatatatttcttattatttaatacaatttataaatgcatgaatgatagattaagtaatggaaagtgtataaaagaaaattcattaattaaaattttaaatatgcggtgtatgaggaaatcagctcatttgtattgaatgaattaagcattctacacttattaatttggggtttttacaaaaatattttattttagaaaaaaaattataattttactgtcacacggaatttttttacaaaaatgttgtctttttataaaacaactgtaaaacaacaaa

SEQ ID NO: 169424 - DNA, 585 bp, Cannabis sativa
caatacgcgcgtttcaaaatgatataaatattacacaaaattaatttacggtctaattaacaataacaactatcttgctaaacattgctaattaacatgacaataaaaatcttgtattttaaaatacaatctaattactaattactaatatgtttcaaacgcaacctaaaaggttaaatatgatggttgagtttgattttggtaacatatttgtaatgacgttctttagattaattagtattttttcccttaaatttcaccatgtatcaaattattcttctaaacttttccagtcgttaaaagttcttcttgaattattgaggacgttagatttaaagacttttgtctaatttaattcaattttattattctggtgattgtttatgtaccaaatcatgctcctcaaactatgatatgtaataaattatgcttcctgaattttcatcacttctttttactaaaatttgataaaagtctttaaatccaacaatgaaagcatttttagcgaccttaaaagtttataaaatatgatttagtacatgtaaaagttcggataacaaaaatcctaattagtttttttttttt

SEQ ID NO: 169425 - DNA, 1681 bp, Cannabis sativa
ccctgatgacaaaaaggattccacagctccatataaatcattccctatcaactcccagttatattggaaaaaataactcgaatatccatctggacctggagctttgatccccgggattgcaaataaggcagccttacattcagctttcgaatacttccccattagcatttcagcttgctgatttatgacttttggtcccatattaacaacactacgaatgacttttttcctattttccatggaacttcccaacaacatcttataataggaaataaatgcctcagttacctgttcaggctgctccgttctggttccatctagctgttcaatggaccagattttattctgtcgtcttcgctcctgaaggcttgaatggaagatcgaagtgttatcatccccgtttttgacccaagatacttttgctttctgctgtagcatggatgacagatcactatgaacctttaaataatgcagtcaagcctctaattcctcctggtgcagcagcagactgtgtggttccatttgcagcttactttgacacacttctagctcttctttggcctttgcttctgccacatgaagctcagaaaaaccttgcttgttgatctcctttaacacacccttcatagccttaagccttgtaactacttgatacatctttgttccattgattggttgagcccaaacatctttgattttctctgtataagtcgggtaagaactccacattctaaaatacttaaatggttttttaccattagatacctcagaatggaaatttaacaccccggggaatggtcaaaaattccttcattaaggaataaagcttcagcattcgagtacttgcccatccaacttgggttagctaggattctatcaatttttgaatagatcctatctccaccatgttgcttattattccatgtgaagaagtttccactcattttcacatcttcaagctgacatttttcaacaacttcaatgaattcagttgccttgtgataatgaactcggtctcccactctttcttctctattcaaaatttcattaaagtcccccaacacaatccaaggatcacgtgttgacagatcttttaggtccatccacagtttcctccttccttctttatcattcaaggcatacacataagtgacatagaactcattcctcccatctgctgtagtcaccttactatgaataaactgactatcacacttgattatatttacatgataacactgagggttccaagcaagcactatcctccccccctggatgccaagctacatttgaggtaaaacaccaaccattaaaaactctcaagtacaaggctcctaatttagtagccttgactctcgtctcgaggagaccaactaacccaatcctttgtagagcaataaattgcttaactagtgattgcttgtgttggttattgatccctcggacattccaacttaagatcttatccattggatagaggaggaccttcccctcctccaatcttatctcttacatcgtccatctgcttatctaaatttgttcgctgtccaggaatttcagattcaaccaaatcataagaaaagttagaactgttaaccatggtttgcatgtttattagctattctaagtgattaagggtggatcatcccataatcaatagataagaaagtgtttgtttaaa

SEQ ID NO: 169426 - DNA, 1658 bp, Cannabis sativa
gaagagaatgagatttgtgagtgaataagattgagagaagagagaagagatgcgtgaagagaagggaagagagaatttttttttttattgtagaggtattatgggaattacacttaatgttggcgtaatctcttaatattgcacaatatgaatttagggaaataattttcccccaatgtacaaagtcaaatttcctatataataatacttgagtcataataatacattaaattggaggtgttaccactaggttagttatgttttatttatttatttttgtcaggcattagttgtaagttaattatattttaattatgttaaaaattagaccaaaattagactagtgtattatcatgtactatttttaaaaaaatataagatttgaattatcatttaataaaatacaaagctcaataataaatttttactatattaactagggataatttcataaatatcaaaaaaaaaaaaaagtataaaaaaattacaaaaaaattcataattatcatttttttccatctcaaatactcttttttttttcttacaaaaaattaagagcactctcttatatttttctattttttacatgattattaaaagtagtctattttttttttatgttttatagtttattcaaaattaatttatgaatgatttgcatattttataacaagattgatgtcttgttatttttctactgatttatagttgtctttttattattttatagttgtttttatgttgttgtttaagtgttcaatagtcttttatagttgtttttatgtattttttttgcacagttgttgtttagtttatgtgcattttttatcgtgtatattttcagtttattccaaataatatttttgttgtatatatgtgtatttgttttgttattttcatgttatttttcagattatagttgttttttaactatcactaactcaaaaagaaaaagagaaaaaaaaattaaaaaaaaaaatggaacaataaaattccatgaaaaaaaacaatgtaatattacaaattatataacgttgtcaaaactaagtaaaaaatatcgtaaatacaataacatattaacatattattttgcttattgcaattgggttaatattttgttatttttctgttgctttgtagttatatttttattgttatatagttattttagtattgccttttagttatttttgagtttttttttactaaaaccctatatttataattttgaaactttacacattattttcgtaaattagtacagtaaaaatttaaaaaattctatatgacaatacttttgtaaattttccttattttatagtatttttgtaagtttcttgtaagttgaaaattacctatatttattacacattaaccaaatataactttaaaataattttaattgataaataccctcttttataatcaaaatactaaatataatctcacataacttatcataattagagtttgtaataatgcaaataatgggaatataatataatctataaaactgggtataaattaaagaataataaaatgaagataaagattaaaataaaaaataggtataaagtgtaatttcctctaattttcctatacattttttttttttgagaaattatagtaaatgaccccaaataataggagtatgttag

SEQ ID NO: 169427 - DNA, 715 bp, Cannabis sativa
  modified_base (98)..(107): a, c, t, g, unknown or other
gactcaaaatctaataccattaatagtataaaatttaacacataccaatttaatatatattttggggtaccagtagagtaataataataataataatnnnnnnnnnnataataataataataatatggtgcagcaaattcttgtccatcatgctccccccactcattttttttattttcaaaatatgagatgtcatgtcatgcttttaaaaaaaaatagagatcatgtcgtgcaaatattttaaaagggtatacccagcacagcctgtaggctcgatatatttgtgtcgtgctttgtacgtgccgaccggtttttctaaaataggtccgtccattttcatatctagacttaaattcatgctttacttttttatattttttaaaaaattaataagttaattactaaactatttattttagagtttaaattacatttatgtaatttttaaatttttatattacactttataaataaattaatatatggtttaagacttttagttttacattttttaataattttaattatagaattataatattcagtgttatattaaaatattattactattttttattttttattttttgatgaaatatcaacttcattaaatttagcattcggaataggagtgttcatccaatttaatctgcattatgttgctcatagtgtatccgatccgcactaagtgtggatttcattttttggatccaat

SEQ ID NO: 169428 - DNA, 893 bp, Cannabis sativa
accatcaccaataacacgagcagcacctaagcgaaccacattttgagcgccccaaatgctatgccagacaaaacttggattgttaccaagatcatctgaaagaaaataagaatgtggaaaatattttgctttgtatactctagcagcaagagagtcggggttacacaatagacaccatccttgtttcgcaagcatagcaagattaaaatcatgtaagtgtctaaaacccatacctccttcatctttaggaatggcaagacggtctcaagacatccaaataataccacgacctttactagtgttggatttccaccaaaaactggccattaatttctctatccccttgcatgtaccaagtggtaaaagaaatacactcataacataggtgggcagggattaaatgaatgttttaaggaggatttctttcccagcacgagatagaaatttcccatcccacctgttgattcgagcaataactttgttctagatgaaaccaaacatagcatttttattgcgaccaataatgttggggagaccgagatgagactgccttcaagtgcttcattcatataaagagtagaacagatatggagacgagttctgccgttagtgttggcgcttaaaaatatggatgattttgaaggattaactttttggctagacgcatcttcgaacagctggagtaaattagagacgctagcagccgcacctcctgttgcatggcaaaataaatagttgtcgtctgcaaaaaaagcatatgtgtgactgagggagcatgattagtaatacgacacccttgaataagtctgttagcttcaaacttttgaattaaagctgaaaaaccttcagcatagatagtgaagagataagttgagagaggatcaccttgtcgg

SEQ ID NO: 169429 - DNA, 762 bp, Cannabis sativa
  modified_base (728)..(736): a, c, t, g, unknown or other
ttttcaaatagtgaattcaatatgttagggtggaaaagttctgggttgtcatttgaatcatattttggaagcttcccatactctgcatcatgatattttctaaaccgatcatacaactgaattatcatttgttgaatggagttatcaacgggttgattggtctgttcattagctcgttgagaatttttatttaatctctctttgagatttggtgtatttctatttatttgcgtagatcaagaagccttcaatttagttggtctcgcaaatcaggctgatcatgtacgttttgacgttgattttgcctaacatcataattgcttactgatcgacttggggaaaaattctctaattggtaacttttaaagttactcatactttcctgctcattttggtattcatatcgtggttttctctcaccttgtggtgggttttcacgttcgtgatctcgaggattgagtttgctcccgaatcctcgacctactttgggctatatttgtctctatatctaatggtgaaacttgagtaggccttcgcctttcaaataagttagtgaaacttcatctattcaagtatgtatacatactctccctttcctcccttccaggtcctcacgatgaacgtggaggacgagcagatgagttaggtggttgatcatttatattttcgttatttctttgagacgtctgtcgtccctttggtcgtgttgttggaaatattttaccagnnnnnnnnnttactaacaagtatgttttattaaca

SEQ ID NO: 169430 - DNA, 656 bp, Cannabis sativa
tattcatgcgagaagactctggcacatcagatttttcattcccttatttcgcaaatccatgggaagttcatagattatcacgttgagtctcttgattttttctgtttctaggattttaagggttttctccttccattcggatatctcacatttctaggttgttcttcatgagtgttcgagggatttttttgattattcccttgctgtcgtcacttcgcactctaactcgacattcctccagtttgatttagctaggcattgctaaagttacctattttccagtggaacgtatctagttgaatcataagcatcgttgcttcacttttctggaatctattcaccagtttgattaaaatctcaaatgtttcttctaggatgaggggtttcaacagtgttagttctttgtgaagcctaaggctcctttctcggacgttgggttgtcttttctagttgattctcttcattgcgccaaatattgtctgccatgagtacaaatttagagttgtatttttgaggagggtatttttctaagctttattacaaaggctctcaatgaaagaactaaattgttaacgcatatttttgttaactaaaatattagccttttataataaataaattgcagaattgattatatagcaattaattatctaata

SEQ ID NO: 169431 - DNA, 659 bp, Cannabis sativa
aacatagtgaagacttagtatcgtgctatattgtatctatgattttagcaatggcggctatgggattaatggtgatagcatttgttacgggtacatacgcagtattgtcaccttcccttgctcttgctattgccaccggtctttttggattgtctttcttcggtcttatattctacacactaacttggagcaaaagggtagtagcactattgagcagaatattgaaaaatctggcgctagtttgctatgtacttttcattatagtgtgcagaattttgaaatatccggcgctagtttgccttctgccaatactagtttctattgtagtgtgcgtagtcatactccaaaatcttttcatcatttttccatattggatattaagatcgactataagaaagtgcataggaaatggcaatgatgatgatgatgaggacctgaagagttcgttacgagattgtttatttttatgtgtagattttgtttgggaacaaatattttcaccttttttttgagaaaaggttctgttattaataactcgaagcatcatttacaacaacagagaaaatggtaggagggatattcttgtaccatatacaatcattatccaacactaatgcttgcttagccaagccatgagcagcttgatttgcatctcttcg

SEQ ID NO: 169432 - DNA, 1092 bp, Cannabis sativa
tgtacatattcactatgggtttcttgtgatttcacgtgagtgttcccacgtcaaacagaaccacgcatcacacaataattgatttatgttttgtcctttatcattttggacactactattaatttatcatattataattgtttaaattaataacgtttattagacatgtaagcttcactacatcacaataaactcattctatttttttttattattatatctataatctctataaaagtggtcagtttttgggctttcagatattaaattaccaaaaagttttgatcatatacaaaacatgtgattttttttaaaactaaattatgtgttatacgttgaatgttttggtttgattcacaaataaaactaaaattttatttaaaatatatatctattaacatgttttgatttttttttctcaatatatatatatttataagaataatagtgtacaaaaataaatattttaaaatttttttgaaaagaaatttaggcttaaaatttattacttatataatttactaaaaattatttgttataatttcacattaaaaaaataattttaataatattctattttttgtagtatacattcttattattttatttattttttttatttggtcttttcttttaagaagaggaaataagtttgtattaaagattctttagaactacaattaaattgcgtctttttttcttttacggattctttttgaactattcacagtgttaaatataaatgaattatgttaagttttatcacatatggttaacaaaatgctcagatcgtcttcagtgaaaaatataaaaattatactatattttatacaaacatttattttgtgatatatttacattaatttttagcagtgtactccaacacacaattataaaattcgattgatgtaaatttattttcaattaatacttctattaaaataccaaattttattattatcttattatctaaagtaaagaagaatgtgttgggctttgtgccctaaataaaattctatttgaatgtaatctttatcatttaattatcaataaagagacagaagtatgttcatcacttatttagtgtgtcat

SEQ ID NO: 169433 - DNA, 505 bp, Cannabis sativa
tggttcactaaggcagaatctacccataaccgagatgaatcatcaacaggaggtcaagaaactagttgagagccattgtcaaaactctgagttagagatacctggctgaagtgctcatgaactcacgatagtgaagctgactgcaaaatcgaaaaccaccatctccggtgagatcttggacatagttgagccaaagggcacggttgaaaaatcctccacgattgtggttgaaaacgtgggcatgaaagttactaatgagttagcacacgggcccacaattaatacaagtggcaacatggatattgggcttcttgaatttgggcccaaaatacccatcactgaaaaacacaccacgaaccagtcggggaataatgagtcagagggatggacaaaagttaagaaataaaaatgtacccagggctttacgaaagcaagttgtagagatggtagctgtaataccctagagttatgaaatggattagcaaaactctaattagataattat

SEQ ID NO: 169434 - DNA, 2211 bp, Cannabis sativa
agagagagagagagagagacgtgtgtgtataggaaagagagtgagaatgaaaaaaaattaatcttattctctctcaaacctcttcttattctctttttttcagggtttttagtttatactgatatatatcatatataaaatgatatgaacaaatatttatttaatctgttaaaataaaagataatatctaatttgattcaaattcataattcaaatttaaatataaatattatatagttgattaagaaaaataagttaaattcttttattttcaattaaatacattatctaataatatatttaattcaataattgaacgataattaattaatttaatttaaattattttaacaataaggtattcaaaaaaaaattaatatgggcctttatatatatgttatcctacacgtgtaaatcatatttttaggtcaaaaattaatttcttaattttaccacatataagatttatcatttattctgcgaataaataataattaattaattctcattaatcttttatttaacaagaattaaaataaatattattttcaccaaaataatatatttctttcgttaatattccataagaataatattatatttaactaactgattaagagaaatcaattaaattcttttatttttaattaaatacattgcccaataataaatttaattcaataattgaaagataattaattaatttaatttttattattttaataataagataattaaacaaaattaatatgggtcttgtccctacacgcgtggaatcatatttttaggtcaaaaattgattttctaattttattacatataagatttattatttattcagacaataaagaataattaattcattctcattaatctcttatttcacaaggattaaaataaatattattttcactaaaataatatatttctccctttaatattctttaagaatattattatatttaactaattaatgtagctttatcaaataaaattaaatagtatttaattatacaatttataattgtcataattattaaaaacaattatttccataaattactattttgcctttaagaatttatttctcatcgaaattaattttcactcaaatttactcattaaataaaactttctcctatacagatttgaggaccatatggaccttatttcgaagctctaataaacatttcattattatcgatctcatcaataaaataacctagtttaataattttcttattactcaactataaatatagaattgctctcattgacaatatagaattacatttatagacttcttacatgtagtccattgatataatcaatataagtagtttgtcctctaattattagttcataattagatttggtcaaaattatcgttttacccttctaattatctcttgactccatatgtaccatttaattcaatttgaacagttaatctataatttattatatatttagatccaactattagcactcctaaaattaacactatcagagaactaatatttgatctcttaagaaagcttggactctattattgtataatatgttcccaaccgtttatattatcaagttcccaaaatagaagttctaagaatcctcttttctgagaaacattaacaagtgaattaaagaactcaatgaacacaaacaggagcacgcgtccactcaggatttagactgatctactaacgatcatcgttgtgatatgaaaaactccttctgttatacaagaaattcggctgcacttcagaagttgacacgtgtcttgcaaatggaatatgaatcacttgatataataaaatttatataaatgaatgcagaataaaataactcgttattattaaataaaagttttaagaaaatattcaaaacttgctgactatatagtttaggtgagataaggataaaaaattattgaaccaatattgacgagacatacgtttgcctcgaactacatagtcaaaaagaagaagatattcattcgttcgagtagaataaatataatcacgtacaacaacctcagattacatttagcaagatagtaatctcacaatattaaatcaactaaagagatatgatgaggcgaaccacctgccaacaaggcaaaccacctgccaacacttaatttttttttcataacatggacaagaaggataactcatgtaacgccctaatgctaaggcacgctacagt

SEQ ID NO: 169435 - DNA, 807 bp, Cannabis sativa
aaatgtaccagtttgtcttgtgagtcaattttggatttgataacttctgaattgacccatggttgtgagacacacttaaatccgtcttgaaattatctttctaatgtaagttgaaccaggtaaattgggtaataattgagagagttatgcctactttattgaaggtagttaatgctaacttgtacgagttacgagcactgacatggccaaatagcagtgctcgtccgtgcatgttctcggaccctttgaggtgtgttttgacttttttttatggtgagtcatattttgggagtttcgagacccaaaaatcttatttcgatgttcgaaaccctaatgggaaaccactactaccaattggagccggaaggtggcaatggtcggccatggcttgcgggaagccatgggtggtgtttctcacttgtatttgctacatggatgttgaaaatacaatttggccaataaatcccctttccatgcgtagtagccgaccattgcaactctattgtggcaatgcccaccaaatttgatgggcactgccatttcttatggcagtactggtcgaatatggactttataatgtcttgggtgaattttcttatttgtatttgatgcatatatgttgaaaatttcacttggccaatgaaaccctttcccttatgcaagggctgaccattgccattccgttgtagcaatgcccatcaaaattgattggcactaccatttccttaaggcaatggtcagccaagtaatttctttaccacttggtgtcttttctcacttagttttgacatattatttatgaaaatg

SEQ ID NO: 169436 - DNA, 979 bp, Cannabis sativa
aagcaaacttcaaaactgccagaaaccaatcaaaacgggcatctcaactccacagattccaaacatggtaaatgaaaaatgtaatctccttagctaagcttataaaagagaagaaaaactataagcaattggtaggcagtctgcatatggcgtatttcattgataattcaagttgacaagtaatctcataatctcacaagtcacgacaattagaatttatagataaatctatgtaataaacattagagacacaaaacttctcagaaaaagaacaaattaacaaaactatctgctcaaatcatggcatataatgcaattctgtgcccgaagaagcaagttgattctctgaaattatccacttagatccttaataattttttataatctatttcagcaaaaacacaaatggaatttgaagtactttctttttcaatgaaatgaaggtcacagatgacaatatttccacaagtaaagccaagaaaaacatcaggattcaagaaaatgtagaatatattaccttgccaagctttgcaagtgatgatgggagtgaagcccatgaaacacttccttctgtcagttttctattatttacaggcaccttgaccaagtttccagggataccattattaggtaaatcacctgtggattttcttccagcagaaattctatgcttatcagacctattctgatcatccaaagttccatttgcagtaactttcttggtaggcatctgaaccttgttctcctctttggaggactttacaggtgtatgggtcttattatcttccttagacggcaacctctcacttgatgtacccttcctaggagtctggcaattacaaactaatttagatgataataaacgtactaatttgactagcagtgagtaaataaccataaacaaaaccagcattaacgcaaccaaaggcacaagttttgtttttcaaacattctggttcattcaataaaaaaaaaaaac

SEQ ID NO: 169437 - DNA, 762 bp, Cannabis sativa
gtgtttgacaccattgatgccttttagtatttctcattaaagcctcttaaaacaattaaatttacggcataaatactacatgtataaatacttaagtttaactttcaattgtaaataaattttggaattctgtaggtatatattaagttttaagtaagtgtcaattcataattagtcaaagtcattaaatttttatttatttaaaaaaataatttaaatatatcaataagaaaataatacgtggataatgacttaacaatatttaaccattaggtagtctgtttcaaaaatataccttaagtattattaattaatgtcaaaaattaaatttagatatatatttacaactgaaatttaaacttaataaatatttatactgtactctttcttataattaggtggagttttaacaaaacatggttggaggttgtttcctataagatttttttggtatgactatttatatttatatattatatatgtgattaaatataatgagtggcgtgatcttatttgctcccttttatgactaattctgttgttgaatatttattattttatttaataaacatatagtgataggtcttcaattatttacttttaattttaattcatcatctttctttgtttgcttaaaaaaaaaaaaatttaaaaatctcatattacactactacaaaattgggctttagaggcggtttttaagggctttcagcgtcggtattggcgaaattcgctaccgacgctgttccgggtgacgctaaa

SEQ ID NO: 169438 - DNA, 830 bp, Cannabis sativa
atcaatttaactaacacctttttgtttgtttaccaaagatttattgcatacctttaataaaataattgaactttttttggaaatttttatttattcaatttttcttatatgactgtgtatgtatattgtaggttatataatagacatttcaattgttttaaaatattaaaaataatttaatgtattgaagaaaaaaaaatcaaatgtttgaacttggttttttgtaacataaattattttaagttttttgaaaaaatatgggatgtctaatataatattatagttgtatttttttttttaaatactaaaaatatagatgtctctacggctaaaagtcttaattgtatttttttatattaggaaagaatgtattcaaatttgtgacttacacaagatgtgcagtaccaacaaaggcaactctaaactttagtgagctaagctttagaagaaaaaaaatgtggtaatttcaaaatcggtaaaaaaattatttatatttaaaaaaaaaaacatttttttgggacatccttaggttatgtaagccctaagggcagatggttaatggtagggatactagtagggaaatttacaccctatattgtatttttttcatttatttcaattatactgtgatacagcagtttttttttttactgtctatttttatactgtcttcttattttgtgtattctaatattgttttgttgataaaagtttttttattcttttttatttacgcgtgtaagcttagagttttgcattattattattattattattttgtattttaagtgttaaaaaggttgatgtgactgtgtattgtcacatttgtg

SEQ ID NO: 169439 - DNA, 587 bp, Cannabis sativa
gcagatcattcttcttcagcctcacatcaacgcaatcactcttctcaatccataactacaaaagtaatccaggataccccgaccttatatgttgatgctgctttagaccacgatcattgtgttacgggacttggtttcactttcaagattggccttcatcgagttattgcttcagcaaaaattctaaagccaagcgcatccactccaatttttgcagagggtcaggctctgttgaatggtatatcctggtgtatctcctctcagctgaagccaaacttcattttcaccgactgtttaaatctcgtttcaaatgttaatggaacatggcaagaccaatcagctctttcaagtcttgtttctcatatcagacattccttctctaattttcctaatgtctccttgatgtacttacttcgccagttcaacaccaacgttcactcacttgccaaggaagctatcaggttgcgtgaggaagctcatgaattgctttagttcctcagtttgttgctgattgtgcttttttcgggtaaatactattttggaccctctattttacaaaagttaccaattggaccctgtgttttgtt

SEQ ID NO: 169440 - DNA, 658 bp, Cannabis sativa
aaaaagttgaaaacacataataatatgtatgagaggtcaacatcaattttaatcaccatttaaaaaaaaatgccacaattttcttagggaggaggagatcatgtgataggctgttgctcaaatttaaaaaaaaacgaaaaatacaaataataatgtgtatgaggggtcaacattaactttaattattatttttaaaaataacaaaaaaaaaataaagaaaataaaatgctgccaacaaaatggcataaaatagtaatatgcataatttcatactgtacacagtataaaaaatatagcaaaaaagtaaattctgtcgtactgcaataaaagagaaataaatttataaaaaaagggaaattttcataattgcacaaaagtaagaaaaacttaactaaaatacggtgacacatcaaaatcaacatatatacggtaactatatattaatttccataaaatacggtgtcaccttcttcgacacctttaccattctcatctcagaaaaaaaaaaaaaaaacaaccattgatcctcgagaaaactttcgaaaaaaaaaaaattcaacaacaattcaatgaaaaatcgacaaaaaactcacctagtcaaataatcaggttgacagaaacaaaaaaactgttgggaatttattttaccaggatctta

SEQ ID NO: 169441 - DNA, 588 bp, Cannabis sativa
  modified_base (550)..(552): a, c, t, g, unknown or other
tgggttctcacgggttctgcgactggttttctctggtctgggtgttgcgttttcatcagaggggcacaggttctgcgactggttctctctggtctgggttctcacgggttctgcgactcagaaggatcatagttgttctggggctgtttgactgcgtcggcgactggttatgcgggttgaaccgaggagtgcttgtggggattaagtccgtgtgtagtttcctttattcactgttccttgtgactgggagtggttggattgtgttaggtgaagaggctgcgggttgggtttgttttattcgggtttttgcgcttgggataggtggagttttctggttttgatggcttcgacaagcacagccatgaatgacatggagtttcagtatggacatatagaattggatgatgaggaagaatgtggttttgagattgaggatgacgttgaggaatcggttttggtggatgatcgttggtgtttggtgggaaggtttttgaatgcgcgatcaatagattttgaagctatgaaacacacgttggcggggttatggaannngggcaaaggcttgttcgtcaaggaattggggccgaa

SEQ ID NO: 169442 - DNA, 1326 bp, Cannabis sativa
  modified_base (692)..(703): a, c, t, g, unknown or other
gctccctggtgaatctctttcaaattgatgcctcaccatggcgtagcagacttgtcctctccgagaaatggagagatgatcgtgttgctgatgacttgaagaatattctagctcatattcaaggagagcatcgagaggcttagttctctccctttttctcttttgttttgttactgcattaggttttttttttgtttgtttagattcaattttatattgaatagtttgtatgaagatttgcacactatgccttttgataattacctcgtagcatcctagaatgatgccaatatcctttttttgagtaggtaattatcatgtaatatcgatcttcatcaaaatgcttatggctttttttttttttttttaatatatatatataatcaatatttaacagtttaacagttttatacaaaggttagatattagtttagttgttgtttatatataaaaaaatactttggaataactcactatacatatatgtacacatataatttttttcaattattaaaataataataataatataatcttatttaaaaaataaaaaatataaagtgacataaagttgtaagagcacattgttaatatgcatggtgcttgtaaataagctctttatataatatataagatatatacttttgcttttttcattttcactcatctatgaataataataataataatannnnnnnnnnnnataataataataataatgaatggtgtatggcatggatttgaccacttttctttagatatttaactgccacgtttttctttatcttgccagatattttgctcgggcatatcacacaccacctcatctcatataagaaactcaacaagggctattaatgcacacataaatatttatagtatctctctccttttgttttttgaaagggtatgtaagagtgtttttgaaagtttatacaataatatatatagtgttcccttattgttgcaaacatctttttattttttctcaaaaacttattaaagtgctgtaatttttaattggcgtatgcatatagttaacatgtatatttaacaaaaactctatatcttcctaatacaatatgtatctgtagtttttttttattcgcattctgtagctttggaagtattattatatttataggtttatttatttattcgtagtttattattattttagttagttaaatttgattagttcttccgcaatcttaacctttgttttatccattcaatatatatacatagggatatgattttgccccgttattgtactttcacggattgtaatccgtgatgtacgacagccgtcaaatgagggagtta

SEQ ID NO: 169443 - DNA, 541 bp, Cannabis sativa
acaaagctcctagctctgatggccttaatgcccatttctaccagaagaattggaatgtccttggcaaggaactctgcactgaccttcttgatgttctaaacaacgattctgatctctcctctatcaatttaatctcttagaaaaagaatgcatccactcttcgtgattttagatcgataagtcaatgctcttgtagctttcatggatcacgtgaatcgagtgttcaacgatttccttgataaatgtgttatagtgtttattgatgatattcttgtatactttcaataagaagtaaaacatgagcaatatttacgaatggtcttacaaagactgaggggagcattttccaagatctccacacctttaacaaagttaaccaagaaaaaatcaacagtttgtgtgggcatataagtgtgaagctagtttccaagagttgaagcagtgattaattacaaccttagttttaggtttgccatcaaattgagaaaattttgttgtttaatgtgatgactccaaacaaggtctagggtgtattctgatg

SEQ ID NO: 169444 - DNA, 699 bp, Cannabis sativa
  modified_base (162)..(168): a, c, t, g, unknown or other
  modified_base (487)..(489): a, c, t, g, unknown or other
tgaataagattacaataaaattaccacatatagttatttttttatatcttacacataagctagctgtaattccattttttttattacttggtgatatatatgaatgaactcatacagagatgaatggcccttaaaaaaaataagaaaagaaatatatatatnnnnnnntatatatatatataaattttggttaattacaacgtaaatttataaataaaagtgacaaatataaatataatactagttttaacatatatagttaatagttgttacacatattatataatattaacatatataatttcttttatattttactttatattaaatatgtctatacaatataaagtttttttaaatattacaattcaaatttaattattattatttttttaaatatatctattctatataaaatgtgactatataacagaattcttggtttatgagaaattattaggtgacttttttttttaaataaaaaaannnacaaattattagatgttgccacagtcaacatctagttaaacctaaatataattaatccacctaaactgttgcaattaataataaatttgttcatattgtttttttattttaaattattttcaaattttgatatttagaattagttaaattttaaatattattttaaactaaatttgaatgttttgatagtttaactagatgaacattttc

SEQ ID NO: 169445 - DNA, 1078 bp, Cannabis sativa
acgatgataaaacaagctgtagtcaccattgtcaaaatcaagagctcttatgctacctacaattgctgaggggccttggaattgacaagagcagagtcgagggctgggctttgcagtcaacaaggtctgagctcaaacaccaagtgggcggagtaggtggcgagtaagctccgttcgaacaaagaaacgtcaatgagagagagagagaggagagagcaactgagattaagagagagggagggttgggtggcggatgatgaaactgagagaaagagagagggatggtgggaaaataatgaaactgagagaatgagagagaaaggggcggtgcacagcaggggtttgaaatggggaagaataaaatggtgaaaacctaatttttattttcaaaatggggaagatgagatgtaagtatatataatataaagagacgcatattgcgtacattagcaagcgacgctaactattttagtgtggtagatgctaagttggttggcgtcaaataccaactgatgcaacatgtatccttataattttttttttctaaatttcatctttagcgtcaagtttcattttcggagttacaaccgacacaaattaattattatttgcgtcggttaccaacatatgcaaaaaactaagagttgacttttgcgtcggtcaacaactttgaccagacgcagacgcaaaaagccttttttgtagtagtgatagtccactagtcaatcttattcagatttctgagtattttttcagggcctccttcataagagtttttttgtcccctttttgagattgtttgccactatttataattgcatagtggtagttaattacaaagctgaccagaatatgactatagtcattatccctaaaatcgtgggatatgattacatatcacaaaatgtaaatgcgaattttgaaaatcatatagctgtgaatttctcgcttttactgggtccaaaatatcgtgtattaaacacgtctttaattgttgaatctggagatgtctcgatagaaacttgattgtagtgatcccaatggcaagctggaaccattcttcttttcgaggtcgaca

SEQ ID NO: 169446 - DNA, 680 bp, Cannabis sativa
ctggtaagtccaatgaactatgtttcattgtattgagagtagtcttgagtgaaatcttgataatatatattgaggtgagtatgggattagtgggtacatgttagaatgtgaaatctggttgaaaaaatatgatgaggtgatatggtaagatgtaagaaaatgtttcatctcaaaatcaattcgtaatgagagaaataactcatgcatcttatatacattgtcgtccaataatttgcatcactggagcctaagagctccaatagtttgcaaccttgtttctctaatagtatattcctatattattgtttggctattgagttctattgtttgtctagagtttagagtttcgattcttatcattatccttatctacatgagcgaagctacacgaaccttatgtaggaccgatcttaagctatttgttcgggtcttatacaaatattagtctgttaaaatattgttaaataatattgtttggagtaatggtaaagatgaattttaagtataagaaagttacaaatttaaaattttgtaccaacttttaacacatttatgaataattcttcaggggagagatagtggaaatcgatacatggattggagcatcagggaacaatggaatgcaaagagattggctaattcgaaatcaagacactggccatattttagttcgtggaact

SEQ ID NO: 169447 - DNA, 935 bp, Cannabis sativa
aaaatgataaattagattttgtataaaatgggtatttccaaaatagtacaaaatatatagtaccatgagctcaatatcaatattttttttttccttttcaatataaccaacttaaagataatttttaacgcgaatagttaaaataataaataattattaactagttcatgatactcttttaaaaaatatagagtttaatttatattatttaataaagtaaaaagtgtaattggtcatttttgtaaaatacaatatttaaaataccttatatcatttacctactaataagtatgtgtaagtaaataatgttttttaatagtcagaagtcaagattacatctcaaaaataatagatgataagtggaataatacatcatattattaattatattaaatttccatatattaatatgaaataagtaaaaaaaaaaaaaaaaccaagtacaaattgaaaataataccaaatacttgatcttatagatttttgaagttttgcttcttcgtcaataaaattgttctcaatctaaagtagtgaaccgatacttttttttttatttaagcgtttatatattacatcagcataacttgggacttgaacccaggacctccaacacacacgcacctcctatggtcacttgagctagcctcaagtggttagtagtgaactgatacacttcctatttattttgacttattagaaataaattaattttttaattttttttataatcgtatatgttataaattataataattttttttaaccagaaaattaacttttagtaaatcaaatcagctattaaaatagctttcaaaccagcaggaacatagctcctgcaggaaacatagccagaaatagaaccagaagaacgagctaaaaagttagtcgtctggttcccgaaccatttaacaaaattaattgaaataggaaacaaa

SEQ ID NO: 169448 - DNA, 1087 bp, Cannabis sativa
  modified_base (1025)..(1039): a, c, t, g, unknown or other
gagagagagagagagaggagaatgtggctaggattttttgaaattgggaatttcgaggatggggtttgcttgagcccacagcaaagagcgatgagggtaaaccgtatacctaagagagagaaacaaaaagagagataatgcctccatcaataatttgtcattgttaccagttggaaaaatagagatctatttaatttgaattttcacatctttacttattgagaattataatacatattgaatgagttaattattctttccctgataatggtagaaataaataaagacgctttcacatatatttacaaacacatacatatataaattttctaaaattttagatcaaaaagaggaatgggtctttttatttgccttttaaattatctttgtttttataattttttatctgttacttcaattgggtgattaaaattaagttttaattatagcttaaaatgtattggaatatgcatgtatataatgtgtttgctaaaatgtttgtcagaaccaatttaaagttaaaatgtctattaacatatagaaactattgcaacaggttcaaccttgtagcttgagcactcaactattgtgtaaggtacgtaattgtgctactaaaaaccctttcagtcacaaacaatttattattcccaaccactaacagcgatgtaatagtgagccattgaagaacaaaaaaaatcaacaacgaaacaaaacaaaaccatgtcacatagacaagactaaaacactcaaaatcatgtcaaacaagactaaaacactcaaaatcatgtcacaaagacaagactaacatacttgaaaacaagactaatcgcaacaacaaaaattaaatgacactaataaaatacaaccccaactaaaccgcacataaacccaaataaggccagtgggcctagttggaaaaaaagggtcggtggactttcttaaatatatatagaaaagaaattacgttgtatacccacattactttacatgttttaatttttacatttagggctcgtttggaacgnnnnnnnnnnnnnnnttgtattgtattatattaaattgtattttatgcaatatttttatgtaa

SEQ ID NO: 169449 - DNA, 1102 bp, Cannabis sativa
aaaaaaaaaaaaaaattatgagtggcacgaacaatatacattgcatattgtccgcacacggacgaggaggacttgatcgaggaatgaggctgcttgcagcctgttctgcacgggggtgtttcagacaagcttgaccgaggaacctcagacacgctttatttgaaagcgtatcctgactaaggttccctcgtgtccgcgcgcgcagcgaatgattccccaccctgattcttttcaaattttcaaaaaatcatacctaattcaatttaaattaaaattaagttctgtaaatagataatttacttaattttttctaaaatatccaaataaaatatttccatatcataaattaaattatttttcataaaaatttcgtaattatcaatcaatcatcaaataaacacatccaaatcatacattcatcattttaaatccatattatgaaagtaaatcattaccgtggctctgagaccagttgttagaatttgttttactaggatttagatttactaatatgtatgattatattctataatctaacaccctaaacatgaattttctaaaacaacgaattaaacacatataaaattctagaaaattttacattggtggcagtagaatattttcagatttctaacccttattcctttctatcgcagagtattaacaagatctgaacatggatctcctttaagtgttggaattcttcacaatcttccacgctataattgagtactaacttaatatgagtgggcatgtactatgttactatgggttcaaaattaatgaagaaaagtaggaaggaatttcgaattctatataagagaggctctcaattttcagttgtctgacaaagatagaaaactaagttgagaatgagagtcatcttattccttatatatgatttcatctagagttaggatttaaattatatagaataaaaaagataaaataatggctaaataaaccttaagtggtcgaccatactagtggaccccactagtttcaattttactattttatttaataatttatcgtttccttcactaatgctatattttaatttttaatcctataaatgttaaatctatttatttaataatta

SEQ ID NO: 169450 - DNA, 631 bp, Cannabis sativa
ttaacaccccaaccacgttaaaatttgtttgtcttattttatactttccccattaattatttattcttaagttcctataatttttattctatttctgaaaatctcggtctaggtcttccagatgcggagcacataataaatggaagggagagttaccttttccaaatgtgttggcacctagagcacctccaaccgaatgtctgctttgaaatggacttccagctccatctcctcattcatgggctttgaatgaaactgagcccattcttccagccatcacttgtccttcttgatggccttccttacttcgtctacaactattgtcgcaatgacttctttgaaatctggagggtcactgtggacatcatggacatggtaggcgtcaatgctctagtgagaagcaagcaagccaacttatctaaggttgattttgatgactaacttctctactttcaaatctttttgtggaaaacctttgtacaaggcttttttctcgagcaataaaggagtagtaggattcgaacatgcaatgttttctagatagatagaagaagtcctaatcatatatttaaataaaaggctaaaataaaatggggaaggaaaaggatggcatgtgtgtacttacagttca

SEQ ID NO: 169451 - DNA, 583 bp, Cannabis sativa
gtttttaaatctcttaattcagattataaaagttagaactgtaaattttattgtattttcttttaataatgaacatatcattgtacaaataaatttatctaaacaagtttctaatccaccttgaacaccaaatggtgaacaagctgtaagagcatctctaaatggggcaataccatagctttcaaaataggcacattatcttaaattttatttttcttttttatctacataaaatttgacacattttcctataaaaattactctaatagtgggcaacttcaaaaattgttcaccatagtctcacataccactttttaattttttttttttattaaaagagaaacatttattaatcagaacagaaaaatactatataaaccagtatctacaaaataacaaaaggcaaacttatttacatgttacaaacaaaatcaaagatttgttgatccctcttaaaaagattcctcctattaagaagtagtaatctcgttttaagtataattctaatcaaattgttcacataagaaatcaaaaaaatattttgctcaaagatacaagcatttcgattccaccaaataaaata

SEQ ID NO: 169452 - DNA, 1198 bp, Cannabis sativa
ttttttttggattggcttcaatccctctagcattcactatgaaaccaagaattttcccaaggagactccaaaagagcatttcttcaggttaagcttcatattgtattttttaagcatcctaaagcactcttcaaggtccctcgtgtgatcttcactcttcatcgaatttaccagcatatcatcgatatagacttccatattttctccaatctatttttcaaacatcccattcacttgtcattgatatgtcgccccatcattttttaaaccaaatggcatgactctataacaaccaagtctcatatttattataaaacttgtgtgttcttgatcagggacattcattttgatctggttatatccaaaatatgcgtccataaacttcatcagctcgtgtcctgtggttgcatccactaactggtcaatccatggcagtgggaaccaatcttttggacatgccttattcaagtctaaaaaatcaatacaatttctccaggtgtcgtttggttttgggacaagaataggatttgaaatccacgagggataaaaggtctcgcatataaattcatttgtcaataatttatcaacttcttctttaagtgccccgtgtctctcggagtctaagggttgccatttttgtctttttactgggtaattggggtccatattcagatgatgatagataaccttagtcaatccctatcatatctgagtggctccaggcgaattgatcctagtttgccttcagaaagttaattaactgctattttagtttttcatccaaattctttccaataaacactcatttagcaggattgtttggatctaaaacaacctcttctagctcttcaattcgttttagttggttattctcatcttgaattctatggtctagatcctcttctttcttctcgcattcttcggttatgaccaccatcaattgatgattagctcttctattttaaagatctatgcaataacattcgctagccaacaattggtcgcctcgtaccacacccaccctgcttgtgtttggaactttagagatatgtgtttaattgaactgactgtccctagtccaaacaatgcagggcgacccctgttgtaaactgatggaagatcgacaactaagaattcctgcattagtgtcgtagataacggtggctctcctaccgttaatggaagttcaatgatgcct

SEQ ID NO: 169453 - DNA, 629 bp, Cannabis sativa
gattagctgaccaccatctcccataagctggtagtgatttaagcaccatatgtcctccgcacacagcccacggacttctggccacaacaaaatccgctttgtttttcttatggaaccttagcatatagatgttcttatcttcctccttgatgttccaacccttccataacctccatttttgtgcaaaaaccgatctgagaagacctttgaagatccctttgttgaaaaaagtccgacccacaatcgtcttctcgattaaatcccttctaatgtaggaagggatttctatgtgactccttaaggtgttcaatatcattacaatgtagtattcaataactggttagcatttttctaatttatttattaaattaaaatttatgggagttgatattgaaatgcatggtatgctacattttgtggtatttgacacttcaatatgccccttaatattttcttattaatatgtacatctttattaacttcgattaaaattttaattttacataagtttaagaacattttcaatgtgagataaaattatactatatttaacacaaagaaaaagattttgtgatatatttacattaatttttagtattgtgctccaatatataattgtaaattttgat

SEQ ID NO: 169454 - DNA, 774 bp, Cannabis sativa
aaaaaaaaaaaaagaaaaaggtaagcaaataggttagtatacacttttttactttttttaaaaaaatataattatgttccttagtttgaacaattatttataatggattataattagatctttttttgaattactattatgagaccttgatatcaagtacatttttcatggagtcaattatgtaatattttttagtaaattcatgaattcaattatgtaatattttttactgatttttcaaaaaaaaaaaaaattgtaatatttatttctgttaattattgttttcgataatgaatctaagttaattatgatatttaaagaagaataaaataaaataactaaatgtgagagttcactccattaacattgacttaattgttgattatatatacgtttgaaaaaagaagggactcataatcacacaagatcacagttccaaattctatgttgcaatggttgcgaattttgtcttttgctttatatggatagttagattcaaatgttatgccttcattgttgatcaagtagtcaaaagtatcatcctggttaccactttcgcagccacgagtgtttgcattttgtgtgacacaatccagaaattattgtataatatgtatgccttccttgtttggatcttcttcggctcttaacggctcccacagttgcgaatacccaatacgtttctgtaaagtgacaaatatgtttatataaatatatatggaagaggtttcaatggttacatttttattgtagttacatttttttaagtcattg

SEQ ID NO: 169455 - DNA, 827 bp, Cannabis sativa
tgacactgggcttgtagtgtcgcaggctgtgacattgggcctgtagtgtcgcagcccgtgtattggtcatgatatttcccaaaatttttagcacattggcctcaacactcaaagggagtgtcacgacactcaacggtggatttcaggcactgagctccctacacattctctgcctcaacactaagtcccagtgttgaggtgcgcccatttcttggtaaaaaactatcttctctaccaaattttggccttttaatgccgtgacatagaattttagtgttgaggcactacgctattatttccaatatcttggccttaagagctcgaaatgcaccaaaagtttagcatcgagattttatttatttgaccttctttttcatattttccaaaatttctccatttttcttcaaaactaaacctacaaaatagtaactacaaaaactttaaaattgcacaaaacaagtgtaaaactatttaaaaacactctaaaaatcatactaataaaaaacctaaaacttgtttctgagtatagcgtttttgctacaagacatgcgttaaatctcaccatattactatattcatccctcttggttttaaatatccatttacaatcgattgattttataccttctggtaataggacaacttcccaaaccttattgtcttgcatagacttattcttttcattcatggcatcgttccactttcgagagttagaacttctaatagcctaatgaaagttgattacatcatcttccaacattttaatttcatccccatgttcttgaagaaatacaaaatagttatctgaaatagcatttcttctctct

SEQ ID NO: 169456 - DNA, 1168 bp, Cannabis sativa
aggggcgatttatagttgttttagttgcgacttttgtcgcccctaataaattaatttgttgtagtgacatttcttgtagtgagttttaagagaaatttttaataggccaatgaattgaagtagatagttggtttgtgaacttgaacacttcagggttaataactgtaaagatccagttaccatatcaattacaaaaataaaagtatcccaacctttgtttgaagttggtagactagagaccatatagtgagggcttttcgtagagatatacaaagctataaaataagaaattcaaagagaaaaactaggcaaaggttacctttgatcattctttgcaaactccacttgaattcctaataaaaagctttttgaattggtttagaaaatttaaaaaattccttggttcttcttggttcttctagggcaaaagtgagaaagggtatatataaaggagtttgatatgtgctattttctaacttgttttgttttcttaattaactaacttagtataatttaatcttatatctaagatttcgctagataaagagttaaaattaacttaataaaagttaccaaaataccatttttttcaccatgaagtaatattttcacctaagggtaaatggtcataataaccaataatcctgtataaccttgatattctaactgaccataaatcttgcctcactaattttatgatagtaaaccatatcaaggtgacactattggccaaatcttcaatttcacaattatcagtcataaaacatgaaaatatgaaaatacataaatgacatgcatgacacaccaaaaatctaataaaatttccacaattgagaaattatatctctaatgcctatttcaaagaataagtctaatttttacactaatgcacatataatcaaaacagtaattaaattactaataatctactaattgtttgttaatttctttatctaaatatacggtcaatacaagaagggtttttggagctcgaagtacagaagtagcgtgcgcaaagatatgaagagaatgagtccacggagaccaatcttaatgagagaaagggaaaggttcaacggtcatttcctgcctataaatagaagatcttattatttaaaaaaaagcacaaattcttgatcacaccagactagtcaaaactctgttggaa

SEQ ID NO: 169457 - DNA, 875 bp, Cannabis sativa
ttgttgggtgttattataggtgatccagacgttttgatgaagtctggaaatgatttgggtgagttatggatttctttgtgtttcaagtggtaggaaccggctaaccggttcgtagaaccggttaactatttcataagcaggaccccaaaaaattcgttttactgattcatgccatattccaagccttagtttttggtatttcttcaataattagggtattgtcatgttagttatcgatagcaaaacttttcgttgtgagtttaggtccccggatcgggttttagcaagttgtttatccatttttgtgaatgtgacataggatatccatccagcgtgtaatttttcgttcaggttggccaacacaattgaatttgaaaacgaggtaagactaacatagaatatatttatatatgaatatgtgtatgtgtgatatatgtatgctgtttgtgattcgtatactaccaacactagtacggtagcggtactgagtgtattggtacaatgtatgatgttcaatgagtataatacggtgttaccagtactagtacggataggtacaaagtgtatgtggaacaacacttagtggtactcgaggtacggtgcaaaccctaccaacactatatatagtagtggtacgtagtgcatgtggtacagtgatcgtaccttagtaaagaatattctatatcatctaataagccttgtggataggtgtatgggtgcctagatacaagtcggtaatatattgtatgttaaaatatttttcttactaagtgttgattcacatatattactttcttgtgttggtaaaggaaaggctaaagttgaataacagtgagttctgagctcagggaatgattgtacatgtcgagacggtg

SEQ ID NO: 169458 - DNA, 513 bp, Cannabis sativa
taagcctaattcataattcgttaaaacaacatatattatgttggaggtcaacttccaattattttccagaaataattattccattccattgctcttataatacaggctttgctcacccacacacccaaaaaaaataataataaaaaaaaaaaaagggcaaaaatagcaaaaggaaaagagctttacaaataagatggaatattggcccaaaagtgcataaagctaacatgataggaacaaaagaaaaagcagatggagagctttgtgatagagttgatgtaattttgaaaataagtgtcaaagtataaagacagcaagtacataagcaagtcaagaaattaataccaacagaaaacagatgaaccaaggaattttcatgcgtttaaggtgttctctctatccacattaggttttgtcacttctcaccatcctaattagaggctacacctttttctgtttctaaatggcacagcatgataaccaatataagaaattaataccaacagaaaagtg

SEQ ID NO: 169459 - DNA, 849 bp, Cannabis sativa
ttgaccaatacttcctgtaaaagaggccaggcaacccgtcactgcctggagctttttagggatgaatgtctcgcattgccttgaaaacctcttccatggtgaaaggctccaacaagtagtcgtttgtagctcgggagatacagtttggaataattctttggaaatcttctaactgcttgaaatagtcacacgccaccctacctatgtttcgattccccgtgacccactgaagccgatcatctatcaatccttagatggtattctttgctttcctattactcgccttcctatggaaaaactttgtgttcttgtccccttctttcagccataaataacgctctactccgttgcttccaaaatttcagccaaacattttgtttcctttccaattcctgcatttgttgccaatccattgcattagtacttcgagacagtaaagaaattttatcttcatattcctttaagtgccttgtcatctctcgtttctttgtcttattccattgttgaagggccaccccacaattactcagccgagtctttaactccctagtgttcgaaatctgcttgtcctgatgccaaaccgagtgcacaatgtttgaacactcttcatcttcagcccaagcactctcaaagtggaatttagttcgccatctagtcgtattatgcatctttaagttggggtcatagcccataaggagaagagggcaatgatccgagtttgtacgatccaaatgacgaactttcgttgaagggaacatgttaaaccaatctgaattaccacaaacccgatcgagcctttcaaagataagatcattttttctaccattgcacctgttgggttttatgccc

SEQ ID NO: 169460 - DNA, 554 bp, Cannabis sativa
tagccattgctttggtttttttttcctttaaggaaaaataattaatttaattaaaattgaataatttgtggccttttttttttcattaggggcaaaatgaggacttgaattaattaattatacatgttttaacaaatttactaataataataaagtaaaatcaacaaccaaaattaatacatctaaagaaaagtaacaaaagcttccaaagtactttactatatgcaataaagttaaaattaattaaatgtcatcttggtaggtaattaatggttgatggctattatacaacacaatttaatgagaaataccgttggaagaatgggattattattaaaaacaaattgcttagtaacagtaaaatttatgattaaaaataaaaaaaaaattataaataataaattatatattgtggttaaaaaatttatgactaaatgtgttagtcataaaaattaccatttatgttttttattacaatacttgttataattaaaagtaaattagtgacaatttatatttaaatatcatattttaactataaataattttttgtt

SEQ ID NO: 169461 - DNA, 856 bp, Cannabis sativa
ttgatttttgaattttatgcgcagccctacttatattatagaagatttgctaattaaatttgcgccatgccaccacttttcttgccaatgccaacaaagacttacatgaatctcttggccatattgatttctcgttcttaaatttttatctactagagattgtctttttttttttcagctaggcctgtcggacctccctgggtgtgacttggtcgaggtttgtgattttgctactgcgatcaggttattgcgattaaatttttgctattaatggatatagattggattaaggtcatttggaagtgtttaccaagttttttaaaaaccaagttaagaaatattaagctaaagaaaatgagtttaaaaaataaataagatgagatttttacgtagttgaggcattaatgagtcttagtttacgagtcaatattattaacctcttagttatggagtatttattacttttctcatacgactgtattttgccaaaatttgtaaccctttacatgaaggggtagccttatttataggctttttgactaatggggatctgttagtgttcataatatgaaataaagccactacatttgatactagtatactttgtcaatgccttggaaaggacattccacatattagtgtgtaagtaaattttatcattgattatcacgtcagtgtaaatctagtgtactaataaattatgggactaaataatttgaagcatataatcacaattactttctaatgtgataatgtcattgttattgcgaataactatatgtttgggatttaataaaacttttatattaaacatataatcatgtataaaacatgtgaacaaaatatatgacaaggt

SEQ ID NO: 169462 - DNA, 607 bp, Cannabis sativa
  modified_base (561)..(563): a, c, t, g, unknown or other
aaaataatgttaatttgaacaatatgaataatctattttcaaaaaagtatcttggaatataattttcttttaacaatttgtttgttatttttttttttttcaggaattcaagagataccggtttgagagcaaaaaaaatcaaataataagatgttgaatcaataaaaattattagactcaagcagagaatagaatagtttatatgaacaaaaagattaaacagataaaagaagttctctttctacccacttttataaagcattttgttcaattcacttccatccaacctatcaattttaactgatctttttacacatataaaaaagcttggagataggattatcttcgaaccaaaaggtccaagaatgttcgagatgatgagattgatgaagtaagagttatctagaacaattatttcaaattcaagtcctatgctagtcaattttaaattaattgttgatctaaataacacacgggataaaaattgaatctatgaaataaataaattgacggacagagaaagaggaacctggggagaaagacgtttgcaatggccacacnnnggagcgtagaagtcgaccaatacacagtcgaaggcggcaatggc

SEQ ID NO: 169463 - DNA, 1195 bp, Cannabis sativa
aagatgataaataagatgaactactaacatcagaattcatcttttacagaagctaatttgtattactttttttttttttcaaatatgaggtttatattttatagtgtgtacaatcttatctttgttttctaaatcttaaaagtaagtaatctggcaattttatatgggccaatgaattcaaatcgccatgatctcaaccattggatggtatagttaaatcatatccaattactccttcctatagttgaagataagatacttaacaaataaatttggatcactgaatttatttgatcatcatctcaaccattggatggtacagtcaaatcaaatctaagcttttactcttttcaaaatttgaagataagatacctcacgaataatctaggtcaatagattaatttgaccacaatctcaaccattgaatggtatagtcaaatcatatcaaagttttttactctttccaaaatctcaagtaaagatacttgacaaataaaattgggccactggatttatttaatcattatctcaaccattggatggtatagtcaaatcatatctaagcttttactcttctcaaaattttaagtaaaatatatatgactcactggatttatttgatcatcatctcaactattggatggtatagtcaaatcatatctaaatttttactcttcccaaaattttaaattgacgaataaattcagtccactggatttatttgatcatcatctcaactattggatggtatagtcaaatcatatctaaaattttactcatcccaaaatctaaagtaaagatacttgacgaataaatttgggcgacttgatttatttattaatcatctcaaccattggatagtatagtcaaatcatatctaagcttttactctttttaaaatttgaagatatgatacttgacaaataaatttaggccaatagattaatttgaccatgatctcaaccattgaatggtatagtcaaattatattcaaacttttacacttttcaaaactttgaagataagaaatatgatattattaagccatttatacccagcatattactctttgaatgaatacacatattcaatatatttctctccctttttctaatttatcttccaaaatgtcttcaattagaactttgtcatactcacttgaagaagatgtacagttatgtcgtgtatatcttga

SEQ ID NO: 169464 - DNA, 1202 bp, Cannabis sativa
tgagataaagagcagaattagaagtattggagggaaaagaagtagtatctttattgataggaaatttattacaagagacagatgctgtggatagagcacctggattacaagatttagtaatacaagatggaacttctaaagaactcttatgaactatagcagcagggactatagcagcaggctcagtggacggttttgactttgtattggtggtggcaaggttgcaatgcagctgaactttggatttgggaaaagaactgtgagacaaagtgtatagatcatttttaagcctccccttgagcaacactttccctgttactttatccttaacaaaacaacatttggagtgaaattctagaaaaatgttattatcagcagtaagcttagacacactaatgaggttcttggtagttttagggactttaaggacattattaagacgtaaagaaccattagaagagggaagataggaattaccagtgtgacttatggggagacgttttccatttccaacagctaaagtgtctgatccaaagtagggagtttcagactccagatattccatgccttgtgctatgtggtttgttgcccctgtgtcggcataccaatcttggtcatctgtgaactcttgaatggcagagctggaatatgcttgaggatcttcatggtcatcaagctcagtaagataagcacgggattcattgatcttgggggtaacaaagttcttgtcaaatctgtaatgacacactgctgctgtgtgtccagatttgtgacaaacttggcataagagacggggaatagagggatttccacgaccataagatcgcccttgcgagcgatttgaagaaaaattcccacgaccttggctgccatatgatcgataaccagaaccagaggttgaacgagagttgtgaactgtgagattggccatgattttagaagaatcctgtaaggtgtaatgtctttccaacctgctttcatgggttagtaacaaggattgaattgtttccagggagagattgtccacaagactagtaatatgaacaaccacaggatcatattcggggcccaaaccattcaacatatgcatgattaaatcattgtcatcaagaggatgaccagcagtggataaagaatcagcaagaagcttgattttatcatagtaatcagtaatagacagattacctttctggattgtggat

SEQ ID NO: 169465 - DNA, 847 bp, Cannabis sativa
tctcgatacggcccatactatggttcaggtaaacttgctatgtgtaacctctttgacatgatcccaccaaattcgtgaaatgtctccttttccttgtctaaggaaaatgcttggctataaagtatgatcaatctagggattagaatgaccactatttctatttccccaggcataaagtaaccatacacgtttggacatgttagctcccatagtaccatcaaacagtgtgttgcacctacatcttttgctttgggccttaagcaattgattcaaacttgtaacttctccccattagaaggattcgaatggcacaccatctacaggtccgggtcatccagacccaacctgcatggttgtctataaatatcgcatcactatcaccattaaaggggtcgaaaatgggtatttcacagagagaaaactttatccaaaagtgtataaaatcaccattgataataccatggactcacggactaatacacattaacgctccaaccacgtaaaaaaatcttatttatttttcactcctttattctttctttagcttcatctttcttataattaatttctaaaaatcttggtaaacaataaaggtattcaaatagtctatttaatacgcatataaaattaaagaggcacacatacaacatattgcttgaactttattttcggtatatcaaattattttgagtttatcaaaattttataaaatgtgttaaatactacaacgtatacaaccatgtagaaaaaaatataaactaagatattctattgaatgccaaaataaataggctaattagcaattttctccccgaactttgacatatactaaattatgtcccctaaa

SEQ ID NO: 169466 - DNA, 693 bp, Cannabis sativa
tggtgtacatcagcaaaagcaaaaattggattccactaatttctctgcatcagcatctgtggccgatcctttgggcaagaataaaggcatatctgaggccactactaatttgaattttcatggcctgcctattaattcgaagcctcacggtttgcagatacatggtgtttccaaatcaacacttgtggatgaaatctctaccaaaatgaacctaaaaaaaggcacgaacaactcacctttcaacccagtgtcccctgcatctcctaatgagagtgatctctctgatctttatatgcctaatgtcggacagcaagcagggattgttgctacatatccgcctgaaactatgcatactcagccacttaatgtgagaactgctgcaacttcacaacacattcaataccccacaatgacagattctacaatctgtatgcttcctactggtgctgattgtgacaaagagaacagttctcctaatcgtgcgaacaagagacttcctgagaaattgtccttacgcaaaacactcaagcgatgtaggggtcccaaacctatcctctcaacttcggagttgtctaccgatgctgagatgtatcagcatgtttctgaaattgcaacagattcaactgatattttggacaacgatgcggaggctgttcttcagccccgcaaacagccatgaaaattattagctgg

SEQ ID NO: 169467 - DNA, 688 bp, Cannabis sativa
agtttgccatgttcttcaagaaacgtggaattttgtatcgattcttgctcctatcaataaaaaataacttttcatagttctttcaagaattgaattgtgtcagaccggttggtatgactgggaagacaaaatgagactaaagccaaaaaaataggaccaagaaaggatcgaggatctatcggaaagggagaataatttcgacgccataatggttgcctttgatcgaattcttgaatatctagatcaaatttgttcagccaagaaaagagattttagtcttgaccaaccaacttcttggaaactaggagggtgtttggctgtgttttcagttttcaattttcagaactgtgtttttaaaagtgagaataaaaaataattttttgtcattttaaaattttaatactgttggttcatgttttttaatactatttttagattttttgtttactaaaaaaaaacttcaatactctacaccatattgaatattgtgtctgaggtccgcgtccggggttcgaggtccaggtcatggttgaggttggagtcaggagtccgaggcctggggtccaagtttggggccgaggtccaagtccgtggccgagcatcgaggtcaggttcgagtccgggtatgtggaataaaatataaaaaaaaaaaatatgttagacaaaaaaataaaaaattattttttaa

SEQ ID NO: 169468 - DNA, 734 bp, Cannabis sativa
ggacctagtgccaaggttgacacttgacactagacccaacacccacgttgacatattgttccatttccaatcagtttctcaaaaaagtgttctgaggcatttttttctgtcatcagaaataacgaaggtacaagcaaactcgagaagaaaaccacaatctcaagggtatcaaaactgagcccagtgtctggggtgataatcaacgtggtgccctggtttcgattactaaagtgtgaattttgctccaagaattctctctgaaatagttaaaaaacgatgtaggagaccttgtcctcaagttcaagaaccttggaagtgctaaaacgtaactcgaaagctctaaaataagcacccaacgcctaggttgacaaatggcctcatgcattgggttcttcttatctgattctgattttgtttcgatcgtttgtctagtttttgacaataaatgagagtcatgaagtcaaaaaagttaaattcacaacttcatattttacttttttaacaaggtgatttactcgtaaaccgggtagtttaagtctcatattttggatagcgacaacatctttgagaattggtaacgacaacatcaaaatattacttaggaatcaaaaaatacatccctgacgcattatcccactcacccagcattgaggttgggcgttgggcctagaacaaccttcagtaaaatagtcataactcactcaatattaattcaattgacgcaattcaacttg

SEQ ID NO: 169469 - DNA, 714 bp, Cannabis sativa
ttaacgatattctttgaaattattaagtaaaatttgagacttaattataccaatagtaacattaataggaatatgtgcctattcatttccttccaccacttaataattttgaccatttttacaaagcatgttaagtataatcttctaattatcttaaaaactcattaaatagtattttctattactatatatatctataagtatttggggtatacgtacatatatagataaattgtagagaaataatatgacacgcagtggtataattcataaatttttaaaaattgttaaataatttgaaatgtcaaaattaaaatttaaacagtctactttaatatttgtacaataagttatttaaatcataattttgacattttaaattattataaattgtttaaaaatttatgaaaaaatctatatatgcagcgagataatcattactgtaatcaggatcgatcttaaggtgagacgaaagagacggccttactcccctactgctcaggtgataatttcattagagtaataactctgaaaattagagtataaatcctaacaacttcaatttttcactatctcgatgtttatttttacataaagtcgaaattaggataaatgtttagggtttccaattcatcatctttattctattcgtaggtggacattatttaacttctttatttatttatttttaggttaattagcaatttccccccc

SEQ ID NO: 169470 - DNA, 609 bp, Cannabis sativa
ttgtgggagtcattcaacatgttattctattgaaggccaagagaggtctaggtcacgaacaacctaaagtcatgatactactcgtaacaccataccacaatgaccttcttgtgagaacgacgcacatggcaggaagagtgagcgtcctccatcacaacaatgacaacgggtagcaatccagagttgtgagacacatgaggaactatacacccttttctacacaacaacaaaccaaaagggaggcacaagaacctacgacccctaaaaaacaataatacacatccctcatggagaggctctcgtgaggagaggggcacgacatgtaataatacagtcccactttctcaactctctcttgcttctagggatattggtgttgatgaaggggtaagaaacatgtacggaaccctccttcaccaatcaggtttcccccatcacttataaggcatcttgagcctcctcgtactaatgtagcatcaccacatcaaccagcccagagagggagattacaacaaagggaggcacctcctagtcatcttccaagtcaagacttgctttgaatccctagagataggcaagaggatgttgcgttttatgccctaaataaaa

SEQ ID NO: 169471 - DNA, 525 bp, Cannabis sativa
tgagagttgggctttgtggatttggaagtccagcccatgggctcacagagcagcaaaattctcggaagaagttgcaaaatacccaatttttttttatacattaactaaatttacgtaaaaaaaaaattaatttaaatataactctttttacgagtattgtacccaaattatcctaacacactcacataaccaagacaaatttatgttctttgtagatagatgtctaggtttgtggagaagtttggacaaaattttgattaaagaaaaatagaaattattatgaaatcataggggtaaaattagtagaatgattgaaaaaagaggtaaacttaatagattttttttaaaaaaagtaaaaattaaaaacatcaagttaaaagagatatataatgtaattttctcaaaattctctcttagctaggatgacgtaccctgtgctacttgggcccactattattcgctagccccaccttaataggactatttccttgaaatttcataaataaataaataaaaattaaaaaa

SEQ ID NO: 169472 - DNA, 515 bp, Cannabis sativa
ctctctctctctctctcatattatggttatacttttcgcataagaactcaatatagttttctggttattctttttttttatatatatatatatttttggttttccttgtcctttcaaataagcaataggaatttagatagagagagtaccctttttggtgtcagaaggaaaggaaatcccaataaaactcatcaattatatccatttggtgcgtgatctcgtcgtttctttccatgcaaaaacgtgatcattcttactataaatatcacccataacaaaccaaaccctacaaaaaaatttcactgttttctttttcggccttctctcatctcatctcatcttttcggatcatgaaaacttgtccaaaacagggttcattagtcgccttaaacgacaacgatgataaaagtagtactagaaccaagtttgccttgagatttatccgatctctaatggaaatgaaaagacgtggacatgtttcttcttcttcttcttcttcagataatgataataat

SEQ ID NO: 169473 - DNA, 735 bp, Cannabis sativa
  modified_base (157)..(159): a, c, t, g, unknown or other
tttttatcttctaagattttaaaaattttaggatgcatttggtaacattattttttattagaatttttgtttttaaaattacaaaagtgaaaatatttttcaaaattatattctataaaattgttattacttttcaattttttaattgagaattaannntttaaaaattaaaaaaaaaattcactttcaaaattttttaaacaaattttgtatatcaatattttagactgtcactccaacctagaccttgaaatccagacccaaacctcgacccgactcgaaccccgacctgacttaaataaaaaatttgcagaatatgcttttggtttttattttaaaaattaaaaaataaaagtggttacagaacacagttttatttttcaataacaaaattttaaaaacaaaaattttatttttatttttgtgattaaaaaattttaaaataaaagtattaccaaatgctaccttaatttatcatcttatcataaaatatttcttaaaatcagacttagggaaaagaagaaaagttgcaacatttggtagagtacgtatatttaacatatgcgtactttgaaaagctatcataaaaaatcacaacttaaatttttaacgacttacttaataaataagattaaacaatatcatcgttatcaaggcattttttatcttctaatattttaaaatctttagtttctcgtcttaccttagaatatttcctaaaatcaaacttaagtg

SEQ ID NO: 169474 - DNA, 552 bp, Cannabis sativa
cctcaactggatgaaccacgccaccgccgccgctgctacttcgacgtgagttgacccggatctgaatctccgacggaccgtctccggccattggaggaagaaaatggattagagaggggagagtatgggaatgggaagtaggaaaggagtaggtttaactgttttaaggctttgcgtggtcaaaagaggaagctaattagtcaacttttaccgattcagctgctcctgtcgtcaagccgagctggttgttgacacatggtttattcacccgcataaatcaaggataattacttttttattattaatataccctacaaattttgtaagagatactattttaataatttttattttatataaaatttatatatttttttaataagagagaagaattttacttgaccaagtattaaacaaatacaataaccaaagggggaacaacccccaacaaacaaattaaaaattgttaattaagatgtcgtttggtaacacttttttaatcaattttctgtttttaaaattgaaaaggtaaaaatatttttcaaaaacatg

SEQ ID NO: 169475 - DNA, 1090 bp, Cannabis sativa
atttttttcttttgaaatttttacataaattactatattaaataaaaataacaaaattatgtttacactttatatggtaacatacatttttactgtcttaagtttcaattatattgtgtgagtacgtgctaagtccatatctccactgtcctagtcgcgagtttcacccacacacaatataattttgttcttttaccttgctaactcgcgaataagatcttggatattaggtcatctctaaaggcactttaaaaacctaaatatgatataatttttttatcaaaagcctccgatctaactcaagtagttctattttggtggaagtctacagtgtcccactaataacagtgggcactgtaaacgactgcatttttacttttttttcttttgtattttttaataattaaataatctttttcaaaaaaacaaataattatataataatataatttattaataaaataatataataataaagaatatattttttagtgtaatttttagtattgtggttagaattggaaaaaaaaaattagtattgaaatagtattcttttggtgttgatttaacactaaatttaggtttctccattgaagttgcctttaaggacttagcacttacccggttgcatttgtacttttttttttctcttttttgttttttctaagccaatcacactcatcaacttgtcttctctatgtatagactcttatgttgtagtattttttttatatttattttgtcaaaaaaatatgggaaattttttattttataattgctaatttattatttaattaattaaatacgaaataataaagttgctagtgaaacagatattttgtaattacatactaaagttttgtaactacaaactagaaagctagtaaaaaataacagtgctgaaaagtaaaaacacacaaggtttttataagtgatatctataattcttacagattgttattagtccacggagtcatgtccagtaggggtgttcattggatcacatccaatggatttggacccatccaatccaatccaattatttattggatattggatttttccatccgatccaatccaattgaattga

SEQ ID NO: 169476 - DNA, 691 bp, Cannabis sativa
ttagaagtctataattaaatactcaaatttcacataacaaaaaataaacaaggtattgtgcattgttgttgtaatttcataattaataaaagctattttagtaatttagtataaacctataaacattctcatttatttttattatagttatagatatagtcctaaacactaagcttattgtgcattgttgttgttgttgttggccatctcttcttccgaaaccggatggacccttgcgctagctcttggatttgaataccgagcgcggcataggaaagtaattacacccaaaataagtgtaattaccagcattaccaccaacaatacaataagcattgtgttcagagaatgctcttttagagcatcttcatgaacaaatgacatattgtttgtcaatccgttcattttttctgaaaagaaacatgaatttcaagtcaaaatctgagccacaactcaaaatatttctcaacttaaaagcacttttagcaatcatacatagtttttcctaacaaaattagcttatttatgatcatatatagcgctgcagatctaaatgatagtttcttcttacgaaacaaatcaaaatctcagacacaactcaaaagcttatttatgatcatagttgcagatctaataaatgatagtttcttcttgaagaaagttaatggagaaaataaatggaatgaagaaa

SEQ ID NO: 169477 - DNA, 737 bp, Cannabis sativa
attttaacaagattctttacaatcacatttctaatcgaatcaagaaataaacaataaaactctttgccccaaacatattcattaaaccttccactatcaataatatctaactctaagtcatttactttcttagtgtctaaatcacttaaaacaaaacagtgaacaaagtataaaacaacaactttcaatgcaagctcatcatcatcgccaaaccttttcccaataaaagcgttctccacgtccttcttgtttatttctttaaaaccaataaaaatcttctcctttaacaattttttttcttgtttatatttcaacttgttacacggaccaaaacaatcaaggcctgaaaccaaagcgaattcctcaatgctacaccttagcatccgaccagcaacaataaatcatatctcattatcattcggttggaccacctcccttaacaacaaacggaacaactggcgttgcaaaacataagaaggagttcttaaaaagtatccaaaaacagtttgtccaaccatttccttctgttcaggggacaaaacagagttgatagtctcaatgataaatattaataaattattttattacatgataaattgatttagtattttgagcctttttaaggagttttttagttttgataatttaattaattaattaattattataattaatttatatacatattttataaagatatttaaatttggtagtttgaaacgacatttatttaaatt

SEQ ID NO: 169478 - DNA, 1776 bp, Cannabis sativa
tttttttttttttcagtgaatctttttcttttatttctttatgaacaatatattgttaaagctgtcatcaattagagttaaacccttgaaggttttttccaaaaaaaaaaaaaagttttgatacttcaataggaagattgtcgttttctttgctttgtgttcaagccaaaactaaaaaaaaaaattgataagaatatcttttagaaagtggggcaattcaattttttttttttttttttctctttcccaatagatgagaccattttttcttcttcttcttcttctttttcccttttgaaaactatgtgttagagcaaattaaagacatagattagagacatgaaatttgtaaatatattggagtgatcgagtttagtaaaagttaaaatatataaagtagcaataattattaataaagtatagaatatgaacaaaaagtaattattattaatgagcaaaaattaccgcatggacggatatataaacaactttttgattgttaggtaataatttatattgtgtaatgactagatacaattaatataaccatattgtgatgatatcatcatgtatagttttaattttttggggtaagactgttatttaattgattttataaaacacaaactctgatttatgtttctttcctaattattattgattctctatcttcaatatttatatataaaattgatcgaggtgaatgtatatgttgacgtttgattttgaatatggagtaataaaatgatgtagttatgagtaaaatctcaaagaaaacattaaaatcataattatttattctatcagatcgcatgagtataaaaatgttggttttgataagatttcaattatgagagattaaaagttttttcacattagattttgaattaagtatgtgtttatcataaaataaagaaataaatatatatgtacgtatcaaatattgaattggactaaatttgattcattgtaatataaataaaaaagatattatgatgtttgatttatttttaaaatagcaatatataggaatcgagtagtgtatttacaaaaatatttttactttcaatttttttcttaataaaggaatgatataaaataaaggtataatttataaattagggtcatatttgtttatatataaatgagtgtaatagtaattatttatgtttatatatatctttaatggttatttgtataaagattattacattgtataaaatataacaaaacttatttatacatatatattagtttagaattaattattagttctacataaatatatttataaactctatatattttattaaaatgtactaatcatagaggtatattttttcttaatacgagatttagaaaaattaagacttaattttttaataataaattagaagttactcttgaatataatattcttaagagaaatgcttagaggcacgggtaatacttttctaagtgtcatattgctattggtataattaagtataggatctcttatataattttaaaaaaataaattttagaaaatatcactaattaattttaaggcatcacttataaaaagtgttagatatcaggagtgcctaataaaaatattgtattccttaaaaaaaaaaaatgctaaaggacacccacaatgcttaacatgcttataaagtataatgttactacttactattaatataatttaatatcaagttataattattttactttaataaatattatataatatttaaaactaattataaaacaatactttatcatagtata

SEQ ID NO: 169479 - DNA, 511 bp, Cannabis sativa
taattaaaaaaattaaatatctaaattgcggccacacaaaaataaatttaaaatctctgcacgaaaaactactataacgtctagttatttataaattaaaaagttcgtcaaattacaaaagattattattctcaaaaactctaattataaagagtaaattaatgttttaaataattttacataatattttccgaataataattattagaaagttgttattatcgtttttgtgttaaagttgatattgtgctgcgtgtgttactaatatttttttgtaatatttatagatctatttatttataaaattaaaatgtagtcaattaattataatacaattaattatattaattatattattgtttgatcgcaattaaataattaattaataacaaattaatagctatacctgacaaaaaaaaaattaataattaagctagcagctagcttatgtatgcgtgcaaatatatatgttatatctttatatattaaaagtgtctatctaacggcattt

SEQ ID NO: 169480 - DNA, 621 bp, Cannabis sativa
  modified_base (313)..(318): a, c, t, g, unknown or other
ttgagaatattaatagataaattgccgtattcataagacaaaatattgacttatcatgtaccttttaggaattttacaccatccccttttgacattaatccaccattatgtaattagaagcactatttctaattactaataaatttcattaaattaatttaaactactcattttgtctttattaattttaattaaataattaaatagttgaaatttatgtaattatttaaattagaaatattttaaaatatttccaaaaataattatttattaattaatttctaaaaataattattatatacaatatataatnnnnnnttaggtttttaaaataattttaattaactaactataagacaagaaaaatgtatatttaggctagtataaaataatattataaaatattttgaaagtaagttataacagcctataactagtttttaagaaaaaatagttaatttattatataataatataaatataaataattatcctatttatttaaaatagacaattaataaaagagatgttataggtttataacaaattttttttaaaaaaatattattttcaaaaaatatcactaaccacttttttaaaaatattattttatatagtata

SEQ ID NO: 169481 - DNA, 698 bp, Cannabis sativa
gagagagagagagagaaatgagggtgtgatgggttaagcaagtttcgtaattggtgaggtcatccatggcctccgattgagcctacgatactggaggtagcccatcatagccaggttaagaggatcgagccaaacacgagagagagaggagctcatgagcgagagagagaacaagcggtggtatgggcgaaggaacaacaatggcttctctctgggtggctttttttttgttgatggtggttgcttgcatattagagagagagaaagaaaagaaaactgatgcagaaaattcaatgagaaaaaaaaaagcaattttttcaattaaaagtatttaatttttatgttaaattaatttatttttatttcttttaaaaaataataatttatttacgtgggccaataaaattgtgccacatgtacaatgtgtacacatggatagtccaacctggcacttaacagctaaatttggatggaagttgtaaattgctaacagtatcatggttttggggattttactgccaaaatttaagttttggaggttaattgtgctgggttttatgccctaaataaaagtcaatttcaatgtaatctttattctttaaatatcaataaagaaacagaagtattttttcactcactttgtgtatcaattggttcatgttattgttgggttttgtgccctaaataaaacccattac

SEQ ID NO: 169482 - DNA, 560 bp, Cannabis sativa
aaagctgcgacaagagtaaaggattcaccgacgcaacttggcggagcaagtcgccgaagaattgtttggagcgaattgctggagcaagtcatccatttaacagtgaccagagcacaagaacgtcgatggcgaaagcctccattgctgagaagatctgaacctaatcgaagaaagaggagggaaatggtgaatgtattgtggatgggcctattattcatgtactacttaatttatgattgggcttaaactagggactatttaaaagcccactccaaacagaacttatttggaattatgtctgcgttttttgttttctttttaaaaaacgataatactttttcatttagcttataatgatgtgttatggaagcatgttgtagtgcctccacgacagttgaatttcgggtataacaataccatatttagaaaacatatagattacactcaataaagaagtattaatagaagcagtattttacgaggataatattacttgcatcgtccaatttaaaggagagcatattaaaggagatataattaaaacacattttactaaattc

SEQ ID NO: 169483 - DNA, 1285 bp, Cannabis sativa
aatgtggggagctagagcacaacaagagtatatgcaaaagaaggcatcaaaattaaaagaatcagaacaactaattaaaaaaataacagttgaacaacggaggaaaactgaacatatattagagcataggatactaaagaaaataacttacatacaaatttcattatttttctattattattaaaaatagagcagtacaataatatttaaaaaacgtgataaataaataaaataaaatgacagtaaaacaacctgaaaataataacaaaacaaactagtaacaaaaatatatatttatttctaaataatccaatagaaacatgtttaacatgaagaactaaaaaacatgaatataggaaaactacttattgccgagaatgatgagagggagaagagagagagaagagagaaaaaaaggggaaggatgagatagagagaagagagaaaaagaagaatagtagatatagctggaatgtttgaatttcagagggtaagttggagagagaacaaaactcttatctttcccaattcttcttcttcttcttcttcatccttcacatacttttttttttttggatacctactattaaaggagatgggtattgagagaagagaagcatttatttgggaagaccgtgtaggagaagattttgtaagaattttatcattagttttaataataaaaaaaaaaaacattatcacaagttacaagacaacccatcactttcatcattagttttgataaaaaaaaattatcacaagagacaagacaactgttgaccgagattttcggcaaacgatttaataatatatataagaaagttgtagaaagtttaatacatgagatttttacgtggttcgggcattaatgagccttagtccactagtcttttctattaatgagaatatttattacagagaatgttcttggtagtttttctctctttgattcttatggaacccagaattctcgacccccgtctaaatgtgtttggggggtatttatagtgtttttcaggagtgatccctagaaccgtacttctagactttctgtgtatttttttagtaggggcacacattcctagcagatatatcatgggaaatacatggcctataccctaggtaccttaggggttaggtggatataatcttttatcccttcttgactgatgtgatccctcataaagtagccgtcactaggctaatcatagtgtaatagctgcagaagaggggttacgccgttagacataatgcttatggcagtttcaatacgtcttctcccatg

SEQ ID NO: 169484 - DNA, 535 bp, Cannabis sativa
tcttgctgctgagtgtaaagaacaaagggcttggctcattcctggtgttgccttgcaaatgcaatgggaaattaagtggtataaggtaatttatttgagcaattataacactttacatgttatttataacacttctatatatgtcatgaatcctaattttatttataattaaaaaagacaaaatatctagctataatgttaattatataatttgtcataatctattatacatgttatttgttgtgactaaaaactactttaatttgtaacttttgtaactagtacttttaggcacaaaattttaagaatttttagtaacaacacctgtaaaatattgtttcttttggtgttataataaattacttaaaactaaaagtatagatgatgatcaatagtagataaataatagggtaagtactatattttgaactttgtgttttgtaaaagttattgattgtatcctctgttttgttatatgacaaaatgaaccctgtacttttcaaaatggtaaaaataggaccatgaactcaatttt

SEQ ID NO: 169485 - DNA, 517 bp, Cannabis sativa
aaaaaaaaaaaaaaaaacagtctagatcagcaagttacgaacatccaatgacccaaaatcaaatggattaatgttgaaattaaatcatataaataaacaaaggacaaaactaatcctaagaaaaagcttggataaggtttcgggtctccgagaaagtgcacaaactggagggtaatacgtgtgagtgcttgaggagagttataaaccaaaattcgaacaattgccaacaataaatgggttttttttcaacagattctaacaaggggttcagatctctggaaactaaccggtttcccctgctggaggtattgcagcggtctgaaaagccgcggagaatatcctagacgcaggcgcccgccaaaatgcctccttggttgtggacaaaaccaagccgatacatacaatgggcgaaggaaagaaccccccatttcatagcgcctgggcaacgcaagttttaactataaaaatatagagtgcacgctccttaattctcttttcttaattctctctttttttt

SEQ ID NO: 169486 - DNA, 816 bp, Cannabis sativa
tttgtgtggatgtgttgttaggtttatattcccataatgctgtacctaaagtctttttaaatagagatgtaagtaagtgcagtatgtatggatttgtatattactttaaatgagccaaaattataaaattccttagttgatttggtgtaattttacctcttatattctacaaatctcttagtttttgtttacaaatcagttttaactaatttcccattcttttttaggacaaataaatctaaagatgaatgttgaaacaaaaatatatagacatatttagaacatttaagttttaaatatttataaaaatattagagttttttgcagttaaatcatcttaacaattactttacttgtataaaaaattttaaattcaaattttaaaagtaaaaccctttaaactattgaactagtaataaatttaaggtgtcattcattttttaccgttaacggctaacatagacggcttatgtgtacacttttgtacatgtgtcatatataagttcaggaataactcttttttgtatttattaataaaaaatactcttatattatatttcattaaaatttacccacttttatgagtgggttgctcaatatattctcacatttcacttaagtgtagcacataatttacattaacctaaggagtataatggggacatcatcaataaaattaggtataacttaaagaatataataataaaggtaagaatttaaataagtaaagtaaagtgggtatataatgcaatttcttcatatttatattggtacacatattattattattttaaaattataaaaattatttcaaaa

SEQ ID NO: 169487 - DNA, 594 bp, Cannabis sativa
ttgatgattttcttgttactggacctaactcgaacctcatcaacacactaattcaagatttaaatcgcagcttctctataaaagacattggttctgtacattatttcctaggagtggaaatctttagggactcatctgggatgcatctctcacaatccaaatacatcagtgaccttctcgtcaaagtgaatatggaaggagctaagccaagtcctaatccgtcgagtccaagtgcaaaattgtctctgacagaaggtgaaccattttctgatctcactctttatcgaagcactttgggggcccttcagtatttgagtctaacaaggcctgatgttgctttcataatcaacaagcttagtcagttcctgcatgccccaactacttcccattgggaagcttgcaaacgggtgttaaggtatctcaaaggtactatctcgcatggactgcatatcacaccagctgagtgtctcacactgtagggatattctgatgccgactgggcatcttgcttagatgacagaaaaagtactgggggatatgcaatgttttttggtggaaatttagtgtcatggtcagcaaaaaaacagaatgttg

SEQ ID NO: 169488 - DNA, 772 bp, Cannabis sativa
gtaaattaataaatgaaaataaaattctgaaacagagaatgtcattgagccgaacagaaccactatcagacgactgctattcgtctcatgatttttctaaaaataatcatgaaaagtttacttattaggactagttgtatattttttaaaaaatttcgaataacttataatgtaaaaaatacggtttaaacagttacttatcacgcctatatataaaaaagtcgcacgtgtaataaaatatttaaaccttatttttagcatgacaaattattcagaatttttttaaaaaatttattagtagtcctaataaaataaatataacatacacaattatgaaaaagaaaaaaaagttttttagatgccaaacgataaagaattttccaaaacatctaactctatattaatattacctactacgtgctctaaaactaaattttctcgttaagatgtagtgtgaaatcattacaacctacattataataagcctaaacaaagcaaatgcacccgatcatttttcgaaaaaatattaattatatatatatatatacttattctgaaagactgaaatatataatcaatgtgtatcttgataactagttaatgatgaatatatatcactattacaaaagcttaatgtaataatattggagggaaagagtagagtcgagtcgagtcaaatcgaatctaatatctctcctccttgtttaattaatatatatagagctcaaactgatgttgacgaaaaatatatatatatatagctcaaatttgt

SEQ ID NO: 169489 - DNA, 705 bp, Cannabis sativa
  modified_base (650)..(672): a, c, t, g, unknown or other
ttttttttcgagttgaccggatcgggttcgggtgagttagctgggtctgagtcaaacctatacaaagaaagtaaattgaccatattcattgtcaagaatataaattaatatatctaaactaaaaataagaaattaaataggcggaacaagtaaccaagagctatattataagttatgaaaaaaatatttaatttatgatattaaatattttttaagtgataaaatttgaaaatattttcacttttttttttataataataagcaataattaattttaatataaatttggaagttcaaaagccttattaaaatttgtatttttatttatagttattttatttttttattatttttttttttttgaaagaaagtaatctttattagacaaaaatatccgctaatacaatgggctgaagagccaggggaacaccgctttcagtaaaaagacgacctgaccaataacaagcaccacatgtcatacagtgcgcgactttattagcagactgtttaacatgaccaatagaaacatcacttaaagaagataaaataaattgacaattttgaacaaataaaccaaaaaaagaaggcataaagactgaattaaaaatagtctgaacaactaaaatgcagtccgtctctaaaatgacatnnnnnnnnnnnnnnnnnnnnnnnaactaagtgcttctttgacacttagaatttttg

SEQ ID NO: 169490 - DNA, 932 bp, Cannabis sativa
atacatatgtatatagttaataaaggtaatccctaaactaactcatatttttaagaagaccaaatcaaattcaaattcaaatgaaattataaattatattaaaaaaaaatatcattttttaaaaattgtgttgcaatttaaaccacattataaaatttcaaaacacacctaataatttgaagaaaacaaattaatctacaacacaaatagttctataccgcacatcaaattatatgcatgcgttcatatttataagtgctaattgcaacctttttttaacctttacatttaaaaatactagaatatgtttttttttttttaatttttcatgaaagtgttccttataattactatatcatctatataaatttttttaaaaaaatatattacagtatcaataataaattttctaatattttagtactttaccacacatatttaaaaacttcaaacatgttttcgatattataaattattcaaaattttttaaaaattcacatattataactataatgaacaacattatcataaaaaatattctaacatataattttagaagcaaaattttaaaaagaaaattataattattactcatcaaaccaaaaaatataccaatctaaactgtggaaatttatccttttcaaaaaaaaaattgtggaaatttaaaattgaaagtgtgggagaaaacatgtaggcatgtggtagtgtgatgttcctttatgggtgcagagatttgattgataatcttagttatttcaataaatttgtggggacaatggataacgatgtgatagagactctcacacgctttggttgtcgttttcataatttatagtcctttatatagagacacatgtgattgacccttttgtttttattgtccattcacttcacttgactccaatgaagaaaatggatgataaatgaaatat

SEQ ID NO: 169491 - DNA, 556 bp, Cannabis sativa
atcttgttggatctgttggagaaggaatattgttcactcactcacccaacttaaccattgaaggtttctgcgactcggattgggccagttcgttagatgacagaaaatccaccacgggctattgcgtttattttggtaacaatcttgttagctggagttctcgaaaacaaaaatcagtagcacgctcaagtaccgaagctgagtatagagcccttgctcaagcgtgcactgaagtggtgtggcttcaatctctcttcgctgaaattggcatcaattgtaaaggccctgcagtactttggtgtgacaattctggtgcaaggcagcttgcttccaatcccgtcttccactcaagaaccaagcacatcgaaatcgatgtgcatttcatcagagataaagttcaaaataaagaagtggaagttcgatatgttccaacacaagaacaggttgctgatattctcacaaagtcacttagcatttctcagtttcactatctcaagaacaagctgattgttctgccctctccacagcacagcttgagggggcgtgttgaaaataa

SEQ ID NO: 169492 - DNA, 626 bp, Cannabis sativa
ttagcctgtatgtatttttaaagtcaaaccataaggacatgacatagtgccttgacacttgaactgaaaatttgtatcagttctcaccaaaaaagaaaattgaagatagagaaaaataaccatgaactgaagagaattctccacttcttgaatcaactattctgtctaggctaaaggaaaagcatcaatcaaaactgaaagaaccctttcagccacagattacaaaaatctaaagtaaaattttaaaattcataatttgatataccttggaaaaatgcaactcatacaatatgaacaatcacagctattagttaagtgtctttgagtttgttaggatttagttttgccagctgtatgagttagttagagtcttttatttggttgttatttagttgcatagtcttctggtttataccagactgttcttctggttttgtaccagattgtatataagctttgttcttgtactctgtattgaattaatggaaattacacaaagttcttcatttccttttctctgtttcgtaatatggtaacagagctagactctgtgtacactccattcttgtcttcttctttcttctttttctttcatggctcgaggtggaggagctcacactcgaagc

SEQ ID NO: 169493 - DNA, 639 bp, Cannabis sativa
gtgttttactgtagttcaaacagcgactgacgcaggattatcattttttttttattttaattttgtactcacgaattgattattattagtaggggtgttcatcaaatcacctaccccgtattatattttattgcacaaaaaaatataatttaaaattttttaaaaatgcgattgtaatttatatttttactaaattgcacgagaactattacagttttaaatttaataattacaatttaacctacgttgcattatattttataaaaatactaattattacataataatttctcttttgatatccgtatacttactaactcttcagtttttaactcgttagtataaacacatttatatatgataaatatatgtgtttttcagacaaactaataattttgttttttttttttatttatgatattattatataaaatttcaatattatttatgtctagttgaaactagcagattgtgatgtttataattcttaaaatctcaaacaggtggttcattttaaatatctatattatagttgtcttagatttaaatataaaaaaaaaattaaaattatttaatatactataaaattttattataaatattattaattttaagacagttaaagtaggggtatgcata

SEQ ID NO: 169494 - DNA, 528 bp, Cannabis sativa
atgtgggtttgggggggggggggggggcccgcaaacttgggtcttgggggtggggggtcacccaactatggtgtttgtcaccccctcccaacttgggtcttgagggggtcacctttgctattggaattggcaacaaccacctcaggcgtgactgtaacatttagaaattaagaaaagaaataaccatcccaaaatgaaattaagaaaagaataaccatcccactccaatcttctaaaacaggaatgagagaagcaaactttccatgttcaacaccttgagggatgaaatggctattcggaattggcaacagccacctcacccgtgactgtaacatttagaaattaagaaaagaaataaccatcccaaaacgaaattaagaaaataataaccataccacgacattcttctaaaacaagaatgagggaagtggactttctatgttcagctttattcaaatgcatatcttctaaaacaaaaacgaggaaagctaactttccatgttcaggaccttaattatatgtatatta

SEQ ID NO: 169495 - DNA, 658 bp, Cannabis sativa
caagttgatgatagcataagtaaagcagacccaggtgatctgtgaggtatgtggtgggccttagtcttatgtcagttgtcaagttgatgtcaataatctgccaatagagcaagctcaagctattagaaatctgaaggctgatgactatccttctattgatggagttatgcactaaattcaagtggagccatcaggccatcctcagctaggtttctttaagtagagaaataggccaccatttcaaagaaatcctcaatagcctgcccaacatccatgtacttgtgaagggtctaacattcaagcagatatattgctctaattcatgatggagactagatcctccattaaaaccttggagaatcaagtgggatagctggctacttaaatggctaacaaaacacaaggtaactttcctagtaatacaaaagtgaatcaaaaaaaaaaaaaaaaactgcaaggcaaatactttgaggactagaaagaactatgccgggtcaagtcaacaaaaatcagatggagaagaaggtcaggatcaacaggcacaagcaccgatataagaggaaaagaagactactgaaggtctacaaacacatgaagcctctcctcaagtcaacattgagcatcatgtcaagatcccttatcctcaaaggctttgcaa

SEQ ID NO: 169496 - DNA, 958 bp, Cannabis sativa
aggaatatgaagataaaatggcagttcttacccgaagcacaagtattcaggattggcaacaaatgcaggaattggaacgtaaacaaaacatttggcttgacaaagaggagaagttttggaatcaacaaagtagggcgctttggttaaaggagggggataagaacacaaagttcttccatagaaaggcaagcaatagaaaagtaaaaaataccatccatggattaattgatgacaggctgcaatggatcacaggaaaccgaaatatgggtcgggtggcgtgtgactacttcaaacagttatttacttccactccagctaataggaatgagttgcatgagtttcaaagcattatcccgaaccgtatatctcgtgcaacgaatgactatatgctggagccattcactgaagaagaggtgttcaaggcaatgcgcaatattcatcctttgaaagctccaggcagcgatggtttacctgggcttttttacagaaaatattgggcagtgattggtcccgaggttaccaaagtgtgcttgggaattctaaatgaagatatgcaagtggatgaaataaatgatactctaatttgccttattcctaagattccaaagccaacccgaatgttagaatttcgtccaataagtctttgtaacgtgatctacaaaatcgtggcaaaatgccttgctggccgaatgaagaatagtttgcatcaagtaatatccgaggaacaaagtgcctttgtgggggggaggctcatacaagataatgcaataatcgggttcgaaagcctacattgtatgaagactaaaaggttcggtaatggaaggaaaatggctttgaaattggatatgtcaaaggcctacgatagagtggaatggaacattttgagaataatgatgcgagggttgggctatgaagaacaatggatcaacaagattatgaagtgtgtggagagtgtctc

SEQ ID NO: 169497 - DNA, 836 bp, Cannabis sativa
  modified_base (750)..(774): a, c, t, g, unknown or other
ttacccaagctttttccatcaagtcagataggaataattatactctgcggagaaatcttgtgtctactataatcaggggcataaactcgaagggtatgttaatggaacaagaccttgccctgctgaatttgttggagttgctggaacaggagagaacacactagggtttggacttcaattgaaccctgaatatgagcattggattgtgtgtgatcaattgctcatgggttggttgtatggatcgatgacagagggaatagcaaccgaggtgatgggttgcacctcagcacgatctctatgggtggctctagagaacttgtatggagctcactctcgtgctaagatggacgacactcaaacaaagattcaaactactcgaaaaggaagcacaacaatggcaaactatcttcgacagaaaagaacatgggcagatagcttggaactctctggtgatccgtacttggaagcacatttaattgcaaatgtactcagcgatcttgatggtaagtacctaaccattgtctgtctacttgaagcacaggaaaagattggtctcacatgacaggaaatgcaagaaatactactcagttttgataataaattggaacgtctgaatatttttgcttcagttggaaaaggaaacaacaactctggtgcaggcccctctgctgctctagcgaacaagcagtctaacaatcctaactatccttctggcggcgtggacactcctgttggaattattttaccagnnnnnnnnnnnnnnnnnnnnnnnnnttgattaacaccctaatatgaattataaaacaatgaaaataaacacatataaagttagaaaa

SEQ ID NO: 169498 - DNA, 802 bp, Cannabis sativa
aaggaaaacaaaacaaaaatctaacttcagtgtaatttcaatttgagtgtttgtaaacatggattcaagatcatcctcaaagctttgctcaacactcttttaaatcaccttctattgtaatttacaaataaataaacaaaggaataaaaaccgactctttaagtattttgccaagtcaaatggtaacatgtaataataatattcaatgtttaaactcaaggaagtgcccttttccacatattttcattaacactagtgttgatcactttctcgattacttgattcaaaactttcaaaagacagaagagcaaatccataatatgtcaaatagcagtgctctttcttttatgtctagagattgcccaataggaagaaaaataaatctacaatattagtattttttggttatacaaaatctataatattagtactttttggtacaaagctaggaagaaaataccatctgaaaaaagactaaaatattaatcattgttgaaagaaaactaaaatatgtcatctctgttaatagataatgtttctaatcttcaaatatttgtaaggcttagaataaaataattaaataattaaaaatatgaactacaaacaaagacaagaataaaataacttaaaataaaacatacttaccttatctcccttaacatattcgtaatatatttaatcatattggtaagaaagattttttgagtgcaatacaactcatatttgatcaatacagaagactcaatcttttaagacaatctcaatttgtactacaaactctcaaagtcaaattctcaagaag

SEQ ID NO: 169499 - DNA, 1230 bp, Cannabis sativa
tagaatttgatatatgtatttacaatgatatttttaatctgtacatattttgtgtatgttattttttacaatgttatatatgtatatgtatgtatgagtaggtgtatatatataattatattttttttacaagggtatatatgtgtgagtatgtgaatatgtatatgtatatataattatatgagtccgtatgtataggagtatatgtttatttgtatgtttatgtatagtgtatgtatgtatgtgttaatgtgattatttatattgttataattattttttataaattaagaatcaatatttctaatattataaaaatattttataatgtaaaaattataacaccgtattatattacgcatgttatcgtgattttttaatattgtactcttatgctaatcaaaggatttatagaaaaacttgaataattcaaatttttataattaaactttaaacttgaatacatagatactttacgtaatttaggatctcgttttaaagttacaaccattttataaaatacttagttacaaaagttgttgcctagcaactatcaaaataaagcttactgttccgaagattgaacactccaggtctaactgcctcaatatgtataatcttcatccgctcgtgctcactgctatttagctttagctttgcctttacctacacatataaacaatacctatgagtcgacagaatcaataagaaaagtataatcatatataacataaacatcaattgattacaactaggcgtccatacaccaaattacagtcctatctcgcatcccatgcgtaatgagtctagaatgttcgtacgatagtactattgaccgtaatatcagcctatactcggtactctagtcataccgatgtgatagcgtcaatctgtactatgccaaatatatatccgtcagtgttcagtgcaactctatgtacactaataccgtcattactgatatattatctaataggtattcataaatatgtacgctaaatatgtaagcacatatgcgtttattatactactcttaccttgattccgaattcaagtaggctgttcaacctgaggggaactgctgctagatgatttataggctcgtaagtcacaacacacgtaaaattgataaatgatatgctaaatcacttttccactgacttaaacttaaaactaaaagtttccatatcaataaattgttagacttttatttgggcttacattaaattt

SEQ ID NO: 169500 - DNA, 527 bp, Cannabis sativa
tttgcaattattttgaagagtaatgattgtgacacacttaaatcatacacataattaaaaatgacataatattatttatagtaaaacttaaatataattttaagtacatattatacagtgtgtacaaattttgtgtttgtttagccttagtacttaaaatacgggctggattttttgatgcggcatgaaaaaatacaaatttaaacatgaaatagtataatactaaaaagtaacacaatacggtacgaaaaattaaaataatatacattatctataaatacaattttaagggccagtttggtacagttgtgttgtgaaaaaaaaaaaaaaaacaactgtagttgtagttgtactacgagaaaaaatagatgtagcaaaactgtaaaagaaaaaaaattgagctgaatgtttggtaaatttttaattttaaagtgttgcgaattgttaaaattctattataataatcatctaattcattataatcacaaatatatatatatataaaaagatatatatattatataaaa

SEQ ID NO: 169501 - DNA, 1056 bp, Cannabis sativa
  modified_base (575)..(580): a, c, t, g, unknown or other
caaatgtttaaatatatatttccgttgaagaatatagtcatcaatgcacttaacttagaggaaacatcattttatattttgttatctagttctgttttaagttataattttattaaaatttcaagttgtttgactaagagaactcttgcacataatgtaatggaacacttcggcataacataaaaagtatgacgttgaggtttgagtaggtgcgacaattcacacacgaactcaatacgaattactacggattaaggtcataaaaaataaatgcgagtcggaattgagtaaaatccgaatgacatgatttttatttggattgggctacgaattgactttatattaatatattattaaaattattaatgtataagattattatttattttcataaaaatgtatataaattagaaaaaaaaaaaattacttacaaaaatataaaatagagggaaattttacaatacactaccttaaaatggatatattgatgaacccttatctgttttagctaccgaaataattttttagttaaattttttctcatggtcaggtacgttatagttatttaagacatnnnnnnaaattttaagaaatttaaaaaagtttaacacaccgaaaactacgttcaaacagtgtattgcacgcgtgactattttattttatacgcttgtaaaatagactgtttgaacattgttttctatattatatattactcggaatttctcaaaattttgtaggttattttaaatagctataacgtatataaatatacaaaaaattagactaaaaaatttttctggatgccgaaacaagtcaagggtgtattaatacatctcttttaaggggttgaattgtagaatcaccctaaaatagatattttttattgatattaagaattttatttattattttaataaattatgataaattatttttataataattaaagggaaattagatattatatgcttaaaattaatttatccactaaaaatatgctagcatattttgcatcatgcaaaatatactcacactatttttctatccaattttacc

SEQ ID NO: 169502 - DNA, 913 bp, Cannabis sativa
  modified_base (438)..(461): a, c, t, g, unknown or other
cttctcgtttcaaaccaaaccacccccatgccttgttcctacatcataaataataatattcccactctttcaaaaaaaaaaaaataataataataatattcccaaaacactagagcacaacctatcttccattgattcaccaaacaaaaaataatatatattgcatttgagtttaacatgagataggaatatttatttggctaattaagatttttatcgctcgaatttttacatgtattaaattatgtctcttgaatttgtattgtcgttaaaaatgtctcatgaactattgagattgttaaatttaaagacttttgttcaattttagtaaaaatagtctggataaaagttcagggaacatgatttagtacatgtaaaagttcaagggacatgatttggtagatatcaaaatctaggaagcatgatttagtacataannnnnnnnnnnnnnnnnnnnnnnnaatgaaattagacaaaagtgtttaaatctaacaatcttaatagttcaggagaaatttttaactgccagaaaagttctgggatatgatttggtacatgttaaagtttaggggcaaaaatcctaattaacatatttatttataggtatataaaaaatgtaatcttgagatttagtgttggccctaagcattacttaattttgtgcgtatcagtggagactcatacactaaattaccatgcgaacggacggatgaggtgttattttattttttattaaaaataaaaattatttatttatttattattttttataacattatatgaaacaataaaagcaatcaattaatgatcaatttttttctgccatgaaccgatattttgtacgatcacattatatttttattttagatcgacttctttatataagtcgtatcagaacaacaaaaaatacatc

SEQ ID NO: 169503 - DNA, 612 bp, Cannabis sativa
ttctcataaaaatggggttaacatctattcatattttacaaataaatattgtttaaaattttggaaattaagaaaattaactatatacacttaacaacaatatatcattttaataaattaatttaatatatatgtaaaaagagtaataaatttttttctctcgcttttttcttctttgtctcttataaaaaagtgacagtaggtgtttgaagtttgtttattagagcgtcgttattttttgacatgggtcataacggatgagcagctctatatgagtcttttgatggtgacgatattgaagatgaggttattgaagcaaatttagaaggagctttcaacgacgtgggcaaagatagtgtggctcggaatcttgtcggcaaaatgatctcatctagaattatttcgaggaaacaaatgactgaaaaatttgttttcatttggaagcttaatggatctgttaccatagaagaggtgggtagaaataaatttatgattcactttttcgatccccacaagtagaaaaaaggcctttgtcttcggtttttaggctagtttgtcttcggtttttattaaaattcactaccgaagtcatttgaggcgatgacatatgtt

SEQ ID NO: 169504 - DNA, 869 bp, Cannabis sativa
actttctcccttacaagatggcaatcagtctctatgtgcttagtcctttcacgaaagactggattggcaactatttgttgagcagccttgttgtcacagtaaagcaatgcagaccttggatgctcaattttcaattccttcaaaagagacagcaactaaaccagttcacaagttgtgttcaacatgtctctgtagttagcttcagctgaggatcttgagacagtactctgtttcttacttttccatgatatcaatgagtttccaaggatcacacaaaagccagtagtggacctccttgtatcaacacaagctgcctaatcggcatctgcgtaggcttggagttgaaggtctgtttaatttgctgcataaagcagaccctgtccaagtgtccctttgacatatagaagtgctcttactgtagcattcatgtgtgtaactctaggagcaaccagaaattgacttagcttattcacagtgtaagctaaattaggcctggttatagtaagctattgtagtttcccaatagttcttttatacaattttggatttgcaaatgcatcttcaccatcttgactgagttttaggttcacttccataggagtgttagtagatttacaacccaaatgacctaaatcttcaagaagctgaagagcataatgtctttgagacgagaaaataccagcatcaatcagttctagcaattttgagttcaaggaaatactttaagtcaccaaggtcttttagtttgaacctatcatttagtctactttttaatgtttgcacatgtaataaccaaaatatttagttattattttctatattacattagtcttaatatctcgatgtggaaatagtgatttcataaaata

SEQ ID NO: 169505 - DNA, 590 bp, Cannabis sativa
taaagagaggacttttggtttaataatttgagctaacataattgactttggagacttttaattgtactaacacttattgttagtatcgttacgtaattaacttgtacattttgtagttttgttcactaacttttgataaatatcgccaactttttctgtccttgtatgaacattaggataatggagatccatatgtccctatcaaaatttattattgtccttttatgaacattatgatgatgaaggtttatatttggaaatttatataatatactaatttttgttattttttttacataaatactgtcatgcggtaatatttatatttttattgtatatattgtttaggttttatatgtatatatatttttaaaaaaatttatatcgtatactaacttttgctatttttttacaaaaatactgttaggcggtattttttacttttttactgtattttttttaataagtttcatactgcagtatattgtgttaagtttttactggtgttacttgtgatttttagttgttctgctttgtgttttactagtattttataaaaacacaacattttttaaaacttttccgtgtga

SEQ ID NO: 169506 - DNA, 508 bp, Cannabis sativa
gtcctcgttagagacccagtttttcgtagtgatgtctttattgtaacgaatattaaaatgtacttagttgaaaataagttggtgggatccaaatacccattctagagttcccaaagtcagccttaacatagacatataaacccctcctaggtcgactgctatgactcagaactactaaactctagtatgtatgttttctttcttgccatgtgtcaaaaattgatatccatatcaccaaggtgagcatccgagttaacagctgattattacgttcataaattttaatacaatacaattcatgttattgattgtagaagacatgatttgtattagcatgttttaaaatatttgaaatggcctgttgttaggcctagtttccgaggtgaagggtttgggactagggtctatatgtctcgtgtccgtggctagggtctagggtcaggtgtcaaagcctgggcattggcaaggattatggtccagagcctgggctagcatttggattggggca

SEQ ID NO: 169507 - DNA, 1061 bp, Cannabis sativa
taaaataatttccaacagtttgggcacactcagatgtgtgagtcccgacaccaaatggttggttgatgtttttgagtcttctagaagtgccatggggctctcaagaaggatgtcttgatttatttgacatttataagccttggtcaaagtcgcaaggttgagtttttttattttttgaaaatcgagcataacataaaattattacacacataaccttaattaataaacaatagtaagaatgacctctaattagaggtaattttatacttaattttatttttaatacctttaattgtcaaattaatgtgtcagtctcagattcagattatttaattttaaaaaaaaatgaaaaattaaattaaaaaatagtttcaaatgtaataacaattataaaattaaagactaaactatttttgctcgaagttgaaatcatcttcatcaatctatagattgtaaaaaagtaccaaagtaaattatcaattaactgagattattacttctttttcacaaatatacataacactaagaaaatagcaagcaaatcactaaaacaaaagagaaatctaactgtagctagtgaattggaggtatgagtttgtgggaaaaatgtaggaaattgtatcaaagtgaaaaattcatatgatgttaggctgggacaaacggaaacccaagttgttttaaattggggattttatttatttatctatttatttttataagggaggaagatgagtcaagcggttgttgaaaaaaataattagatgtcatttttaaaaaaataattaattatttaaaaatttattttacaactagtgaaagtctaatttttgtaaaaaaatagaattttattttaaatattacagttaaatgatttaactgttagaaaaattaaaataaggatttaaacataaaaataaaattatttataaatattaactactatggaggtcttattaaatagttaaattgaaaattgttataaatagtattaattatgtggatgtctaaatcttttatttattaccattaatgtaattaacattccctttttcttagtttcc

SEQ ID NO: 169508 - DNA, 1094 bp, Cannabis sativa
tattatataacccttaaaagtggccataaatataaaaaatttgagcatggtgaagttgaattctaaaatgatacgttatcaaacaacaaatcaaaaatccccaagccctttggggggtttaagcaacatatactatttttaaaattcaaagatctccctcaattcagagaacatctacattctaaatctaacacaaatagaaaaaacaaatagtttattttccatcaatttcacctcaaaaaactattttagtttccaaatcttcatcaattttaggaattgatgcaaagaaaataactcatctttatcgatggaaaaaaatagtagtggcgaaaagataactttcaaactctgtcactactctattttaaggaatgagataggtatgagagagtgaaaatctaattgtaacattactaattgaaaagtttatatcattttagatcttacattttgacttattacttatttggacactacatttttataaataactttagatctcatcatgttttgtaatcgactacaattaagattttaagtttaattttttttttaaatataaccaaaatatccttatttgtgaaaatatatatcattttagactttatattttgtttcactattgtttagagctgttatcccaatttttgcactctaacgtggcatcacatgctggtgacacgtggatccaattcttcatatttgccaaaaagagatgttccgaacagaacaccacatatacctacacagacgaggtcctcttagctgagcagtggacaatctgagcagcatatcaacacttaaaattctaaaatttgcatcgggaagcataagagcaatccctataaattagggatcgtatcacagagatatgacaagctgtacaaatctcacaatctgtgtatcctaaatatgtaatgtatattcttaccaattatagacattctaagcaaaagggaaaccttcactcaagcatgtagccctataaaagtgatccattctaactggtaggggggtcgaaagaataacttgagaaagatttaagagagcatactcagagattttattgtaagagctttaagagagggaac

SEQ ID NO: 169509 - DNA, 1286 bp, Cannabis sativa
gttattagagccgttcttagctctatagttgttggagccacatatgagaccttatttatttgtgtttcctttatcttcttaaatcgttttttaagatttgactatatttgaacttgttctctccatcactaattttgtcagggttatcataggtgattatcagggtcattggcggtgagtggagtttggttttgcaggtggtggttggggtgtgggattaatggcacaaatggatttgggttgtggcttaatcgagagagaatgattagggtttctggaaaaacaaagaagaaaagaaaaaagggaaaaaggaaaaaggaaaaaaaagaaaaaaattaattattttttttatttttaaatatttaaactattaatattaaatgcactaattaaattttaccacgtgtacacttgtgtacagagtggcaatccattttggcacttaacaaatcaaagtggacggaaggagtacaaatcaaaacgattatgtagattgaggagttcagccctcaaaatttcaatctaagggattgatcgtctcaaacttcaaacttcagagagtttggccccaaattacccttttagttatttcaaacttttagttgtataaacttgtaaggatgatatatttatacatgttaacccataaactttccctagtattatggatatcaataattgacacgtggcatgaaggatgacgtcacagggttgagtagacccgaacctgggaggagcccctagccctgcgcccaggttaactccgggatctttcagaatggaagtttgggcttcaataacttgaatctaacccactatcttttaatattttgtatcatgaatatatggagcaacctaatccaatcctcgggagctgaaattacacgaacttgcaatctaaaagccaacctgggcacctagggtttcaatttttgggactgtcttagtgcaaaattgccaaaacttgcattaggacatcaactagacatacctcagacatgtttgaggcattagaattaaattcaaagcaagttaatttttgagcacccggggccccgagcacccagcgcctaggttgacaatctgtcaatctgggcgccttctaagtgttcgattgaatatccaaattttgcatttaatatgtcttcatcaaaaatggggaaataactcctttcagaggaaaaataacaatttctggccataaataataggacccagtgcccaggttgatacctagggtcggccttgcgcccaggttgacaatttgccaacctaggccacaaaaa

SEQ ID NO: 169510 - DNA, 978 bp, Cannabis sativa
ccaagatatttcattggctagcttccaacctcacaccccatcatgaatgaatattgtggcaccgatctctcattcatacaaatcctcaacaattgacttttactcatatttacttttaatccagaaatagcgcaaaagggctccactatcctcaccatttttagcaatgatttctcatcattgacaaatctcagggtgtcatcagcaaattggagacgactaacttgtatcttctcttttcccatcataaaaccaaaaaaggttttcctaattctactgcttattccaacattctcccaaggacatctactaccaacgtgaacataaaaggagatggtagatcttcttgtctaaggccccgtgttttgataaatttccccctttgtcgtccattaatgaatattgagaaggaattcgaggataagcatcctttaatctactttctccaagtgattccaaatcccttgttaagcaggactgaatccaagaagtcccactcaactcaatcgtaggatttctcaaagtcaatttttaataccattccacttttacctttgcatctgtagtcttctactgtctcatttgctatgagaacagagtctagtatttgtcttccttcgacaaaagctgattgtgtttccatgatagtctcctccaatacactcctaagtcaatggagagcaccttagcaatgatcttgtaaacacttgttatgaggttgatcggtctgtaatctccaactttgcagctgttcagcttttttgggatcaggcaaataaatgaatgtctcgtttatgtttccttgaatatttccctctctctcaaaagctttgaatacttccatcaaatcttccttaatgctgttggtaggaatttcctatcatctcggtacaacagtagcaaaagtagagataatagaactgatatattgatattagaatgaaaagagaacaagttgctaggtattcgagagaccca

SEQ ID NO: 169511 - DNA, 667 bp, Cannabis sativa
agaaacagtttcatagtcttcaaagaactaagcaattgtcactttatcaacaattgaagcaaagtttgtagctgcaacaactagtgcctgtcaagctatttgactgagaaagatttttgaagagttacacttcatgcaagagggagccaccataatttattgtgacaataactcagcaattaaattttctaaaaatccaattttcatggtataagcaagcatattaatgtgaagtataattacttaagggagcgcaatgtgaaaagtgttatcgatcttattgattgtagaagcaaataacaagttattgatatatttacaaagcctcttaaattgtctacatttcaaaaacttagaagatcaagtgtaatagaaagtaaactgagtgtttataaacacatcaacttaagagaggaaatatgggaaaaattatctttattatgttttttttttgttaatccgtgtaattagataactatgtaagtagtggtttggttagttcatattctctaagaaataatgggatatggtgcatgtttacatgttgggtaattagtggtcttattttttagagaaattccaatgaatatgtaaataagtgagaaatgctaaagggcaccagtggtgcctaacacccttctacgtgtcaatatcgctattggtccaa

SEQ ID NO: 169512 - DNA, 599 bp, Cannabis sativa
gaacttagtgacaaacttgcaagatattccaaggggaaggaatttggtgattatggatgctgcttgttgtgggatggtagcggcaggagcgattattgctgctaatgagtaggggtggcttattgagggcctcactgttaaacataagatttttttgactcttaaagttgaaactcttactttaatccatgttgttagtctttgtagattaaggggttgggactttacaattttgatatctgattgcaaacaatcggtggatgtaatcttttgtcgcaaagctccttcttgggagattaaggcacaatttttagttcttttagctctcattgattcttgtaatataattatcagatggctgcttagaattatagtggaagcaactcataatttggctatttagagttttgcttttaatcggtttggttttctagtgacaagagaagtagaaccctttgtttttacttttacttttgtgttctaaacttttgatttgtgttgaataagaatttttcagttagtaaattatatatgagtaatttgcggtataaatatttaagtttaatttccagttacaaataaatacttaagtttaattt

SEQ ID NO: 169513 - DNA, 727 bp, Cannabis sativa
aactttgtccccttttctattatttatagcattaataatttcattagcaataaacacattatcaaaaataattctaccactaagaaaagcgcttttattgactgaaactaagtcacataaaattgattttagcctatttgcaacaactttagatataactttatatatagtggtataaagactaataggtctaaaatttggatgccttatttttctttgaaataagaataataatagtattattaattaaagagatactagactcattattgaggatagcaagcatagttttattgaaatcattacgaacaactgatcaattttttatttttttttattttatagaaataagagttaagaccatcaaatccaggagctttatctctagataattggaaaagagctgacttgacctcctctgtagagaaaggttgactaagatactgagaaaaaaaggaagtaatagaggaagtaatgccctcaagaacataatttatagaggcaatttctgtacccttagtagtgaaaaggttgacataaaaatctataaaatgatcacagatactggggaaattattagtagtaactccattatccagattgatacttttaatagaattatttattttcctagaagaggcacaagaatggaaaaacttagtgcatatttggcatcatagctaaaaaactgttatttgtttttaaaaacaaaaaattgtttttaaaa

SEQ ID NO: 169514 - DNA, 583 bp, Cannabis sativa
aaaaaaaaaaaataccaaacatgcgccaaaactttctgcaaaaaaaatgattaaatatgtatatattaatcccagaagaggggctaataatttatactgtcatggcatgaagaaaaaaattattaatatgtgaccggtttaagactaatggtatatattttttgttgttttcttagtaataaaaaaataataaacatgcatcagaatataatcgaagttcactgtgtgtatatatataggagggtttggtgcttacaaagaaaacgaaaagaagaaaagtgaaatcattcaaatatatgtatttatatatattatatacatatatatgggttaaagtaaaattttttctaaaatctattcatagactagtcactagcttcttgctttgaaagtttacatatatatatatagggatacgattttgtcccgttattgtactttcacggattataatccgtaatgtattgtaaccgtcagatgagggagttatttgatctgacgactgagattgatctaggggtaattagggttaaaaagtagaaacgtaccctaatactcctttaatgtaccatgagactcatct

SEQ ID NO: 169515 - DNA, 501 bp, Cannabis sativa
accttcatcccgttcatccgctgtgaccgtgacatcttccagatcttcttcgtcaatatgaaacctcaaagtttcatcctccatggcccctgtatgacgactagatgaagccatactgattgacgataaaaataaatataaaattccaatccagcctttccagggaaagtcgacagcaaagggacaagactctataatactcactctttcttaacgatagaatagacaaaaagaatagacaaaacagatctcaatcacatacacatacgacagacacagaaaaccatgtcaatagacatgacggctttatcatgttttaaataacataattagcaattaattcacttttatttatcttagtattggggtatttgacaaaagctacttatccaagcctttaactctaaggagtttcgttttcatcctcaacaaactataatttaaacatattattttttttcttttaaatgtgttaaaatatatagcactttaataaatatg

SEQ ID NO: 169516 - DNA, 572 bp, Cannabis sativa
  modified_base (523)..(525): a, c, t, g, unknown or other
aagatctaatagctcactctattacttagtgctgaggctgacttgaaagatcgatgtgtggattcttcaacaaagttcttagattagatgattgttaattataagaaaagaaataaggatacattgatatgcttcaagaggtattatatttcttttaatagtttagatttattctatgcatattatgttgagatcctttagcttatggttcatattaaataataattatttctttctcttttataactgtgatatggattataaaaacgttataattttattatttaaatttttggaggtagctttgttttatattgcttgtgataaaaattttaagcaaatcatatcttttaattagacgatgaactattatgattcaagaagattttaagaccgactacgaatatctagatcctaaattcacgagtaatctactaaaaaatattaaaacagccgaaaaaataaaaataataggatggacaaattattgttttttgtcatcataactaaaaaactgtttttnnnttttaaaaacagaaaattgtttttaaaaacaatttgacttgtttggc

SEQ ID NO: 169517 - DNA, 721 bp, Cannabis sativa
ctgcagctgttgatgtcagaattggtgcttttggtcagtgatgctcattattcgtggtagactaaatatcatcaccgattgatgctaaatgggtatgattcaatactaaagcttctaaattctgacttgtatagatatttgctcttgttttcatgtactctcatacttgacagaggtggattcctgttcatgtttggcttttcgacttgttatccgaacatggtcaaattgggttagttttcaaaacagtatagaatcttaaatggacaatctgcgtttctatgtggatgatgtcttgagttgtatttatagtatagtacttttatttaagaaaataaaaataaaaatatatttcttctggatattgtttttatggtacctttgctttgctaattttataacattttcttttttcaagttacaagtagctttcatgcgagtaaccaagtaatagtaggtgatactattactaataataaatgttttgaccaaattacactattcaatttagttttcccgaagatcacaaaattgtattattattaggaggttagttaagacaacatgtaaatctaaaaaggatcaatatatgtagcggtccttggcaaaataccatttttttataattatatttatcactataccaattaggaataaccttatcactatacccgaacattaagggctcgtttggaatgccgtattatgtcgtattgtattg

SEQ ID NO: 169518 - DNA, 864 bp, Cannabis sativa
ctgttccagtacggagtctccgatgcccattgcttgatttggcgatcgggaacatgccacactgggtcgcggatagattatcgtcctactattgttaataatgcgaaggagatgctgaaggagagtgagagtagtagattaatgctaaataacaatctcattaatgggtggtacgatttttccgacaaaaacagcatgtgcttcgcgcttatgtgcacgaagacgaagagaaatattacgacatgcatacaagagatttctggcttgtctaaattgcgtgtccttgtgcttggattgcctgttgttggggcgttctctgatttttcaattgatccgatcattgatatcataaaatttataggataaatcactaatagctagcacatgcaatactgtggggtgtgtactacataattttaattttgttaagcagtctgctaataaggttgtgtatgtactggcgcaatcttctcttgtggaggttgaccatacttttagtacgtagtgttactttacctactgtaattgcttccttagtttgcctctcgcctggggcacttaccctgtgtttgaatcctgtcgatgttaatttgtgtaagtgttttgatcaggttgtgttttgcttttgtcctcggtctgagaatagagtggctgatgccttagccggttgggcaagaggttctaagtctggttctcaaggtgtgttaagggacattgcccgtgtggcaatgactttgttctagttttgctttcaataaaaagatttatttagcaaaaaaaaaaaaaaaaattacttccttagttttggaagacttgaattaatgaagtttttgttagacttttatttgggcttacattaaattt

SEQ ID NO: 169519 - DNA, 895 bp, Cannabis sativa
tttcttacctcaagtttcgattcacgtgtattggttgacttgaatggagaaaaatcaacgatcccgaacattacgtcacaacaacaaaaagaatgattaatcactcgacctaacccattcaaggtccttgattcatcaccgtaaatcccccttcactaaggtaccaataccttaaacatcaagaaacacatgaaaaatgagagttctaaacatcaacaaaaatggtaagccgttttcgggatttattggatgggaaaatgagattttttgccttttttacaagaaacatgaaactcagagtttcaacttctcaaaaccccaccaaaacttaaccaaaccattccaaacttcacagaacaatcatataacttccatattacaatctctacttgacaaatcaaagtcatgccctaacatgaaaaatgtcatgagagctcaagctttgagttcaaaaactcaagcctggctctcactccaccacaactgcaaataaaatgctcaaaatgcttccattcaatccaaaaaaccaacccaaagccttacccaacccatatcagttacgggaccaaaaactcacttccaaaacttaaacttttcaagaaagaaaagagaactcaactcttaccttagcttcccttcaagtttggcttaccctacctgctaccaaaggattgtagaactgaatctggacaaaagaaattgaaaaaaaatggttttgagcttgggttttgttcttgcttgagagaaaagaaggagagggttcaagatgagggtttagtgtttgattttatatcaatatttatttatatatatatatatatatctatttataaagaaaaacacaaacattatgatgtggcaatttgtatgatttcttcatcctattctttgattt

SEQ ID NO: 169520 - DNA, 670 bp, Cannabis sativa
attatgttgtgactaaaaaattgtcactaaaagtaacaattttttgttgtgaattaggcagtccacttgatacttaacagaatagtttcaatgaaaaagtaaccaaaaagtagaatggcagttttgagagttttaccaccaaaaaattggtttgtctgtcacaaattatacaattcaaatagtattgtcgtcaatatcctttttgaaaatacaagatctagtttattatttaacaaaacaaaagttttaatagataaattttacaaaatacaaaatttaaaataaaataataagaaaattattgactaattaaaaggtcacaatatataggacaaactatactgtaaaacttattaattagtctattttgctcaatatccaaacagcactgataccagtttcagtcttgcttgttcatcatttctgtgttttgtcaagcttaaaatgatccaagaccgaaaccttgccgccgaggcctttcgcattcaaacaaccaacacattcaatgactgtagtttccttgtaaattggaggattgttttctgatagtaatgttagcccaagatatgtttccaagaggggggtgaattggaaatttaagctaattttagaaatttaaaaatcccaaagacaattcatgcaaatatttaagtttaatgcaataacaaag

SEQ ID NO: 169521 - DNA, 1333 bp, Cannabis sativa
  modified_base (407)..(410): a, c, t, g, unknown or other
acactttgtaagtaaatgtcctcatttcaaaagttgtagagaaatgactctcttacactatttattatttatattgttttttgtcccataaaaaatttaataattttttttacatttttttttagaattagaagtaaattatttaaagattatggtatatctatattagttttgttaatatcttttttattttaaagttatgtagattttttttaattttttatggttcgttgtatgaaatattattattcttagatgatatttattttttttattttgctatgtataatagtggtttataattttgttagcataatacaaatattttaatgtatgtatataattcctacatatatttaattattatttttatatattttagatgtatgatatattatttattttannnnatatttaattagtttctattttatcatatataatagtggtatataacttattgtgaggttatatatattttaaatgtggtatataatttggttagtataatctatattagtaataatatttttattattatgattgttattagtatatatattttggtaaatggtacatgtatttttttattatacaatatatatattaaagggtaaaaatgaatttttcttcttaatgatgtatttttgtatttgtttttacttttttgttctattatgtaattctttttttaaaaaaattatataataataaaagaaatttgtagcttaaatattttatgttttcaaatttatacacttatatactaggagactaggcttataaatattggacctttttaattttacaaaaaagtccatctgcagtacagtttttttatttaaacaatttggtgctttatattataatccaagggttcatttggtacgtcgtataagggatgtattgttttaaaaaataaataatactatgtttggataaagtaatgtattgtattaattattacgaccaaaatttttgatacaatgtatgatttattatttaatacataacaaatgacccgtattagcttgtattgtactatttacgaaggattcggggtcaacaccaatctctgacccaaacgcggacctgggagccggacctagacccagacccaggacccgaacccagaccagggacccgacccgaacctagacccgacccaggtcccaaacccgaagccgaacccggacccagacccaagacttggacgcggacgcgaacgcggacctagacatagatccgggacctaaacctagatcccaaaccccaaatctggactcggacctggactcggacctggactcagacccggacccagacttggacc

SEQ ID NO: 169522 - DNA, 559 bp, Cannabis sativa
tatgtgaaaaattaattgttattagttggtaaatagttcgtaatattttataataataatttaattaattaaattatataaggatagtacgtatgactcgttcattaacttgtttagtttagtattgtattaatattattttttgtattgatttatattaatgggttgtgtaaaattatattaatttttaccacaaaatcaacccaactttgaccctatttaagtttgaggttcgagtttaggtccggagtttaggtttgggtttgggttcgagaccggagtcatatttagggtcgggtctccaattccagaccttttataatattattataatacatgcttttacagattattttttatgtattaaagaataagacttacattgtattaaaatttatggtggtttaatactgttatattatttataataatataatatatagattaaatatgtgtaataaactaatagtatgtaacataatataatatataatatatattagttgtaatctttttgtaatatttggggagtgttacttgttactatgagtaacctcca

SEQ ID NO: 169523 - DNA, 1182 bp, Cannabis sativa
  modified_base (1115)..(1120): a, c, t, g, unknown or other
cttaatattctccttaaagccaattttgcttctaaatttttacaattttgtactctatttgagtcgaacatttcaacgagttgctcattttcttctctaatagtttaaacaatagtagaaattttttcatcatctttccttatagattttgctttctttatcctaatgagtagttgaaataaattacattcgccatcaccatctatatgtttagtgaaaataataaaattccaaaagacaaatcaataaatgatacacttgttcactatgtcctttgagatgcattaattgatcacatgagagaacgccatataaaattaaattgtgtaattgtattttatttaaggttttttctaaaattatgtgtaatgtttaattgatttaataaatattttattttactatattattttactaatagtcatgatattattatgatattatttaatttattgacaatttatataattatatcataaatttgttaatattagttattaatataaataatataaaatgtaagattttttaaccaaaatatttttatttggtgtaaattactggagaaattgaactaaaattaataaattatataccaacttactgaaaaagatacattataatggtgtaactgttggagattatgtaagaggaataagaaaaagaacaatacgtgtcgtgaaataaagaaaagaaagaaaagaaaaagtaaaagagaaaaggaaacaaaaaaataaaagaaaaagaaaaagaaaagaatttttatttttatttatttagaataatttttaaatattttaagtaattaaagttacagttacagttagaaaagtatgacacatgtacatagtgacaatccatatagtatttaatgtttaaaaactaaccataattaaatatgcaaaccaaattaaaactttacatattttatctcaattaaaaaaagaaattatcacatataacattttttgattttttttttctttttaactttacagtttggattgctctagtagtttatttgtatgttgctataaggattttagttgcgatttatgttactccaataattgctatgtgagttgtgaattttagtaaaaatacaaaaaaaaaannnnnnaaaaaaaaaaaacttttttaaagtcgaatgaaaaaaagagaaaaaaaccaaaaaaaaaaaaa

SEQ ID NO: 169524 - DNA, 861 bp, Cannabis sativa
aataatattatacgggatatctatttttcaagtttaaatattgatctttactagttcttaattttcgtatataaagtgtaggattaacaaatctaaatttaatattttttaaatctttatatgattattcttaaggtggatataattaaattaatagaatttatttcaattagatttaattgattggttttggaatatttaacgattttgtaaatttaatgagtttaattggtttcgaaaatgttaatgtgattgatttattaatattagcatttaaagattatattatatataaaggatttataaaaaattaaaagagattgtggatttggttaattctcatgtatgtagctgctattatataaagggtatcaataaaggtaatctaattttaatacatgattttattattaataatgtttgtgaaaaatcactcaattgaaattgagtgattgtattaggagtgattgaaggattttagtataagagttggtgtggaaatgaggtgttgaccacctaatatctgatattaaaggtgatttatttgtgaagaaatttaaatggagcatcaaagtttaaaagtttccatgatattggattgtagatggtatggttttattatataatgataatatattataacatatatggagtctgaaggagaattttaaagtaataagcatattgagtttatgaagtaagtctctcaatacacttaaagaagaaatatcaatcgtaaattggaatgtttgaggtttaaatggaaaagaggcaattcaacatttaaagttacttctaaaagaatacaagccagatgttatcttcttaatggaaacaaggttggtggaaggtaagagttat

SEQ ID NO: 169525 - DNA, 750 bp, Cannabis sativa
taggatgaattgacccatgaaatgaatgaagagatggccagaagcagacttcaatgccaatctgacagtgattctggatccttggagctgccatctgacatccagtacaaggttatggacaaggtatttggacaaaggattgactatatacgaggagttggttaccgcttatgaaagaaggagaaaaaaatcaacatatggctcttcaagttaaagtcaaactcaatctcaagcagggtctactctttcccaagatgttggtattatggttgagatgtttaagagattgtgtgaacactttccaacgggataagacacttctgatttgtatgacccacgatttgagagtttcctccaacaatatttacgaacacaacctcaaggtagtgcaacttgtccaaggctgcaacaacaaccgtttcagcagactcagcagtctcctaacatgcagggaagttcttaccagtctcttcttattccgaacatgtttggacgctcctcccaatcttctcaattttgctactctaatttctttgaaagatcacagttgcaacgacgtcaatttgggagttcatctcagcaaccaatggtgtttgggggttcaatgcagcaactttctccgggtaaattttttagtacacaaaatctatatattttttctattgagtttcagcaacaatcaccgaatttttgcaacaacaacaatctccaaatttttttcaacaacaacaatctccgaatttaccacaa

SEQ ID NO: 169526 - DNA, 557 bp, Cannabis sativa
catcaacttccattctagtcctcaagaacatagtcatagtcatgaaagcaatgatgatgagctgcaaagatataaattatttttcagatttaactctagttctaacattcaaatatacaagaaacgatttgaatctgattaatcatgacctggcttgttttgaatatgtaaacaaaagaatttctcttcatgagaagaagttcccttgatgcacaagttctaagaagttcccatttagagatggaatacacactgaaggaaagagcattctcatggccttgagatttatcatatggctgtgtaagatcctcatctagcttcttcccaaaacgagatgccttaaactttttggagaattcctccactgatacataccgaaaagctttctcggttgagtaccagtactgctcttgatctttcttagagattacctacataccagaagataaagtgtgtttttaaagagtacatgacatcaaaagttgaaaggcataaaagaaaaattataatgcttacctcttggacaaaatcagctactcctttcctttctggacact

SEQ ID NO: 169527 - DNA, 634 bp, Cannabis sativa
ttagaaaatataattttagagcatacaatgtgtgtactcttaagaattttaacagttaataaaatatttttcataagttttttcaggaaaaaaaaaacattcagcttattaaaaatgaaaaggtgtggagtttctgacaatgacatattgtcacgccaatatcgattttttgaagtaaaacattttttgtaacattagttaccacttaccattgaataaaataattataaagaatgggtgcagcaaggtaaaacaatatcaatattaataagtatttttttggggggaattatttgatatagggatatttacggtaaaatttctttaatatttataattgttatacaaatgactttaataaaaagattgtgtattaaataaattaaagaattatatcgccacgtgtttctgagctgacacttaaagggtttaattagaacttaacaactaaaaaagggtatgaatgcaacaaaatcataagataaggtacttttgccgctattttttttattagagtcattgtgtaacaaatgtaaatgttaaggtggtttcgtcgcaaatatgcctttcatatactatttttaattttttttttttaaatttatggtttaggttgctctggtagtttctatgt

SEQ ID NO: 169528 - DNA, 544 bp, Cannabis sativa
tcaacgatggtcaccaatcttcccccacaactaccactgttgtcaccataactaccacaccaccacaattaacaccatcctcgtcacactaaaaggactaaacaatttgaccgagtttaacccgaacccaaccaacctggcccgatcaaactcgtaaaatttaaaaaacccgttcaattcagacggatcgggtccaacccgatacactttcaagtaggctcgcgagttgattttttatgaccattaattaaatttcaagttggacccgaacccacccgccaacccagccaattttcttttaacatatatattatataaagatatttttattgatatatttataaataaatattttatttaactttacggtaatatgaaaattctttcattaacatcaaaattttcttttaataacttgtcactaaacttagaaaaaaaaactacatgaaataaatttttgttttttagaaagaaaacaaaaatttataagcaaaaaaatctacctaaaataatttttttttaaaaaataatatacatataaata

SEQ ID NO: 169529 - DNA, 773 bp, Cannabis sativa
atgtaggtccaataggtgccgatggtggtccgataggtgtctaattgttctttattcagttttatgattttttttggactgatatatggtctgatgatggcccaaaatctcttgtagatatgtgctattgttgtaggcttgatgaatttgatattcagttcgatgattagcctgataggggatataccaatcttttgtttttgtttagtgtattgggacaatggggtccaacgctgggacgatacctggcctgatgatattcatacaagtaggtccaattaaagtcgatagttgtccgattgtgaatgcattttttcatttttgtttgtgcgatatgggtctgatggaggtctgaatttttattcgatgctttgctacagaattgctaactttcattatattttttttttttgtggagacttccacacgaaataattcaagtctcggagcattacacaggtcgtgtcactgggcgtgacgaaacttattactacctgaatattaagaccaaatttgatgaattcaaattattagatagggtgagggagtcccctttcaaacagttctttgagagagaaccattacaatttttggaggcattgatccatcaattattgttgcacaagatcaaatctgacaagccagacgagatacacttttacttcaaaaagaagagatgcagatttagtagggttgagttgttgggttctgtgccctaaataaaatccatttcaatataatcagatttagtagttaataaagatcagaaataa

SEQ ID NO: 169530 - DNA, 1498 bp, Cannabis sativa
gagatcagccattttattgactccatgaaaaatgctacgatggcagtcgatttgagcgccaagattacaacatgtaataccgatatgagttgtcggatggtgtttgggaagaagtactctgatgacgagtttgatcctaagggtttcaaggaaattatcaaagagttgatgcacttgggtgccgctcctaacttgggagattacattcctttccttgctccacttgacttgcaaggcttgacaaagcgaatgaaggctgttcagaaagtgtttgatgagttctttgaggggatcattgatgagcatattcaatccaaggctaaagacgatcatgaagacaaagattttgtcgatgtcatgttgagaattatgggatctgaacagtctgagtatcgcattgaacgaccaaatatcaaagctataattctggtattcttttttaacattttgacatgtttttaacatttttacaatgatggttgaatttaaaaaaaaattactattaaaggtctatatataccaagtacttatcgtaataaatgcatactcttatgtacgtataaagccataaacagtacacaatttcttttgaagtaaagatctctaaaatcaataccaaactggtgtgagttaatttgggtatgcaggacatgcttataggctcaatggatacatcatcaacagcaatagaatgggcaatatcagaactcatcaagcacccaacaacaatgaaaaaactccaagaagaaatcaaaaccatggtgggcatggaaagactggtggaagaatctgacttagaaaagttgccttacttagacatggtgataaaggaatcaatgaggcttcatccagtggcaccattgttacttcctcatgcagccgccgaagacagcatggtaaatggcttctacataccacaaaactcacgtgtgctcataaacttttggacgattgggagagaccccgagtgttggactgagccagaaaagtttttcccagaaaggttttcgggaagtgatatagatttaaaagggagagacttcgagttcattccatttgggtctggaagaagagggtgcccgggaatgcagcttggtctgcttgtggtgaggttgatggtggctcaacttgttcactgctttgattgggaactacctgatggaatggtagcttcggagttggatatgagtgaagagtttggtttgactactactagagttcaacatctagtagccattcctagctatcgccttaagaaataatagaaattttaagctttttaattgcccttcgaaataaaaacgaagaacctagatcttctatcttaagaaagacttgaggaaactctttaagggtagttaagtttttagttcaatgtgttattaattttcgagctattttcaattttatgatatttgtggcaaaacctccttaacatttacaattgttacacatatgatcctaatcaaaaaagtggtggcaaaagtaccttatctta

SEQ ID NO: 169531 - DNA, 934 bp, Cannabis sativa
tttatatataatatgtatggatatgtgttgtaggtttatatataggcgttggatttcaacccgctgggtaccgaggcgggatgaattacgctgagtatttatttatatgttatctgacatatatatatatatatttttttttatggagagagggaatcattcaatactgaaatctactcttttggattaaaaaattggattttaataaggataaaaaggtattaaaaataactttacaagtgtgattagacatgtatgcacctaaataaatttatcacattaaaagctttataaaacacaatgttttagtggaagagcatttcaatagttttttactttatcctttaaaaataaatcatcaaaattttattttttttattttacaacacacttttacattataccatatattagtttctttatatttttctctacattattaaattaatattattttttattttctacactattaaaataataattttaaaatacatcatcaaaactctaccttttttttttattattttacaacacacttttacattatatcatacattagtttctttggagaaggtttcaatggttacattaaatacgtaaccatcgtagttatatttttttagccattagattactattgaattattgtgattagtttgaaaattaaataaaaataaataataattaacctgtaacctaataatcacctaataatttatttccttataaaactttaatgaaggttaattatatttcaaaattaaattaattataattattaattaattttttataatttattattaaataaggatcatttagcaattttttcttacccttaaattatcaaattttttatagcaaaacactttataatttaaaattatacacatataattttataattaaaattttattatacttataactt

SEQ ID NO: 169532 - DNA, 702 bp, Cannabis sativa
tactgctatgtgaagttggttaacttcattatttcgtttattgttctccatattttgttaatttgatttgtaggagaaagatgactctctcatatatgtaagcgcactgacaataaaataatttggacacaatgcaattattaagtgtcatttcatcaaaagtgccactaaatattaaaggcatcaagctactcacctaccctaaattttttattattttttcattaaaccaacccacgagagaaaaaaaataataatttttttttaaaaaaaaattgttaaacgacgttggtgggccgactgttagtcgctaataataggggtgttattatatgaatatgcaagagattcttttatgaagaaatatattcaagagatttacattgcctatcccagccttacattgaaggaggaactatcgccactcttgaagcaaaatccctcctcacgatgttgcgctggtgcattgatgaatatttcttggtccatgaggtagaaacggactgcaaaactattactgacgctctgtttcatcataaagaagatatttcgatttttggagatcttataagtcaaatcaaggaaactttgtctcacatccctgctgctcggctctctcatgtcaatcgtggtgccaactcccttgctgataagttggcgcaccggactttggggttagatgaagtggcaatctggataggc

SEQ ID NO: 169533 - DNA, 678 bp, Cannabis sativa
ttccagcacatattcttcttcctgatccaaatggaaaataatttaaattgttacctaaaaagttataattattgcctgatgctccactttcatcgaacctctcaggtttaaattccaaaggattttcccaaatgctaggatctctatgtatagaccaaacatttagaaaaatggtacttcctttaggtatggtatagcctccaacaatggtagattgggttggagaacgaggtaatagaaaaggagctggtggatgcaaacgtaaagtctccttaaagacattattcaagtaagtgagcttagtcaaatgagattcttctacgttgttgtttaaccccacaatttgtttgagttcctcttgaactttaattaaaacacttggattcttcaacatctctgccattgcccattccactgtggatattgtagtgtctgttcctccaacgaacatatcctatgtataacacatcaatacacatcaaatgtaaggaatatattattgtatcaaatgcatgaaaatatcaaatatgtaacaaacgtttaaaatatatgttagatgaatttttttttgtaatcattaatttttttagcctaattttatttttatcccctaaactttaacatgtacccaatcatgctctttgaatttttctggccgttaaaaattcctcctgaact

SEQ ID NO: 169534 - DNA, 754 bp, Cannabis sativa
tcttgttttgaacttctgaaaaccctagtctctctgctcctataaatatacagtaacactaacttgaactgaaaacctctttcaaaactctaacctcttttgcaacttctgaaaaaaaaaagtctatcaatttgagaagagaaagagaagaagatacagcctgttctagtgtgtaatctgttttttttttagttattattattagtattattgttatgcatactgccattaaaattttacagcctattctattatcaaaatgtatttttttagaaatagttcttacgttatagaccatttacttataattgttttctgttatacatttatttatgcagatatttcataaaatggcgaaaaaggtatgatattatttcttttatacatttatttatgtagagatttctttcataagttaatgataataatgtttatgtagagaatggagagctttgttttaagctatggtgtaaatttgtttgctattgcctcaataattattattatttgcagtgtgtaaccgcgcagcatcccggaaatatgatcaaatggaaattggattcacgggttcaaagaagaatagaaaaaacatgctttagatatctcatgcagcttttcatggtttctactaaattaaatgttccataactatggtttctccgtttggtagttgtattgaggagtgcaaatctcttctttccaacttgaataatgttaattttcgttttgttaaacgatctgctaatcgtgttgc

SEQ ID NO: 169535 - DNA, 778 bp, Cannabis sativa
tatacaaatattactaataaacagcaatcaatgaaacaatgaaaaaggttaagaagtatgaatctttgtaatgagcgtacttttcaaacagatgtgaaggaaaaagaaaagtttatacaactaggtttcgattctttctctactacaatcaagaaaaaatttaaaatgagaaattatcttctcttgttttatcttcttttgttgatggtgataaaataaaaataaggagaaaatgatgagagtgtaccgaaaaactaagctgaagacaagaagaagaagcagccccacttatccagtttgatagccctagagggaccccaaatccttttatatttacttggacgagatgcgactttaatcgacggttgaacattgttgacgcaactaaggatgcattagattgtgccacgtggtggatcagtaaccgtgtcttcaaatggtcaaagtgtacaattacaagaagggtttgtaattttcttttgttatttaactgccaaaaatacatatttaatgacattcaaattttttgttatgtttatatcaaaaatgaaagaaaatgctatggtgcacttataacctgactttaagggtgcatgtagaaagctataatgcaattggatttgtgtgtaattagagataattacacaatttggcatgtttgtctgaccatgtaattaccctgtaactgtgtaatctcatggctcctcatgagaattggatgtaattacactgtgtaattactaaaaacttttcatattaaacattagctactaaaaaa

SEQ ID NO: 169536 - DNA, 698 bp, Cannabis sativa
agtttaattggactaaattgggataatgattttttaaattcattcactaattggattgtattgaattagagggaaaaagttagatttgatcggatgctcatggttttgatttctttgtgagtaactgtatataaaaagtcccacattgactgtaaatgagaatttaacccacacctaagcctataaatatggcgcctcaccatttcttttcatctcgaaatttgtattccttctctattataaagggtggttgtttactcaatcttgcccaagttgtaattttgaagtccaacaaataattagtggtgcttggagacataggtaatttataaatttctcgtgtttttatttttctatttatttgtaagttttatttgttcttatttcttatttaacatcttatttatttcaatagcaataattaatttgtttggttaatttaaaattttaatttatgaaaatatacacatagaaaatgctgaacaattaaatcataaattaaaaaaataataaaaataatatataaggtaattttctaaaatattatgtacctctcaattatattgaatataaatttctctttatttattcatattgaaaagaaacaaaaatacatttcatactctcattcttctttttctagtatatcaatttaattactttaagccaaattacaattctttttattttaatcacaa

SEQ ID NO: 169537 - DNA, 668 bp, Cannabis sativa
  modified_base (577)..(614): a, c, t, g, unknown or other
ctgggggtgaatatcaaccatttttttccttggtaaaagctcatgaaattgagtttaacaatccttgtccacacacttctgcccaaaatggtcgagatgaaagaaagtatcgatatattattaaaatgggcctcactcttttagctcaagaaagcatgccactcaagtattggtgttatgattttgaaataatagtgtatctcataaataggcttcccacaccaatcttgaataatgtatcaccctttgaaacttaatttgacgtaaaacctgattatatgctcttaaaagtttttggagatgcttgtattccttgcctcagaccttacaagtcccataaattctaattttactcccttaagtgtgttaatatcttggttaaaacaactcacacaaagggtacaagtgtctcactcccactagaaaaatctatatttctaggaatgttatcattaaagagttggattttcctttccaaacaagtttcataaataactatcaaactcctcagtctatggctatccacaatacctcttggtcctctcttcgtatgtcctttgtgttggaaattattttnnnnnnnnnnnnnnnnnnnnnnnnnnnnnnnnnnnnnncaccctaaatatgaacttctaaaatgaatataaaattaaacacatataaagtat

SEQ ID NO: 169538 - DNA, 735 bp, Cannabis sativa
accaactaagtgtggggcttgtgatcttttggggcatatcacagcgaactgtaataaagaaaaggcgccagtggcatggagaaaaaagggggtgctagagcagaaaaataaaactaagggtactgagaagactattactagtgatgagatcactaaaccagttgaagaaaaaagatttgataccagaactaaagctgatcttggggaagaagagagtttgaagcggtctgaagaagtaactgaaggtttaatttggattactcctcgacagagaagtactaaacaagcagctactgctgaaccagaagcgattacaaggaatggatatgagattctaaccgaatctatggatgggggattggttacaaatacctttgaaagtccatggaagtctgcaatataatgggatgtaatgtaaggggtttgaataagagggaaaatagattggtgttagatgtttgtagagaaaataaagttgggcttggtgccctccttgaaacaaaaataaagcatgaaaatgtgaaggatgttattgcctctagctttccaaactgggatttctattccagttcaactataagcaacagaataatattgatatggcaatcgaagtttgtttgtgttgaagtcctgatagaggatgtccaattcatccattgtaaggtcaaagggatagggttaatggaggagttcttttttactgctgtttacggtagtaatttgttactggagagg

SEQ ID NO: 169539 - DNA, 719 bp, Cannabis sativa
cccctagaaaagtacaccttatgtacttcttgctttcaaaacatacatcaactttctgaaactaagacccaaatggaggactttgcagtaacaaattctatacacaggaaaatatctctccatcgatggctaaagcaaatgagcctgttgaagctgatgattgcagttctgatgtagtaaattctttgcgatttgaggtaaaaggttctgcataccaaaaggattcccaccctatgctgtgctgaatctgctgattacttattattcctttaaatagtcatggtcatgccttataaataataatgttctgcagtataatagaataaagatggaaaaatattacagatgatgcctttatatggattttcaaatttcaatggatgttttcctcattctttggagattcatttatataaatataagtataaatataaatataatttattgattatgtatgtattaaaaattaaaatgtatgttatttgtcaactttgtagcaacgttttaccgagaggtctctttctgctcacttaaggcttgttttctcttgaccgtcgcaatttatttcaagcatgcatcatgtataaatattcttgttatatgggctattagcattattgatctgatctgcatcactgtaccatgtccttcctgctgtgtgtatgtcacgtttcaatggattgctaactcaatcattttaattgctgtttttgcatgtt

SEQ ID NO: 169540 - DNA, 977 bp, Cannabis sativa
agcataaaaatctgattctgcaatgacaatgacaatgacaataggtaaaagttctcccatccataaaaatacttcatcttctcccagtagtatatattatatataattataatcctctaagtaacaaagtttcattgaggaccataacagctgctatagacagaggtaaaggtatcccaaagcatctactgagaaattctagtccttggccagtgataatagtaaaatggtcccaatacaatactatgtgctacatacagctttccacagatcatacataaatatatataaatataaatataaatatatgtatgtatacataaatgctttatctatttgccttttaagagttgaccatggtaataaattattctctactaaatactattttgtatatgtttttataaaagttatcaagatgatttgttttgttagatgacaaaataaattttatgtttttcaaaatagtataaatagaatcttgaactaattttttgtttaaataaaatttaataataatctaatccaaaggtgttatgataaaactgtttacattttttgtatctgttcgtgttaagaattatttttaagttgattatattaaaaaaaaaaaaagttgtcaaaaattaaatttaagtcctatttttatcattttataaaatacagaattcattttatcatttaacaaaataaaaagtccaatcaataatttttacaaaatacaatatctaaaataatatttacccaaatcttctgcttttaaaatgaattcaccccatgattgtaatttgttaccattctcttggtatttgcactccactttgttaatcatttttttttactcttcaacacatatgaacaaagaattacatttactaggctgtaattgaagtaaagatacataacacatactatttcctttccattaatgttatcatagaccagtttgcatctgataacagaaaaaaaaaaaaaaa

SEQ ID NO: 169541 - DNA, 502 bp, Cannabis sativa
agagagagagagagagaagcacacaaaatgggtcgcttaggtttaaggctatgtttgagaaagacgaaatgatttgaacttaaatctgaattgggggtttattaaaagttagggaatctccgacagttagaaaccgtcgaccacaagtatacccaacggtttccaaaccgtcgggggttccctacattctaatttttaaatttaattttatggcgttttataaaattgtcgagaaaagtacatgattgtttaaaatcgtagcgacgattctagtattaccgacggtttaaaatagtcacataaatttattagcgacaatcctcaaaaaaattaatttaaagactaacatgaataagctttattttgtacactactacaaaagttagaatttgcgacgatcctaaaaacgctttttttttgggaccatcgctaaaaaaattaagtaactatttaaaaccctcaagaaaaattagtattcccgacggtttataacagtaattac

SEQ ID NO: 169542 - DNA, 1344 bp, Cannabis sativa
tatgttttgttgggaaaactggtttagtcattcaaatggtgggtgtgtcgccgtagcttaatgttcatgcgtgcgatcacatactccttgggttactgcgatacacccagccatttgcgacatgcggccagttttctcttttcttgcataatcgcatgcttcaactggttggttttcttgaaacagtgaggagtttccattaactcaatggttatgcgggaagggcatgccccttgggatactggagactcctcagctgtttcttgaggtatgccactagttggatatgcgtgacgtgttcgcatgttgtgattggttagatttctcaaaatggtgggtgtttcccagtaaccccatggtcatgcttaagaacgcatgccccttgggtcattgggagacccccacccatttttgaggcactcaactaatttcacatgtgcgatttataccctaggagagttggctggatttctcgaaatggtgggtgtatcttaatatccttgtaatcgatatggtcattaggttattgagagacacccagccatttcttgagaggccgaacaaacttgaatttttttttgtatttttcatgcgggtgaggccacttgtattattctcgcactttcaccacactgaaaagatcttctatctttcaaatgagtgacttgacggatagccggccaaatgcttggctcaggaggtggtgccttcgctgacgagcaggacaaagaagatagctttttccggcttcactttctgaagaagaaaccccagtcgccaaagctgcgactttaggtccattgtcctctgaggacatagaaagaatggttcaagagctcgctgaaccagggaaaatcgagattcatgatagagaatccacagtgtgcgctcgtgaacaccttgtccattctaggcatgcttctgacgtcgaagttgaggagatggatgatgactgggagattcctgaccatgagtcaggagaggaggaagatgctgaaggaagtgggactgattcagcggataatacgcaactgaacgaacccttctcatgcaaggacctggtctcgtgagtcaccgaatctgacctcaacacttttacgaggttgaatttgctgcgacttggcaccatgtgccttgctctacccagagaccacatctttcctttaccaatcctgcaataatccccataaaggatgtggttgtttctatacccattcttcgatgtggggtattgattcccttccatccattcattactattatcctcaagcggtatgatgtctctcccttccagctaaccctcaatagctatcgcatagctcttgggttttatgcgatgtacat

SEQ ID NO: 169543 - DNA, 656 bp, Cannabis sativa
taagctgtctatgctattaccatataagaacattaggaatttatttatatgactgtttttcatgcttgcctggacctttatttatacattcagctgtttcattttttggcatgttctttgattgaataccacccttgttaaaatgggaatcttcatagtggtaatatgcctaggaaggtcttttgtttctttggttgagtgtgcgttggtactgaagtgggttccatcttatcatatctaaaaaatagttgatctgtattgtgttaccctgtgtggaaggtagatgcttttctactcggaaatttggaattggattatgcctgaaattagaggtgtaaccttttgttaagtaagcacacaatcttctgaaagaccaactggtcaccgtgctacccttcacatgtttaagtcaataagttaaggtctaggtgaagtttttcttttagggtaagtgcatgataggaatttactgctgtccagctaagttagaacagattgctactggataatagactagacagcgatgaataaatagctcgatatgaataggcagatctgatattgtgtattagctgaataaaatggtaatgatgacaatgtaaccagaggtattcgagagacctcaactctctcaagagcctaagctcaattcccat

SEQ ID NO: 169544 - DNA, 535 bp, Cannabis sativa
ccttccaagttctcgctcgagtcgagaaaaatctcaggggcaggttgttcgtcattctcgattggggcaggctgttcgtcaatcacgtttggggacggagtagcttcagagacattctcttcggtttggatcgaagggagatcagaggtattctcgacatcagcaacgattttggcaagctttgaagtcgcccgtttcttcttcgccatgagaggaagcggaggacttcacacgctgttcaaattataaaatcttagttttttataatatccaaaccctttatactacttcatgtaacccgtgtacgtacaatattacataaaataatttatctgaataccaatggcaattcaaaataatagtattgctatctttcggtttaaaatctctaccaaaacttaactatgtatttagataaatgttcatgagttaaattagtaagagggtttaaaagttatttaaattatactaattttataatctcctgacattttgagtgaaaaataatctataaaagaaacacatttaatcagaa

SEQ ID NO: 169545 - DNA, 630 bp, Cannabis sativa
gtgtgagtcgtgactaaggaaaaactgtttaaaaacaatttaaaagtaaaattaagattgaattgtactaacactattttttataatacttttttaatcaattgtaaaaatattttttgaaatcacgttttataaaattatttttacttttaaatttaaaataattattttcaaaattttttgaaacattttttttcaaatgagaaatcttgttacaggttagaacatttaccatcattttggcttgttgtagaattttcaattattttttgtgtgtaaatcttaatgacattaattaagggtggaagaattgagttttcttctgcttattataatttttaaattttatattgtatactgtacttaatttcaaataatttgaaaccaatagcccataaaacattgtaccatttaagtatatgttgagttctctagtttcattcttgctatactttttgagctcagcaaaatgtagataaatacatttggactcagaccctacttggatcttggcctcaattttgaactcgaaccgatcccaatcctaacccgatttaaataaatttaaaaaaataaaaataaaaataaaatttaataaacacactcaaaaaatttaaaaacaaaaatttt

SEQ ID NO: 169546 - DNA, 1059 bp, Cannabis sativa
ttatattaataatttttataatataacaatttaaaattctatatatacacaatctataaattttaaacttcttattcaataaataatagaattttccaatctttctaataaaaaaaattattttataataaataaaattattattaataataaataattagataatataattttaaaaataatatattagattatttttttaagttaatttttttaaaaaaatattatttattatatggataattaattattattttttattattacactaaataaaattaaatagccgagcgaagagcgactatattatctagttataaataaactagtaaacaacatgcacttcacaatgggtgattaagcaattttaaattatatatatgaaataaattatataatttatctgatgaaaactaagtaataaaattataataaattttaaccttactaattttttatataattttctttcaaataatatgtgaagttaagtgtataaacagaccaaccaaacctacatttacaaaataataatattaaaagtattgattaatatgtcaaattaataagtgaatagctcaaagtaaatataattaaaaaaaaaaaaatagtctctctctcacattcctttagaccttacttctaccaacattcttttctcactcatgaaatgagtcatcccttgttgtgttatctctatatccaaagtcgatgtgcttgatgtaataataataaaaataattattcaataaaactaatcaaaaattgatcattacctaaaaaaaattattgatcattatgaaagtaaatttataaatgtaaataaaaataattattgaaaaaaaatcatagatcaaacaaaaaaaaaaatactaaggatttacaggaccttttgagattctcgagaaggttggactggtagcatgtttagccttgcctccatcactttcagcagtccataacgtatttcatgtctctatgttacgaaaatacatatcggatcctactcatgtgctgagttatgaaaacatagagcttcaactggatttatcatacgaa

SEQ ID NO: 169547 - DNA, 627 bp, Cannabis sativa
gtgattatgtttttgtctttatatcatacatacaagtttctaaccattcatatggatataatttttaaaagttaacattgtgtagcatgtatttatttgtagcttattaaattttctaatttttttgtaaaaaaaataagacatcaaattaaaaaaaataataacaaataatcaaaattaattttaccatttaagaaaatgaattttaaattatgttctttgaccaaataataaccttttacgtgtttaaaagtattatttcatgtaaattttctgttattctattttagagattttattacaaattttcttcaaaacatattttctcccatttaaattattttttttaccaaaataattaagacaataattatttattttgctgaaataattaattagtgaaaactcatcttatcccaaaaaaaaaaaaaaaagaagaaaataattaaaaatgggactaatatcataactttttacaaataataaactttgacttatatcataagtactttttatcaaattttaccaattacatcttaattaattaaataataaaaaaagtaaatagttaaaagtgttgaccgaggttttcggcaactaataaaatattataaagttagagagctg

SEQ ID NO: 169548 - DNA, 899 bp, Cannabis sativa
ctcttcggttctcaatgggtgttagtggctcggtgttgacaaatgtaggtgattttgtttttggacctataattttttattttattttttatgtgtgttgtttgtttaatgagatttggaaatgagatacaagatagtgtttggttgtatgtatttatgaatgttatcccaaaatttgtccacctgacgtggcatgtccacataagccaaagatagagtacaagtggggtacaaccctgtcagtagcagaacagggcctcgatgcaagatatagcaaaatcgtcaagcagcaactgaatggagtgaagagaaccctcaaggagttgtacaaacatcatggccgaccaagagaagcctatagggcggctagagtgagcctataggcccgccaggatctatgcacaagttggccggctaaagagtgacttccagaccaagggagcttccattcgacaaaggaacctaacctctacaagtaagcactatacaaagttgtcttcaacttgtaaaaggttggcctcctcatccgtgggctggcctcctcttggtgaagttacatgggggtctggcaggagcatggcctgccagaccctggcatgaacatgggtagccaggattaacctggcaagactatgtactgcccaaaacatggacaacaagtcatgggctgcgaattgggccctaaaagcccaacagaatggctgaataatatcttaattcaagggcactttcgtgtaatgtaattgcctaacaacgtatgcaaatatctagggatttaatctgttatctagggttttgggcctcctataataaggtcctaaccctagcctagaaacctaagttatttagcctccaaatttctctaagtcttaaagccctattctctctctctctctctc

SEQ ID NO: 169549 - DNA, 1131 bp, Cannabis sativa
aagggtatagggactaattagtaaaattgttagtattgtctaattagtataaatatgtaatactattacacaaaggggaatcaatgaatgaaatgagagaaaattaggattattcctattggaatttggcactgactcgaagagtgtaattcgatacaatcggtaattgtaacacaaaccctctccatatatccttccatattcaaaccctctccatctatctcttattttctcactaaagaaaacaaaaccctctccattgccagaccaccaccgcgctactgccgcctcctctccaccgcttgaagctttgccaaaccacccccgtattgatgccgccgccatctttcggtaatataatttcatttctctcattctcttctcatatatatatatatatatatatatatatattagtttaatatttttatgtatactaatttgtattttatatatatatatttatatttatattttctgatattttgtactttattgttcaaacactattagtgcgccaccatccatattggagctagccactacaagcggtcggacggagccatttatatcaaagccaccacttggtatatcattgaaaatccattactgcttctcaactacaatttttgcatccattcttatttttaatgtaacaccaacatatgaactatttccatcttcttcaaaaaccttcacttcccaatccatggttcctttccacattcgactaaatatcgattcttcgatttctagtttcgaaataaatctatccactactgatcttccaccaaaagatgcaaccaccacctcgttctcctctcccattattcctcctccaattccacccccaacttacttatcattgtcacaatattgtcttccacctctctcgaccgatcaccagcaaccattaatctcatcagtaatcataagttaattatataattttttagtctagtcgactgtctcccaaagaagggtccataagttaatcatagttcttagtccatccgactatctcttagagaaaggccctaaaaatcatacataatattaatttatcaattataaataagataaaataataattaaacttaaatataatactaaatattataattctataat

SEQ ID NO: 169550 - DNA, 666 bp, Cannabis sativa
ctgagattgcagccattaacagtggcataaagtctaagtccgagggaagatcaccgcggtgccaaagggggaccaaaaggcagtatgtctccactacaatcagtggctgagattgatccttaagccgactaagaacctctttaatcccaattgcctcagccagtgctggtggttgcagcagcatccacatttatcttatgttgacagtattatagcatctggtttggtccaaaactcaacactttcatttcattatcatgctaagactcaatcggacctaaatcaaaccatgaaacgcaagtcttgttctgttagcaagaaaagacagggttggaagattatttgatggaacgccaattgataatgtttttcttcttcattggaaatggaatacataaacagtttcttaccacttataagagtcttgatgaagaaaggattctcaagttcaatagaatctttggagcgagctttctccagcgcggaaaattacaacttcatctgtgttgctcttagaacgtgattcaagatttcctgtattacatgaaacaaatatgtcacacttagaattctttgagctccattggatcatttaattctaaactataatgagtcaatttctttgagttttatttacctgagaacataggatttgttttcattctc

SEQ ID NO: 169551 - DNA, 659 bp, Cannabis sativa
attattaattaattaactaatgtgaaaatttagtgcacaaaaaaaaatagtgttattagtaagcagttgtagggttgtgttcgcggtgcgggtggtgtaatttttaattttttttttaaattaacttgtatatgtagtttttttaatttttcaaactggacccacactgtcaaattaaaaaattgtagaaactgcattgcaaaaaatggtgcggtacagtgtaatttttgcagtttgaactatcattaaatgatttaactatcataaatacaatgaagcttgagcaacacttattaaaaatactataagcttgaaaataaatatgaaaaaaaattacaagttttaatacaataattagtggattttagactgagtcttcaaatattagatctaaataaatataaaaattaatatttttttaatatgcggtgcgatccaatttgaatcgcatattaataatttaaaaccacaaatcgcactgtactgcgcagtttagtaaaaatataaatcacgaccgcactataaaaaattttaaattgtattttcttacagtgcgagcggtttgataaacatccatgcagttgtgctcagcactttttaaaagtaattagttagttatatttaaaaattattatattaaattatataaaatgtattaa

SEQ ID NO: 169552 - DNA, 598 bp, Cannabis sativa
agatcattgtacatgactactccggcgtaggagtagcatcattgtgaagccatactattttgacgacccattcacctaggcaaagaaaagtgacgactatgcactatcacatcacccgcacatgggataaatcttgtctcaccaaactcctaccacggaggctacgtagcatctagagaccgaagagagatgtaccttttccctcctttgatccttctttttcctataaatacatggaactgtaatgaaaaaatagatgtttttgactcacacacaaaagtgagctctcatactataacttgaatattctctgattaagagaacattcccaccataaataaaagtgactcgtggaatacatttcgttataatactcgaaccacataaaaatcctttctttaatttgtgcaacgtactaaaggcaaacttgctattgctagaaacaccttcctgcatagtagaacattacttagaggaatatcgtagatatttaatttttacgagttgtataatggagacttcacttgaatgtatcggcttacaagtattgggggtattttcttatagaccctgtaggggtctgacgagcttcccgaag

SEQ ID NO: 169553 - DNA, 528 bp, Cannabis sativa
  modified_base (444)..(457): a, c, t, g, unknown or other
atgtaatcatggatggaaagctataatagagtgggttatcgatgccatattttaggtgcattgttgaaatagagataagcgttgtcatgcacgaaattcatgaatgattttgtggagattacacatccaaacctagtatttccaagaaaatcatttgctaaggctattttttatataccatgaagaaggattttactgagtatgtctacaagtgtgagcaatgccaatgctattcaaaatttccaagggccccgccaacggagataactctcatgaataacccctggccttctgcagtctggggcatagacttagttggatcacttccaaccgacaaaggaggagtcaaatttgccattattgttgttcactactttactaagtgggtgcaagctaaacccatgaatatagtaactaccaagaatgtaacaccctaactacctnnnnnnnnnnnnnngatttttaaacgtactgtgcagctggttgctaatcaacgaggtttaaggaaaaatgtgattaattaaaatt

SEQ ID NO: 169554 - DNA, 573 bp, Cannabis sativa
tgttttaaaaaaatatatattattcaaaggttctaaaaatttaatacttttttttttattttgtacgttgcaagttatttaaaatatcttacaatatacacaaccatacaaacaaaataagaattaaaaattctcttagatgttgaattagttagggagaataaaatttcggaattttttcatttttacattttaaaataatttttttttttgtatttttacggaattcactttgcagaacaacttaaatcgcaactaaaatccctatagcaaccatagaaactactggagacaccactttaaaaaccttaaattttttaaaaaaaatttaaaaaataatctatacagtaattttcctgaactactatacgataaattagttttttcaaatgataaattaattattaatttaaataataaaaatgtgagattttttaatggagttgttaatagattctctacgaattggtgaaaagaataacactaaaatagtacaaccgtttgagataatcttaataggtttcgtttagattgagtttctatacatgggaaatcttgtttatttatttattt

SEQ ID NO: 169555 - DNA, 634 bp, Cannabis sativa
aacgcattctgcgatatctctttggcaccactaatctcggcctcacctttactgcctttacacacttcaatcttcaaggatactccgatgccgactgggctgggtgcagtgatgatagaaaatcaaccactgggtactgtatgtacctcagaaacaatctagtcagctggtgctccaagaagcaaagtgtcatcgctcggtccagcacagagtctgagtaccgtgctctggctcttgctgcgtctgagatggtctggctcgaatcaatactcaatgaactctccattcctactgcaacaactcccattctatggtgcgataacttaggagctggctctcttacatcaaaccctgtttatcatgctcgaacaaaacacatcgaaattgatgtgcattttgttcgaaacagggtcctggacaaaaagttggatgttcgatatgtcgactcaacataccaaatagctgatcttcttacgaaacctcttcacaacccacaattcaactatctcagggtcaagttaacactcaaaccaaatgagtgtaacttgaggggggatgttagagatagcctagattaactactttctgttatttgttagttagtcttaaggggttaggtagttagtttgttatt

SEQ ID NO: 169556 - DNA, 530 bp, Cannabis sativa
aaagactacattgatcgactccgatatattataaaagatagattacttcaccacctttgacttagctttatttcacatagaaggttgcctaagagtgtgaaagatgatatgagagaggaggattaagagaccatttttttttttcaatttggaaagaacgactgagagagtaagagaaggagaagagcgcctctgagttgttgagctggtagagagaaaattagggttagggtaagaagaagtttccttttatatgtagggttataagtgtatataaaaaagtaaaatatttttaatttattattgggcttcggtctgggttgggttcatcggcccaaataaatttaaaccccattccgacccaatgaatgacgggtttggatattattcacccattggacttcggcttcatatgggttgggttttttttgtccattttcgggttgggttagccgggttggtcggcccaccgggttaaatgcacagccctaggccatatagtttccaaagatggagtcgaggtggatcct

SEQ ID NO: 169557 - DNA, 578 bp, Cannabis sativa
taggcttcttcttccaagtctcaaatttgaatttattatccaaaaaagaaaaaaaaaataaaatgactaaaatttaaaatctattcttgtcagagaaaattggacaacaccaaaaataacgagtattcgagtagagccaaaaacaaacacttgcaaatatgtaagtactcacttagagtagcgaatactcaaaaattagactatgaaatagacaaaaagacagtaaaaggtaagtgagatagagaagtatagtagttcagtcagagttttgcctacttagtctacttttggtagactatcaaatttgattcagatcacttctttatatagaaagcaagtgtcatttgattttacataaccagtcagatagaaccgtttattacattaattatacccattaattaagataaatgttaataaaataaatgtaataacagtttcttctgttatttaattaatttcttgaacgtgacttgtcgagttgtatattgactatccatattctaaacacgcaagcttgcaagccactacaagaattccccccaatagcggcggggctattagcggcggagctcctc

SEQ ID NO: 169558 - DNA, 560 bp, Cannabis sativa
tcagtggtaactaactccattaaatcacagacagcaaaagacaataaggagtaaatacacaccctgtaggaccaactaccctaccccagacacaaaaaggaaaagaaacacctcaccacagaaatcacacaaatgaaccaaataacaaactccactcactgaaagacaacaaaagaagagacaaaataaccgaatgaaaccaactttaagagacgaaaaccaaagaaattagtagaagactaatctctccgagcaacactcatacagccaaaagatcaactaccagaaaactagagaactcaggactcaaaagacacactctctatcccactttttttaatcacttttaccacttaatacctcgtaccgaaatagatatataatgggctcttaaaatttttaatgtatctctctctcctttttttttttcattttacacattaggcattacactctctttttcttcagccatctctgtcgcaatatcactatccaggtcagttagagaaattttatttacaccccaaaattttttaaagacaccccattttaataatttt

SEQ ID NO: 169559 - DNA, 1234 bp, Cannabis sativa
ctcctttccagattcaagtgagtttgtcgacctgaacggaaagtcctatgctagatggatgccctaatcacatattaaaactgagtaaatcacatgtccaaaaaccctaatttggaaaacccgaacctacaacccaaggttcagttataatcactagggactacactatcttaggaaatagggaaacacccaactaaggcactaaaatggcaagaatttgagaaaatgggttgtttggggaacctgccaaaactgattaaccggttttacaggtactggtaaacccgttaaccagtttgtaccaatctcccccaaaaaacccaaatcttactcaaaactcaaccaaatgctaccaaaccttttagagaacctaatcagggtacaaacaacacaatccaaccaataaaacccagaaaaactcactgaatcaaaacatgccattgaagacctaagcttgagtttcaaaactcaaacttatacaattccatcactacacatcaaaactatcatccagagcataaaatcaacataaataaagctcctaatttgaacaaaaaataaaataaaccctaacaacccctaacgctaaaatccacatactcaaagcaaacttaagagcttcaaacgtacaaaactatggttctaaagttaccttagcttgatcctctctgaagtccttgctgaaaacaccaagagtaagcaacaattcccctggttttatgcttgttcgaagagagagagaagggaaagacaaattgttctttttatttggctttttcttaatttgtctctaaatgaattaagggttaagttaattaattcttgttgaaaaaagaaatgagcaggtgtcaaaatatagggcagccaccaagtcacccatgtggaaaattactaaaatgcccttttctttataactaaagcattttcaagactaagggtaaaacggtcaaaatccataacctcgctcaaacccgatattctatttcgtccaacataaatcccaataagaaataatgttctagacctacccaattgatcaacctagccatccatcacattttttgttgtcgctaagcaaaagttataaaaattacataattcacatataattcaaataatacacctagagtttaataaaatctcaacaattgagaaattttaactctaatgtccatttctagcagtgggacccacaaataatttaaattcacaaataatataaaaatatcagtaa

SEQ ID NO: 169560 - DNA, 612 bp, Cannabis sativa
cctgggtcttgtttgacttgggcttgaccaaaattatcttcttaccaaaaatacagatatataacaatagtaatttgattattttaaatttttatgatgaacaagtcttttttttttgtcaaaagtgttggcatattttaattatataataaattattagtttaggtagtatttggtaacatttttaaagggatattggttgctaaaccacctgaactttacattttgtaacacttaaccacttaaattcaatttttgacggcaaaagctactaaactctcttttcgttttgctctgtactcctccatccaaaaatcactgttacgcgtggtaaatttttagtggtccacataatatgaattttgaaaaataattataaatatttaaaaaaaaaaaaataaagatatttttttaaattttttttccttttccttttttaaaaaataataaaaattataaaaaaaaattaaaaattataaaaataaataaattataaaaaattatttttctattttcttattttttctctttccttttttcttttcttcttcttcttcactaaaaaaccctaccaaaccctagcaaactctaacgccgacgaccacccccaac

SEQ ID NO: 169561 - DNA, 650 bp, Cannabis sativa
tactagaacagactttaagtaccatgacagatgcaaagaattgcatctcaaccatctaagcttttcagatgatgttcttctattctgcaatggagattttactagtatcctatatatgctacaaggcttgaaattattctcactcacttcatgattgtttccaaatgcagccaagtctgcaattttttgcaacaatatgcctcagcaagacatcagcagaattctagctatctcagggttctctcaacaaacccttccatccacttatctaggaattcctctttgttcaaagaaaatttctagtaaggaatgtgctattctagctgaaaaaaatgactgcaagagtgagaacatggagcacaaggcatctttcttttgctgccagaatagtattgattaactcggtacttctagccattcatgcctattggagtcaagtcatgatcttgccaaacaaagttgttaaagaaattaaagcaatttacagggcttttctatggaaaaggtagcatatgtttcaaggagcaggggctgtagcttgggacactatctgccagacaaaagtagaaggaggcattaggtttagaagagttaaagaagggaacagagcagccatgattaagtatgtttgggcaattgctaataaagaa

SEQ ID NO: 169562 - DNA, 1343 bp, Cannabis sativa
gggcataaaacccaacaccacccccatttcgctaagaaggcaaggttcatttctctagttttacggaacccaagcccccttaaagacttaggaaggaaaagtttatcccaagcttttagatacaggccatggttacccttttcagacccccaccagaaatcacgaaccattccatcaatcttagtcacaaggcgacttgagagtttggtcgtttgcatggcatacataggtaaggaaaggccaacagactttatgagagtagcatgacccgctttagacagagatttagctttccatccctaaagtttagacatgaggttctcaatgatgaaattgaagtcggcatccttttgtctggagcgaaagagaggtaaccctaagtatttgatattaccttccggggacccaattcccagcaccgacttgatacttcttttcatgccactaaaagtatttatactaaaaaagaccgaggttttgagtttattgacttgctggtcggaccaatcgcaaaacctcacaatgcattgccaataacttttagcttcttccaaattcgctctcccaaccaagattaagtgatccacaaagaaaatgtgggagagtatagggccacccctgcttattttaatacccttaatagagccttcgcattgtgcatcgatcaaaagtctagacaaaatttccactcccaaatgaacaagtaaggagacaaggggtcaccctgacgaagaccacaagagggggtgatgttaccaaactgaccaccattaaggcaaatattgagagaggtggtagtgatgcattgggaaatccaaccccgaaacttttgcggttccctaaacccagcaagcacatggtcaacaaaattccagctcagtttgtcataggctttcataaggtcaatttttatggcaaaacatccttccttgccttttttcctgttgaaggagtggataatctcttgaatgattacattgttatcctggatattcctccccggaacaaaagcagctttggtaggacaaatcaaaaaagggagcggaggcttaattctattagcaatgattttagaaataaccttacacaacacgttacacagtgaaatatgcctataatggttcgttcttttcgggttttggaccttggggataaggacaatatttgttgcgttaacacctttatgcataatgcccgtccaaaaaaaatccaagacaacctcagagaaatcctcgcccacagtcccccaatagtgcttgaagaacagaacagacatcccatcagggcccggggccttatggttattcatggcaaatagtactcttttgatttcatcatgactc

SEQ ID NO: 169563 - DNA, 1060 bp, Cannabis sativa
gggttggagaaggcaagaaaacataatgaagttctgcataagaagtacaaatcgaatcaatacatttcaagacatccagacgagagttgttatgaataatctcattacgaagtctccagatagtttcaacaacaatcgaagcatacaagaaaacttcatccactcgaatccccctagtattaagattccatatgaatttgacccagtcccgaactcgaatccctgcattgcatataggatatatgccccatggtgaagaacgccataatgcattgccacatcacacgacaggaaaagatgttctattgatttctcccctaatccgcacaaatgacagttagcatcctgaatgtggaatcttcttccaatcacaaatctaataggaagtgcattagagagaatgcaccaccaaaggatcttatgcctctccaagattttgctattccacaacttgttccaaagtgtcggagaaactgcacattgctgagctctgtccaaggcttgagacagatacgccgatttgcaagtaaattgtccttttttctctagagtccaaacccatctatcattccctatacccgaaggtttcccgcctttgacgattgtagacaccgtttccttatcaaaaaggccatttagctttcggatgtcccaatctccattagcaagcaaaaggtcagccacacagttctcattgcttaagatcccattccttggtttcgggataaaacctttcagatgaggtatccaaggatccctccaaatattagtcgtcattccattagtcactgctttacaagcccctttctttagaatagatttggctttcacaacatttttccagaaccaagaatccgagtccttgtagctacagctgagaaattccttccccttaaggtacttggcttccaaaattttacaacataaggattgagaactatttaacaaattccaaccccacttggcaaggaaagccagattcatttcctttatttttcggaaacctaatccacccaaagacttaggaaggcacagcttatcccaagcctttagataaaga

SEQ ID NO: 169564 - DNA, 994 bp, Cannabis sativa
agtttgtgcctttgaaaatgaatgatccataaagcatttttggatagtaaatactaatatgataaaattaaaacctgtttttttattttcaaactgaagaaaatagattggatagtatttgaattccatgtatttatctttctgtagaggtctcttgttattcattaatggaatgtcagtgaaaatagtcccatattagttacaaactaagagaagattttaaatacaactataaaatgagagtttctatgattatttattcttatcaatttaatatccgatataaatatacttagaatttgaaggttaattgagagaaagaaggtgacattcttgacattaataagctattttggaaggttagtgtattattgtaaattaaactacctccttatagtggtctaatccgattcaaattccaagaaaacaatgaataaaaaaaacccaaaccctcgtcaagcgccaggtttgaaggttagggataccaagggttgggttttgagtttcgagggttagaggactttgggttcacaggatcggggatagggatgaatttaattttttgttgataatttatttttttagttggcttatataatcattatcttgggaaaataaataacacaaaaattaaaagaagatttttctaaattagggaggatcatgaaacacaaatttgcaaatttacttttgtgtaatcaagttagcatgcatatgagaattttcaatggtttacatttgctttaattattggataattatttaatttaaattttaattaaaagtaattaataaggtactaataacttaatactaatttgatcgtattttattactagtatattttgttttcttataaaatattaattaacaataatttgatgtcaaaattaaatttaattataattataattataattagtttttactgttagttattaagggaattatctcatatactgttttttttatttccgatttgagtttctaaagt

SEQ ID NO: 169565 - DNA, 1188 bp, Cannabis sativa
tttttttttttttttttttgggcctctaataagagtgagtcttttatttccagcgacagaattacactctataatgacaaatcaatttttttttaaataagtctaagatcacgattcgaactttaatacttgccatataaagattatacaatctgttatattcatagcgaaaccaaaaaaaaaaattaacaaaataaaaaaattaatttttagaaaataactcgtttaattaaatttttcttaaaaaaatacttctcttttatgaaatagcagtcatcaaaatacaattaaatacaaaaaaaaaaaatgatattttattcttataaaaaatttacaataaattaaaaaatgttttaataaataattactaaaataatttaacaattattaaattaaaatataaataagatataatatttaattacactatcatttcttttttttttagaatatatttaattacactatctatttggtagtgtttgacaactttaatcatttttcttatatataaaatttatttttattaagaagctaactaggtgatgacagctgtggtgtggtgggagacattttcgataagtttaatgagttcttttttataaattatataattatacataacatccatttcgatgggaacttgtatctcccaataaaacttaaataagttacatacatatataattatatgtttcatattttaattagtgtaaagagtactattgctattaagtactagtggtgtctagtatcttctcgacatgtcgcattgtgattggatagcgatattctctaaaagttattatattaaactatatgagacccgatatttaattggatcaatagcgatattgacatactaagtgctagacaccactggtaccctttgaaattcctctagtgtaaatagtacattaattagtattattttaaagagaaatttaaaagggcacattgttgcttagtatcttcttatatgttaatattattattagtttaattaagtatcagattttatatagtttaatataataatttttagagaatattattagccaatcgcaaagacaggtgttagacactataaatggtaaataccaatgctctattttaaaagagaaatgctaaaaggcactagtggtgtcaagcaccctcctacgtatcaatatcgttattggtctaatt

SEQ ID NO: 169566 - DNA, 710 bp, Cannabis sativa
  modified_base (576)..(582): a, c, t, g, unknown or other
  modified_base (670)..(680): a, c, t, g, unknown or other
ttaaaaatatttcaaaatcatttttcatacaatttaaatatatattgaaaatgaagtttttaatgacttgccaacggttaatagtttacctccaaatagtggctttttattatggaaatcgtatgatgacaaaggaaaaaaaaatagaagcaaattaattataaaatgtaaagttagtcttgtgaattttgagattataattttttgaaaatatttcttaaagtcattggtcaaccaatgtcaatgttaacttcaagttttatcatcatatatagaattgatggcactagaatattaattatgttttccaaaatataaggtgaattataatagatagaattaggctacctaagtttttttttttttcaagaactaatgaacttatgtttaattttaattatcgagtcaaattaataggtttatgtaatttttcaattagagaatttacttcctaaatctcttacaataattttggaaaatttatatggtatactaacttttgccattttttctacaaaaatattgccaagcgatattttttacttttttattgtattttttttataagtttcatannnnnnnatactgtgttaagttttcactagtattttactggtgttttttaggtgtcctactgttgttttgaattgttctgctttgtgttttactnnnnnnnnnnnaaaatacagtatttttgaaaagatttccgt

SEQ ID NO: 169567 - DNA, 601 bp, Cannabis sativa
aacaaacatgatttagtagatatcagcggtcgatctgatcggtttatattatattttattcattttaaagtaaaaattagtttataaaaaattaagtacaacccgcctaattcaaaaaaaaaaaaaatatcaattgacctaataaattgatcattttagtaaagttaacttgttcaaaccaaacactaatatttttttcacatttaaatattatattttactgataataagacaaatatataaattgaattgaaaattcaaatcaaccaccgcgaaaaaaatataataaattgaatttttttagttttttttataaatatatattaattatattataaatcaggttagtcaggtgagtttgggttggtattatttttaatttacccaatataaagattaggcagattatattttcgtcaggtttttcgatttgcatttttcgttgagatatcttggtttggtttggacgagttgttcgagttgggcggtttacaaaactttatttaaaacccaagtagatattaaattcgaagaacatgatttaataaatggacaatggaaatttgaatttttatgcatacaataaaaaaaaaaaaaaaaa

SEQ ID NO: 169568 - DNA, 927 bp, Cannabis sativa
  modified_base (884)..(893): a, c, t, g, unknown or other
ggtatcagagccaagaaaaagcctgccccgatgtcgtcgcactctcagactcctcaggcaactactacggctgcagcaggtgctgcaagtccacctatacttgtctcccaacaaaactacacccaaccattcaatactttgaatcaaccattccctctgaagctcgacaggaaaaactatgttctctggaaaacaatggtgtctacagtgatacgtggtcatcgccttgatggttttgtcaatggaactcgtccatgtccaccggagtttgttccagctccaatcaccactgaaggagaagcaggttttggtgtaaccatcaacccagatttcgaacactggattgtgagtgatcaacttctaatgggttggttatacagctcaatgacagaaggaattgctaccgaggttatgggctgtgctacagcagcaggactgtggaaagcacttgaaaacttgtatggtgctcactcaaagtcgagaatggacgatacacgcactctgattcagaccacaagaaaaggatcaacatccatggaagactatctgaagcaaaagaaagcctgggctgactctctggctcttgctggagaaccctatccagattaccagctcatatctaatgttacctctggcttggacatcgaatatctaccaatagtgctacaaattgaagctcgacagtcaacaacttggcaggaattgtaggggatacttcttgcatttgataacaagatggagagacttcaaggtttaagtcttaacagtagcactaaaccttcccatcctcctgtgtcacctaatgctaattttgcaaatcgaccatgtaacaccctaactaccttaggcgtattacgtgaattttaaacgtactgtgcagctcnnnnnnnnnnaacgaggtttatggaaaaaacgtgattaattaaa

SEQ ID NO: 169569 - DNA, 621 bp, Cannabis sativa
tctaatgtgtatcaacttgctcaatcttaattcaatccttgtgcttttctgatgacaagataaccaaatcaaacgttcaaagatgaatagtatactcaaatatttcagccaaatttcattaattccctctaatcattgtatagtattttctctgtaccgaagttagatctatatgcaatcagctttagacattagaaaatcaaaatagattgaaccaattgctgagaattatcatcaaaatagcttaccaattgctccagcgagagcagagcaatcacttgagggagaaatttcaggtatacatctcttccagcaatcttctgcttctgcttctgtaagcaccaaatttcagaaaagaactacatatcacatatgtaccgtaccttagggagagagagagagagggagacaggtaagtgagaatcccggagagagaatataggcggcggtgggtggcggaggggtagggttccgttcgggaaggagaagaagacgattaagtcttgggttttgcaatttgggctaaggattataccgaaaaatgacaattttttggggattatttcacaaatacacaaaaataacaaaaaattataaaatatggttttatagaattttaaa

SEQ ID NO: 169570 - DNA, 1278 bp, Cannabis sativa
caatatttctaggcagatcaggtgtttgagagttaggaggcatggcagtagcattgtgtccaggcatatcagactcttgagagatgtttgatcttttttctacagggaaatcactcacatttgtgttagacacattagtagatggaaaaactaaatgagagaaaggatcaatattaacatctgaggtgtttaatgtcagaaaaggaaagatattttcatggaaaattacatttcgagaaacaaaaatttgtttatcatttaagtcataaagtttgtaacctttgatgccttgtggataccctataaaaacacaaggctttgctcttggggcaaatttggtacgattatcagtaagagtacatgcaaaagcaaggcatccaaagtttcttagattagaatagttcggagtagtaccaaataataactcaaaaggtgtcttattgtgaagaagaggagtaggggttctattgattaaaaaagttgttgtcattatacattcagaccagaattttattggcatttttacttggaagaaaagagcacgagccacattttataaatgttgatgcttttttttagcaatagcgttttgttttggtgtttccacgcaagtgaagtcatgcataattccaagtttcgcaaaaagatctttaaacacaagttcaggtgcattatcagaacgaaatttcttaatagtgcattggaattgagtctgaacataagagagaaactgaggcattatttcaataacatcagatttatgtcttagaagatagacccatgtaaatcttgtgtgatcatcaaccaaagtcaaaaagtatttatagtttgaatggaaactaatgtgataagggccccaagtatcacaatggacaatatcaaatttatttacagcagtagaattgctattagggaaagaaagctttctttgctttgctaaaggaaaaatataacaaggtttgttcttatgtagggagctaacactacagtttaaagtgtcacttagaagggtaagtctcctttgagatggatgtcccaatcatgaatgccaaagttcagcagtcacatagaaggagtaagcattatgagttgaagcatccatcacatagaggccactcatgaccttacctctgccaatctccctccggctgtgtttgtcctgaatagagaaatcatcagtatggaattttactgaaatggagccactgttagttatgctgctgacaaacatgatattgtatttaaaactaggaacataaagcacatcagtaagaatta

SEQ ID NO: 169571 - DNA, 1236 bp, Cannabis sativa
ttagtagttccatcatgccattcactgggatcatctagcactttaagcagcttttgttgtgctagcaatgatttgatatttctcctccaaattctataaaaactagatccatcaaacctgtcaatatctacttttatattgcttatgttagttaattcaaaaaagataacaaatttcttttaagagaattcttagtttgaatattcaaactcttcttgataaagattccctcaaggatcagcttccttcaatcttgatcaccttctcttcctccttgtgagtttttcttgttgttcaaaccacgactctaatacaactataggaatttacactagtatccctacacaactcaaacacacacattagtgcacaaggtcaattttgacctttcattattctaaatcaatggacacacttatgacacgtattggatttattttattctttgaattttctttaccaattttatttgtctgaatagattttcgaaggacacaacaaaattagggcaaagacaattcaagaggaaagttaagaagagagaaaaaccagctctgatcttgagctggttttagataaatatgcactagaaaattaacagcaaattaaataaagagactcgggtaagcaagagcaaacacagagcaattttgacaaggttcaccactagggctgagcataaaatctagaaaactggaaaaccgttcaaaccgacataccaaatattgttagagccgaaaccgacggaatcaaaaactgaaaaaatcgctaacggttaaaatcaccattgaacggtcattttttttggggtaataaaccgaccgttatacttatatattaatttattaacttttttttgctttatgtattgtagttattaataatatattattattattttattaacattaaagttaaaagaataagataattagtttttgaatattaatttgtatgtttatagttgtaaaatgtagaataatatgtttatagaataaattgggtcatattttaaagaaaaaagaagaagttcggtttgggcggtttaaaccaaccaaatcgaggttcaaaacggtcggtttaaatataggttctggattagtcgatcggttttcagattgcaccaatctagaccaaaaactgaattctgaatttttatatagaaaagaaccaaccaaaccgaccgatgttcacccctattaaccaccaaaaatggggctacgtccttggtgagct

SEQ ID NO: 169572 - DNA, 616 bp, Cannabis sativa
aatatttttctcaactttggtgtctgaaaatattttgtttaaatattctttttttctaatttttatggtaattttcatcatagttattacaacatcatattagtaaatttttgaaaaatccataataatttaccatcattctagtgtcaaaaaagtatttaatttttttttgaatacgagtagtaaaatatattaaaaattcatttgtcaatactataagaggttgtttgtctatgttttaagtttttaaaattttgtttttaaaaatgaaaatagaaaatatttttttatcataataaaaatttaatagtatttagctaatattttctaaaacttatttttagatttttttttccaaaaagaaaaaaattcaatattctacaccatactacgacatgaacccagccccacctcggactagaccttaactaaacttgacactgaacctaaatcgtgacccaggacccaaatccagtctcggggcccgaacctagaccgtgacctgggacttggaccaggcttcaagacttgaactaaattcacactacaaaaaactgctacttttagtgacaactttttagtcacgatatactttttttgtgactaaatgtgactt

SEQ ID NO: 169573 - DNA, 672 bp, Cannabis sativa
gcagaggacatgcacgcagcacgtccagcatggcagattctagaggtcgaggccctggagaatcgactggcctacatgctggggcgtgaggctactccttttcctacagagctcttggaccaggtggccaggagtgcctcaaaattgcccacagagacttaggcatcctgcagcagagcgaatgttttcacgctgcctcactgcgcaaagcggcaagccattggggtaagtcttcaagacgctagcttttttatttttccctattttctattttagcgtttcaaccttctaacttggctttatttcttaacaagcggccttgctggcagaaagggccaccgtggaggttggcgcgctagtgacagaactagagcgggtcagggcgtcaaatcgtgacctgggcatcaacaacgagacccttcaggctgagctcacagacgccaagttccaaattgagggcctgttgcaggccaatcagtagttggaggaggaaagtgcccgccaagcttgccatcaagaacatgaaggtcgttcacgacttttacacgaagacagtggagtggatgtctggcgtgagtccttcctctccattaggtggtgtgcaaccatgaacctccagtcggcccattattaaatctatttattttgtttttttctttttacttttttttt

SEQ ID NO: 169574 - DNA, 717 bp, Cannabis sativa
  modified_base (653)..(656): a, c, t, g, unknown or other
gttcaaagaatattctgatgtaatcaagccttgcaccagagtcccttcctccaaaaagccttccccatgctatagccttatatgttcaagattctctgtgtttactgatgcctcttggtgtaatggtaaggcagggatagcggctattttagttaatcacgaagataatacatggttctactcttctcaatatgtgacatctccatcgcctcttgatgccgaagtccaagccattttctatggtttatcgtgggcatcaaaactgaaatgggaagacattgttctgttctcggattgtcaagtggcaatttcagctcttgcaaaaaaagtttgtatcccggattggcgtactactcacctttcttatgcaattttagatattgttaaagactttagttcttgtaatttctggtttgttaagcgtgaacttttaaccgcagtggatgttttggcaagaagtgctagaatctctagcctagatgccagcttttgtcaaggggagggaaacccccctgtggttcccacttttaattgttagttaatgaacgtttgttccttcaaaaaaaaaaaaattaaccattccgcacagttgtttaaatatatataaacaactagtaaacattctgcttcgcggcggatatataaaatatttnnnnttatatataaaaaataaattgtgtattttaattaataattgttaatctccttacaaaaaaa

SEQ ID NO: 169575 - DNA, 594 bp, Cannabis sativa
gttgacaaagaaagttacgctaaatagttattttgttgggcaatcaatcaaatgcttctgcctaactagactaatgaatgttgacgagaagaattaactttccacttgttcggcagatgattcttttttgtgggccttgttggccacctgtgaccttgggttatcagagaatcctacttgtgggacttgtagcctggtagtccaccaggtgttgtcactattgagtttgtaaccctttgtcagtgataagtgagaagaaggtgaaaatgacatcaagtcatcaaaccccttatgctccaggtgacagatgtgctacaatgttcgggacaacaccactacaaaaataggtttttttgatgtttttaaacagtcgtttaaagtatttccgtcggtttctataatcgtcgcctatacgaccgttgtaaaactagtaaaataggcgacagttacagactgtcgctaatgtggacttcccaacagtttaaaaccgtcgcctataacatgacgatggtgcggaggcgtgggtggagttttagagagttaagatttttgttttagggtgtgggaaatggagaataaatagatggacatgtg

SEQ ID NO: 169576 - DNA, 928 bp, Cannabis sativa
gcgtctagaggtggtgtggatgagtgtgctataattggtgttggtgggtggtccaaattctatttattctaatacttatcttataggaattattaaacaaatatacaaaaataataaaaaaaaaattacaaaaatacggttatataaaattttaaatatttttacgattttttaattttatttatgaaaaatatgattttttttatgttgtactcttgttaatttgttatcgattttttgttatttgtatgttattttttgttgttgttttgatattgtttcgatgttatttttctgttacttttatgtagttttcttattattttcgtattgtttttataaaaaatcttaaaatgtaaaaatttaatttttttttttttttaaaaaatagattgtatataattatccctatgttatatggtagggtatcgagcaccatagtactttacatcaatgctcaactaacaactcaatagatgtatgagtatcacccaattagtggtggttgcttaaaatatctgagttgccaactttgtatttttgcataaattatttgttagtcaatgcaaaaacattaataaaataaattaattaatattttaatattacgttgaacaatattaattaattgcaaacaaattaaagataacattaataacattacccgtctagccaactaaactgcaaacaacttttctatttaaataatatttttttttaaaaaaataataaattaaaagcataaatattttctatacattaagataaagaattttcaaactatctccataaggaaatcatatgttggaaatgaagtcttgtgtgcttttcttcattttggctattcagtccattttctttactcatccatctctatgtttgaactgtaatacttcactcttctcttgaggagatattacggacgtag

SEQ ID NO: 169577 - DNA, 567 bp, Cannabis sativa
gccaaagatggatttatatgagagaattgtcaacagccacagtaaaaaggactcaacccatatgatatgatttttttttaagaaaagctaataaataaaaacagatagactctacgttcattatataaaaaatttataacaatggttgataagggaataaaatcaaatctctcgtggaaaattacccactttgccacattatgaaaaataaagttaaaagtcctacaaacttagaaaagaattattacaaaatgagatatagttttcaattgcccaatgagactacttcccattaagagtattgataactaccttagagttgctctccataataacaaacttggaaccaaagtccttagcaactaataaaggcaaacaataagtcgctgcttctccacataacatatcagtaaaatctaactgagaggtttgaactcaaactatcctaccaaaatagtttctggtcacaactatagtacacattttctaatcccactttaacatcagaatttaacttaatccaaacttgaggaagaggatgccagacctccttcaggcacgaaacaa

SEQ ID NO: 169578 - DNA, 733 bp, Cannabis sativa
  modified_base (563)..(566): a, c, t, g, unknown or other
catggaattcagggacacaattcagtcagactttgctaggtagtttgcagtcattgacaccagagataaatgaggatgcagaagacttacaggcagtggaatccatttgtgctcatggaacttttagttcaggtaacgtgtaccattgcctctctcagttttgaatgtgttcatttttctaaaagtaaaaatgctcttgctcttggccctttcactttgtttttgttcaagttggcttttagttctatatataagatagactagaaactagggagtgctcggtaacacaacgagttttcgattagaataacactttcaaaagcaataatgtactttattttcacccaagagatgtcactatagtaactagggtaagtacttaaagtattgagtttgtaattttcaccaatttcctttagtatggattctgttagtgttttaaatttgttagggttttttataagattgatactaaatgttttcgtcaatgatttagaatttaagttttacatgtgtgcttgttaagactaaattgacaaaattggacaaaaattacaattttnnnnacattaggtacttatgccactaaaaaaattattaagtttatagcggttacaaatttaaaaccttaagtacttatgtcataattatccgtagtaattattatcacttgccggtttatgcatgttgtagaattggcggggatcatagttttaggaaaataataatgtat

SEQ ID NO: 169579 - DNA, 1147 bp, Cannabis sativa
aggagtctggaatgtggtagccgctatgcatcctttaaaggcaccaagactgggtggtatgccgggttttttctatagaagatattgggagatagtggggaccgatgttcttcaaatggttttaaattttttttccactgggactttggagaagcaactaaattactccttcatctacttaattccaaaggaggagaacacgtgtacggtggataaatttaggccgattagcttgtgcaacttcgcctataagattatttcgaagataatcgcctctaggttgaggggtgtgattgacaagttaatatcaccctttcaatcggtctttgttcccggtagatggattgcggaatcatcaatcttgactcaaggattggtccacaaaatcaagagaaagaaagggaagggagggcttatggcaattaagctggatatgttaaaggcttacgatagaatagagtggcactttcttcacgaggtactcaagggtaatggctttaatagtggtgtctgttctttaatcatggagtgtgttagttctatgtcatactcagttttaatcaatggtgttccacagaaaaagttcgaaccacacaggggtctccgcaaaggagacccgctgtctccctttttattcctgctttgccatgatgtgctttcaaaactaattatgagacagcaatctagggggctggtgcatgggatttcaatctctagatcaggcccggcggttagccacttgatgtttgcggatgatacaattttatttgctcgtgcaaatgagaggatggcgactaatttgttggactgtatccatatatacgaattctggtctggccagaagtgtagcttagtgaaatcttgtgtccttttctccggtaatatgggaaacacactaaaaataatattctgaacatcctggaggtgaaagagtgtgagggccaagagaagcacctcggaaatccttttgtttttaagaggaaaaagagagaagactatttgtacctgaaacaaaaagtcttgaaaagaattgaaggttggaagacaaagttactttcttttgcgggtcgaactactctggtgaaatcagttgctctatcgatccccttatatgcgatgtctgttggaagttattttaccaggatct

SEQ ID NO: 169580 - DNA, 728 bp, Cannabis sativa
tattttatttcctttgtttcgatgtaattcttattctagttatgttttgattcattctaaccaaactccacttaatggggtgtttgttatgtgaatttcaattggagatcatagtagaattaaaaggagtagacttgaagagaatatgaaacataagtgttggagtagacttgaaaggaaatacgaaacatataagtgttgaaggggattaattaatattaccactattttaatttaaaaagtagaatccacttaaacatacaaactccttgattttcaaaatttaatttagtttgataatctcattcatcaaagctaatctcataccaaacacttttttttaatattaagttttttttagatgtgtgtatcagtattatagtgtaatatttatatatatatatatatatactatatgggtccactcttaataggtattacccataaatgggtaaaattagaaaattttgaatttttatacttaattttttctatctaatataaaaaatctcttacttttacattatatggactgagattccactggttcagaaaaaattaaaaaaaagttttttgacaaaaaaaaagataagtaaaagttgagtttgatttatatatttttatatgaacatgttgttaatataatgtgaaaagagatattttttaatatttttttgattaagtagttaaattaagtatagaaattcaaatttatcttttattattcg

SEQ ID NO: 169581 - DNA, 1088 bp, Cannabis sativa
tctttgggaaaagttagttgatagatgctaatatttttccttggactagttcttatctagatgattataggattactcagaagaaggttctttctattgcttgccaacagtcgtgtgatgcttaagaatccttgatccctcccatagcacatgggccattcaagctttgcacaaatgcagccatgaactctaaaaataacaagttgggattgggagttgtagtaaatgatgagaatgataatgttgttgttggtttggctattcctgtctcaagggcttttgactcaacttatgctgaagcacttgttctcaaggttgctctaaagtggtgtatggcaattaaatttcccatttcaattattgaatcaaactcaaagttacttatttataaaatcatatgtaatgaagttgatctttgtaattctttatcaaatcttcttaatgtaactatttggtatactcctaggctgaagagtttgtgtagaataataacatttcacacttctaacttgttttttttggtttttttaagtgaaagttacaattttttttttataaaaatggatatataccttaaagtcaagtcaatagtggtttataatatgcttattattatgatattggtattttaggaaaacaaaatgaggaaagagggtgagaaggttcctaactttctatagctatgcagctgtagtgcaattattagttctattcattcatttgtttgttattattaatcatctttgtgagtgtatatacacatcaatactaactggtcaaacactgactggctaccaagaaataataggctagcctaattcatatataagaccagttataaagattttacacatggttgcactatttttgtgtatattcaattataaatttagtgcatttaacaaaaaaaaaaaaattattaatttagtgcagaatttatgcaataattttaataatttttaccaaatattacatctactaataatattttactttaaagattttacttttttttttaattatatttacattaataattaatttataatataattattatattgtaacaattaatttataattatttt

SEQ ID NO: 169582 - DNA, 784 bp, Cannabis sativa
  modified_base (398)..(414): a, c, t, g, unknown or other
ttattttttttacaaaaagattgtaccttatgtaattatactaaaataaaatttttgatattatgttgttgggttttggttgagttgggttggattaggttaatgccttacccatttctaaaccaataaggtcggtccatgaatagtataacccttttttttttgaataaacaatattataacccatgtaggtcgtggtagggttgttaaatttgagataagttaaagaatacctcttttttatgtccattaataaaaaatatccttatattatattttattaaaatatacaaatttttatgagtgagttgcccaatatatcctcactctctacttaaatctagcatataatttacatcaacctaagaggtctaatagagatatcatctataaaagtnnnnnnnnnnnnnnnnntatgaaaataaaagtaaaaattaaaacaagtaaagtaaagtgattatacaatgtaatttcctcatattttttcgggttggattggccggttggaccatttatgtacaaccctaatccacaataagagcatagggagtttattatgggtccccttttgttttcatgtgtaggagcattttaatttgggtacaaaaatacctattttttgttattttttacatttttctcacttttttatacatttttatttacatttttctcacactttttttttatacattttaaatgtattaagtcttaaaaaatactgtattaaagttacaaaatcaaaaaaatatcgtgtttcagtaaaataaaaaaataactaaaa

SEQ ID NO: 169583 - DNA, 698 bp, Cannabis sativa
ggtaaagaaaagattactaaaaagtctcatccttttcagtatccacatcatcctacaatcaccatggtgaattaccagcctgtgaaccttaacttaccacctcaacacctctctgcccattccattactttcccgtcctttctgaatcttaatgctaacttcactggcccatttgttcccccacaatccacttttgtcatcatgatgcctacaccaatgaatcctaacaccacaaatattgccccctctttcactagacccaactttgatatctccatgagatcctctgcttttacctcatattctaccgattctcttattgtggctgatatctctgctagccaaatggacactctgtcctctgcccttactcttcttgtggctggttctggtagttccccctgttgatgactctactgtgagaactaacccttctcaggctcagcctgattctattgtccatgggaaaggattggcttctgcctctggtgtcaatcggccttctttccaaccttaacaagttgtggttgaacgttctgtgaggtctcaactcaaacgtgctcgctctggtgaaagggaagatgagtcttcccttgaagcagctgatttggaataggcgggtgatgctttgcacacccgcccagaaaaatgagtattttgagttggaatgcacgtgggttggggagtacacgtgcatt

SEQ ID NO: 169584 - DNA, 703 bp, Cannabis sativa
gaatatgattactatcttttgaatcaatctcaatcttcccctactatcactaagtgcattcctctacttgtagaatggattaaacttaagtgctatgtgacagttatggagcttgtggttcgagaacacattgagaagatactttaagataatattaaggcttacaatttgttattgtagaaagtgattctgatggagttattaatttgcaaaaataatctaaatacacaatgtaatttatttaaattgaattatgattggttgattatgagaataattagtactatatattacatttggattatcaaactataaattcatgggagcacgtagatcaccgagttacgaccaaaaattttgtgtgggtattgacgcgtcattttacagcagatatttatttatttatttatttatttattgagaataatagcagatattaatcagatttcaatttttcaaacgtgttagatctcaaacttgattaataatattctatttattgtggatatctcatttgatccaattttattttaagaattattttaagtgatttaccatttttaacaatatccagataattatatattttcttagtgtaattttcttttaatgatatgtctttataatgtaataattgcatatattcggatattttttatttatagttttattttttgtcattattctttatttatatacaatt

SEQ ID NO: 169585 - DNA, 701 bp, Cannabis sativa
  modified_base (669)..(676): a, c, t, g, unknown or other
aaatgtcactcagccatgcatgcttaatgtcactcggccagcatgccactcgacatagaatttccacaacaatatgactaaagttagtaaaattttcccaagtaagggaatctttgagcaatatacgatcacaagaaaaatgcgtgcatggaaggaacgtacgaccacaccttttgcaagctctaaaagtaaggaggtagtgcaagtagtggaggcactgcacctgtaaggtctgaggacttgaccaagggtacactgcagccactactcttgagacccgagactacctgacaccagataaggatacgtggtgcaagatcacctcctgcacttgcgattagtagcctgaaagtaacatcttacttctttcggaccaccatgtatctcaggccactagagcctataaattatttctcaaatgtgagagggggttgaaaaatcaatcttgtaatcaacacattgaatgcaatagaaacaaattttttcactgctcaaaaatctcattgtcatttgaatttgcactctatctttatcgtcatcttatttttgagtttcgagtttagatttcgcttttccaaccaaaaagttagttgacgagttcttaccatcaataactttttgaaagaaaaaaaaggtaaatttttgaaagggtaaataccattttagacnnnnnnnnttgcaaaagttacagattggaccct

SEQ ID NO: 169586 - DNA, 1243 bp, Cannabis sativa
aacaaaaaataaataagcaaaaattaataactccttctaatattactattatttttttatcataaaaataaagcctacgttgcatatacatgtagttttatctaaatatattaatagaaacatgtaagtgtgtttgcttattaaaacaattaattttgaaaaaaaatcttaataaacaataatatatatatatattaaaaaatgtgctatttcattattaaaaataaataaaatatacaattatttactaattattaaaatcttaagatatgcaacaactcatcaagatgtcagtcaagttgttcatcaaataagatatcaatcaagttgtcaacaataaaaatgatataacttaataaatgtagaggttaattttagagataatattttagtcataatataatttttttataattaaatataatttttaattataataaaaattaataataatatttaaatataaattattattgtatgtgaatgttttttttaaatataaagtatgaccaattaattaattttagttacaataagtattgtgattaaaaatacatttaatcacaataaattattatttttccataatatttataatatatatactgagtccacaatagtgtgagttaataactttcataataatataaaaaagttagagtttttcgttcctatatctatagctattagatgttatcttttttctcaggccaaacctgtcagctttttttgagcttaggtacagtttggtcgggattgtgttttgctactgtaattcaattttttctactacaattagttttgtctatgtgatatgattttgagtattttaatcttatttatgtgacatagttttatttcgttagttcttatttgttcttcgatggctcaccatcaaatcgctcttagtagttgaaaataatataaattctctacgagtaatgtgattgttagtagtgcaattacgtatcatacacaatagttaagtgcttaagctacgaggttgaatgatcaaacctgctacaatagtttctactgttgtcttttctaaacggtggatgaaatagaatataagtattcttaaggttaaatgtgatgctataatattctttttcatctgattttattttagtttttttaatcaaacgatctgagaatcaagcggctgattatttaacttgttttttttttttaataaaaatcaaaaccttcattaataagaaatttcagccattacaataga

SEQ ID NO: 169587 - DNA, 699 bp, Cannabis sativa
gcaagtcaacaaatgcgccaacaaaaggtgtcaacaaaatggatccacctccatgttttgccagtgctttttcttgctagtaatagtcacttttgccggtgaagtaccttaaattcgtcggcaaatattggcaattcaaccgccaaaaaatggaaatttttggcggttcgaagggtctttttcttctcaattagtttctatagagaaaaatttattacagagaaactttttaattactatatttatttaaccaagaattttatattatttttgtaagtatcacttgctctattttattattcaaaatatttaatcaaaattaattattttttttattttatctcacatttttacatgacattatatgtcaaattttaaatataattaattttacatcatttaaatattatattttcaaatacttattgattaaaatattaaaaaatataataatatttaaattggagtaaaacaaataaaattgattaaaatatatatatttcttttagcttacttgggtattccatctctatattttagttttaagggtttaggtaaaatagatgtggagctagcttaaacatatacctcaagtatttggttcatttgagctatttatatacattttagctattatatatatatatactaggtgaatatacgtgccgagccacgtattgctagttttatttaagattt

SEQ ID NO: 169588 - DNA, 1159 bp, Cannabis sativa
aatggtcctttggaattattgtgggatgtttatgataaatataaaaaaagccctaaaaatgttaaaaataaaaaaagatggcatttttaaaaattaaattttatctgagtccataaatgaaacattcgggctcagcccaataacacccgaacccgaccacgcccaacccgcaatacccgacccaaaattgtaatggtttaccccaagcctcaacacttccaagcaacccctctcataactcatgttgcaaggtgaaatattcccacttttgaagcccaaacccttcacatatgtattaaaatcccaattcctcatatttgtcataatcaaaataaaactaaaaattcttccccacttagtaatagtgaaacaactcaaaaacgggagaatgtcgattataacttccacaaatattcctagtcactatatcagatcaaacacaaagtacaaaacatctcaacaaacaccagatcagaccagagaatacccacaagtaccgagaaaacccaactaaagccacaaacaaccttaggcccgaactatacccacactcattagtgtagagacacgactcatatcaacaacacttcagaccaagtagcagacccccacctaattacacctgaaaagaataataaaaaaaacagagcacatataaacaaggaagcaacaataaataagaaaaccatttgaggttagctcaagtaactataggagagtgcgtgattgttgaggttctacattgtgtaatatataaacacttcaataaacaataaataagaaaacatataatgtgggcactgatggataataaatgcatatgaatatgcccataatgcattattatatttttcttgaaaagatagtggtaaattagtttctttttaatcacataatttttttacatgcaagttatataagtattttcattaaccaaataaaaaagaaaatgaaatgttactttaatttaaattataataaatacaccccattattaaagaaaataaaaacttaaataatttttaaaaattactcgtaatatttttttttaaaatttttcctcatattttatgttaatttcaatacttattttgatttcattttcataattttttaaaacttgtgtatatatttttttaagaaaatttcatataatttt

SEQ ID NO: 169589 - DNA, 1058 bp, Cannabis sativa
atgaggattcttgatctttctcagtgatagagtttgcaaggtgaaagcatgttttaacagtgtagacccctgatgtgttatggttccatataagtcaatcctgtgattggtaaaagcttaagggaatggtgagaattcggtcaatgtcaatttgtgcaaagtcttcctgaagagaagccatattccattccatagtatcaagaatgtaagtagataccggagttgttggatcgccagtatagcaaataggcttaaattcgtcatgtcctagaatccaaggatctagcccacttctaacttgaaacccattaccaatcttgtatctaagtcccttaagaagtaggtcccttccccaatgtattccttgccaagttaaagaaggtgaatgtccatggtgggcttctaaaaaagagtttcttgtgaagtatctatgtttcagaagtcttcctaatagtgagttcgggttctcaaacaacctttaggcctgttttgcaagcatagcttgattgaaatcaacaaatgaacgaaagcccactcctccttcaaacttagatttacatagcaatttccatcttttccaatgaatttttgacccatctttgtttgtcccccaccaaaaattggccatcttagattcaattttattgcagaaacccattggcaaacgaaagtaactcatagcatatgtaggaatagattaaaccaccacttttaaaagcacttctttccctccagcagaaaataatttttcattccaagcatgtaggagtttccaaattgtttccttcacattgttaaataactcctttttgttatgacttgaataggcagggagacccagatatgtttcatgacattcacatattggcatccccaaagtttggctgaagaaattctttgcgtcgttggtagtattcggagagaaagacatgattgatttttgagtattgagaaacagtcccgaagcttgatggtagacctctaggattctcttgatggccaaagcagagctattattcgctgttgcgatatttagcacacgcaagtgtacgtatcgt

SEQ ID NO: 169590 - DNA, 616 bp, Cannabis sativa
ataaactatattgtatatatttggtcctaggcggagtatatctccctatcatacaatccaaatcaagtcagagctaaattggctaaagactaattcttcagaaactatcatctagacagatctcaaatcccataataatctgagtaaatcaagcatttgtatatgtgggaatagttaaaaagaccgtataattttaatatgatgaattattaaataattaggatttaattatgaaattaagttatcaattatgatttttgcatttgtacgtggagatttatatgaattcagattatgttatttatgatatatatatatgtatttcttgttttctgtattttgtgctcggtagcagtggaacgtaatgttggaccattagagagtcacgttttcatatggtttagaattttattgttagcagggcatcattgttaggcattggaaataacaggaaattggcagggtttggaaatgaccaaatcacccttggaggcctttaaacctttgaattatgtttaggggcgaaattgtaacgtccccgcttcaagcctctattgggcccttacacccacggaataatggctcttatacacgattacgtcactttggctgcttc

SEQ ID NO: 169591 - DNA, 647 bp, Cannabis sativa
tagggtgtatctagaattacgggcttagctttctagaagctaagagaaagttgtggggcagcttctccatgagtgggaatcggcttagtgtcgattagtctctttctggtgtagtatacatgatactgtacactatcttcttctcttgtaagggcagcactcacaacatgttctgtgactgttaggtgcacgcctagctcttctttgtctagggatttgtgcaacatagtttgttgagctaaattatttcttttactcctggaatgcagtttcactttcctttgtccacctaaatttgttgttgcttctactttatgttgaagaagggtacacatttgtctgtatacttggagacaaatctactcagtagagtagtgcatcctgtttggctttgtacttcattgattattgtgggcgaattcatgttcaaaagggcttcgatcttgtctgggtttgagattcttcattttgtagctgcgaaggattttgaaattttctgtgaaggtcctgtatatgcccccagcccttttcaacttgtcgagcatgtcatccacgcacaccttcatgttgcgcctgataggatcattgaacattttgttcctaagcttctgatgtgtggcccctgcattcagccctaaagggcatga

SEQ ID NO: 169592 - DNA, 715 bp, Cannabis sativa
cttacttccagttccctagggttcaaaattcaggctatactccctactcttatacttgaggatttaatttttctatttcttacgaaagaggtgaaactatttatataacaatataatatatgctacccccaagtgattaatagttgagacttttgatcacttgttaaatggtagaactttcaaagaccgaatatgaaatgaaaacttcttcaattatttaaagacttcatgccatgaggcgtgtatggaaattatatactaaaataaaaagtaaagacaaacaaaaaggaacctgaccaccctcaatttactgatagtatcagcacaggtggtcagcattccatgcccttgggattctcgttccatctagtcgttttaaatgattagtttcatcaccaattttttctaaaacttcatatggaccttcccagtttggtcctaagattcccactccgagctcctgaaaggctagaaatactcttttcaaaacatggtcgctgattttgaatttttttctcttaactttagagttaaaatttctggcaattttgttttgatacatctagagttggacctgggactgctctcgaagctccttaattaaatccaaggattcaatttttcattgtggatccaattgggattacagtctcacatccataggtcatgaagtacagagtgtggcttgtagaagttctttcagtagtcctatagg

SEQ ID NO: 169593 - DNA, 1374 bp, Cannabis sativa
  modified_base (819)..(820): a, c, t, g, unknown or other
  modified_base (964)..(968): a, c, t, g, unknown or other
ccactcaatggttggttcaaccgtctataccattagttagtcttacaatagtacagtgctttaataatagagaaatgataaagaatattctaacacccttctatgtgtgtgaatattgctattggtctataactaagtatcagattccaatcgtaagacgacatgtgtagaaatgctaagtactattgatacccaataacaatgctcttaataatacattgtacggagactgcatattgttactattgtttttgtagtgtttaatatacttaaattgtgatagctatagcaattatttagttgatcgtataacattaatgtaactatttaagaacaaattttagtataacaattttttgtaatgttctttttaagaaagtaaaaggaacatttgttagaaaatatcaaatataataataaaatgacaatacttgaggtgtgcaaataagacactatctttaaggatttataaagtaattttctaaaattcaacatatcttctattacaataaaagaactaggaaaacagaaacaacaaaataataataaataacctagcaactctcttaaagttatcgtgtatatatatatgtatataggagctagtagtgtatgtatattatgtttttcctataatgatacagatatatatatatataaatattataaaaaagaaagagtagtgtactaatgttactattaatgctagcgctagtggagaagaaagtggatctttgcaagtttttaggaagcacacttcaaatatatataaagggacatgattttgttctgtaattgtactttcacggaatgtattcnntgatgtacgacagccgttagataagggagttatttgatctgagggttgagattgatctaggggtaattagggttaaaaatagtaatgtaccctgacactcatctaatgtatactgagatccatctaatgtaccacggaatacannnnntgaaagtacatcacgggacaatattgtcttcctatatatatataaattgccaagtcaaaagataagttttttcttattaaaataacaattgagttttttttccttaatttaaaaattcacaatattatcgttatatagtgtgctaatccactttttatatctatttattttttaggtagttttcgtccaattggttgtttttttcagatgcttcttgaaggtggtctcgagtttgttttgtctaaattttcgagataatttggtcttatataagtcgctttgtagtgactcatattctgactttgtatatctttggctagacaattagcttgttgactagaagtttttctacgtcgacgattgtcatagtatgattttgatcactctttcaaaaaaaaaaagaaat

SEQ ID NO: 169594 - DNA, 549 bp, Cannabis sativa
gtcgacatggtaattcatttcttcacgcacttggagttaccaagttacataaacgacacctcaattgtgttgatcccaaagaaggagtctccctcattggtaaccgattaccatcctattgcgctgtgtaatgttgcttacaaagtaatctctaagatcattgcctcaagactccgcccattgcttcacaatatcatatccctgaatcaagcagcgttcatcaaaggaagacacatagccgagaacactatgattgctagagagatcgtccattccatgagtaaaagaagaggcaagaggggtgtcatgttgatcaaactggacctcgaaaaagcttacgacaaacttgattggggttttgtgcattcggttctactacaatatgggttcaccagcccattcactgagtaggtagatgcgtgcatcaaggttcaagaaatcaagttacttctcaatggatcacttgtggggaagttcaggccggaaaggggattaaggcaaggtgaccctttatcgcctaccctctatataatgagatcggaagagcgt

SEQ ID NO: 169595 - DNA, 1069 bp, Cannabis sativa
aagaaataggttgatactctttagtcattcttggtttttgtagtttcggtatcaacatcccattttagttattaaatggttgcactgatgcaccgttatttatgattgcaaggcatacttggttgaccctttcacccacaatatcctaaaatatctagaaaaataaagcatgatatccatctgatcccagagctttagtggtgccaatggccttaacaacttgatggatgtcctccttagtaaacggttcaattagacactcattatcatcaaccaaaatacgtgaattaacgaattctgtaccacacttaatttgctcattattaggttagaaattttaaaaatgtctataaaataccgatctgcttcaccaataatctcttcctcaacacacaacctttggcaagtttctatcataatattagtaatagaatttttcttcttcctcactgatactttgttatgaaaatatttcgtgtttctatcatcagccatcatccacttcgatcttgatctctatttctaacaaagtttatttatattcagaaggtcatccaatttaaattctagagttttcaccttatttattcgaatattaaaagcaataacgttcaaaagtttatttatctccttctgagtttccacaacttgcttaaagacccgaatctttacttactccaagtttaatgacagtttgtacaatattcaagatagtcacaaagtcccaaagggtctgtcacatttaacgtacacttttcctaagcctcaaacacaatgaatcaacaaacatgttctttaagccaatgaggttcaaagaagaacttccatttaacttgctcatgactccatgtaacaacattctcaagtttagttgctataggacgatgatcaaaatgaaaaaaattaccatggaacactcaaactgaaggaaacactcaaaccaggcatatatttgaaaaatatccatagacattgatatccatgtccatggatatttctgaaatttctaaattcatggatattatttatttattatatatataaaaaaattagaatatgaattaaagtg

SEQ ID NO: 169596 - DNA, 874 bp, Cannabis sativa
tgaagaagtttacatgatacagcctccagggtttgaggttcctggtcaagagcaccttgtgtacaaacttaacaaagctttatatgggctcaaacaggctcctcgagcctggtttgataagctacagaacagcctgacttctctgggatttgtctcatctaagtcagatcactctctcttcatattacacactcctacatctactacacttgttttagtgtacgttgatgatattcttattacagggagtgattcagcagctgttacaagattcattgctgctctaaacagtgaattctctctcaaagatttggggaaattgagttatttccttggaatcgaagtgacatatactgatactggtattcatctgtgtcaagctaaatatgccaaggacttgcttatcaaggctcaaatggcaggagccaaatcatctcccactcctatgactagtggacttcggttatcagctcaccagggagaccctatagctgatgttcacatgtatcgatcaattgtgggtgcactccaatatcttgctataaccagaccagagttgtcatagagtgtgaatagagtatgtcaattcatgcaaaagccactcacaactcactggcaagcagtcaagaggattttacgatatattagtggcacaactacatttggtctccacctcacaaagccactgtcttatgatctgattgccttttgtgatgctgactgggcatcagatccagatgacagaaggtctacatctgggtttgcaattttctttggctcaaatttgatagcttggaaaagtaaaaagcagcaaacggtttctcgatccagcactgaagctgaatacaggagtgttgcaaatgtcactgcagag

SEQ ID NO: 169597 - DNA, 639 bp, Cannabis sativa
  modified_base (117)..(122): a, c, t, g, unknown or other
aaaggatgactagctacgcgctcaagaatttgatcaatgaatgggagcgaaaatgatctttacgggatgtggcattcaatttctgataatcaatgcacatgcgccaacccgtcacannnnnngtgggaacaagggcccctttttcattttcgaccacagtaacacccgatttcttgggcactacttgaactggactgacccatttgctgttggccactgggtaaacaatagccgcatcaagaagttttagtacttcattttcaccacttctttcattggtgggttcaatcttctttgagggtccgttcatgggatagccttatcttccagattaattcgatgggtgcaaactcgagggctaattcctttcatatcagcaagcgtccaacctattgcaagtttatatttccgcagtacctcgagtaactgtaattcttgagaaggttgaaggtgagacgagatgataactggaaaagttttgccatctccgagaaaaacatgtttcaagcccttcggaagttggtccaattgatcaaatcatttgcagtggcaaggaatggtcttccaaggatgatgggaatttttgattccatgttgaccacagattgggtatcaagaacaaggaagtccacgggataa

SEQ ID NO: 169598 - DNA, 660 bp, Cannabis sativa
tcctaggtcctagtctgggtccaagttcatgttttggttaaggttcgggtctcgggtccaagtttgagaacaggtctccgtttggattcaggtctaactttgggtccctgtcccagtttacgtccaggttttaggtcccaagtctgagtttggttcttaggccctgggtccggccccagtttttgggtcgtggtctaggtctgggtcccggtctgggtccaagtcctggtcttgctttagattccaagtcacaagtcccggtcaggctccaagtcctagtatgggtttgggtctacgttagggtttaggtttgggtcctgttacagtcccaggtctgggttctcgtcccagtcctggtccgattctgattccaagttcgggatcgggtttcgatcccagttcgggtccaggtcttggtacggatctgggtcatggtcctggattcaaacactgactgcaggataggtcgaagcctcaggtgttgatttggatctcgctcttggatcccggtcttgttccagttttggtcctaggtcccgagctgagtcctatgtttcggtttgggtccgagttaggggttgtgtcccagttgtcagttcttgggtttcgggtctaaggtcgggtcttgtgtcttgagtctggggtcgagttttgggtctc

SEQ ID NO: 169599 - DNA, 747 bp, Cannabis sativa
tttactaagttaccacccaaaaacatacagaagcctctggtggattttctgtcatctaaactagaaactcagtctgcatcagagtatgcttcaaaatcaagaactgttactggtttgaggtgaagtccaagatttggagtgcctttaatgtatcttagaacatgtttgcaggcattccagtgattgacagtaggggcttttaagaattgactcagtttatttactatgtaagattaggtcttgttaaggtcagatattgaagtgtccctatggtgctatgatacaactctggttggtcaaaaggagtattgtcctctaagaaaagtttattagccaaaatcattggtgtgtcacagcagatcagatgcatatttagattgaataagatataaactagaagcattgcgatatgcttcaaatccaagaaaatagctggcagatccaagagacttaagggaaaaatatgtatgcaaatcctttataagatgatggagaacatttgaatttctccctgtaattaacaagtcatctacataaaccagaactagaagaacaactccatgtttttaagtgtaaaacaaggatgtattagaaacagattgtttgaacccccaacttatgagagcacgtttgagcttgccaaactttgctcgaggtgcttgccttaattcatataaggacttgtgaagtttgtgttaaataaattaacaattaacccaagatctatttgtatataacatagaacac

SEQ ID NO: 169600 - DNA, 730 bp, Cannabis sativa
aataaagttgagaaaggttaattagatgaaatcactaccaacaaaaacagaatagtcgttggtttataattatatactcaaagctgttggaaaactcaactaaccgttgatttaacacaaaaataatatgatgctaaaatatattatttttgtgctaatattatattattttggatttttatattacattgaaatttttaatttttttttaatatgagatagaacttttttcaaaatactgtattttttttaaaaaaaaataatgtgttaagtttttactgttgttccacggttgttttctagttgttttactatagtttttaattgttctgttttgttacggttgttttatatgaagatagtatttttgtaaaaaaaaaattgtacaatgttagcggcataagtgtaatgttagtaaaagtttaatttttgtccaattttgttagtacaaattccgttaatatcttaaatataggacatgtgtaagagctaaattataaattattaaattttgacataaacatgtaatatgagttattttcaaaatttttttgaataaattcaaaacggaatctgtattaacgaaattgaataaaaattttaattttactaacattgagtacttatgccgttaaaaaaaaataaaattattggatttatagttacaaactcaaaattttgaatatttaattgtaattacccctatacctgttagaatttattttaccag

SEQ ID NO: 169601 - DNA, 621 bp, Cannabis sativa
tcaaattaaacttaatatcgagctattgtggtgaagaagagaattggaaaattttataggttgtctacttcatatgtaatccatgttaatgtttctctaccatatatatattgtacagcactgaatccatgtccttaaattaacttgatatctgtggtggacagaagaaaagaaaagtaggactgcaagaatcttattcccagttttgagaggaatttttctgacttgggatttaaggaaattaaactatcgctgttgtgttcatcaaaccccttcaaagctactcataacagattctataactttattagaacttacttgctattagggatgcacacccggtggggaattagcggggagtgttctcccgtccctatctccattaaggattttaatctccattcccgttccatcctcatttattaatccccttcgaggacgcggtggggaagcggtggggaatccccaaatgggacagggaaaggggccagaaatcccctattgtaaaaatgaagtttatttttaaaatttaaatgtaaaaaattattaaattacatgaaagataaaatattacatattatttactattcaatatagtaattattatataaaaacacaact

SEQ ID NO: 169602 - DNA, 1301 bp, Cannabis sativa
cttattgccatttccatctcttcatcacgttcactatcagaatctggtgttgaaggagatccagaagttaggttcgcgtagcgatttcgaattctttcttggttacgaacccctattgactgcacagcttggtggatccactcattgagatcgttgtcctccgatcttgttgtgacatgatttcggagatcgcgggagaggcagagtaaccttacttgcccgagaattacttgatccaaaagcgaagcaaggtcctctagtgtattaaattcagaatgataatcataagacttcgatttccagtgttcctctaatttttcctccattcttgtcgacggtattcaccgaaatcggcggctctgataccaattgataagacctgagaactccacactcaagaacacaattaaacagtagcaaaagtaggaatagaacagtagcaaaacaataaaaaatgtatactgaatgtattagaaacccaattacaaatgataggagcccttaggcccctttggtgcaaatagagatttactcaaacattgcataccactcaattcccctcaatattctatatatactattgtattccctcccaaaacactaccctcaatacaaagactcaattacccttttatttaatatatgctagcataccccactaatcctaggtcctaacattggtacattaaggagaattttagtgaaaggacttcacataatccaatatgaataggaacaaagtaatggcactactactgattgttatggttgtatgatttgatgatatatatgttgtttatatatgcgttatacaagtttgagtgtaagatgtcaatgactgagaattcaagaatgatgaaattaaaaaatgattccatctttggtaaccaaaacctctgtttccggggggtgtataaagagtgtaaaggagttagaggttttattggctctatgagtggaaattcatgcatttttatagttcttgttagcaatcctcattagatttgttaaagaaagaaaacacttgagcaatctctacttatgaaattttttcaaggcaaatgttcattgattttttccatgaaagcaaacttggaagtggaaaaaatagattaattggttaactaatatataatcaactataagatttaaaaccactttaactatgattatgttaaatactttcataatagttttttctacatagaaatatgtaggaattttcttggtgaaattccaagaatgccctacaccaactcaagcataaagtcaaaacgacaaggacaaaattgtcctagaaa

SEQ ID NO: 169603 - DNA, 512 bp, Cannabis sativa
  modified_base (444)..(467): a, c, t, g, unknown or other
tagaactcatgatcctaaccaaatcactgcagcttttcttgatttctataaagaattgcttggttccaagttggataatagaaggaagactcatcctggagtgcttgctaaaggaccttgcttatcacatgagcaaagtaacatgctacttcaagattttactaaagatgatgtgagggcagctgtttttagtattcttggagctaaatctcctggaccaggtggattctcgagctatttttttcaagataattgggagatcattggggaggaggtttccaaagtagtctaatcattcttgaattcaggtaacattttaaaagagattaattctacaaaaattaacatgttacaagcactaaaattgttctcaagtacatcaggtttatacccgaatgttgctaaagcagcttgctattgcagcaactgttgggttttatgccnnnnnnnnnnnnnnnnnnnnnnnnatcagatttacttattaatataggtcagaaataacatttaatgtt

SEQ ID NO: 169604 - DNA, 762 bp, Cannabis sativa
attttattatatttataggctagagtttgcatataaacatcacccacatgtaaaaacaagtaatatattgatatttggatcgatttggtgaggccaaatccgtgaggcaatagttattaatttatacatgtggaatctggttgatgataccaggaagaaaacgtgtgtcatctccgcatgtaatatcgataatttaatgactaattgacaatcactatctttctttttatggaatgcatgatttttagacctgactttgaaaaccaagtattgtggtgggatttgatattaaatgagcgtcgaatcaatcttaacatctgaaggcctattaattattttttggaagcaacgcttgaaagaagttggatgatctttttgctggactcttcttttgtctggttgagatgtctttctgaaactttgatggcccgacttagtaaggttggtccattatcttaattgggcctttgttaatagtatttgggtcttggaagtacatgtgtccctcttccagaaatataaataatatttacccccaattttccataactttagagtggtagaggcttgtagtcttccttccatatggtatgaggatgcagggatgtttaaaaagtgattagtggttaaaaatatatttttatttattttaaataataaaataagttgagttttagttgatatttttatgaaattattgtaatatattttataaattaaaatatttgattttgattcaatttatgattttcttgtaggaat

SEQ ID NO: 169605 - DNA, 815 bp, Cannabis sativa
tgccacaaatcctcttgaaagagaaggatacctttgagaatgcgattttaaattgatgccgattttcttttgggtaacctagtgtattcatatctcaattcaaagttcctacaggtaactaatttatgttttactaagagacatcccggtgtcaattgttatttagtcattcaaaggtctcttttattttttattattttaaaattttaatagtagaaaagaaatatatcttctattttatttgtatatcgtttatctttacaaaatactaaataaaataaaacaatttttgaaaggatataatagaattttgtaattggttctttccatataaaagattcttttatttgattgatagagacaataatcgattaattataatatacagaaaaaaaaattgaaaactaaataatattctatttaattataataataataaaaaagtaatcttattccaaacacccttataatcttcaatcaattctgcgcttcaatatgattaccaggagtaaacactaaagtaaaaattatgtatagtgctcttaaattttttatagtattccttcttatctaataaactaatttctttatcaaacaaataatttttttatcagaaaactaatttcttcattattaaactaattttgattatataaaaataaaatttatatataagttttaagttctttatggtattctttcttgttatgccaatttgcatgtcatatatatcaaaacttttttctttttcatatttttttttaaatatatatatataatttgtgttcattatacattctatgcatttttttttt

SEQ ID NO: 169606 - DNA, 1208 bp, Cannabis sativa
tctctctctctctcttttgaacccccaaggaaccaacaacaattgggattttttttgctgcaaatcagagtaattagcaaggttttagtaatctagttcaaggtataactcctcttagctcttctctttgattatcttatgtttttagttaagttcaagcatgttttcctagagttagggttctgtgatgtgagtagtgtttgatttatattctgaagttaaattatggataattaagatgatttgagctagatttgtgggttgtagtgttgtttgagcaagctttgagtttaagaactcaagctttgttctttaagggtgatttgagtttcagaggctattacttgatgttattgcttgaaatatctttattatggtgtaaataggtattatggaggttttggtgagatttgggatcgaattgatatgtttatgagtttttttttgttttctgcactgaatcggaattccggttcagatggacctgtaggaactggaattccagttggtccccagagaaccccacagaaccggaattccggttggggcattttaggaaaccctagtttttcccgcttttgtaatatttagggcattgtcatgttattcatcgataaggaaacttttagttttgagtttttattcccgaaaagtgatttagcgtgtcactcatcaattttacgaataatgtgatttaggggcctgtaaatcatcgtgcagatgttccactcaagttggccggcacgcctgaatttggaagtgaggtaaggtagtataatggttgcatttatgtatacatgtttagtgtacatgttagttgccgtcagaataacatattagggtatcagtgaggtgtacatagagatgcaccgagataccaacatatatatgttagacaaatctatagccatcaatgtagcatatcagggcatccgtgaggtgtacatagagctgcacagagatgccaacagatatatgctaggctatcatatagtatgaactaactgctaccacatcggtacgactagagtactgagtataggttggattctcagttagtcatactttgtcgagaacgttcctgactcagttagtagattgtgattaggtgtatgggtgcatggttccggtctggatatatgtttatgtttatgattatacttttcttactgagtctgtcgacccacagatattgtttgcatgtgtag

SEQ ID NO: 169607 - DNA, 995 bp, Cannabis sativa
tgtaaaaataaaaaaaatccctataaattattaaagttaactacctatatagttgtttatatatacactagttaacgtaatcctcgcacggttattataatttataattgaaacacaatttaatttataaatatttaattttttttataaatagaagtacccaaacaatttttataaatatatatttacccgtttactaataatatactttttaatttaagagtgataaaacttattattgtatcatgcgtgtctaggggcggaaccacaaccatagcaagagtggcgatggcctcccaacatatatacaggcctattaattttatatatacacaaaaaacaaaattaaagatgaataacatgtaaaacatatacagtctctaatagggcataatctaaagtatatattataaaatataaattaactatttagaaagaattaacactttaaattaaatttatacatatagaaggtaaataaaataaaataatagcttataattatatattttttattacttaacattctctttaattgtttaccaatgatttattattattactacatatacataatttttttggaataaaatatgatgtacgtgatatatttaaaattaaaaaaaaaaaacatatttatttatgtatcttgactataaataaaatcaaaaaaaaagtaaagaagcaattcaaggatacatttcagttttagttattattattaattttatgaaggaatattatgataaaatataatttaaataatattttgaaatatttctttataaacaatattttttatgaaggttctatatcttccatcgcatcattatcgtttagtatgatcaatcttctcttgtagtgactcaagagacaacaacatataattgaccatggatatatacttgcttagggagatataatccaacatgtttaagagattgtccttgacttttatttattgtcatagaaaaatatggtgctaaaggaagttg

SEQ ID NO: 169608 - DNA, 762 bp, Cannabis sativa
aacgagtccaacataatttaactacctaatataagctacttctaatctatatttttatttttatgtttttggcagtgggataattttaagtttaattttatatatatgaagatgtatattataattatttcatttatataaaaaataatgtatacatatatttagatataaaaactaaatttaaactgtaactatttcattacggaatacataaaaaatgtgtataattataatgcacccatttttaactaaatttgtctttaaataaagcagtcaattccattattttttttttgagaaaaatgaactcattaaaacttacagaattaattgagttttttttgttttttttaattgtttgtaaatttaaagtatcatctatattctataattaattgtcaatacactctttacgtagcacatttatattagtacacctaatattattgtttaaaaatataaaaattatttcaaattttataatatttttattttttattttttatagttttattaaattttaaaatgagttttgaaaatagtttctaaataataatattaagtgtactaacataaacgtggcacgtgcacaagagtatactcataagtattacatgatggaagttaaccaaatgacatcttaatttgctactaattcaataatttggagagttttactactaaaatttgagcgtagaaagttaaatctaagtgaaacaataattgagagagtttagccgctaaaaactcgaataaagttag

SEQ ID NO: 169609 - DNA, 1059 bp, Cannabis sativa
ataagactgcttcctcgctttgtcaagtatggatcttcattatcccaattacgaaaaaaccccgtgtcttctctgggtgggatggatcttgagctacctatatctatgcgatacatagtctccatagctatgttgctattgagcggggaaaagtgagtatctcccaatgtcctaagaccatgttcggtgttataaagacctgccggtaacgatacaacttcgattccattgatgacagcaatggccccggaaattgaagtactaggaatgaattttatgctcatcgtcgatttggaactctcgacgtttacgtagtattctttcacaatatttttttggctaaaaaaatcagcattcaaggaaacactgaagttatttaggagggtgtattgatcattgactttgactgagaagaaagctttggaaatactaacgtttcggtaagtagctgagtaaaagtgcaaccgaacaaactttgggcctggagttaccggaatggtgtaggtaaattctgtgaacgagagacgcgcggttccataagggacgggatctgttccgtcgggtgggttagatctgtcaactggggaggcaaatgagtcgctatttttgtcaaattttaagggaaatagtttagagttgatatctccactccacttccgatcgtctcgtgcggttttgttaatcgcgtcagagccacagtcgatggctgtgtcttctacatggatgtaattagcttgaagtggctgtccccgagcaaacacaacagtgatcaacacgaggaagatgaccaaaggttgaaatgactttggaatcatatttgagtagcgaaaacgatatggggatgtatgtttcaggcaagttttttaatgattaatagagaagttaataacaagacctttaatgcacccaaaaaattaaatgcatgtacaactatcatggaaaaaatggaaaaatgatggtttgagaataaatttgtattggttttgtttagaataggtggatatgtagttaatagtttgatgatgttgataagttggatgattggtgggataaggaaga

SEQ ID NO: 169610 - DNA, 929 bp, Cannabis sativa
  modified_base (827)..(842): a, c, t, g, unknown or other
ggagatgaaggatggtactggtcggcagtaggcctccactaccgagaagggtgggttgcaaatcttagaaaattttaattttttttatatataatattttttaatctttaataattttttttatgatgtgaattaataaaattttgacacgtgctaattttaagaactacaaatgatgttgttaaattgggtacctacatactaacatgaatcttaagcttgaggatttttactataatttttttagattaggggcttattagcatcaaattgaactttttagggatttttactgcaatttaacattaacacgtgatatttttgaagcaactaacagatctgttaaaatgtggaccaacagacttactactgctattttttgaatttgaggatttatctgcattaaaataaactttttaagaacttataccacaattttctcaaattaattaataaaatgtatttttaatttttttttcacaatttcacgattttctatagaaacaatacgaaaacaataaaacaatacataaaagtaacaggaaaataacatctaaacattattaaaataataacaaaaaataacatgcagaaaacaaaaaatcaacaacaaattaacaagtgtacaacataaaaagaccatattttttgtaaataaaatcataaaaattataaaaatatttaaaatttcgtacaaccatatttttataattttttttttattatctttgtgtatttctaaaacaatctcttttatttatttattcatttatgtaatctctaataaaagtgttattatcacaataaattaaggtggcgtttggtannnnnnnnnnnnnnnnttttctatttttaaaattggaaaagtgaaaatattttttcaaaaacatgttctataaaactattttcacttttttatttttttaatt

SEQ ID NO: 169611 - DNA, 595 bp, Cannabis sativa
tgatatagattagacccgttcaatcccaaacactatattgccaatatttggattcaataaaggtggatctcagttgatggaggtctacattatgtagggttaagtgtaataaaatgtgaatataagaattttgtcgctaataaaataaaaaaaatattacaatttgcttgagatttctttctttcaacaaaacttattatttagctaaatgtgttatagtattaaaattatgatcagcaagacaaaaatctctaaaatttatatgatagctttaatattaaaaaaataattcgagttcattatcataggccgcgttattgtttaaagtcaaaataataataaaaaaataatatgaaaaaattgtattaattggatacccaaaattaaagcacaattaagttttactaattttgcggcccataatgtggtcaaatgagcgtttgccaacaatgttatcggtatggtagatatttctactattccaaatgctatcttttgtgatcatgcagtctaacttcttttaatctaaacgcttttattcaaaaaagaaaaaaagataagcaaccaatttaaataaaggtaaataccattttag

SEQ ID NO: 169612 - DNA, 707 bp, Cannabis sativa
cacgcccctgcaactactacacttgcaaccactactcttacatctggagttaataggtgtacctcgtactagttgtctccaaggaccacgaaaatcaacttgtagcatgaggcctgtagagccttaatataaataacattcttgttgtaaaaattatatatctatatgcaagtgtacacaatcgacaacaagtaatataatgataagttgagtatcgtctccacaagaattgtgttaaatgcaaaaatattacatatttcatagtatcaaaaatacaaagttaattgaattttaaataatattatcatgaaactaaagttatatatttttatattgaatttttttttatttaagattaattttatctttgtttataaataataaatactatttattgcataattgaggaaaagaaatagaaaaaaaataaaaaatgtattatttttattataaaaattacaaattaatgagattttaaataaatattttcattgaattagtgtgatatatttttgtgttgagaatattttgtttggatttaattttgtttgtgtttgattgagtaaaatttataaaaagaaagaaaagaaataaaaaaggatgatagaaatgtggcccaagacaagagaaaaatggtatttttgaagaccaaattgagctcaaatagcatcaggcccaaccgacccattttccttcccagtcgacag

SEQ ID NO: 169613 - DNA, 578 bp, Cannabis sativa
tatcacaagtaattatactttaacaatactaaaattgtaagagctatatatacaaaatgctgacagatatacattactaagttattttttttcttcaactatttaaatctatatatatatatataactttcaataaaatatatatttgtttaaaccacaataaaatatatattattgtatgcataaaattaatcatacttattaaataactttctactcttttcagaaaaaaaaaaattaactttctactattatggataaataaaaaaaatatatattacgagtttccatttcacacttatatctaatgaatattgaaagagcttactcacaataataataagaggatctttttcagttttaacaaaaaaaaaagtaacaatattataaaaatactttcagctgaccaaataaataaatatataacctaaatataaaaaaaattacacaaataccacttacacacaccttcaacccaagattcacgcttcttgagcaactatcgcgcaactacgcagcaacccaatgcaaccgaaacgaaaattcaaccaaaaactaccattgtgtggagtcgactt

SEQ ID NO: 169614 - DNA, 656 bp, Cannabis sativa
atttgttttgtgaaaaaaggctactgggttagtgttagtgatcttatgcagagatcgtccaaagctttcgacacaccgatccaaagctttcgaagacacacatgcttgcacctttctctctcaaactctgtcgtcttcttcttcttcttcctcgcccctctttgtctggatgatttacgttcagcctccaccattattgagtgaggttgtcaaaccaccattggaggagtcttcgccaacactatagtgattgcatttatgaagcttcctacaataagcatcattactttgacatatctttctaagtgtcttctctaattttttttatgaaagaaagatgcatcttcattaaatcaaatcatcactaactaaggatgaaattttagtaggtaaagagtctatactaaaaatacaaccagtaacatgaatagaggaacgtgttaagacatgcaccatctttacctaaaaatgttaagactcaaacacgttgagaagctgctgaattgtaatatcaccatctgccaaatttggtcgcggcgactgagtccagaaaacccaaaaatccaatttttaaggcctaaaaatgcccaaacacaaacctaacttcacctaagtcataaacaagcaaaaatcatgctaaaccaaggtattttcag

SEQ ID NO: 169615 - DNA, 737 bp, Cannabis sativa
taagctcgattctctctgtgtacacttttgattttgttcttcactgatgtgttctcgatctaactctgtttctacgctgtttgtgcatgtacttcccccttctacctcctcacgacgagaacttggtttctcatctctagatcttggagcagaagtcttcaaaacaagggtttactccttctctcttctctcttttctcttttctctgatctgtatgtattgtgttgtatttgctttaatttgatgtttatatacttgtattgagtcggttgatcacagatctaggagttagttacaactgttattgtaactaactcctatttattgatccagtagaagcaaatccacctaagattgagtcctttgttttatatctgttgtaagtgtgctgatgtggatatttgtgtgcaaagggacttggttataagtggaatttacttcaacaaatcccaatactattaccataaattaataatttgactataaatttctcctagatatcaaaataaatagggaagcattattgtaccctttttaagcatgcactacagaattttcttagaattagcagtaagaatattgtgtagttaattttttggccctatgaaaatttcactccaaattttgaatggtcaacgacatttaaaagttaactattatgaaaattgaattacgagttaaaagtgtaataactgaaagggtaaataccattttggaccctgtgttttacaaaagtt

SEQ ID NO: 169616 - DNA, 607 bp, Cannabis sativa
catctaaattggagttttctgatgcgctttgtggggaagcgaagacttgctgcaaggctctggatctggcgaaggatcgaggctctaagtttattattgttgagttagattcgagggtagttatcaacgctcttaataggaaggagtctcgttgggagcttgagaactatgtctctttttgtattagatcctttccttattttgttagttgtgttttcgctaatattagtagaaactgtaattttactgtctataatgtggtaaagtgggcgtttacccatcaaataatgttttgtctttatattttatattttattaatatacttgcttcttccataaaaagggggaaaaaaatggatactgcatactttttttaaaaaattactttgttttttctaaaagtcaaaaacatgatttttcctaattattttttttttctgcaagaaatcattatgatactttggtttagggttttggatactttaataagataagggttatttgcggcaaaacctcctaaagtggacaggtttttacaactaaccccctaatctaaaattttggtggtaaaactacctaaaccactagtccgttagcagttagccct

SEQ ID NO: 169617 - DNA, 589 bp, Cannabis sativa
ttgaatttgatctcttataattaaaatgtcgttttctcatgtttttatgcaattatatagggttgaaactattttaagtgtagtctcacttttcaagtccagtaaatacttattaaacaactcgtaccgccaaattttaaaaaaatttaaattatatatatcaaattaattatgtcttttagttaataattaaataatttttttatgtatctatatgcttattaattaagagtgatgatatcgagtctcgagaaaaaaaaaattaaaccctaattatatgagaataaatagaaatttaaaaaaataataaaaaaaatatatatttttaaaaagtttattttatttagatcttaatcacgagtctagtccgtcttaatctaaggcgggtctcctgatgcttaatataattatatgtaatttattaattaattcacgtaataattacgtaatttattatgtaatttattttttttgtttgaaagctattatcctacgttttagtttttactacaaactgtaacgttgctttcatataaatatatatatatatatatatatattttacactctctacttgttttggcatcca

SEQ ID NO: 169618 - DNA, 1032 bp, Cannabis sativa
gagtggaaatgaatgggtacaggctaaaatcgatacgcagtcaaagaattaaaagttatagttaaacattggttaaagttccaaaccttagaactatctattctacattcagtcaaaaacaattcaagaatagttaaagttcatggcaagatatctagaaaatgatgcatatattcattagcaatcagctaaaagtagaaggaataagtgacttactcactgttcaaagttttcttgatttccttggaagacaacgtcaataaatttcttggcaagttccttcaaaggtttggaagaaaattgggatgaaatttttttgctctggtgccatgagagtaaacatggctaaaagaattcccaagagctttaatccccttttataggcatccaaaaaatgaagataaatcatttaaaattctaaaatttgggttttcttcccaaaagtgaatgttagtactcattacaagaagtacaaccatcacgcatgctgtgtcattcagccatcaatacgtgattcgaggtaccgtttttaagaggtatttcatgctcagacaccaaagagactcttagtcaaagtcacgtcagatcaacctcaactaaagacacgcgtcacctatctagacaaagtccctaaccaaatgaagtccacgtgcgaccaagaaggtcccacacagacttgggagggcaaatgttatctttttttttggcactatgacatggcaattagctggatgacatgtgtctcatagtttcctatctggacagaaggttacactcctagcagccctcgaggatcggtaaaaaggtctgtattgtccatacatagcaagatgtccgagtatagtcaccaggagacatctgaccaaagctcgattatgtgatcaactcgcatgcgtcaaacaagatatgtgagttagaaatttaagagatggatatcatcgcttccaagacacgaagataatccctacattcgtgggattagtttagagaataaagacaataagcctaggtttctcattctttgcattgtaa

SEQ ID NO: 169619 - DNA, 516 bp, Cannabis sativa
tgattgacaagggttattctatttttgctacagaaaacttgaggaggaaaggtactgagcgaaaggatagcatgacggtgttggtcagggaccatagcttttttgtccgacgacctttaggtgctccggtgggaccgtgtcctgtcatcaataatatctctgagtattgggcccgaagccctttggtgtttttggcctcttcttcaaaggatatgccgaaataatgtggtcggcccaaaacaaaaatctttaatttggttaggcctaaaggtgtttctacaaaggctagtttcgttctttagatcccctcagatgggtcgaatctaggaatcgaaaggaagaaatgtaatggaacattttacacatatatgcaatacatctcaaacagtttgctaaatgtaaaagcttacagaaccatgagctgagctcgacactggccttgattgtacatatcttgacggtcttcagtgaacaatctggtggctctgatacaactgtaatgcccgtattttaaaa

SEQ ID NO: 169620 - DNA, 725 bp, Cannabis sativa
tatgatcatatttaattacataatattttagtttcccgatttaatttttaaaatttattgtcaaaatattctaacaattaattgtggcggagtctttgatagaaagtctcacatatataaatatagagtctcgatctccgagctcactactcattctgtgaaatacagtaaatctatctaaagagagtagagagagcttggaagctcaattatacccatgataattagttttctttgcagatcaaagattttgtgggattgaacctcaaagattcaatgtctggaagtatttcgatcctataattatatcgtgtatatattcatttattccgcatttcatatacacattcaaataaaatttctaacaacatgtgtatataattagatttgttgtattttttaaaaaggttttaaagatggtataatatatatgtatgcatttaaaatgtatatttaaaagtaattgatattggatttaggggtgtgcagcaagtcatccaatccaattataaccgatcgatccatttcaattaatcgatctaatagaatcaaatatccaatcataattagattcattcagatgtaaattttaaaagtccaatcggatcagatcagttgttggatgggacatccgatccaatgagattaaagaaaaaaaatcttagatctaaaatattaattctcatcttcctaaatgctattaaaattatcaatgcgtattgaat

SEQ ID NO: 169621 - DNA, 639 bp, Cannabis sativa
attatatatttttcttgttttctcgatcgattcttgggtttcctcatctgggtttcccagtcccataaatggttctcatgcccgcatgccctacccatgaaattccaatccaaaaagtagcgatcttgaatgtgcccagaagcccgatcaaaaagtgcgatcgatttgggtgcgactgcacgacgtgcaatcgattacagtcgcaacaatagttgcggctgaacgagaggtgatctctgaacgacgagtaggtgcaatggtggggacaaacggtggtgagcgtctttgtttagcttctatcgaaaatggtagttttctttacttatataaatattctttaaatttttccagtggtgagctttagcttccttagaaaacggtcgttctttttactttataagtatttttgagatcgaatttcttatgaaaatttgcttttgagatgggaatgatgatgtagttgctagtaatgatggatcgtatttgaggatggagttagaaggattgcacaagagttatgtgtagaaaatacaatccttattaagatttagttaatttctcttttctattgataattttttaatttaggtgtcgtatggtaacatttttgttttctaaatttttaatcacaaaatgaaa

SEQ ID NO: 169622 - DNA, 643 bp, Cannabis sativa
gataatttcctccaaaaactttcttgctatagcagtaattaaagaagagatcaaccacacagtaaacaagtagattcttagattctaccaaaattgaataaccgatccctcgtaaggagtctttttcgaaggggtagccacataattactctatatttaggcataataaacttgccttaaatcagattatattttcagttctccatattagtttgttgcattttgtcagataaacttgaagtggagaaataaaacttttgaaagtcaattttatagaagaaagctttaattttttcctttgttttcactatccttcttcaacaccaactagcatcaagtggaacttcatagtcccaccaattctcttcttttaagtaaacgagttaatccacttaatccaaaagttatccttcttcttagtgtgataggccaaacatgcttgtctatggcacaaaagattctataaggcaatatcattgaagcccaggccacccacttttttatcactaaaaatgtcctgccaagccacatgaccatggtagtttaggatctcaatgcctttccatgttagacaatttatatgtataaactgaaatatatgtatgtgtatataacatgcggaataaataaacatatacactat

SEQ ID NO: 169623 - DNA, 696 bp, Cannabis sativa
aaattataatttattttatatatacaggtaaatataattttaaactttgagttttacaaaaattattgattgaattattaattttgttaaattataatttaaattttgtattttttaaaatagtataaaatagaccttaaacttaatttttagcaatttattttttaatataattaacctgaagttattatctagcacaaacagataaaaaaaaaaaaatgtaatcagtgggtcaggttactattaagttttaatttgataaagatttgtatagtttttaaaaacatagaatctgaattatcatttaactaaacaaaagttctcattaataatttttacaaaactggtccaaaataatattacccatatatattaatattgtataatataattatagcatacattctatttattttttgggaatttgttaaaataatttaatcaataatgtttaaaataatgtacaaataacatgttactatatttttttaatgtatttttatatgcgtgtaactcactattttaacatctaaaaaaatttaatagggtatataatatatatttggtataaatatcatgaacatcttcatcatatagaaaaatttaaattatataaacaaaaacgtctctactaataagaacaatctttcaaaaaaaaaaaataaaataataataataagaacaaaatggatgcta

SEQ ID NO: 169624 - DNA, 878 bp, Cannabis sativa
  modified_base (436)..(440): a, c, t, g, unknown or other
cacgtgtcaattacatcgctcgtagcttggactcttcggtatatgcgcatgataagtgggactggccgaccatgcgtgacaagtttttgagctattttagcaacagagtgttcatcaaatccaattaaattaatcgtcaaaaaaaaatctaatcaaattaattattttcaattaattattttttagtattaaattatttaatatttcttagaaaaatatatatatttttttttcatataataacaaaataaaataaattattattattattattttatgtctcaactaataaattaaaataaataaaataataaataataaatgttaaaaatatattaatttttatttattgtatcgccgaaggaaggtgagcagacgcttaggtgtatgtatatatatttataaatactaagttgatgttacgtgcaatgcacgnnnnnttagttttctttttaattaggttcaattaagtgatttaagtgcaatacatgtatatttaatttttttttaatcaggtaatgtatttttttttttatttttgaaatgaaatttaagattttaatctttaaaaaaaaatttagctattgctacattagtgtgtcatttaaatgtgattatatatacatatttttttaaaaaaaaaattaatcaggtaacgtatacgataatgtatatattgtaatttactatattcttaaccaaaactcacataaccaaatttaaatgtgtctatatatagactggattcgtaaatttgatataaatattttttgttctcaaattttacaaaaaataataataaagttaaaaatatttatgatattttaaatttaaatttttttatataaaatatatacataatttttctttttatttta

SEQ ID NO: 169625 - DNA, 909 bp, Cannabis sativa
taatactatatattaattgaaatttctcttgttcttatatgtattatttcatatattaaagaaagattgaaatgatttctttcccatctataaggttttctttttttaaaaaaaatacctcaatatatatgaatcgaattaagaacatttcaatgagatgagaaacacaatgattacatcaacagaaaggttttcataatcctttctaacactaatttttgttatgagagagcaaagagcttctaaaaatagccattagcttaaccatataaaaactagggagatcctaacccacaaagacaccgtaattaattaatatgtataactactaattaatatgtataaataactactaatatcatttctgaaaagtttttgacttgcgggagcaagtcttggaaggctttcttgtccttttggaagggtctttaggaaagctaacctttctccggaaaggagtatcggatggctagcttttcctcctagaaatgagtttcgaatggctcttttctatctacaaagttctttcagggaactatggttcgtattttcggaagctctcatgcacgttcccaaaagcgactatacttatgttgacgtggagatctcactcaaaggagagctggttaagttagctattgcctaacaaacttaacaacctcccttcttaattgcagccaccaactttaggatcttgatcctaagcatataaatactaccaacacttatcctttcaagtagaacgatcagattgagttttgagatagagagagaaaagattgtgaggtagagagagaaaggagagaaaagagagaggttggggttggattttgtatgaagaattttctgtagatgaagaagattcttgggtaagagtgtgagagttaaaacactttgagagaaatcttc

SEQ ID NO: 169626 - DNA, 718 bp, Cannabis sativa
taaataaaaattaaatttgctgacctggcaattaatggtggaagaaataattaacaagaaaatatatatcattaggactatttaattttacaaaagatcctaattatatatatagtttagataacagatccaacatgtacacaaatatagtttttttttataaagagaaaattataattatcccaacatcattaaaattatttaattttacaaaaaatctgaattaatttaagtaatttattgttttttttaaaatttaaatttaaatatgtacgtaataattgaaagataggtgagataatctagtaatctaaattcaaattattactaaaatctaaataaattatacacatatatgtcattaaatctccgccatatttctttttatgcacttaatttaaaatattatctatttaatttctttgataaagtaataatatttaacaatatgcacaagtgtgtttagtgtgaaatgatcattttgagctaattttcaacattagacgtgggctgggcttcattaatcaaattgggctcaaataacttcacacggcccaagatctaatacaactcacacggcccaagctctaatacaagtataaatcattttattagtcatcataataaatagggttaatttcacaaatgcacaaaaataacaaaaatatagtttcacggaattttaaacatttttacgattttttttttattttattta

SEQ ID NO: 169627 - DNA, 570 bp, Cannabis sativa
aaaataatttccaacataatgttgacatggattgacaagcttgttcaagtaaaggtgattatggaggatagtcaacttgttcattgtaagatcaaaattgtgggattcaaagatgggttttttgttacagcagtttatggtagcaactctcttaatttgaggaaagagctatggggcaagctgccaggcattggcaatctaaaagaaccatggatcattcttggtgacttcaatgctatatttttctataaggatagaaatggtggaagacaagtcaaacactctgaaattcaagatgctcaagactggctcgctatgggtcaagttgatgagtcgaaaagttcagggtcatacttcatgtggtcaaacaaacatgaagagggagttagaatttactcaaagctagatagggtcttttctaatgaggcttggatagactaattcccaaacactgaagccagctaccgttgggggacgatctcggaccatagctattgccttattaaaccgattgaggttgctatctatggtaacagaccgttcagattctgtaattactggatgctaaga

SEQ ID NO: 169628 - DNA, 999 bp, Cannabis sativa
ggtgagcattagtattctcaatgatccttggttatctgacgttggtaatccttttgctacctcttatcgcccatttttagtagggaagactgtggattgtttgctggttgaagattcgtataagtgggatgtggatgttgtgaaagatatttttaacccgcgtgatgcctctttaattctcagtgttcctctcttccctttggcttcttaagacagatagtgttggtcggctgagttctctggtatttacttgattaagagtgcttatagactaattcaagaaatgtaggagggtttgttaagggatgataattctggattttggcaaaattgtggaatgtgaaaattctgccaaagattacaaacacgatgtgagccatttctaattgtcatgctacgcatattcagctaggtattaggcacgtggacgtgccatcttcttgtccaaggtgtaatcaagatgctgaaaccatttcacattgcttggtgagttgtccttttgattactcgcgttggaaacttgttggtttttctttttcagcggcttttgctacttcttttggttgctagtttgtcacttatgatgtacagtggcatgaggaggaatttaaattggctgccatgttgtgtttgaccatttggactattaaaagtgaaaagctttggcaaaacaagaactagtttgtttagtatgtggcagcgttagcttaatcaatggagttgtgcttaatatcagacttttgtcacctcgttggtttctttacaattaatcgatgagagtgagcaatggattacacttgatgtaggaatgatatttaagattaatgttgatgctgctgtgtttgagaatgaaaacaattttgggtttagttgagttgccaaaaacgatgaatgctgacttgtggtggctaagcttggtagaaaattaggcttggttagttcggtgctggtagaagctcttattgtgaaagaagtttttcagttggctgaaggaaaaca

SEQ ID NO: 169629 - DNA, 830 bp, Cannabis sativa
actttctccatggctggcaacggaaaaaacgtcgacactcctcatgaagaaaccactcaccgtccttaaaaaaagagccaatgggctcccgaggcctcccgattcacgatctaaacagaccaattgttccaggagaactcaacctgatgttggcccaagcatgcggaccactcgttccaagaggacccaacctgagggtggcccaagtacacggaccacatgttcaaggagaacccagaatccaggaataaggtatgaagaacctaaaaggaacattggtagaacccatcccagtccagttggcgaggatggcgcctacgatccaacaagatacacgctgatcgtcgagttggaaaactgccaactcagacgccgcctggagaaggcgaaccggtggaacgctgagttggaatgtgaggcagctgctgccagggtggcacaggcgaataatacccaaaatcaacctgattatggaatgagaagaccacgaggaaaaccttgcgactcatgaaccaggaggcaggagacaactcaagagaaccctcagaacgctcaggaagaacaacctggggaaactgagggtcccctaaaaacgagcaatctggggaaactgaggttccctctaaaaatgaacaaccaaatgatcagccagaaccatctcatagaaatgagaatagaaggtaaccaaaaaccagggaataagaaattccttgtggaaacgagggaaatcctgggacacaacctggaacacgtaggtcaccagcagggaaccgcaaacgttcttcccaaacccatatggaaggggcatgtacaaaccccagtagggggca

SEQ ID NO: 169630 - DNA, 637 bp, Cannabis sativa
ataaggtgtatatgcgcttacctttctgcccggcaataaaatgtgttgttattactttcaatataaacatttggggcctgccttggtagtgtagttttacttttacatgacatacaaacatgcatagatggtatacgtatcgtatccaaagcgtactgttctcttcactatatttatttatttttggtggtgttgtgtgtgtttgtctttacataaacttgttctactgtagatatcatagaaggtagtttaggttatacaagatttagaatatttacatgattgcattaattgttttaaacacattatgggcctagatgaaacttaatctaaccatccatattaaatcatttatcaatactaaattaattaaaaaaatatcatatctatttatttacttttgcatatttatttaaagagaatgagaattaatggtacggtattgattcccatataactgtttattagattttggaaagggagaaagtggtggagtccaagagaaaataaaggacaagattctctcctatttttatagggaatatctttccctttccttacttaatttattttaatgttaattttattaattaaaaatgaaaaagacaaatatccccttaaaaatctataaacagaa

SEQ ID NO: 169631 - DNA, 629 bp, Cannabis sativa
gaccctctgattctggttggccttaacatacttttgcaaatgcgagttattcttcctaatcaaaaattcaattttctgctttagattattgcattcgttcgtgtcatggtcgtagttcgcatgaaaatggtgaaacttagacatgtctcttttactcacgtccttcttcatgggagagggtttcttgtatgggaccatagactgagtcgttgcatatattgtctttaggtcgtttgttaggacagaaaaagtagtaaattttgaagcattgtccttggggtgctgttcggcatttccaacaaacttgcctttctttttgttgccttgcatgctgtcgttatcagacctcttcccattttagttcaaactgcaaggatactgtggactctgagcggacgttcctgctgaggtggtacgtggctgactcttcttttgtctgacggtttctacacgccaaaaaactgcttcgagcttaataaaccaatctgctcggtccagaaattcaaccattgatcccacaatcaacctcttaatatccttccacaattctccaagtggcccaatgcctcccagtatagcggcgaaccttccttcttcaatcaaccccttaacctttgtagcctttatca

SEQ ID NO: 169632 - DNA, 502 bp, Cannabis sativa
tagcttggccagagagtgaccccaaagtcgctcggccaatgctgtttatgaagattgcttggccagagaatgaccctagagtcgcttggccagagaatgaccccaaagtcacttggccaatgcagattatgaagatggcttggctagagagtgaccctagagtcactcggccaatgccagttacgaaaaattgcttggttagagagtgaccccatagtcgctcggccaacacgagttacaaaaagggcttggccaaagaatggcctccaaattcactcagccaacgccaattacgaaagttattgggccaaagagccaccctcagagtcgttcagccaatgccaaataaaattgttgcttgacatattggcgcgaagtaaagttcaactgagggaagcccccactacaaagggggcaatatctctaagaaaaattagagggtctcacccctcggcaaggaagatcccccaacttattcagtcgacaagaacacttaaaagaa

SEQ ID NO: 169633 - DNA, 509 bp, Cannabis sativa
agtctaataaatatggttggttatgtgatgtaacagaggcatttatggaatattataagcagctacttggataaaaaatgcaacaaaggataaaaatcaagttgactgtcattgcagagggacctgttgtgtccaaggaacaagctgaagttctgctagctaattacaccagtgaagaaatcaaacaagttgtgtttgatattcctggagttaagagtcctggtcctaatgggtttgggagtttctttttctaagataattgggatttgattggagaggatgtgtgtactgctattagatcttttctctagacaggaaatcttttgaaggaaatcaaatcaactataatgaccctcattccaaaggtcaagagtcctaacctggtgagtgattttaggcctatctcatgttgtattgtgctatataagattgttacaaaattaatatgttctaggcttaagaacatcctccctgatttagtttctcttaatcaaggaggctttattaag

SEQ ID NO: 169634 - DNA, 718 bp, Cannabis sativa
ttagttttatgaatatagggtattttttaagtgagagtactattttttctcttataaatgcgggcaattttgtaacctttgatttttaatctaaagtaatgatattttttcttatgatggagtatcattaatgagttatttgaaaaaaaataaaaataaaaataaaatgataataataataataataataataataataaagaagttattagatttaatacctacgtattctacccattaatcatatgaaagtacagttttttttttctctcaatttcaccatatcacctctcatgataattgaaagaatcttcttcatcaattccataaatcccaaaaatattttgttcttcctcctgtttctattagccacaagtatttttcattatgtattttaattttaaattgttgtgtacaatgctgttatggaaaaaaaattcaccatacatattaagaaccaaagagagaatgcaatagatatattttttatcaaaggaatgcaagagatacttcaatgaaaaacttttttttaactgtggaaaacacgggctaaggccttagatggagtggagatattgaaaaaactaagattgaaatatattcaatttatttagaaaaaagaaaaaagaatcagattgagaaactcattgtatatttttgatctagaaaataaaatcccactaattaactctttcattaaatttacaaaaaaaaaaaa

SEQ ID NO: 169635 - DNA, 887 bp, Cannabis sativa
tgcgatttcatcatcaaacatctgtaagtaaaccttgagagccttcttggtcaaactgacattgccacaggccttaaccacaactatatgggcaactattttgggcttgtagctattttgcttgatatgagtaaataaatccaatgccttgatggggatgagttttccttagtcaaagcatctatgtctttgttgtatcattgtggagggaggccctaggtttgcatcttccgaaacacttcttgcaattctttggtgtcttttcccactagttattcatcaacatcaattgtaggctcctcattaatcgagtcattcgattgggagagctttgattgaagatctttttatggctttggattgcaaaaaaattaaatttgagatctcaaccttatttttttcaaagtttcagccataatagtttgaagcttatccaaatcactatatagcacttataacctataaataggatttatccattaatatatacattttgaatggaaagttaatttaatacaaatcatctaacaatataaacatagttagaatagtactaaagattcgatctaaaaaaactgaaaattttaaaaagagacttggctcaaaataatttttttgccgtaactcaaacaatattaatcaaatgtttacaatcattaacaactaaatcaaaaggagaattcatcattaattgatagtgaatggcctcgaccgccaccatacaatctgtcaccatccccgaccattatttgtcctttatccaatttagagcctcttaaataccccacttttaaccaacttaggttccacattgccacaacaacaaatggtacagtcgccgtgtcctggtgtcaaggtcgcccaagcatatggcagcttgggccatt

SEQ ID NO: 169636 - DNA, 521 bp, Cannabis sativa
ttatgggccttaaaaggcccattttcatttctatgggctactttcctcaaaacatagcctaacaaattggggtaagttgaaaaatgcctctattattaatctattaattaaattttaactttattttttaaattgaaatataacttctttttatatgtattatacccaaaatgccctgacgtaagggagccacgtagagagtatctttaagtgaaaagggtaaaattaatacaatattaaaaaaaagaggtaaaaataatagactttaaaaaaaagagtaaaaataaaaaagtacaatataaaaagagtatagagtctaatttcctctaacaaatttaagagtagtttacttacgcattataaaaattaaaaagaaaattacataaaatcttaattttaataaaaaatttacgtttaatattttttatatatatttttatagtattctataaaaatacaaaaaaaaatacatgaaaataataaaaaaaaataacaacaaaattacatcaaaacaacataaa

SEQ ID NO: 169637 - DNA, 542 bp, Cannabis sativa
attaataaaataataaaaaatgtagaggacaaattgagcccgtataaaaaaaaaataagttagtttgtttaaagaaaataaggattgatatgagtaaaacacgatacgaatttgaacatggtacaaatattatgatctaatggctaaacactactataaaattggctttttctatcggtttataactgtcttttatactatttcccaacggttcctaaaaccgttagttatgtgggtgtcataaaaatacggaactttaaaagacagtttataatattgggaaaatttactttaaatgacagtttaaaactgttgaaaaaaatcactttaaatgagtgtttataaatgttgaaaaaagtccatgactgtttttaactgttggaaaaagtcactttaaatgactgtttataactgacggcaaaaatattatgtaaagtaaaaaaaaaatctattactatgtgttgaccgagattttcggcaacaattaaaatatgattatagtagtgagctgtaagaaagcgagatgaggatttttacgtggt

SEQ ID NO: 169638 - DNA, 719 bp, Cannabis sativa
aacctcatcttcttgctcagaatgatcctgatcatactccttggctcccgcaccttccttcaacttagcttcatgcttcagttgaatgagttcattctcttgatgagctccctcagccagccaacacttgatttcctcttcttctccttcacaggctggggaatgaaatcttttggataaagcccatactccataaagtgggtctccgaggtcaagaaagtgatattccgggaatcatgcggaatctgagtgatccgttaagctctatcccgaagagctagcatgaagggtggacggtagtatataggaatctactgtaaccgagtatacgttgtgcccatgccttcaaccatgtaaaactcgtcaaaaattttcccaattttgcgcatggccttgtgcccagtgcccattaaccacttgaagccttgctgaggaaaactaaagtatcccgacctaccttgctttggagtagacttcaagtaaaaaaaccagctaacctcatgaggagaaagcataccccacttttgggtggcgtagagaacgagcaaggcaaacaaatacttgatgcacttgggagtaaactgggtctgacagagacggaagaagtctaccaccttcctaaagtacgagtgcaaaggcagtattgccccttgtttggaatgagcacccaaccaggcacacatccccttcttcgagtttgtgtccggttgtttgaggca

SEQ ID NO: 169639 - DNA, 907 bp, Cannabis sativa
ttcttatcttttattgaaaaaaataggctttaaaaaaattgagtttaatacttgtgtcgcccatgcatacaatttaaataattcataacaaataaaagattaggcaaactttgtgtctaattgaggctaatttatatggggtaaatgacggtgaaactcttttatgttttcattttttatacacttaatttttatattttttttttttaacaaaacatcctcaagtttacttttctttataaatttaaagggtcagttaatattactatcaaatatcaactagataatcattgtgtacatctatctatacgtgataatacaacctagaaactaaaacaatgataattcaattagtatttaatagttatatctaaccagcttctcaaattcataaaaaaagttaatacgaaaaataaaattaaatgaattaaatgtataaaatcaaaatataaaaaaaatttaccctcaataatctatttatgtgcgatcatatttgttaaaggatgagtatagattatacacgctcgaaaaactaaatatcaaacttgtaatatcatctaataaaaacttaggtcattaacctcacttagaaaaagcatttacaattttagagcacttttgttagcttttctaccagggatgcacacggggtgggagtgctcctcccgtccccatccccgttaaggatcttaatccgcatccctgtttattccccatcggggatggggcggggaatcccctgatgggggcggggacaggacggagaatcccctaataaaaaaaaatatagtttataataaaaattttgatatgtaaaaatattaaaatacataaaaattaaaatattatacattaattattattcaataaactaattattatccaaaatataacttaaaattcataa

SEQ ID NO: 169640 - DNA, 582 bp, Cannabis sativa
cacatgacagtgaggataacaccccaacaaaatgtggtagcaaaaagaatgaacaagataatactcaacaaggtgagatgcttgctgttgtagtcaagactatatctcaaggtttttggggagaagcaaccttaactattatctacctaatatacagaagtccatcaagtgcatatgaattcaaaactcctgagcggaaatggtctggtaaacctcctaacttatctaatcttagagtatttagatgtgcagcttatgcacatcaaagtatagggaaattggaacctggggctatgaatgtgtcttcttaggatatccaaaaggggtaaaaggtatagactatgggttttggaataaagaggttttaaaacaattaacaccagagatgtaatatttaaagaagatgttttctaaccctagtgcaggtacaaaggaaattgaccatgcaggtacaagcattgaagttaggtctggatctattcaggtggaacaacaagagaacacaccagaacaagggcgataggttcaggtggaacttggggatcatattcaggtggaatttgaaggagaagtaactaaaat

SEQ ID NO: 169641 - DNA, 539 bp, Cannabis sativa
aaactaatagataagcagaagcctacctgcttcccggacaaggaagacatattatctctcccggatatagagtgatcaaaactcagagtctacccaactgatacccagaagggtaatcgaatggcctattgaggacaccgtccactcgagagtgccgcgaacgtctacttatggtgcaattcggatctccaacgacgattatgcttttttttgacacaaaatcagatcttgtcccctatgtccaggcatggtagtgcgcgtgcatcatccaccattttgctagacgtttatttcagacctctacttttaaaagttaaacctttaagtaacacgtgccctttacttttaaaggttaaatcttttggtgacacttgtccactacgtacaatggtctccaattgtccaagttgttgtacacacgacccaattgtttctaaggggccaatagtcagttctattttgcatgtaattgaccccattagtgggcttttagcagaaatcctaggtggatcaggggcatgtccatacccgcccttagc

SEQ ID NO: 169642 - DNA, 787 bp, Cannabis sativa
ggtacagcccgaactaaaggtaaaaaggaaatacttaccttagtatgctctttcaaaagggtggaagctagaagatcgataggcattaaatttgatcccctcaacttctcgtttagctcaccctagatgtgctattgatagaagttcatcatgtccttttccttttaagtctctaaagcaattgacatgggtgctttctcttttgtttttttggctcagaggagcaggagtaggctttaagcttttctttgctgggagctcaatggcaaccgtaggagcagagatgttggtggaaataacttcatctctggtgaccaaaggagttgggggtagagccaagggaagatccttcttggacgaacccttgtcatccttcttttggacttttgtcagactttcctgcccggatgatccaccagcattcctttttagaagtgcatacctgaatgacatagttgcacaggaaaaaatgaaggttagtcttcacaaaaatgtatagcaaaagacaatataaaaattgcaaggaatatactttggacatccagggaagcatcttcttggacaactataaaaggggcatcgtcatccaaagattccatatttgactcttctaaccattttccccttcccaacgacaactagcattgcgggacgtgcagtcatctcggcaacctctctaatcaaaataggcacccagtcggggctctcttctttttcttattcttcttcagctcagacacctcccacgcatatacaagagcctagggctgtacaaaaaaatttgtaa

SEQ ID NO: 169643 - DNA, 1202 bp, Cannabis sativa
  modified_base (1163)..(1163): a, c, t, g, unknown or other
taactcattcacatactaaaatttgtctaaactaaccatttttttcctctatgagttgggttaggttgggttggattataacccttatttcataactattgaccttgtttttagccaatgacactaagtcttcaaagggataataatgattaatcaaaataataaaataaatcaataaaaacagacaatatttagagaggttcacctttgatactgggaatggcaataggctactcctattttttttttttttgaaaaatggcctactcctattttttagttgtattacttatagagaattattaggatcacaaggtccaaccaggtgagtttcttaataatctcgagaaagcttacaagtatttgttgtagaataactgttctttcagataaaaaaggaatccctaaacaatgatatgacctcaccatttatatcgcaagtacattacacctatcacgagttaataggagaaaaattagaaaaacttaaatatcgaatcccatgattttctcaatcgtataagtcaatcccataaagataggaattctaaatggactataattgtggcggtatttagggaaaatatctctgagaattttccctcgctgcgtgcttgtgttcagagaatggcacttactcggcgagcttaatctacttggaatagtgtgaggttcacatctatcaagattgtggttgctacaggtttagacttaactgatttagctctgactcaacctggacaaaactataagtaggtgtactctgtccaagtccaatgtacgactcgtgtcacctagcccagtgccacgtcaccttgtgcaaaatttgggataacatttaccttccaagtctgtgtggaaacttatgctcgtatggggacttctacaggttacactttgctcagagttgtggcacacgtctgcacccacgtgccatcctagacgtgacatgaattctgcctaaggcgtgcatatcccttcttgtattttcactatcacaacattaaatgcagtaccttgaaatttgggcatggtagtgttaggttatatttagcctatgtctcgggtctaatagttaagcattttcttgattattgttgtcttttggagcgattttacgcttgattttccttgtttcaggttcccggggcattagagttcanattcagtcaattgacgaaaagatgggacaaactggtgaa

SEQ ID NO: 169644 - DNA, 577 bp, Cannabis sativa
tccacaatctcttagttgtgtaatagtgatccatttcgagtagttgccctcttattgtctctcatcaatgttgtaagcatattgttagtcgtgcctaaacctttctttgtcttcattctttgaaaaaaaattgtcaaaaccgtgcgcaaatacttcgttgtctccttcataaagtagatgatgaccttgagtttgaagctttcaacttctcctttggtaatctatgatttgttaatcctttgcttatctcttggtattcaagatatcttcataagctattacccctagcaattttagcagatctctttctatcttcttatcttggattttattcggcacgcatttctgtaacagactcatctctaaagtcttcacgtacatacttcacatctaccttaggataaaacatccatcaagatagtacttttccttaaagatctattatttcctccttctaaataagcgagttttgtgaaatgtcgtatcccaatctagtatgtcatcaactatcctaagacattacctacttcctaaaggttcagcttcctttcataactaggtgtggggactgcttctt

SEQ ID NO: 169645 - DNA, 544 bp, Cannabis sativa
ccacatattagagcttgttgttattatagaatgaaaaagaataagagtattgggttgatgatattgatagggagaattctggtttggtctccaattgtgtttcgtaaagtatgtatgagattcttcagctgaatttgttcgatgatatgaaaaattggtacatattagattaccaaagctcataaaattttttattttaaaaaaaaataaagaaacatggtcttgtatgttgcagttatgtgatagaagaaaaaaaataataagagtgcaaaataattttgtcatgatttctttagaatacgtcacttaatattactttgctttgagccttttttgctaaatttactttgctttagttaattgcccaaaataaaataaaaattactaaattattgctaaatcgccatatttttcatcttttagtacatgtaataaaagaaaggtaataatttttttttttttgaaagtaaagacccaaaagttacaggagaaaagggtaggggtcttggctattccaactccatgtgttatctaaccctatgga

SEQ ID NO: 169646 - DNA, 705 bp, Cannabis sativa
  modified_base (676)..(680): a, c, t, g, unknown or other
aggctagggttttttattgtttaaagagatagaagagaagagagaagtattattttttaaaaaacaatgaaagagcgttttctatacgcattattgattttcatttttttttattaattaatatggtatgttataagtaatttaatttccataccctagtttaaaaaaaatccacatgcttcacatccagtatagtgttggacgaaaaatttaactaaaaaatactaaaaaaaaacatttaatgaaatttttaatgtataacgtctttttttctctttctagtccaatattaatggacataatacaaaaaaatttctagtctattattattggacttgaaatctattttaaaaaaaaaattaatgtccaacactatatttgttggactagaaaaagagacattaaaaatgttatttgtagtagtgacccgtgagtcacaaggactcaacaaaaaaaaaataatcatacaatttattatttatatattattatttatactcagacaattaggatcagatgataacacattactcataagattaaatctaaatcaccactaatatcagccatagataaatgccagtataaaaatatttagtaatacaaaattactgagctaataatataagtgttgggttttatgccctaaattaaactctttacaatctgattagtnnnnnatataagaaatttgaagtgatttat

SEQ ID NO: 169647 - DNA, 731 bp, Cannabis sativa
  modified_base (702)..(705): a, c, t, g, unknown or other
aaatttaaaataaggattgtttattatcttaaaattttgaaaatattaagaaagaaaccgatgagactgtggaagataaataaaggtaaagcaaaagtaatggaggataatatattagagattgatattggatcatctcctggagtcaccactaaatgttgtaaggtagttgtggtaacgtgttactaaagtttaaggtagtcgtggatatctcattaatcgtgtaagatttttaatatttgttaattttttatttatttgttaatgtttgacgttaacattctatttattttttaaataaaaaaaataatcgtttaaaacaccgttaaaccaacaaatgatgttagatagacactttttatatataaagatatattatacgtagaataagatttgttgtattttcttttttgaggttttaaagagggtataatatatatgtatgtgattaaaatatatatttagaggtaattgatactcaatcagctacttttatttttatgagttttatttgttatttttattgtgtattttaagtgttaatagagatataaatgtacaaataaatattaaatgtgcaaatatattgtgtatttacattacttcttgtttatcgaatttttcggcaaccaaatattttttagagcttagtaaagaaacgaaggtataaattgtttgatatattttaccaggatctagatnnnntaccatgtatgtttcattaacatcct

SEQ ID NO: 169648 - DNA, 521 bp, Cannabis sativa
ccttccaatattgatagtgggggagtttctcccaaaacgtaacacgcaattgaaggctttcagaattcaatttcatcttggatatcatcagtattaattttaactttactagttgatgttgactttgaaaattaagtttccagcttgtgtttcacattaccagaacgtaaaatgggtgggttagatatgttaccttgagctaaattctcagagcaatgattactagtttcccaacaatgcacaaaatcattcctgatatcctcctgctttttgatagattgaagagaagacctaggcgagagaggctcaaggaagaaatcatgaatctctgacagttgaacactcgaattatcttcgccttcctctgtttgcacatcctcttcttcctcctccttttgtgcatctgagaaaacgattggctcaattccaagcacaacatccatcgattttttttttcctaacatcagagactgaattcgaacctttcttcttccttggcttagtcaaattcaacttcccct

SEQ ID NO: 169649 - DNA, 570 bp, Cannabis sativa
agtttccaagctttcaacctccttcaagagattttcttccctcatttgcctggatttggcattctcttctcttatccttggttaactttgaaagaagagtgcgaagaccctccctctcgtcgttaagctcattgagctccttcgatagagcctcgttttctgcatcaagctgggcggtagatggcatctcctgaatttttttggtcagctcctcaatccgtttgttggcagctaaaatcttcttgctaacttcacccagctcaacccttacagtatcgacctctttctaggtcgtatccacctccttctacagattggtggtggtggtgatattattcagggcagtaaatttgacctaggagtaagcgtaggccatcttcagatcgaggtgcataggaaaaagtcaaaatctacactagtaaaaagacaggataaaaattaagaagaaaatacttacgcgagttgcatccttcagaagcccacccatcagaagctccacggacagctcattatcagctctggccaactgatcacttgttgggttttgtgccctaaataaaaccctttaca

SEQ ID NO: 169650 - DNA, 1255 bp, Cannabis sativa
aattatataaaaatacttgttactgtaaatatatatacattatagtttagtagtttattaattgtaatatacatgtaaatcacgaatcagagtccgtataagaaaacgagttaatctatttagaaaaagctaattggttcgagcaaagcatgaccaaaagcacgtcaggaaaaagatcatgcttaagggtcgtgtcgcaggcctattctataaaattattggcacatgacatgatctatattttttttgtcacgacacgacacaatttgtatttttgtcgagaaaaaatcatacatgtaataaaatatttgaactttaattttaggattgtaaactatttataattttctgataatttacatgtacttctgtataaatacaacatatatgataataagaaaagatataaaaaaaactctaaataaaaatatggagaattactttgtatattatttttttaatttttttttaaaatttacaatttagcttgctccactaatttttatgtggattattatatggattttagttacaaatttaagtttcttcgttagttatatattatgtaaattttcgtaaaaataaaaaaaaaattaaaaaaaataaagaaaaaaacttactttaaatataaaaatgaaaaaaccctacaaatataattgtatgacaacattccttttagaaagttaactataaaattttcattatgtttatactttatgcaatatccttattaaaatataaattatttgttattggacaaaggaatatagattgtaacttacgtaacaaactacatagatgatttgctatatatattgataatatgatattaattggattttagctaggcatcatacaatatttatatatagaatattttttaatgggtattagttattgatggttactaaacaatttaactatatattaattttaaaaatattaaactattagatttgatccaacgatgagtaataaaagagaaattcactatatcaaaaatatatttatatatgaaatacttaagtcaaactcaatttttttttttgccaaaaaactttttttcttaaattttttttcagccaatggaacaatcccaactcatataattaatgtaaaaataagatttttttttttttgtaggtttttttttaatccaaacaaataaacaagttgtcttttatcaagttctaagtttgttggaaaagttagttaattcggttatgttttcactcctcaaagttcgggtagttaa

SEQ ID NO: 169651 - DNA, 628 bp, Cannabis sativa
tatatataataataagaacaataaaatatctaattaaaactattatatatgacgagttttatttatttcgaattaatggtaaaatatttaggtatttttgatcaaattataaattatacacataaggtttttataatttttcgaaccacaatcgctgtaagatttcaaaactacaaaaattatactgggtgtggatggttttacactacaaattaatttatttttaatgttcaaagaaaaagaataattaatatttaaaaattcaattgttttagtagtaaagttaattttatatattgttcaatcactagttgcatacctcttagtctttattagaaatatttcatataacattagcattaaattttcatatcaaacagtaagaagaccactacacgtaaatagcattgaaaccaatttaaaagtgcactaaatatagaataaatacaaattcattatcccacagagacaacaatatatatgtgtcaacaatatattattatataggctaactacgatttttacccttaattttaacatgtacaaaattatactccttgaatttttttggccgttaaaattttttcctgaactatcgaaattgttaaatttaaagatttttgtctaa

SEQ ID NO: 169652 - DNA, 767 bp, Cannabis sativa
agagtgtccaccgcagaggctctttctgaggtcgaggtggagctcctcgaaaggcagaagaaaaccacaactaacaagaaacgagcctcccagaccggtaatcttgaggtccctgagattgaaacccatgatccgattcctcctccggtctctgcctgttccgacgagcctcttcccaaagcgactcaagcctctgcctcctcaagtcaggcccttgaaacattgcttgttaaggccggaaagactggctcagagttcaccacgaagtttggaggggcatgttggcgtcagttcaaggctctccttccccatgactgagatttgatcaaccatggggatttggagggagtgcttacaaggagtttgtctcacagcctcttggtaagttcccttatccttatctattcacttcttttattcctcttctcttttttttttttctttactcatgtaactttgtttatgggtttccaggcttctttcctctcctttgctgcccaacggcgaggcttggaaaaggtaaaatatttggagggcgagatccagaacctaataggccattgcgacgttgtggccaagaaatttaatgatgcccaactggagacttctcgccttaccaaggatgtcgagaggatgaagaaaaatcttgaagctgccgagaaggagacaaatgacaagaccgatgaatgcgagaagctcaaagggaaacttgctgcagccaaggtgacacttgatgggaaagaggccaaaacccaagaacgatgcaa

SEQ ID NO: 169653 - DNA, 1537 bp, Cannabis sativa
gatactgggagtaaagcctgcatcaaaagttctgaattggatggcaattgcagaattgaaagggttgaagattcagttgcaggggatgttgagcttgaaattgctagactgagtacctcatcttggagtatgccagttttgtttgtgaagaagaaggatgaaactttatgagtgtgtattgaccactaggagttaaataaattaacggtgaagaataagtatcctttgtcaaggatagatgttatgttgatcaattatagagaaggatcatcttccctaagatcggtcttcgatctggttattaccagttgaagactcgagaggaggataagataataaataaaataataaagaaaataagaacacaagatttgtagagatttagcctcgtgattatggtaatagcctgcttcccttgttcttgtattactttgaagaattaataagattaaaaggagctggtaagtgagtttcttaataattctcaagaaaagcttacaattgtttggcagcgtaaaagctctctaaaaaatatgattttagatccctaaataatggaatgacaccattatttataaggggaaaagaacatgagttaagtttcccaaaacaaataaaactaagaaggttttctattatttcttgtcggagcaagtcaatcccacaaaattagggatttgattgagatttgaatattggaatatttacggaaagtatctctgaagatattcttatgtcaaactaccttgcttaaaagactcggcattcttggataatgtggatttgtgcagacaatcacatataggttctatcaagatgattcctgctgaaggtgtaaacttgaccatttcatgtaaaactctttggatagactgtcaaaggacaatcatctatccatgcttagaaaatgttctccacgtgtcactcttactaaatgtgacatcaccctatctagaaagtgggataacacatctgatgcaagtttactctgctaatgccctagataggacattctacttataaaagtgtaagtaaactacatcgttgattattccgtcagtgtaaatctaatgcattgataaatcatgattagctacctaatgtatttaggattggcagagtattcccaagcacacatttattccctagttggctggttggattgtttgtaaaggcttctcactagagatcgattgattagctttggttatgcaacttcatattctagcttattcagtgagtcagaaagagagacacactagctgtaacgtccctgcttcaagcctccatcaggctcttatacccacaaaataatggctcttatacacgagtacatcactctggctgcttcatggactgaagacttaccatacagacaaagacgagtgtttccagcgtactttgtcctcactcgcacgcttcttaggaagttaggtcactcatcatgaaattactccaggccagacacgcttaatagtggagttctttcgtgatgggctaccgaaaaacaagatgcaacttgttgatataggtagta

SEQ ID NO: 169654 - DNA, 755 bp, Cannabis sativa
tgatcgtacagaggcaaacgttttgggaaaagaatcccagaagaatgtggtgagggcgactccccctcgtacaatcaaaggggaccacccaatggcaaatttggaaaagaatcccaatgatgatgaagtaattttgtccttaatgcccaatgttgggccttctgcggcccaaatgcttgaacatccccaccagcatgtgtgtaagtcgaggaccccacatcagtaccctgagcccgtccccattgaatggaacattgggctgggccttcaggaaaatatggcccagtttgctaataatagtggtcacaatgccttggctgagaatttgttgattagtcaagataaggagggcatccaagcccacgataaccctgggccaggccacaagaaacgtaaagcctcaatacactatttacccattgatgaaaagggccaacccattcctgaggctctagtgagaaataaggagtctgatagaacctttgctccgaatggatcaccgtcttttgtgattggcaagaacgactcagaggctcgagaaggaggaaggaaactcaagagtaagagtaactcttcgtcaagcaaaaagagagggagaccgagaaagagtggagctttctcaagtcctcagaaaaaccatgaatctggaagtaaaaaagtgctcgacggaatggaggaaaccaagaacactggggaagtctttgtggacattacaattcagcagaattttcaaatgggcgaggaggcggccctta

SEQ ID NO: 169655 - DNA, 557 bp, Cannabis sativa
atatatatatatatatatcacacccttctaactctaagaggtaatgagctaattgcaccaattggtttaattaagggaaaattacacaaaatactgactttttctctcttttttttacttataccagccattataatttacatttatactgtatatttttatatcttttatacggcagtatattactttttatcaaaatattttttttgtaattttttgggtttccacctcttttcctaaaattaaagtttgatgttgataaagatgacacttattcattatcacttttttttattatttattttcaaatactctctcactaatttatatatataaaatattttgatttgattgatgttgttaccttgtgacaagttttttttatttatttatttttttttacttgaaattgatgatgataaaaatgagactcaaaacatacatgttctcatttcaatttttcatcctatttcctattctttatttctccatgttcatcttcttcttcttcatgggtttctcttttttttttgtttcaaaatccatacagttattat

SEQ ID NO: 169656 - DNA, 739 bp, Cannabis sativa
ttgctccatatcatgactaatatccagtggtagcaggaacacgctcatagcatagctggacagagcttgagccaccatttttatgaagacttcttttcctgctttagacagaacttagagtcccaattttgaactcttttcctgactctttccttcaagtatcccaaaaccgcattcttattccttcccattgtgcttggcaaaccaagatacatactattctcatcagcaaccaccatttggagaaaagaacaaatactgtttcgtacagacaaactggtattggtgctataaaatatagaagatttgccaaagtttgcttgttgacccgaagcttgctcaaatagagtgagtagttctcgaactttagatgcttactccattgtggctttacaatagagataactatcatctgcgaacaacatatgtgacactctaggagcgccatttgcaactttacacccatgaagcaaccccctcagttcatacttcctaatcaatgctgaaaaaccttccgcacataagatgaaaatgtaaggtgaaagaggatcaccttgccgaatacccctctgtggaaggataggacccattgtttttcctccatgaacaatcacacaaaagcagacaaatttcttataaaattccccaaaaaaaaaaaattaaaaatctgttaggttatttttagcctacgttttgggtcactttttatagttgttttccttctttattattatattta

SEQ ID NO: 169657 - DNA, 1228 bp, Cannabis sativa
ggagtacgtatactctcactagtaactaaaaaaaataattaacaggtgcataatttcacccttaattatatcttctttgactacatttatttaaaattttcacataatagataaaaaaatttgaaaaaaattatacaagtacattgaaaaaaattatttttattttttaaacttttttatttataaaaatacatctctagtaaaaataataaacgttttttttttattgttttataatttatttgtagttgtcatgaattttttttttttcttatggttgatttgtagtcaggggcggacgtacatagttatttatagtggccatgaccctcctagcatatatgtaattctaagttttaaactttagtatattgttcaaaaaaaaaaaaaatttagtatattgtaattggcctccttagcatatatgtaattatgtatatgtgattctagcttctaagtctaaaaatttagtatattgtgatttaacatttttaataattattacatagtggctcctttcaaaaagttaaagtaaaatttgaagaaaataaaatacattttgtctacagtagcactaacaaaatcatatacaattattactttcttttataaaacgaatattatataagtgtcatttttttaaaaagtatttatttatattctttaataatatttatttagtttatttgttagttaggccattaccacttcacaatatttttcaaaaaatttgtttaaaaaaaagtggaaatcttcttgattttactattttagcaatcattttttatttatttatgtgagtagttagtaaaaattaaaaaagcaaaaaaatttaaatttatgtataagatagtaactcttattctacacatccagtttctaaaattactacatatcaatctttttctgctatgaatatagtgaagattacacttcgcaacaaaataaaatatatttttaagtgattatttgttagtgtatatagaaaaaaaaattgctaaaaaaattagcataaattcacttatatataactttcatgatatttaagagagacgtattgtattttaattttaattataatattaataatatattttgaattatttttcacttaatttataatgtagtttgactctcgttgaattttgactctggctccgcccctgtttatagtctttgtgaagtttgattttttgttgttttttagttgtattttttttttttttga

SEQ ID NO: 169658 - DNA, 768 bp, Cannabis sativa
atcgctcgggtttgaatagattcgttgaactttgtaggttgaattgaacttgctgatctgagcgagcttagatcaattagtttatgcttacgatggttgagccgtatggatcaattattttttcttccagtaaggattcgagtgttggctcgagcaaaattgtgagagtagtttagatttagatcaagaaaaagaacttaccagagttcgatcaccggatggactgcatgttgtgtgctcggccgaagggcggaggtgttgggtcgaagatgagagggaggccaggtcagagatgagagggcggaggtgctgtgagtctgaaatgaataagttgcaccagatgttagagaaggaaaaattcgactctttttaatcggtgaagttcaaaaaaaaaaaaaaaattaggaacagagatttagcgccaaataagagtatagtcattccagatgattatttaattatttttaaaataaaataaattttatctggaacgattttgataagtcgcacttgatactatcatcatcaggaataaaatttcattaatattcttgattgtgtcgcgcttaaaacccttatttgttgtagtgtcactgtctcatgggctgggcttcacttgataagtccaaagtaatgtattatctataagcaccctattaaaagaaaagggtaactaagtataacttctattattctataaatacgcactgaattcttccggtgaagggttggaaattttaaactcacaagcttgagaagagaatagag

SEQ ID NO: 169659 - DNA, 880 bp, Cannabis sativa
  modified_base (588)..(600): a, c, t, g, unknown or other
tatatatatatatgtatactagttttttatatacttgcaacgcaagtatgttaatattaaattattggatgctcctatacaacaatgcaccctttcaaatggggtattttaaataatttttggaaaattctacaatatagttctttgaaatgaatgttctcatgcatcttgttttgttattaaagaaagtatatattccaatatttttatctacgtagtaattatttaagacattggcaaaattttgagaaattcagaaaaatttaacacattgaaaatagggtttaaagagtatgtttcacgcgagacttttttattttatacacatgtgcaatagacggtttgaagattaatttatatatattgtaaattattttgaatttcctaaaattttacaaaatgtcttaaattaataattataacatacacgactataaaaaacttggattaaaaaattcttatagacgtcgaaatcgaaacagttaggggttgtatctgtacaattattttagtgtggtgtattgtagaagcactcataactttttattctatttttttcatactcgtgtatattatagttatttaagnnnnnnnnnnnnnttttgagaaatttgaaataatttataatacagaaaccattatttaaatagtttattttacacgcgtaaaaaataaaagagtcacgaatgcaacatactatttgaaccttattttcggcatattaaattttttttttgaatttttcaaaattatacaagatgtcttaaataattacaacgtacacaactattaaaaaaattagactaaaaaattctttcaaatactgaaacagttaggggtacatcatgcgtttctttatatccttcacgatatacatatc

SEQ ID NO: 169660 - DNA, 505 bp, Cannabis sativa
  modified_base (449)..(457): a, c, t, g, unknown or other
aattattgtaatcaaattattctcacacattcacataaaaattaaagacataagttaaaagagatgtgttttttttcgaaaaaatttctttaaggcccttaggaagatgaattgtaaaataaaaaaaaaccaagagtaatttgtggcataaatatctagttgaacttttgcgattttgtaagtacacagtatttatttgcaattgagagttaaataatttatgccacatattattcaaagaaaaaaaactgtttgatcatatttattttattatctatggctcttgttgtttttgttctcttgtaatagatatgttgatttttttcataaaaataatggtcaagtctctaaattcttcctcatatcctccctcaccaaattataagggtgttcattaaattgtccaaactgctcaaactgtccgcactacaccgcaccgcaaaaaaaannnnnnnnnaaattctttgcggtgcggtcgcagtttgaatttttcctaaaccgcgcg

SEQ ID NO: 169661 - DNA, 802 bp, Cannabis sativa
ccggtcgagaggtgttgatcaaattagttatccgaacaatttcggtttatgtcatgagctgttttagacttttaaaaggtctgattcacgagattcaggccctcattgcccagttttggtggggatctagaacagccaagcatcaagttcattggggggattgggagaagttatgcaaggacaaatgggctggaggtatggggttcaaagatttggaagatttcaatcaggcgcttttagcgaagcaaggctggaaactggtcacaaacccgaacatattatttgctcaggtgttgaaggctctctatttcccaaatgtagagtttcttgaggcgggcaaaggtgcttggtgttctaatgtttggaggggtatcctttgcgtatgagaactactaatgaaggggacaaggtggcgtgtgactgatgggcgcaaagtaagaataaatgaggatcgttggattcctagaggagccccctttctcctccgaacctccgctaaggtgcctcctaatacttatgtggaaactctcattaatgaaacaggcgattggaagttggaggctcttaaggagaggttgaatgtggaagatattccttggattttggggatccaaactatgagaggttgtggtgaagatgagctcatttggaactatacagttgatggagagtacacagtggctagtggttatacaatgatgcaaatcgagaaaaaaggagcggagacgtcagacaaatcgatactacggaagtggtggaaagaggtttggcactcaaacttaactccgaaaatgaagaactt

SEQ ID NO: 169662 - DNA, 1269 bp, Cannabis sativa
  modified_base (1120)..(1126): a, c, t, g, unknown or other
cactagtcattgctcataacattcatcacatggttaccagagccaagcttgtcatctttaaactaaaatcttatattgccaccacatcccaagttaccgaaccaacaactttaaaggtttctcttgcaagtccaatatggaataaagcaatgaatgtggaaattgatgctttaaaaagaaaagaaacttggcatcttgttattcctccaccagatgctcctatagttagcaacaaatgggtgtatcgggttaaatacaacaaaaatagctcagttgaaagatacaaagctcgtttgggtgccaagggctttcaacaaaccccttgtttggattacatagagacatacaatccagtcataaagccttgtacgatttgtgtaatatttactcttctagctacttataattgggaaatttagcaagtggacatcaacaatgcttttttaaatggggaacacaatgaaactgtttatatgcaacaacctcctgggtttgaagatccagcttttcccaacatgtttgcaaactcaacaaggctctttatgaactcaaacaagctccaagggcctcgtttgacaagctcaaatattctttgacgcaatggtgttttcacaactgtaaatcaaacactagtttgtgttgggaatattttaccaggatctaggtttattaacaagtatattgaattaacatcctaaatttgaatatctctaaaacaataaaattaagcacataagagtttagaaaaccttacattgattgtagcggaatataatgactccttctgctcaaatttctcacccttattcctttctgtcgtagagtattatcaagatctgagcttggatctctttctctccttcaggtttggttacaaccgtcttttgcactatgattgagtacttgacttgttatgtgtgggcatggcactctatcactatgggcgaattggttgaagaacaatgaaggagggttcgaatcactatagaaggtgtatctcatctactagtcgtcggagaatgaaaactaggtttggtttggttgaagtcaatagttggatgagatgagagcatcatgttccttttatagcatttcaactagggcttaggtttgaattatnnnnnnnaaaaaagaataaaatatttggcaaaaattcactagagttgtcggccacttaaggaccaatctctatttacaattttgccactttatttcaaccaattattcttctttcaatataatacaatatttccaatttcaatcctataa

SEQ ID NO: 169663 - DNA, 724 bp, Cannabis sativa
tcaagagatcgagtctctcggtctctcatttgatgtatgatgatgacactaaagttctttattaaagccaacttagtgaatatagaaaatcttatagaagctttgtcaaagtactactactagtcaggctaatacaatcagaaatcgaaagtctttttctttaaaaactacaatgactaagtaaaaattgagattttagagaagatgggatttgaaattatagttgatgatgagctatttcttagcctctgattgtcaatggtaatatggctaatagtttcaagttcattgtggaaaaagtcataaatcgtatggaaggatggagggcttgattactgtcgcaagctgctaaatttgtttttattagaaatgttatttcggctattcctatatatttattggctgtctttgatcttcctgtcaaaactaccaacgcccttgatgttgcatgtaatgccctaacgtttagggacgctatgtgtgtgcttttataaatttatttcctactaatcaaccagtttaggaaaaagtgtggttaaaataaaacccttaataatttcaaattagaataaaaacttccataccaagtgtactattataatatggggatctcttgtttataaaattctttataacaatttacaaaaccactaatacataagtaaggttatattttcaaacatagaaaaagggttgatcttgcttcccggaagccaagacatca

SEQ ID NO: 169664 - DNA, 550 bp, Cannabis sativa
  modified_base (481)..(505): a, c, t, g, unknown or other
tgggttccaaacccaaaaaaccagtaagaacaacacgaatttaagccccaaactcaatcaatttcaacctaaacttagccaaaactcacaaaccatcaaatagggtttttaaaaattatacagggagtttagaaaatacaatttcatgcactaaaacctaaccatataccctgaatttcagattgcatcaatacacaaagtcaagctccaatcttgaacattactcaacaaaattcataaccaaaagctagaactctcaagctagcttcaactatagtttccagcaatcaaacaacataaagataggatttaaacatggagaacaccctagaatttcatccaatgctcatccaaacacaatcccacacaaaatcaaaagattcaagtataaacatgctcaaaccaacaaaagaacactaacatgcagcatatcatcatcatcaacctatttcatgctctttctgttggaaattattttacnnnnnnnnnnnnnnnnnnnnnnnnnatgtttattaacaccctaaatattaactttctaaaacgatgaaat

SEQ ID NO: 169665 - DNA, 710 bp, Cannabis sativa
tcttagcttttaacaatgttgttgaacctttactaagaaaaaaaataaattagttatggtcattttgtggcgtatttagtttaagagaaatagaatagtgcattataacatttctttgcctcctgacttggtggtgaattaggctcttgaatttctttggaactttcaacattgcaaggctcgaattaggcctcctctttctctgggatagatgacctctttgtcttctgatgaggttgtttcaaaatggtttcatctactggctggtactatcaaggttaaaagtgatgttgctattgaaaaaattggttcctgtagtagtcttggtatggtagtgtgtgatcatttgggtagcgttctagcctcttttgtttggtacctgaaaggttgtcttgatccttaagtggtggaggctttgatgcttcggaatgtcatggtccaatgtcactattttcggtatgacaatatcatctttgaaatagattgcttgaatgttatgcaaaaagtggtgaacaaagtttctctaatgtcctcttcggatcttgttttaaatgacattgtcattctttgtaatggttttagagatgttagttttttgcactgtcgtagagattttaatattattgtccacactttagctaaagtcagtcttacaactgttgggattttatgccctaaataaaacacattacaatctaatctgatttgtt

SEQ ID NO: 169666 - DNA, 643 bp, Cannabis sativa
cattttaaatgggtacatatttgtcttgtttcgcctatttcttatctttggacaatttcttagagtcgtctttcctctttgatcctgaagcttccaactcgaattcttcaaaagactcacatcccgattgttttcctggttccccgacttgatgactcctgaacttattctccaactcgtctattagcaaatcgattgaatccctttgctttggaccaagttgttgacgaagatcaggttttttccagttcaaggattctcgcagcttcaattggccaagacggctggcagatcttgctccatccataaactgcattatgcctttttgatcattgttgcgacgagtattctcttctcctcgcattgatcgattatgaattaccgtgtgcctcgcagtagcatttgtctcttcatgtccaactctctccctaaggtttgatttgtctcgttccccctgttggggtttgtgcgagctcatttcctatgagttggctacccctgaatgatgacccatgtatcctaggatgtgtccccagatttcccttattcctgcagggaatttctggtttcttagctcctggttgatcatatggcatctcaccttcaaggtatcccccaatttcctcaggttgtctctcctgag

SEQ ID NO: 169667 - DNA, 833 bp, Cannabis sativa
tataattacattttgttaggctctattctctttctataccttttcagaaatgctaaaaggcatgtggtcctaattcctaaataagttctatacgtgtcaatatttttattggtgtaatttagtggatctcatatagtttaaaataagataataacttttagagaatatcgttagcgaatcgtaaattgacatgttaaaaaagtactaggcaccactaatattcaataacaatactctattgttataggaattactatgtagcttattaaattgataaatatggctatgaatttatataagcgcgctacttggtaataagaaagccataatgtaaactaaacatcttagacttcgagttaatataaggccttaatttacatggtaataataaaaataatgcgacaataaaaaaaactcacatacttgtcttgttattatatatcaatataactaacttttgtgtaattgagtaacaatcctttccaatccaaatcacttctttccaaaagcatgtatggttaaattacaagatacttcatatatacaatagtatatatttggaccaaataaattatattttaattgagatatacactaaaaaaaataacatcaaaaagtatcaaatgtaataacaataacaataaataatcttgtcgttgttatgtttgaaatttcgttgatactgtttgagtttgactgctcttgtcccctacgttgatctcttagtaactggggtgaagctatttgtagtgagtaatataaaccattgttgaagtgtagtgggttattttttatgttcttggtgctcaagcataagttcactttatgatcat

SEQ ID NO: 169668 - DNA, 624 bp, Cannabis sativa
tacaatttacaaactttattattatttcagtgttataagcttcacgaattaccaaagaatattggaaggttaattaacttgcggtatctagatattgatggttcacctctaaaagagcttcccaaaaaactaagtactataaaatccttgtatttcttatctgatgtgattttaagtacgggaggatttaaaatgaaaaaggtaggagagcttgagaacttatgtagtatttctgggttggaaaatataaaggatgctagagaagctacagaggctaatttgaaggacaagaagtgtcttacgaaactgactttgaggtggaaacataatggtggtgctgctgataattcagaaaaagaaaaggatgtacttgatgcgcttcgaccacatacaagcttggagtatcttgggattgaaggttacagaggtacaacattctcagactggattggagactctgcatttgttaatttagtatcagtcaggattgtcggttgtgacaattgtattttactcccacttgggcagctaccatgtctagaatggctgtctatttcagacatgatggagtggaaagattggtcatttgctattcttgaagaagaaggtcaaatattattccct

SEQ ID NO: 169669 - DNA, 515 bp, Cannabis sativa
aaataaaagctatttagaatttttgtcctttaatatatactaaatcatattcctgtaaattttgacatgtactgaatcatactcttaaatttttgaggtcgttaaattttttcttaaattattaagattatttaattcaaggactactaactaatttcgtttaatttactaatgcaatgattatttatgtactaattgtattatcgaatttcgatatttactaaatcgcctccctaaactttgaaatgtataaaatattgtcccttaaattttctttcatgtcagacttctattagtaaaatttaaaaaaaataaattaaattcaacaatcttaatagttcaatttttttaacactctataaagttcatatgacataattttatcaatgttaaagttcaagacaaacatcctaattagcaaaaaataaataaaagtctcatttaataggatgtataaaggtcatattgtattaaatagcaagtaacactatatttgaataaaatattatattgta

SEQ ID NO: 169670 - DNA, 575 bp, Cannabis sativa
  modified_base (311)..(336): a, c, t, g, unknown or other
cttttattactttttgtttatatttggctcaaatatatcactacactattattttagaagaaattacattttaatttatttattttaatttttatattttttaaaatatacttacttattttataaatgatgtttgttataccttttagatgtttcttataccttttagattaatacaaattatgtggtatactcaagtgaaaaataagagtatattgagcaacctactaacaaaagtaagtacttttttaataaaatataatatgaaagtattttttgctaatgaatacaaaaaatagatatttctcaannnnnnnnnnnnnnnnnnnnnnnnnntactataagtttttttttttttttatcatttcacaaatatattaaagcaacaaaaaatttacaaaatatgtttatacagaatttaaaacatctttacgatttttataatttaatttattaaaaatagatctttttatgtagtagtcttgttaatttgtttttgaatttttgttatatatatatgttattttttgttgttattttattgttattttgatattatttttctgttactttta

SEQ ID NO: 169671 - DNA, 562 bp, Cannabis sativa
tcagtcaaatttttaacaacacggccagatctgagaacagggggagtaacacaattccctcgattcaattcgtcagagcatctcttgtttgcagccataaacatactgaaatcagtgcggatatcttcctgctggataatagtcgtcaacgacgatttcagagttaggggagcaggaaaatcatcatatagggcagcttcttctgaatcaggtggcacatccaaatttagcgattcctcatcctccgagaatgctaaaggttcaacacccagcacctcctccatagatttggttttccgaacatcagatgtggagcatggtcgacgttttttggtcttctttgttgaaattttcaatttcccctgcgccttagctctggttttcgccatagcaccagctcagagagctgctagagcaaggagagagaaaatttagagacagaaactttttttcgaactttttaaaatgtccaaaagttacggccagtaactttggtgatcgcccgtttaaaggaaaactcctagagagtaatatgttagttaaattaactctagttcagcac

SEQ ID NO: 169672 - DNA, 771 bp, Cannabis sativa
ccagaatgggactggttccaactatccttaacagcatcataaaaggacggttccgtaagccagaagttttcaaacatgaatcttttatgcctcggacgaaccatactatcatcattaagggttatcctaagaactctatgatccgatccataaaatcccaaatggtaaagagtagtgtgaggaaaggtttgttgccaagtgtggttaacaactccccaatcaagtctttcacacacggtgccatgtttccaagtgaacttggagccaatcgggtttaaaggtaaaagggagaatttactaacaaaacgttgaaaatgggtcatagcataggtagggggattagaacaactggaacggacacttctagataaataatcattgaaattgcctaggataagccaaggaagtaaaggagcgttatcaaaaagtctttctaagagcaaccacgaattcattttatcaataatatatggagaaccatagtaacatgaaacatgagtacttatattgtcattaaacgttacaatataatcaacatgattagtagaggaattcaaaatattaacagatacatccgaagtccagaaaatcaaaagacccccccccctagacctattcttgggacttcaaaaacatgaacaaaaggaagactacgacacaagtagtccccacgaccagcagcagctttgatctccatcacaaagagaaaattcggtctgtgttttttaacaaaaagggagaggttacggaatgcccgagggctccccaaac

SEQ ID NO: 169673 - DNA, 716 bp, Cannabis sativa
aatagcttcaaaacgcaagttaaaccgtgtcaatcagttcaatattgagggagttatgactattttattaaaggttattcagcacccagtgaccaagttgacatccagggcacaaattgacattctgtcatctatctagatgctgagtaagtggaaaaacgtcacaaacttgtattttctaatgcctaactgatatgttaacatcacctggtcagattctttattttggtgaagttgttcaccagttctcaaagatgttactttttggagaaatttggtagattcgaaactctccgatttttttccatatttcaccttgttggaagggtgaaatatcacagtatgaatttaacctgtcacaagtcgtagctctcatttactacgaaaaaatagtcagatggtcgagacaaaattagattttgataaacagaacccagtgcaccaggctacatatcaactaggaggttgggtgcttcccaaataacttctaaagacacgttttaatacttctaaggcattcgagattgtgaacgaggtatcatatcccattttgacaaaaataataaaaatgtctggagaaaaatttacatttgaggagcagaaacatgcgaactaggttgcacgtcaatttgggcacagggcccaatgcccatgtcaacttgggcgttggggccttattttggctcccaaaggatctcgtttgctccccgagatca

SEQ ID NO: 169674 - DNA, 662 bp, Cannabis sativa
  modified_base (609)..(620): a, c, t, g, unknown or other
attttattactttattctcaattaaaaaaattatatggactctttttttcaatttagtctggtacaaaacgcagttttttttttttcatcaggttcttcttcattttgttgtttcataattattataattttgaaatataaaaaaagttacaaatttgaaatgattcacatttaataaagttagtaattgtatatgagagccatttttttagaaaacgttgtaaaacattgagaatttaatagcggcgtttttagtgccaaacctaacgttgatatctttatttaatgccctattttggctggtaacatccatatagatgtgtgatatcaaatataaattttaaacactatataaagaggtttaaggtgtttatttgaaaatgtacttttttttatcaacaagcatttgctagaaaacacaatgtttgataattcttaaaattatttcttagagagtttcccaagagaaataagcttttcgccaaaggtttaatactttgtttaagtcacggtaattatcactaatctacacttaaggttgtaaatgaatacttcctttcatgttcttttttattagagaacattgtcccacatggattaaatgtaaannnnnnnnnnnntatataagaacataggctactccactcattgccaattggttt

SEQ ID NO: 169675 - DNA, 1050 bp, Cannabis sativa
ggcgacgctcctcgactgaaacttgttagactctgtttcgtctgtttctcatttttcaaatctgtcgttcttatcgatctttcttgattcgattctgcaatggctactgatgatcaaagctctacccatggtgtcgacaatgacgggatatctacaatggaaggagaccctcctaatcccacggtacaacatcatccgaatcaacagactgttcagccaagaagctttcttgaagatccatcacatccatactatttgcatcatggagacaacccaggcaatgttctagtttctcaactcctcactgggcaagacaattacatgtcttggagcagagcaatgattttagccatctcagtcaagaataaactcggtttcttggatggtaccatccctaaaccctcttcttctgagcatattatgtacaatgcttggtttaggaacaataacattgtgatttcctggatattaaattctgtgtctaaagagatttcttctagtatattgtatgatgagtctgcagctgctatatggtccgatcttaaggttcgttttcatcaacgaaatggtccacatatatacaatctaagaaagagtttgatgaatttgaagcaggagaatcaaactgttagtatgtattacacgaaattaaagactgtgtgggaacaattatcaaattatagaccagcttgtgtctgtaatggttgcacatgtggtggtgtaaagaaacttcaagaacaccatcacatggaacatatcatgtcttttctcatgggtctttcggattctttctctcaagttcgaggaagcatattgattatggatcccttacctgaaatcaatagagtctttcaccttgtaactcaagaggagaatcaaaagggcaattccaacactgcttctgaacccaatccaggaatcgcatttgctttccaaggagacaagtctaactcaaataaatcagactctcaaggaagtaagtctcatcctcccaagaagaatcggccgttttgcactcactgcaatgttcttggtcacaccattgagagg

SEQ ID NO: 169676 - DNA, 672 bp, Cannabis sativa
agaaaaaattcttttgtaatgttacgtcttcacccaaacaagttacaaaagtatctcaatgcttttataattcgggggcatataggatataggccacaactatactccaccaatccacaaaatatatctcaaagtcattgtcgacacgttattttacgagaatgagattttaaaaaattttgccatgaatatatattccaaatctcatcttggacagggggccaagtcgatatatcgatgaggtaaaaattaatctcaatgtcattactaacacgtcactttaagagtatgagattctaaaaattttcaccatattttttcaaaatttcatctcggacaagggaaaagttagtacactgataagataaaagacaatgagggctctggaaggagccataactcaaaacattcaacttaacaaagacatctcaaatggcctacattagaaattttgacaagtgagtcgcgtgctaaaattgagtacccaaagagttaagacccatgtcgacaactcgctcaaactagcaaaagcgcaagccaccattggcgataaaattaatgttatcgcgttacaaagatataaagcatcagagtaaaataagcaaaaaaaatatattcaacttaaaattccaaagtcacaaagatatggaataaactaagttatatatgctt

SEQ ID NO: 169677 - DNA, 508 bp, Cannabis sativa
gcccaaaatttaaaatgagagaggcataatttttttttataaggcaaggggaaaaataaacttaaaaaggataaaaaaaaacaattttagtgggatttgaacacttagtctctattatatatgtaatttaacttaaccattacactaaaattaatatcatgtttataaatatcatattttattacaaatatgtcttaactaattaaaatacaactgtatgaaagttaacttaaccataacactaaaattaatatcatgttataaatatcatattttattataaatatacgtcttaactaactaaaatacaacatgtatgaaagttaacttaaccattacactaaaattaatatcatgtttataaatatcatattttattataaatatatgtcttaactaactaaaatacatgtatggtaggggtgtgcataaatcgattcaattcaatgagaaccgaccgaccgatccaattacaaccgaccgccaaacattagatatccaattgtga

SEQ ID NO: 169678 - DNA, 516 bp, Cannabis sativa
ctctttgcattcgaaattcagcagccaatactgtcgtggctctgcacagaattgggacgaggttctttgaacttcagaatctatccaacaacctaagaaggactgagtctcctatgacaaattcagtccctttgatcacagcagcgagaagtttcagtgcagatcacaggagtttttccaatgtcgttttttctgatgcttcatggacaagggagaacgcatgaatagcagctgtatgtgttgatattcacaatggaagctggtctatccactcccagaaaattaaggctttttcggccttggaagcagaattttgggctatctatcttgctctgtccagtgctgttgatttgggatggcaagaagttcacctcctctctgactcaagcattgctatcaaagccctttctagcccaggggatgcccagattggaagtttgctaatgttttttactcaattataaacttgtcaaaaaaatttctgaattgtcatttcttttatattaaccgtagtct

SEQ ID NO: 169679 - DNA, 713 bp, Cannabis sativa
tgattcaagttcaatagcaaaaaaaattaactctaattcgatgatcttatattaaggtttaagaatgcaatcatgttgtttaccaagaaaaaaatatggaatgaaattatgttagagtagtaattaagataaatagtatgtgtactctaacacttatcttattgtttaactaattcactatgcatgtttattgattagtgtgatataattttttagaaagttttgacaaaaacaaaacattaaaacctataattaatataggaaagaatatatttaattattttttaaatatatgttatgtataatctttataatatatgtaatttgcgatagtattatgacactactaaattttttctcaatctaccaaatttttctacatatatgctcaaaatcgctcgaagagcggttttttcagattatgtaaagtctctaaacttaattattattagcctaatttataatttggtactatttaatgcattaataatcctacttactcttttcattatattcctaaaaattttgtaataattaatttatatttttaacaattattgcactttataataatttattttagatttcagtgacataaaattggaaattctacaatgcacaaaagaagtataccaatacactcttatttgtttcgatatcgaaaaaaaattattccaattttttttcatagtcatgtacgttatagttattta

SEQ ID NO: 169680 - DNA, 538 bp, Cannabis sativa
tttattgtttgcccaactgatatatgccagtgataaaatacaaatatggtaggagaatgaatagagaggggaatgatgatgtgtaattgagttatgactgattagagagagagagagagagagagagagagagagagtgttggtctgtatgttaggcttcttttggttgtaataaagtgtgaggagggagcaggaaagaggtaatgggaattattttgatgtgtttgggagacaccaggctctctaattcctggagggctctatcttgctaattgtagtttctttttactgaattaatacaattactcttgctggagataacttgaactccagtagagatttctcttcacctctctgttactgttttattgagttgtgaattcaaatggaattttcaaactctagggatcaataatacacataatttggtattatacatgttagaatattagctgtatattaggtgtaaaagaattagggtaacttgtatttagtagtttcctattttgttggtagtttcctatttcctagtctccta

SEQ ID NO: 169681 - DNA, 841 bp, Cannabis sativa
aaagaatatagtgccaaacttagaattccgtgagtagtgtgctttgggaaagtcaactaaggtgaagtttggtactggtatgcatactaccaaggccatcaagaatcatctttagaggaggatctagatatattttgtcaatcattgattacttgtaatatacatcttttctatgtgtatcgaaatttatgtattctgtgacttttaggtcaagaattgataatttatgtgaatttaacactaaggaatgaaatttgtattactcttatcatttaagaaatttatgctaactggtgcggagttgaaaattctaactgggtaaaatattaaagaatcataaaatttataaaattcaactgggtaaaatattaaagaatcataaaatttgtaattttatcaagtatggaaattattattaggcttaagatgtttaaattgattaatggaatttatttatgaaatactaagtgataaaaccttaaaagggagaatttcagtaaatttgatatccgtgtgtgaacctttcatgcgtgaatgattaatttaggataaaatgattattaatttatgttcgtaatgaaataaaatcataatgtaacaattcttttattgttacacaaatttatttaagttatttaattttatagtataattgagagtggaaattaagtgggtaggtttaggggtttttaagcaagggatttttttttttattaatatactaaaaatacaatctattaacataaataatcattgaccttagatttggccaactgacagtggagtcatattcaatgctgatgcttgccacgtgctgcacaataagaacaataaagtaaat

SEQ ID NO: 169682 - DNA, 957 bp, Cannabis sativa
taataaacaaaacagtttaagtgccggttagacaagaaatccttgcaaaattgaagtgccggttacaaaatgaatgtaaacagtgaaaaggagcagctaacttacttcccaagaactaaaaaaaacaatgaacaaggttggctaatagctgttaatttaccaaaagagagtgtcgccatcgccatcaagaaatgcccaagaaagtatatggctttactctgaactcactgatagtggattgtttatcagttgtgagtctaattatcctttgacaggtgactgccgcggtggttcgcaactttaataagcacacattattgataattaaattataagcctaagctaaatgtctatgatcaagaaaggactcatgtaagaaaatcactatcaataagagcctagcttacacttggtcaacttacttttaaataaaaagagtaagagattagtgatgaccttctctgaaatatgagaatagaagtgaatacccacccatgctccagtatatctaatttctcaagagtttcattcatgtgttcttgataaatgccaccaccccttgtgataggtatgcacttccctatcagaattcacaacatgtctttacagaatttagaaaggctaaatatttactgaacaaaaaatcaagcacaagcatagaaaaggagggaaagattctaatgataagaagtaaagtttgaagtttgaatatttccatataagttcaattttcttgtaattttaaaaagcaatctgttctattatccaagcttgtcaaagctaatagcctaatataacaatgattgctatattcgtatcatgactagctaatatccaatggcaataatctaacatcttgctcttatcaatggagcttgttgggctccaatctaaccaaacactactacaaaactccctttagaggcggtttttaagccctttcagcgtcgggtttcg

SEQ ID NO: 169683 - DNA, 512 bp, Cannabis sativa
tttagtgaaaacagagagtcaatattgtcgtttgttgtaggttggttgtcgttttgggaagtggagaagctgcagccactgttttctgaggaagagacgacattaaagctcatatgctcaggaaactcgatgccggagagagcagagccattggggctgttgagattgttgtggtttccggctatggctatgaaaacgacggaaaagaccaggagaatggtcaatataaacgacaccttagaagaagaagaagccattgaaagaaagaaagaaagaaacttttttcttcttgtttgtttctcgggaaaatcctacaccaatgtgaaaactcaaaagaatgaaacaaaacccaaaaacccagcaaagcaaggaaaaaggtcagattttttttttttttttttttgctatgcctctcaaagaagagaactttttctcagaaatcaaagacccagaaagagaaaagctctaaaaatcaaagcttttctgggattttggaaaaaaaaaaaagaaaa

SEQ ID NO: 169684 - DNA, 1332 bp, Cannabis sativa
attatatattaatatagtaatatatataatatatgaaaactatataattactatatagattgatctatatatatgtgcacgtacgtgaagaatggtgtatataaactagctttcttgatttttgatatgttttaagattgaatataatttgttgtagtttttaaggtagtatttataatagctagaattcgatttgtactaatgatgatgtgaacattcgattcaacgttgtttcttattctcaaattttcaaaatatgacaattgatagactcgtttggctacaaaataaaagtccattaattaatatataaaatggactagtcaaatatctatattatactaccaaggaagaggactactaactatatatatatagctactagtaggacccatatgcaagtgcaaggctgcaatatctaatttccttagtttgatcgaattaagcacttatagaatacaaaatacatttagtaaggaaattagaatacaaaaaatagaaatgtagttatttgatactgtgattagtcttatctctgtgaaatagtttttagtatttagttttgtctttgtgatatgtttttgaatattttagtcgtgtctgtgtgacatgatttcgttttgttttgtttcgttgttggttttttttgctctctgatagctcgttatcaaatatttgttagtggttgagaataataagttttctgcgactaaatggattgttattagtgcagttatttactttccacaataattgagtgttcaagctacgaggttgaatgaacctactgcaacaagttctactattgagttttctgagcagtagatgaaattgaatataggtgttcttaagattaattgtgatgttgcaatctttttcatcttattttatttttaactttttttgtcaaacgatttagaaattagacagctgattatctggctcgtttttctaattctaattttgatcgtgtctctaagagaagatgttacgattggattgtatactattattttaactgatggctattaataaaattgcatgatttattaaaaaaattagttattatttaaaaatcacctctaattattacataaacatttcatataaattttgtttatatatttttaattgaaatgattgaattggctaggatatagattagtatatttaaaatattactcaataaaaaataatatttcttgatttatcacataattttttaatgaaagtgttaattacaacctcctattataacttttagtcaaccttcacgtccgaaatcatatgccgaaatattttttttcaattttttttttatagcggtattcg

SEQ ID NO: 169685 - DNA, 555 bp, Cannabis sativa
gaggcagtaaatcattcaaggattttccaccttgtaaaacgctctgctttacaacagcaagaacatcactagaacacggggaaagaagctgaagaacattttgcaagtaatctccagaaaccttggtcgccaaacatttaatatcgtgaataatctgcaattattcacaatatctattaaattagtttgcaaacataagttgtcaattcatgtttgattcttttctgagcaaaattattttccttaatgaaatctagtgcgcttatagttgcagaatccagaagtgtgacattttggactttcccaccactttcctttgtacaagtgtcaaaaggataaaccataaattaaaagatttgacaggtgccacaaatgacaagtatattttttgaaaataagaattacgtacataaataacacgacgaaaaaaaaacggttttgccaacttttagatttttttttgttgtaatttacttggttagttgtgtttactgtgttatatattttagggtttaaggtttaggtttaactgtgttatacatttgtcgataagtc

SEQ ID NO: 169686 - DNA, 525 bp, Cannabis sativa
aaggatgaatgttggattcccaaatacattttcaaagatctctaggtgctctgaacctatgagactgatcacataagtaagcagatttaactttaaactctcccacattatcatctttccaaatcacgcaatcatgcttatttccaagaatcctttctataccaaggattttgttaccaatatgaagatttgcaaaattaatttagaattccattgattcccttaaatggataggtcaactatagtcttcagcccctgtgtacttggtctaactctgttcatgaggtcttaaaattcttacaaattcaaccaagggatccatggctagttccacatatcaataagctctccattgcttgccatagagacactttcatcttttatgagtcttctcacatcctaaattcttctccataagcttgaatctctatcttttggctccactacccaaaaactctcatcaaagttatactttttaaccatacatatgacagtcagtagtctcgtgatccgtaaggaaaaata

SEQ ID NO: 169687 - DNA, 943 bp, Cannabis sativa
  modified_base (893)..(896): a, c, t, g, unknown or other
gtcgatttgaccagacccgtttaattcatttatataaagaattatgtataattttagttaatttatcaacccatttatcaatccaaacttgtttacaatcgacactatttttttaatgaaaatgttacttctattaaagatgaagcaaatcaacaaacaaaataggttgaataccagcatagacaagcccccatctgtagctaatttaaacaatttaacatgtttatatcctaaataatttatatgtaataaatataaaaatgtatactttcaattaaattgttgtcgtattagttttgagttaggcgtgttaattcaaattaatctgtttaataaataggtcatgtgtcaacccgaaaatactcaaactcacttaaagaatacctaaagttatttatttggtccgaatgttaagtaatgttatcatctctaacatattttgtcgccctagatattatttgtgtgcctctattgagttcatagatatacaaataattgcttccatatcttttgccttctgtttataatattgttggttttaaataaaataaaatggaatggaatgaaacttaattataagatgagttcgtatgcttgagggacatagattgtatacctgattttttatatttaaaaaaaaaaaaaaaaaacattcaagagtaaaagaaactgtttatcatactcttgatgtactagaaaaaagtaaaaacctattattgatgttaaagtaaagatttgatgtggaagaaaatttgtcatttttcatatgagagctttgatagttcatataacaaacaaaaagtccatcaaagaaccttgtgaacaaaaccctattattgacactagtggatggagcatggtttagtacataaactgtaaagaccgcttagttnnnnttggaaattagcagttaattatggttaattatggaaaattatttata

SEQ ID NO: 169688 - DNA, 821 bp, Cannabis sativa
atagaaggtcaacatctggcttttctattttctttggttctaatcttgttgcttggcaatgcaagaagcaacacactgtctctagatcaagcacaaaagttgagtataggagtttagctcaagttgtttctgagatcacttggatgcactcattgtttacagagattcatgttcagctccctagatctcctattatttggtgtgacaatttgagcacaattctccttactgcaaaccctgttctacattctaggactaagcatattgagctgaatttgtactttgttcgtgaaaagctttctcagaaactggtgcgaatccagcatgttcctgcagcagaccaaattatagacggtttcactgaagccacttcaacacctcgatttgattttttcagaaccaaacttggcattggtccctgcaccaattccaagtttgagggggagtgtaaagacagttagagagttagttagttgttagtggctgttgtccaattctgttacttttctgtttggtctgttggttcatctttggctctttgagccttgtatatatagtgctgttcagctcaatattgtaatgagaatcattctttcctttcattctctttctctgtttctttctgtcttcttctcttccttctctttctctctgtttctttgttccttcttgcactgcagcaatggtgagcaaagcttccaacactaacaggcccccactgccagacttgatttttcagaccctctttgtggtgaggctgctgcctgttgcttggctttactgatggcgacggagaagagatgtaattttgttattgttga

SEQ ID NO: 169689 - DNA, 988 bp, Cannabis sativa
tagagagattgagtttgtgttttgaatgaagaatcttcttttgataaagaagaatctagggtaagagtgtgagagttggaacactttgagagattctaacagagaatctttctcgactatattgtacatcaataaagatgatttgaccgtgagtagagttatagatcacttcaatttatcaaacttgaacatgtatatatctttgtgttaatttttagtgtttacactcatatgaaaaaaatagttacctgtgcaacaaaatattcataattttataaaaatttacaagtagttcaaaatgatcaacgtacacaattatgaataaaaattagactaaaaattttgttccatgccaaaataagtaaaaaagaaacaatccttcatgaggtatcctaaaatatttatcgaagaatattgtataattttttttttcttacataaagttttttttatttaataaaaaaaggtaaacaaaaaattagaaaacatcagctgtgtctaacactttttttgttgttatattactattggtataattaaatatcaaatctcatcatataccttaaaatagtaactttcatagaatatcgttaaccaatcacatcgtaccgcctctaaataatgctaaataataatagagtattgttattgatcactagtggtgctcaacactttctatagatgacgctccacgattaattagcgatattctctcaaatttattttcttaaattatatgacacttgacacttaattataatactaagaaaaacgctaatcactttttagcaattgtcatagcaatatcacacgattaattatatagtcttctctcacaaaaagtctacccactattatataaaagtttttgaaattaaattagtcttgccttgcgaataagggtaaaaccgtaatataaaccataatttccaagttagttaaaaagggcgccaagtaccgtttggacggaacaaagacgctgcagctc

SEQ ID NO: 169690 - DNA, 1179 bp, Cannabis sativa
aacacaaattcaaacatcgattcccaacacagaacgctaactcagaattcacacactaaaaccttgcttgaacttaggaaaatcaaaagaagagagactaagaggttataccttgaattaaagcactcaaattcttctaggattcactgaaatgagttgaaaaatgcacaatccctagctggtttcttgatggttcaaaagagagagaattgatgagagagagtgaattttttaggttttttctaactttctctttttcaaaagattaataaaaacttaatatttaataaataaaatccttaaaatcagagtacttatgcccactaaaagacaagataaggactctaaagaaaatgactattttgccccttaacacaaaatcataaacatacacgctatctaagggtaatttggtcatttccaaaaccccgactattcccaacatttctcgaagtctataaggattgccccgctactataaaaatactaaaccatacgaaaatgtgactctctaccggcccaacgctgcgttccactgttaccagttacaaatacgaaaaacaagaaattttacacataacataaataacacattttgaattcaattaaatctccataaatgcataaatcatgattaataacataatttcataattacaccctaattatctaataatctatcgtattaaaattaagcggtctttacaattatccccacattaaaaagattttgtgcacaaaatctaacctgaatagctctggatattgagttctcatgtcagactccaacccctaagtggcctcttccactttaatattcctctagagaactttaaccaaccctatggttttgttttgaagaactttttcctttctattgaggatttgcacaggttgttgatcataagacagatccggttgcaactccagggcttcataacttaaaatatgcgtcaggtaagatacatatttcctcaacatcgaaacacggtatacttatgcacaactgatagtgttggtggcaaaaccaaccgatatgaaacctgtctgatcttctcgagtattttgaagggccctataaacctagggcttagcttgcctttctttccaaagtgtctaatgcccttcattggtgacactcgcaggaaaacatgctcccttgcttgaaatgtaacatct

SEQ ID NO: 169691 - DNA, 1065 bp, Cannabis sativa
aatcaaaccttattgatttaatcttatttacagacctttggttgtattcaaggaaggatttcgaagccgtcgttattggtacatttttcctcttaatatacttgacaatttatatgtcttttgattttcaatttaggctatgtttggaagttaattttgatggggaaagaagtaagtgtagaaaaaaaaaatcatagtaaaaactttgttgaaccaactttttatttttgtgcaattctttttatatcaagcatgagaatttttttttaattttaattttttatattattttcttcaacattttctttgtttctttcttctaaatagtcttggcaaaaaaaaaaaaaaaactttagggattaaggtctagtggcgagaattgtattagacattcttgcttgattcgaattctcccagactcaacagcttgggactactaggaggtctcttggttgacaactacgattatagcaactaacggagtaacttaaatcgcaattaaaatccgtatagtaattcacatagaaactattggagaaaccaccgaaacaactcaaaccgtaaattttaaaaaaaaattaaaaaataatatatggaataattctcgaaaaaattattgaggttactaaaatgcttgctatttttagtgctggtggttgagattttttttttttttttaaaaaaaaattgttgggattaactaattaatacaaacaaacatttaggtcttgatatggtagaatgttgaattctaatatttatgtatgtgacgtgaatatgtataattagatattttgttttggtgcatgcagtctggtggagtgttcagatatttgtaatttgatgggtgaggaagatgatggtccttgattgaattacaccattaattttgatacatttgtacaatgtaaattactatttgtttatttttttttgtaattaattaaagcgataattgttgaagtatatacacatttatatttcattagagaacacctgaaaaataaagataattacataaaatattatttttttgtaaactttttacacttttacattttaaga

SEQ ID NO: 169692 - DNA, 973 bp, Cannabis sativa
tatttttttgtcattcaagtttttgtattaaggtctggaaattttttcttattttgtttaaacatcatgaatggaagttttgaattgagtattttttaagaatattgctgctgaggtatttgtttgccattgattatactaatttgcctacaaattttgtgattttttcttcttttataagttggtttttgtgtatatatgtatataaagataccgttgtcatcatatatgtttgataaaatgttttaaagaaagaacacatctccaattttgatttttgcgtcttctttaagttgagttttttttttcttcatgatattgttctggtgttctctttgttgatttggtttttatgatttagtattttatttgcaaatttttaatagctacattgatttatcatcgttttgtagtttcttattttatctttattgtaatattttagttgtttataagttttttttaatgttgtttgaatcatttattatgggcttttttcagtttaactaaaaaaaagtaacaatattataaaaatatttctagctgaccaaataaataaatatacaatccaaataaaaaaaattacataaatactatttacacacactttcaacttaggattcatacttcttgggtaaccattgtgcaaccatacaactacctaacacaactgaaacgaaaattcaaccataaaaagaaccaccattaattccggcaacttcacctaagaaaatgaccagaatcaatcaaaacagggaatgtttcgaattcataaaaaaaaatgtagaaaaactactacgaaactaaaatttaactgaaaatctagtttaatttgcataaaattaatgtcctgacttcaatttttagattcttgaaatgcaaatttcaaaaatttgaattggagtttccaaacaatccaactcaagtataattcaaaaaaattacatcaataatatagtaaaatatttatcct

SEQ ID NO: 169693 - DNA, 569 bp, Cannabis sativa
ccttaaatatgtgttgtagttgtacttagatggacattgtaatgaccaaaattcctttctgagtaatttatggtgtttatattacacttgtaatcaagtcttaactctataatagagttttagtaattaaataaatgcaatgtatagtgtgattttatttaaaataataataataaataattaaaaattctaatgttgttgtagtttaattttttatacttcttaggtcaaagtaattaaagataattaatattgttacgactttattagtattattttgaggtatattttcaaagtatttttaaatagttttagttgtgttttgtacaattttacgcttttaattgttaatattttacaggtttagtagtgaagagaagtggagtaaacttgaaaaaaaaatgtgctagaaggttaattaaataaaatcttgtcgctagagtatatgaaagtaatccaagaaagaaataatccaactacaagaaaataggcctatctcggcgggcctagccccccgttattgttctatctcgacgggcacaaaccgccgtgaatttgaatgccgacat

SEQ ID NO: 169694 - DNA, 578 bp, Cannabis sativa
gaggtttacctatccacagctcttaggtgtttgcacttcactttttctatttggattcctcttaattaagtaataggcagtgtatgtgcttctccccagtttctttaataatcatctaactttattaagaaaagttctattcattcgttcagcaacacattttgtgtgtagtctttatcacagttttatgtctttttattccaaactttaaacacaaattagtaaattcatcatttataaattctaatccattatcagttctcaacactttgattttagaatgtatttggctttcaacaagatttttccaattcctaaactcttctaaatagtcattcaaaatgtcccttgagacaactgcccttgattcttcttggtcatctttcgttcgtttccttttcctctgcttatgttcttcttctaattcccttctacatgagcctcattttgcaaggttgctgtcacagactcagtcagattgttaaaggtcaaaggggctattgaaccatgtatcgcaggcctcaaacgacgcatgaaatgttcaatcaccaagtgttggtcaacaacaccaagatatg

SEQ ID NO: 169695 - DNA, 581 bp, Cannabis sativa
attaaagaaatatagataagccaaaaattaatatcatattaatgttattgaaaatagtgtcattataatatgtggcaagtgagaattggttattataatcccatcccacttgggtatagattcctaaagagaattgttaaaaaaatactattagtacttagtactttctttggtgtcatattactattgatgtaattaagtatcagatctcacataatttaaaaaaatagtttttaaaaaacatcattaaccaattataacgtgtcatctataaaaagttttaagtactattggaacccaataacaaaatcacaatacttaactctacacttgatcaaaatattaaattagtaataaatattttctagggtttatgaaaatctgatgtgtatattgattaaacaataggttatgattaattgttgtcaagatacatgtatgaaatatgatgaaattctttttttatttatatatacatatatattaagtattagctaatttttttttgaaaatgaaagtcatcatttattaaacgatcgaacaactctgttaccaagctcggtaacagctcaaccggaaca

SEQ ID NO: 169696 - DNA, 521 bp, Cannabis sativa
ttttccccaaaacagtggctctgaaaccagttgataggtaccaattaccaagtatccagattctgaccactgaaatgaattgtaagatgaacgaaattcctatttactgctgtaacaaagtactggtcttagactcaccccctgaaagtagtgtgttgattgaagaggccacccctctcccctaactagccaaattgtttttgtttttttcctttactctccttactgactcctatatataaacctcggcaacatatctgctaactcttaacaacctaactggaccagaacaacaaataacaaacactaacaattggcatatcagtttgctcaggtagtcattgcactccattgaccttttttttcattgctgcaatcatttttattcttgcttgtcggtatgaggatactgataggaatttcctatcattttgggtataatcagtagcaagataaaagaaaatagagccaaacagtagaaacaataggaaatagcaagtatattgatattagagtgacaa

SEQ ID NO: 169697 - DNA, 617 bp, Cannabis sativa
actatccaacatatacgactatatagagataaactcagtaccttctctttataggaggctgcttatgctctccaatccaaaacccaccacttaaaactctttgaacacttattcaagctatataaatcatgcaaaaatacgttcacagaaaaaataaagaaaaagtatatatcttagatatagaagatacttttatatatttatgtttctgtgaatacaatttgttcttattgttttttactttccctatttctctctccaaagataaatcaaaatcaaacaatattaaaattccataaaaattgaaagcactttagcacaatcatataaaaatccacatttacaagaaatatataatagaatttagattgattgttacatattcttacccagctcaaggatcttaaacaattcattggagacgtttaacaacttcaaagttgtgtgcaaatatatataatcctgagtggaccaaattgtccacaacagtcaagtcagccctaaaattagaagttaaacactcaacaatgatttcagactttacattctggaaaaaaaaaaattatgtaagccataaaaataactctcctcattccaatctcgtaattcaatattac

SEQ ID NO: 169698 - DNA, 720 bp, Cannabis sativa
ataccaaacgagcccttaaaattatatatacctcaatccaagctcaaagacccaaaaaaaaaagctccaaaagccacagtttaatatcgttgccgctaagttcccaaacccacgaaaccctaaaatagaaatagtttatttatccttaaaacctaaaataaattaatttctataacgtatatctttggtcatgtgtgtttgataaatggttaagttagtggagattaatttatatctccggttattttgaaataatctaagacataggtctacaatttttgatatagaaagaggaataaaaataatgttagataggaaagcaacaactttagattggtttcttgttttaaccgatagtgatttcgacatcgaatgaatttattcaaagtgtttatttgtcaaatattaggaaaatagactaaagacttgatcacaattctaattttcgggttattgatgcttttagtatgattttagacttatgagtaattaagtagaaataattctacatgttctggaataaaccttgatttattattataaaagttgtcttgtcgttttgacatgtttggtatgtgatttttgttgttgagttatgagtttgttgagttggaattgttgtggacttgggaacccccgggttgttcaattccttaaagaaatagtttttcaaaagagacccaatttaatttttttgtgtgagacaatttgcaagaaaga

SEQ ID NO: 169699 - DNA, 504 bp, Cannabis sativa
tcaagttgtgcccattgtgattgggcatgatcttgatgacgtcgtcttgtttacaggtgttcctcctccccaattcttggttactggtgctgttaattctgaatacactcaatggaagcgacgtgattgttcactaggtcggttatcttcatctgtcactaggtcagttattgttctcgttgcaaaagtaactaattaatttattatcaaaataaaatatatatgcaaccaattagtatatttattcatattaattttctgatttattactctatgtagatgaagtatcttattacctaaattggatatttgcagtatgtataaaatcaatggtatctcactacatgattcttgcaggcaacgacaagcatccacaattgctttttctttagctcttcatgctttttggtaagataatgagacactgtagtcgtctgccatatcatccatagtttcagttggtgtgtaatctctttttgggtttacaaacttgttttttataac

SEQ ID NO: 169700 - DNA, 799 bp, Cannabis sativa
tttgtttgtagggatggatcagatgaagaaattaacagggaggatctctttattccagggctgttgcccaagataccggggcgatattactatttgtttggaaagcctatatatacaaggggaagggaagagagcttgaaaaacagagaaaatgctaatgaaatgtacttgcagataaagtctgaagttgaaaattgtctagcatatttactcgagaagcgagagaatgatccttataggaatgtcattgatagaacaatttataaagcagtttatggttcttccaaagatgttccaggatttgatccttgaaaaacaccaggcaaggcaagtgtttttgtttcattgatataatagcaaaccattttttgaaccctcctctgtagaagttgggtgtatattagtaggataaatatcttgtaagacaagaaaaagaagagaatatatatcttctgatatttgtatacaagtactcttattttatcagaaaaataaatatactatactggcactgtgtaaagttgcttttaaagattattggccttgtttcacattgaaaaagaacgaaagagaagcaacggttgttaataatacgtgtataatattctgctgcacaagaccagctatacatgtataatagcatatatgaggacatttcttgtgcatccttaagagcataataaattatgtataatgatgtgtgcacccaaaatatgcaaaaaaaattactctaaattgagacaagtggtaaatcactaaccattgataaggagtgtcatattttcaaaaaaaaaaaaaa

SEQ ID NO: 169701 - DNA, 1527 bp, Cannabis sativa
ttttacaaaaaaaaaaaatagtgtattatttaattattcttataatatatttatgattcaaattctgttatgagaataaagatggatatatatttgtttgtttgggctaattgattgggttgggcctccacttcctttttcaactttttatttttaaaaatcccactttctcttctctcaatttagcttcctcatatataatatgtgccacaaatactaatatccactttgccaaaatagttactaatgatacatcaaaataatattttttagtagaagtagaaacacaagagatacaatctcaagaatcttacttatgggtttatacaaatattatccaagatgacattttggataagaaaaatgtatgacaaattactcacagaaataggcatttagattcatcaatctaatttgcgagcagcatcaaaatgatcaataaaagaacagctcggcgacataattgtttttagataagatcaaaggcgatgtttgagcagttattaatctttttccacatgttgttaataaattgaatgtgggaaaattgtcatatttttgttggaatatattttatgatttactaacaagtatgtttattaacattctaaatatgaatttctaaaataatagtgtggtgtaattcataggaaaccaaaatcttgtttcttctttcagttgtgactgctagttaaagttggttagagttagttagctgtgacagtctagttagtttgaactgtcagtcggttagaagctcggtttgatgagctgttatctaatctatataaactctttcttgtaatcatttgtaacataagaaaaggaagaatcagagtgagaaagtgagaaagagagagaattgtatcgagagggagagagtgaatgactgctgctcttgaaggttatgaaccatggtattcatggtgttctaacccgtcaatcatggaggtttgagagtagatttctctctgttagctactctgattgaagatcaaagaattggtgcctgtaatcaacatttaatagtagaaatactccttgggggagagctggaataagactcacattaagatcggaaccaggataaaaaccttgtctcattttcttattttctctgtttttctgcattaattcttgtctggtttatgtttaactgattttgtatctggtttaaatgcattattgtgcatgtgtttgtgttgagtttgtgttgtaggagaatttacaacaagtagaatttaaacacatataaagtttaagtaacgttacattgattgcagcggaatataatgactcttctcacttagatctctaacctttgttcttttctgtcgcagattattatcaagatctgaattcgattctcttttaggtgttggattcttcacagtcttatagactatgatatgattgagtattaacttagggaaaattacatttacaaacgatatatttatctaatttacagaattaccgttgctcatttcaatttacaaaaacaacgtgcaagaatttcaaatttat

SEQ ID NO: 169702 - DNA, 778 bp, Cannabis sativa
gttcaaaatataactgccgagataagtgtgccacatgctttcatatttctacaatgtcgacgctagaaccgccgagataggatagcaatctcggcagtttcttctgaaccgccgagattgttattctatatcagcagttaagaacccacgagataagttaatgacgacggtttgttaagaacctccgtaattgattttaggacgaaaaaatatatatatttttttaacattttcccctgcattagtagtgaaaatatatacaatatgttctaattaaattttcccctgtatctaatcaaattcataagatatcaattttacatataaattttttgttaatggttatatgtatgacaactacatgttctaaatttataaatctagctaagattgtatatacttgcgagtaataaaacaaaaggaaaattatgcttgaaaatattctgtatagtagtcgatctattcttcacacacagtgttaatatcatctattgtatacttggtcttaccatcacactgcaatataagagtaaatcaatatgttagtttcttgatgaataaaattgatcaaatttaaaagaatatattaattacttatgtgtttcgaaagatattcttttggattttttgccatagttaaatctctcattagccgcatgatgtaaaaatcgcacacagtgtcattaagttacctagggccctacatataatataatatgtatcaatatttgatttatacataaaataaatgatcaaataaaatacttttcaattttag

SEQ ID NO: 169703 - DNA, 881 bp, Cannabis sativa
ctttgttgaaggtagacaaattcttgactcggttcttattgctaatgaatcagtagaggactatagaagcagaggcaaaagcgggttggtcctaaagattgactttgaaaaagcctatgatcgagtggattggaatatcctggatttggtattgtgcaagaagggttttggagtcacttggagaaaatggatcaataaatgcttgtcttctacttcattctcagtattcattaatggaagaccgagggggaagttctcttgctctcggggcctcagacaaggtgacccactatcaccctttatgtttactcgcggatgttctagggaggatggtggttaaggcagtaagttcaggcaatttctccgggtttgaggttggaaaagagaaggtttatattagccatcttcaatttgcagatgatacctagttcttcatcaaagatgatgactcattgcagaagctggtacgactagtggaagccttttgtgttatttctgggcttaaagtcaacatgaacaaaagtcaattattggggatttgcttggaggaggaaaaggtgacaaggttggcgtatcagatagggtgtgaagttggcagctggccattgacgtacttaggcatgcccttggggggctcgcctagaaaatgggctttttgggagccggttttgaacaagtgtgctaaaagactagatggatggaaatgctcatttttatctcgtgggggtaggttgactctcatccagtcagttctatcctctcttcccatctactttctttccctatttaaagctccaaaatctgtaacaaaagccttggagaagatgatgagggattttctttgggaaggctgcgagtcgtcgggtggggatcatttagtg

SEQ ID NO: 169704 - DNA, 504 bp, Cannabis sativa
  modified_base (461)..(462): a, c, t, g, unknown or other
gcaaggttctagtggggagattctaatgtgagaaagaaaatacattcgtgtacttaaaatcatctttacaagcataaaaatgatgaaggtatgtgctttcaaaatctttacatattcaatcaagtcttattttccaaacaagaggattgtctctaccatttttccacttccttgaccgtctgtgttattaaaggtttctaccaaaacaaaagagtttgggaaagtttctcccaataagagaggctcttatgtttggaaaaatattttatgaggcaaggagttatttgatcttcgtgttatttggagggtgggtaatggtaactttatctcgatttagaaggatcattggatactgatgaacttgaagcttatcacttctccgccttcttccctatgaatggagccagtggtatcctctttgggcaactcgcatgatggatgtgttaggttttatgccctanntaaaactcaatttcaatgtaatctattttattcaacatcaat

SEQ ID NO: 169705 - DNA, 1339 bp, Cannabis sativa
tagggcatgcacgaggattctattcgttactatgttcgtgcgctagccatgaatccaaaggcagacaacgcatggcaatacttgagaatttcattaaggtatgacaagaagaagattgcctctcttataattgtcttaccataagaagaagattaacatatgtcttttgttgttgttgttgttgcagctgtgctgataggaatgacatgttagaagcttgtgattcccggaatctcgatgttcttcaaaaagagttccctctatgataaacatatatagatatatatgtatggtttaattgttagtattagaggaggagattaaatacatgggagttaccactactactaattggttgagtatatagcaaaagctagcaagggcaagcaagttgggctatattattagatgaataagaaggatcccctcccaatcccatgtctctctcctattatatatattattattatcattcatcatcatcatcattaatacaaatcttttctttttctttgatttatactatagttaaatttgttgatggacacaaacaatgttgtatcatgtgatcattatgaatcatgtttataagagagaatgaaatgaatccgatttttcctttattagataattataagaataaaatttgatgtgaggtggaatggaagtaaaagagtgatatgatattgggatgtgagtaagccacacacacacacacaccaaaccaaagccactcacttacacttagtactactgagtatagtgagtgtggtaaatagagtgtacacctaacataacactatttagtattatataaatataaataaatacttgagcttgttacgtgcttcactggagaataataatagtaaataataatgacagtatccattggagaatcctttttcacagtctctgtcgtggtacaccactgctacgtgtgtctctcattttttttctttaattttttgcacttcaataattcattttctttttgtaaatgagaaaccacaaatatatatatatatatatagggagccgattttgtgcccagaaatgtaaaatatgaaatgtattcacggtaggtaggtctcagggtacgttaccattttttaaccctaattatccttagatttactccaaccctcaaatcaaataactactctatctaacggctgctgtacatcatgaaatacattcctttaaagtacactaacgggacaaaattgtatatatatattaatatgagtaatttgcggcaaaaccccccaaactatcaatttacttgcaaaaaaccatccaacctcatattttagtgagaaaatcctccaaagtactg

SEQ ID NO: 169706 - DNA, 835 bp, Cannabis sativa
  modified_base (767)..(809): a, c, t, g, unknown or other
aaccgcaccgcgaagaatttcaaaacgcatttttgggcgatgcgggcggtttgagcggtttgatgtacacccctagttattggtcggtgaaaagctgtggataatgaccactctaactttcaatgggatgacggcatattggatttgattcgaggggatgatgtccaatacttgcagagttggaagaataaggaaagaatatacatggccctcttcttcgacggtgcaaagtattgggtgactttagaggcagaccttgatcgctggatgttgatcgtatttgactcaacccttggatcgattcccccgtatgaattgaagagtcacttgacattatgggaagagttattcccaaattttttgctatagcctggcctattcgagaatcataaaatagtcgtcatccctcaattgagagtctcagagagccaggttagaaattttagttcagaagtcatcgccaacaagattgtacaacagacggaatcaaggtaacttaattacaattgattttttaataattaacttgatttaatttgcatacatatatttaattaatttttattgtctcttacagcagtgattgtgggatgtttgtaatagagcacgtcgagcataaaatgctggaacttccgtttgataatgttaacggggacaatatgaagaaattgagagagcggtggtgtgtaaatttgttctaccaaaatttagcatgaactcttatatttttttcttatatatttatctacaaatatatatatatatannnnnnnnnnnnnnnnnnnnnnnnnnnnnnnnnnnnnnnnnnnatggttacatttttttttacctgtaa

SEQ ID NO: 169707 - DNA, 576 bp, Cannabis sativa
ccaaccaaacaccacctaagtgttgaaagggggttattaatggcttgaaaaaggtttttacacctttgtcaaaaaagcctattccttctactactaagtactaaggaatttagtgaatatgcctttaagaataaacaagctcaaagagttttctagttagtgcccaatagatagaaagcaagtgtgtccaaaagatgaatcaaaacctctatttatagtgttaggattttacatttcagatcacacaccccaatgactattaccagttgtaataggacatcaaatggagattagaacgttgatcattgatgatagaaacgtctcccataaattctcaatattttgcaacatttttgtccagaaaaggcaccaggcgatatatcggatggagtaatatcattgagcccctctagatacattgacaaatgccgaaaacatcccatgcactgatttaggcgacatgtcaccttaggcagtttttgcacactagttttgagtttcgaataccaacttaaacccctaatgatgcgtgtcatttaccataacaaatttactaattaattttatttttatatt

SEQ ID NO: 169708 - DNA, 846 bp, Cannabis sativa
tctctctctctctctctcaagcattaatcttacctctttttttgttcttcttcctcttctcacctagcccatctcattgtcttttctcaacttcttcttcaagtggctattggatctagaaaggaggtggacagatctggattgagtttggtcagatctagactggggttagttgaatctaggctgaattcccttaatctccccttcttctcggatccaatgacagattggctccaatagtggtagtttcagcaatatggtgtaatggtggggtttctgtatggtgtaattgtggtggtagttgtaggttttcagatcacagtatgggtttgtaaggattgatttgtatatggttttacaagaatgaagtttgaaatataaagtttacagtatgttcattgtgagactaagtaattttgtatatgtaaatctaaacatttaagctctattaataatctgggattttggagtttgatgtgttgttagtaaagcccatgaccaaggcccagtagcaattaatcaagacttggtagatcaaaggtgtaacgccctaactcattaggcacgctacccaatatacttaatgaaaccctaatcccctaatcaggattactattaaaattagcgcagaaattaaactttttaattaccaaatataatactttttcactttacaaaataaaagatacatgtgtcgggatcctgaaaatactttacaaaatgttgctacaagttcgttacctctagccgacctaagcggcaaaacagagctcaaaaatacatcactagtagaccccaacccgcttaatctcaatatgtataacacataattaatggtgccactgc

SEQ ID NO: 169709 - DNA, 1210 bp, Cannabis sativa
ctctctctctctctctcaattcaacacgacactacgtcaattttcttcataagttcttcacaagatctcacatgttcttaatctgtaacaccttattctcactattgtgatactgaagacagtcatagctagaaattacaagctctaagcttgtaatttacatggtattatctcaagagtaaatacaactaaaaggaaagtaggtcattacccattcatcaaggagactagacctctataaattattttgttacttttataatttattgttgttatttacacgtagtgataatcatcaattaataaggctctgctgtcagttggctaaattttgagtcaacaaagagaaagaggtggcttgtcttagactgaccccttcacaatatatattgaaaaaatctcatttgtggtagaggaaaactatggctccctatagctctttgaaatttatctcagttcaaatcctagtgttattctacgctttctgatatgttcttttatatgtatttatttaaaataatgaaagttgtcaagcaagctggtatggcttcaacacatattatccaagtacctgactatagttatgttgttgcctcttttctctgttgttctctttagagtctccagcttataaagaaaaggctatggtaggtccatctaatccttctaatccaactccacatggtgttcccacaaccagtttcttaacattcgttttcaatgactcactgtcaaattcaaatatggaatctgcagggcctagaccatcatccaaattgagttttccattactttccgctaaaacatctgaaactccttgccccatttttcctttctcatcctttaatctctctatttttgagctgcaaagatctaagtttggaccatctaatagtaagatctcccttgcttttttatttttgcatggcagttgtaaaccctaaagattgtctcatttagttaatgccatatgtacttcgtgcagaaacatgtagggcattggatgaggaagatggtgaaagtggtgaaagtgagaatgattttgaagtttctgtaggaccataccctcgctatgaagacaatatccacaaagaattaaggcacaagcgagcaggaagaggtacttgttagacaatctttagggatgtaaatggggcggggcgggtgcagggattgctcccccaccctcatacccgcttcttaaattcac

SEQ ID NO: 169710 - DNA, 538 bp, Cannabis sativa
ccaaattagagtttcaattagttctctcgcactaagaattgctctgagcattgttgaaacttgaatgaacaaaaaaatattttgagttctctgtttgacaaaatatcaaaataacttccatcaagcttcttaataccatatcctaactgaacagttctaaatgattaaactctatattttcaacataatcaaataaaaagatttaatttttgttatgtacaatacaaaagatatagtgaatgatatcaaaaaaataaaacaaaacgaaatcatcctcacaccttgatgccattgatgcaaacttacttgcgagaagtcgatcatggaatttgaatagcgtggaacaaatagaaagactggtatggattttagggttggaaaaataatttgctttggtattgatcatggtgattttttgagaggattgagaatcgcaatataggtttcagaagaaagaataatcgcagagaatggtatttcttattttgggaaagcgcagagaatggagattaaatcgtaaagtgagttttgggtttga

SEQ ID NO: 169711 - DNA, 545 bp, Cannabis sativa
aaagaccacaaacgacaacaacttgactctgctctcttactgttgttcgtttactaatgaaaagcgtggtcgttttagtgcatggttgaaagcgatttgtcgttttcttcgagactacatatcgttttatgttaactgttttcttcttggataaaaatctcaaacaaacgacatgtcgtttaaacaattatgttccatttgacaaacttatcattaaacattattattactctatttggtaaaaatacatgtattataaaaactcctttccttcctcaaattttgtatgataatttttttttaacaacgtttattttaaacaaaattctaccaatcatttaagtttcttccaatttactaataaaacgatctgctaacaaaattacttttagttaagttgtcatttcacggagaaaattgctcgtacaagtttcttgctgggacttttttctgtttaaaaaacaataattttctaaattgattaataaacattgagtgattctacaatgcacccccttaaaagagatgtattgatgcactcttaa

SEQ ID NO: 169712 - DNA, 761 bp, Cannabis sativa
tagatgaacataattaattaggggcaaattattatttttctgactcaatttaatgattatgggggattagacggtgtagcatcactaattaaaagtgttatatatatatatatataaatatacatttaaaagatgctgatcttgactagttcatccaattttcatttcgctatataattaatatatgttgaattacttacattatcttataaagaatctcccattttttttatggattatgcattaaccattattaatgaggtacaacatcttgtccgaattcctatcgcaatcaaactcatgaagatgacttcacacgtcacttataaaatcaatatgcataatctgtatatttggatggaggcccaaaacaaatattgctttatgtgtatgataaggaaacaactatatatctaataaatttataaacatcatcagctaataaattattaatacataatacgtataacataagattttaagtttaagatatctaattaacaatcttagctatagaaatgggcacctatatatttcatttcaggatagcatgcatatgtatctatatgtatttctattcatgtctatataacaaatttggttgtttatgagaaattattagttgatttttttttaaataaaaaaaaataatacattattagatgtttccacgtaaatggtcagcatttagttaaacttaaatataattaattcaccttccaattaataataaatttgttcatattgtttatttttttatt

SEQ ID NO: 169713 - DNA, 721 bp, Cannabis sativa
gagtattcaactcaaatcaaatatatatactgataaaaatatatcaagaagtgaagccttcattaagtcagctgccaactggtgatttttcacattttttatatggtatctgtgatgagctaatggaatgcgtcatggataaattggtggcgaggcaagcaaatgaccccaattttaaattgaaacaatatattataatcaccttggaaacatataacgtaaatatatatgatgaggaaaaccaaatgtgtggcatggttccaacttcaatctgcttagaactagaaagtgattagattataatttttcaaaattgagctctttaacatgcagcaatatattattctattttttagttgactttgtgtggtttcttgtgttgcgtggaccagtgtactaatattttgggggttgctggactggtatgattcatttcatatgagtttgaagactgcttcaacgtcaacaacatgtacaagataacaaaaagctacgtttcataggtcagtattattattgttaatttgttattaccatttcttcaacatgtctttcatattctaataaataattacttagcattttccttttggaggagttcttgtgaaccatctattttacttggcgggaatgttagataaaaaaaatagagaagaatgaaaattctcagctcaattgagactgagtgcagcagctccattaaataggtaaagggagtaca

SEQ ID NO: 169714 - DNA, 1122 bp, Cannabis sativa
ttgagttcaccaagctcagaccccaaagtcccagaaatgttagaatttcccaaatccctgaaaaattcaacaaaataaaatatgaagtattaaaatacaggcagagatagcacaaaatcaaagaaagaagaagaagaagaaggaatcttacaaacggatcacatggttattgttatcacaggaaacatggaaccaggtgcaaggattgaccagagttgggtcccagctttgcagaacattggtggggtccgatagtctgtttctcagagcatgcaaagcacttcctgaaaccattcaacaccattaatcaaagcttttcaaacaaaaaaaacacacaattttgtttctaagttaccaaatttaattgaaaagatgaagaaagatacaaactttatgtgaagaaagccaaaaagataaaaggggttaccttcagaatttgtggagatggcaggagagagtagaagaaaggcaaaggagagaaagagagaaagggaaagaaacgccattatttacagcaccaaaaaaaatggccaaagagagagaaagaataataagaagaagaagatgaggaagagaaggtgataataaatattaaatgcttagaaaattaagaagagaagtgagttttgggtttggagaaggtgggaaaagtcagcagtcaaagtcaaacactatggtatttgttaatggcaaaaagactgtagtagtgctttcaaaactacttaaataaaccgaccaatgagagaaaaatggagtggtgtagtggggaagaaaggagacccacccatgcagagaccgtgaccttacttactactcatttaacaacaaaaaagaaagttttatttggcaagtactctgaagcttttgccgcgggtttgtctagcatttttctatatattaatatagctgttaatttaatttaatatcgagtttgatataatattttttttaagagaatatcgctaattaatcgtaaaataatatgtattgaggtgttaggtacattagagaatcttcaatagtaaaactttagagaggatacttggtgaattagatatattatgtggcaaaatattaagatattataccattggaaagaaaaaaaaaggctaattatgattt

SEQ ID NO: 169715 - DNA, 591 bp, Cannabis sativa
ttcctgcaaagacttaatctcgcaggttaggaagtctgacttgatgacgtgtgagagattgaagctaataaatactgctacaatgaagtccatgtcgatgcaacgccctcatcttccttttaccaacccagcgatcattctgacccaaaatgcggtagtctcagcccccattattcgctgtggtatcacccttccttttcacttttttgtaaaggcaatcttgacacactacgacatctccacgttccaactcacacccaatagctatcgaataatcattgggttttatgcaatgtatatggaatacacgcaacaagaacccacagtcgaggattttagttacttttacgatatagaaaatgttgtccatgacaatgacaaaaagaaactaacataagtttcttgatcatattgttttaatacaagacaataaataatttgcatatggataaatacgtcaatattattttttattacttctaataatcttataactgtgacatttttatgtttatcaataagtttccaaccaagccatcgaggaatatgattttctgggactctttatcctaccatttcacccaactttgg

SEQ ID NO: 169716 - DNA, 1004 bp, Cannabis sativa
aaacaagaagcactacaaatgtgtcttgtgctcctcgagtgaagagggtgtagtcggcttgtgattgagtaaatccctcttcaagaagagcatcagtgagtttcttatccattgtcttgaggattggcgaagtcaatagatggatttatggagtttacacacaagattgccacccgagatagaaggggggagttggagaccttgaggtattttcatgtatgcttcttcatccaaatcaccattgaggaatgcgttgttgatatcaagttgtaaagtggaccagtgtttaatagtaacaatggcaagtaggagtttgaaagtaaccatcttggccacgggtgagaaggtgtcaaagaaatccaagccttcttgttgagtgtatccttgagcgacaagacaagctttcaatctttcgacacttccatcactgttgtacttaattttgtacacccatccacatcctatagcgcgcttgttaggtgggagaggtaccacggaccaagttttgttggtgatgagtgctagaagttcattgtccatagcttggagccatttcttgaattgaatggcctgtttgtaactctgaggttcgaactcggctgtaactgcaagaacaaacattttataagcttttgaaagtttggaataagaggcatattttgatataggataaaaagtggtagtgttatcttccagcaggttgtaacactcgaaatcctggagataactaggtggccatgacactctagtagtctttctaggcacgggttctggtgtaggggatggatcaggtggaagtgttggttcttcatgatcctgagcatcattttctggtgtgttttctacaatatcgtgcagagtaatatcagtagaaactgaactgggaagttgaacaggataatcatcaatatgtgtattagtgatatgttcatttggtagaatgagaggtaaaaaaggatcaacattattaccagtaggattaagtttatgaaaaggaaaaacat

SEQ ID NO: 169717 - DNA, 712 bp, Cannabis sativa
tatataaaaattgtttgtgtagattaattgaacaaatgcaaaataaacatctcattaatgcttatgccatgtgaaaatgtggactactaagctaacttgctatattaaaagttacagctagaatattttagtagtgattctatattataataaaaaccaaaaaattaaataaaaaaaatagaacatacatatggtaagtaattgtaaaatgttataaatagtcaatggttttattatattatttgttctaaaaaataatgaaaattaaatggtgttataatattggtttatttattaagtatggagagttgaaaagtctcatatgggtttttgttgtttcttggaaaatgtttaaaaccccatttccatttcttttctttgttttcatgacatatgcaaaagagtaccaatggtacccaacatcacttaaggatgtcattaaaattagtagtacaatttactatcaattttcatataattatataaatagaaagagtaatttgcaacatcaatatacaaattaaattattagttacaaataaatatttaagtttaatccttaactgcaaataaatacttaaatttattttttggcggtagtaatacttaaattatatttctaaaactccgtaagtacttaatcatcaaatgtcaagtaattatccacgtgttattttttttattgatttatttaaactaattttttttaaaa

SEQ ID NO: 169718 - DNA, 861 bp, Cannabis sativa
caggaagaacgtcagtgataatgagggcatgcacgatttcaagaagcttggacaattttttttttcaaaaagcttaagtttttgaaaagatgaaaatggtagaaaaatatattcttgctgttttatactttgaacccaataaccgtaagaccacaatatagaagatttaatggctggaaatagaggagaagtggaaaagacgggtcataaattttaatgatgtccctcgaaaccataaaactgccaaaatcaatagcgtgcatattttcaaaatgaattatgacaaaaataccctctgtaatcatttaaaaaatacctttttattaaaagagactttttaaggggcaattgttacacccaaaattcaattggtacttcaggagatgacacgtgttaatttcaaggaatattaaccggcaaatataatgacatttttatttataaatattaaatgtaataactccttaaatgcaaaattcgatagggtatatgtgtaactcgcagactacacattccttagcgaggcacggatgtacaaactattaactcatgtattgacgagaaaccattttgtgtcaaaagacataatcacaaggatgatatcgataatacatagcgagacatcaacctcgccatatgtagaaaggtgttgatgatacacattatactaactaagtgtatagctcgaatgacgtggataacgaatagcgagacatccatctcgccataggaaggcatactcctgataaactctagctcgctgccagggttattgttgctattaagaaccctcagaacatggttgtctagtctgcaaggccttatagtcaaagagcagtcctcaagtttgctcagtacacc

SEQ ID NO: 169719 - DNA, 720 bp, Cannabis sativa
tggtgaagtgggctctttcaaagtcttatcttttatttatttattgtttttaatttcagatattgggtaggaaagcaaacccagatgttagttatattgaaatagagaaaacttttcacaagaacaagggtaaaatgcctgacgtgaaagagattcctatcgattggtctaatgatgggtagccttcaaaatcgttggatggtttgaatttagtcaggcctgttcctaagaaaggctttgactgcctgtaattttttttatttttttattttttggttgaagaaggcagcaggaagaaagaatacaggcgtgagatttaggattatttgggatgattcgtattctcctttgtttttttatttttattttattttaattcattcaaataattttatgaaaattaaatttaagttaaatatattagattaaaaaagtaagtttttaattttaactaaacatttaaaaaaaaataaggatttaatcgtgtacactttgtcacaactaaatagtagtaacggtgaggcttaaaatacaacgtttgatattaaatctgccaaaaagaaaaatatagtatttaagtgtataaaagtgaaaatatatggtatttatgtcgtaaattttcctaataaaaaaataccagaaaaattattcttattcacattacatacacataaatttttaaatacatatacatatatattttagtgtaaatctaaagat

SEQ ID NO: 169720 - DNA, 1022 bp, Cannabis sativa
ccccttagggtggtaccctcgagacccttatcatttgcatctcatgttatatttaatacttagcagtatatagctttgataatggaagacgtattgtatcaaccatgccatatgtaggtagagcgtgatacttgatccataggagtgtagagggtaaagggtatacccctagactaatccatcacccttgggtaaaaagttacctttggggtagaggtatcagtgtataccacctagactaatttgacacacttggggtgtggtgattgtttaatctgttgtgagggtacttattcatccttcccactacaaaaaatgacacttttactagcgcatttgaccgaatgcgctggcataaaatggctcaaccaatgtcagaaatttttagcaaaatttttaccagcgtactataccggtgcaattcatgaattgcgctggcaaaaatctcaaaataaactaccttatggcgcgaaccatttttcaatggttcataaacctttattgggtctaaaacaatttggggagaattttgccacgtcaaaaaaaggtgggggaaacacttttgcaaatatgtgccaacaaaaggatataagaaaaaaagttaactctctagctggaaaattagacttttgtcggtgcaaatatgcgctggcaaaagttccaaagaaaagtggaaaaattctcgcacgaaaatgtgataggtgggaagatttttaccaacgcaatgtgtgccggcaaaaatattttaaaacgatgtgtttcaatttagggtaaattataaaaaatttgccagtgcaatagagatttttactgatgcaatgaaatgcgcctgtaaaagtctatatatattaggttgaatttcttctcctttcgccatttttaaaattggattttgaaaattattttttttaatatttatatcattaatattaggtggaccaattaaaattaaattaaggggaattaccacatatactatttttttaactttttttttttctttcaaatttacggtttgggtt

SEQ ID NO: 169721 - DNA, 896 bp, Cannabis sativa
tgtctcccaatgccccatgagagctttggcttggaactatcgtggtctcgggaatgcagcgacagttcgacaactgaaggagttaatccggaagtcgaatcccaagttactaatcctctctgaagctaggctttcacaagataagttcaattgcctcatgaataaacttcatttccctgggatatgctatgtcccgcctcttggtacggcaggtggattttctctctgttggcggttaggagtggattggacaattcagaatgcggataaaaatatgatcactggaattatcgcctctgatcctattgaccgtccctggatgattgttagaacctatgggcctctggcttatggggaaaaggaagctttttggaagaatgtgggggatttcattgatcagtgcaacctccctataatccttatgggtgatcttaatggaactctaaaagatagggaatgcctgaactatgtaaattcttctagctcaacacgctactcttttgatttgagacgaatggtccatcgcactggactaattgatttgggctatcttggggtcacatacacttggtttaagaaaagtgtcgacccttcggggggatcttctctcaagagagcgcggcttgatcgtgcactggcttcaacggattggagaatagcgtggccgaatgcaatcttatcgcaccttacagccgccttttcagaccataaccccattctcttggatactctaggaggaaaacaatgcacaaagccccagttcaaatacaaaatgatgtgggaaagagaccatctcttgctctgggtggttaaaagagcatggttagtgtgacagtcagtagtcccgggatccgtaaggaaaaacaccgggtaagctgtgcaatcccacatcgcct

SEQ ID NO: 169722 - DNA, 1917 bp, Cannabis sativa
  modified_base (1860)..(1892): a, c, t, g, unknown or other
gttcgaccaccacaaaaccaagggggaaccagcagatttcattctatttttttggaattcaacaagtaatcttagtgtttccaagaggaggtaagctctagcaccctaattctttagttttttaacttgaagtttaacttgaatatgcaattttgaggtgtaggggctgttagggtttgtttgtgttataattcgatttctaagtttaaattgagttacaaataggttcttgcagttggttttgatgttttgtgtaatggatgcacaagtttgattttgaaaactcaagcttggttcatccatggcttgtttttattttgtgtacatttttggattctattgcttagagtttgttatgggaggtcaatataggtgttctggaagttttggtgaaatttggacacgatttgagcaagttttgaattgtttggggaaacttggtgcaacccggttaactggttttccagaacctgtaaaaccggttaaccggttttggtaaattccccaaacaattccttttgtcgattcgtgtccattttagagccttttttgggtgattccatgtttcttgggtattgtagtttcagttattaatagcagaaccttaagttggaggttcgggtttcccagattagggttttgggcgtgttatttatacgattatgctatgtgattagggcatctatctatcacgaggttttccgttcaggtcgaccaacttacttgaattcaaaaatgaggtaagaatagtgtagaacatgtgatatatatatatatatatgcgaatgtatgtatgtgtgaaatatatatatccatacttattatggtttgtacactaccaacacttgtacgaaaatggtacagagtgcatgggtatagtgtatattgttatatgagtacataacggtgttaccagcacaagtacatgaaggtacagggtgtacgtggtatatcacttagtggtactcagggtacgagacaaaccctaccaaccctcgtacaatgtcggtgcatagtgtatgtggtacagtggttagtaaagaacgttcttactcatttgttaatccttgtaaataggtgtatgggcgtctagatacaagtcaaaattatatgatttattatatgcttttcttactgagtttgtcgactcacagttctaccttcatgtgtaggtaaaggaaagacaaaggctgaacatgagtgatcttcgagctaggatgatgttgtacatgtcattgcggcgcgacctgggtgttcagtctgaggacatctagggttttattttgtagtcgttgtgcgacctgactaaatgtattttaaatattttgtaaaattttaattacgggatcctgacttttataaatatatacatacaagtttataaagtttattagttaaatctaaaattttaatatacacgattttacaggaaagttcttttattagaaaagatagcactataattgaaaaatcactgtagcatgcgtaagtatcaaggagttacacctctccttctacattttgagagggtcgaaagaaatcaccttcatggggaagatgaaccccagtgaaggtacccttggcagagccaaggggtaagaagacagaggttggcccagcttcaactgaggaacgtgacactggggcgagacccccatcttgggggcagataccacaagctttttcttcttcctagaagaaatgctgctcgcagcttcaagacacttgctgtatcgaccagaagtcgatacaacaaaaaaaatgggttagcgtaaggtgtgatcccagaaccttcgaagacgatggacgtggaacaagtgttctagaagcaaacgatgttgggtttttgtgccctaaatnnnnnnnnnnnnnnnnnnnnnnnnnnnnnnnnntaataaagatcagaaatcacatttt

SEQ ID NO: 169723 - DNA, 736 bp, Cannabis sativa
gccggacgtgatgattcctatgggcgtgtggtggctgttacctcagtactttctctttggattagctgatgttttcactctggttggtatgcaagagttcttctatgatcaagtcccaacagagttgaggagcataggccttgcactttactttagtgtatttggtattggaaacttcttaagcagcttttttatttctgttattgagaaaacaacaggtggagaaggcagagatagctggtttcctaataacttgaacaaggctcatctagattggttttattggttactttttggacttagtacaattggctttgctttctacttgcattttgctaactcctacgtttataatagaagaggtaaaacataaaaattatacccttttctgtcattgtactttgtaattgtttgaagaatgtaaattaaacattccaatgtaagtatgaacaggattgaaagattcaacgtgaatatatatgtttttattgaaaaatagtgctagatcaaattgatttaatcgctagaagttcatttggatgtcaatactcatttttgacactaaaaatacaaattgacatcaaaacgaagccacgcacgttataaagagttaaaagccaagcaatgtagtccagcaaattataagaggaagacaaatttattcaatgatttaagaggctttattgcttcaggactaaatctaaactgtcaaaaccgttgcctaatacaaaaaagg

SEQ ID NO: 169724 - DNA, 898 bp, Cannabis sativa
attacaataagaactattaattttgtccaatacacttttacaataagaagctagtatttaaactggaatcttggtagcttggatctaggaaataacaaccaaaatagctttagcttcacctacatctgggggaacaactggtgcaagtggaataacaaaacaagctttcatactatcattatcttcacatacaacaaccctaatcagtatttttcgaagacatcatcaatggtagcatctgtgttgaatctccatgccctagcagccaacggaggtacctgttcaccaatttactacttctgctttgatagtttaagtttttaatgatgagccatatcatattcaaggaaatagttaactgcataatgaaaaagtttcgttgggggaaggctctttttattatgaaaaaggttattttgctgattctaaattgtccaaacaaaacaaaacaagacagcaaggttctgtttatcatataaatcaaaagccttagcaaagaatatgtccacagtatcatctttatggctattatataaattcaaaaaggcataatgtttccaagcctttttaacatgtcgacattctaagatggcgtgcttcactatctccgaagtcagttagcaaagagggcaaattgaggaaggaatgatagataaaaagataaagaataggcaataggtatagtgtgggataacactcgccaaattaaatgcttaactttaggaggagtagtggatgaccaaacttttgaccaaaaatacttacaaccttcaagtgagaatgtaacgccttaagtaattaggcacgctacccaaaatgcttatgaaaccctaatcccctaatcgggatactaattaaaatagcgcagaatttaaacttttatattaatcagaatgaa

SEQ ID NO: 169725 - DNA, 650 bp, Cannabis sativa
tggttcttgctctactacgatatttttctcgtcatttataaatgctcatcttgactctcttgttctactactattatattctcgtgtacaaattttttctttttgtatttggttctttattctcattatttgtacacatcttcttttcttttgatttcattttataaattttgcataacattcaagtacattgctgcaaaaaaactaaattcaaattaagtttgactttattattacatacatatgcatgcactaaatattaaaagtgaatactaatgatcattaagggtatttcgtagtacatgtgtgtcattggattcaaacaaatgatactctgtcatctttcatagagttatttttttatttggctccataaaatctagagtccttcaagcaactaagtagttaattcggttaaaacttaaccgacttaactgactcctggcatcgagctctctccggacatgtatcacgtttcctggacagacgtcccaaattgatgcagcgcaattcggaaggacgtctcggataggcataaagcctactagaacggactatccaaaaccccttccttgaggaaaaagctagccttccagaactcttttccagacgacaaccaactttccataagacttcttccggatggacaa

SEQ ID NO: 169726 - DNA, 902 bp, Cannabis sativa
  modified_base (846)..(862): a, c, t, g, unknown or other
cagccaaatttcgggtataacacgtcacaagccaacaaagtaatgccatatcaaatcctaaaggcaaataaatgagagttttcctccatatttaattttgtttgggaaactataaaggtttcacctttagcctccacctgtccacttatgtagactgaagcaaacttccacaatccacaatattctagaagcttaaggggtaaatgttatcagtatttctgacaaaggatacgtggacacaagactgataaccaaagcccatttgtgggccctaaccgacaagaattggaccgagcacaataccaatctggccttttaagaaggaaatcttagagcacaactaagtagcttccgccaagcacaatctatatctggagaacttcaagctccatgttttcagaatgaccgattagcgcatatctggaagccaacagtagtttccatttgccaatttgcaaagaataaggaagttaccttccacaaatctcagaccaaaaataatatcaaacttaaaaaggaaactacataattaaatatcaaataattaatgcataattaattatccataatcaaaggacacgacataaaaaaataccataatgattaacttgccaagtcagcatacagtcattgcctcattggctgagcttcacacaataagcctaaagtatagtatgatttgtaaacactccattagagagaaaaaggtaactaagtataatatttattacactataaataaacacaaaacccttcatgcaaagggttggaatttctcaactcagagactcaagaagagaatagaggaagtatactcattgtaattgttggagattattttaccannnnnnnnnnnnnnnnnacaagtatgtttattaacacactaaatatgaactttctaa

SEQ ID NO: 169727 - DNA, 811 bp, Cannabis sativa
gagggagacaaagtataaataatacatgattggagaggcttgatggccccaccttggaaaacaacggagataaaattatggaataattctttttttagaattatggaataattttaaataaaagtaaagttggaattttaatgtatagttttacataaacatggggctttctattctaactcatagtatacttagtttacttgtcatataagatacataaggcctcttaagtgttttagaagtttcataatttatagtattgatatgagatattatagtgcgtagcacaatgataaaatattgtcttataattggttagtaattttttataatatttattaaaataaaataagtgaactcaatattaagttacaccaataacaatattaaatctcacaaaaatactcaacacatcatgagtacttttataatatttttcaataatttaatacccactacttttttaatctccttttataaaagagttgtggtatattcttttaagcaaatactttattggtcaaactttactttttggaaaacattgtaaagtataatattagttttcacatcttttaattaatttgataattgttatattacatttttcttcaatttttttttattaaagaaaatcaaattcaaattcaaatcacctctctccaatgtcaaaaattaggggtgttcatcaaaccgcccaaactgctcaaattgtccgcaccgcaccacaccgtaaaaaaaatacggtttgaaattctttgcggtgcggtcacagtttgaattttttctaaaccgcgcggtgcggtgcggt

SEQ ID NO: 169728 - DNA, 1204 bp, Cannabis sativa
gatttacttggatatttgctacaacaaaaatttgatgttttaacaattatacctcaattcttatcctatgttaaaaatcaatttaaatgtgtctttaaaaaattcagatctaacaatgctcctgaactaggttttaaagacttatttttacaaaatggtataatgcatggctttacttgtgtaaaatatcccgaacaaaacgttgtagcagaaaggaagcatcaacaccttttaaatatggtcgtgccttgtatttttaagaaaagttacctacataattctggacagattgtgtaatgatggttgttttccttatcaactgtacacctatacctaacctcaatgacaacactctgtatgaacttatgtttgatcatcctcctaactatactggtttcaaaaactttagttgtcttgtgtttgcatctactcttgttgcacaaagaactaaatttaccttaagagctatatcatgtgtctttatagggcactcgcatggtatcaaaggatataaactatacgatataaacactaaaattttttttgtatctaggactattgtctttcatgaaaacattatctttttcataaacttaataccaacattaacaatactgatcctttctcttctatggtgtttctttcttctaatatctctcttacccctgtccatgattacctataattgatcctagaaattctattactaacgacttagtgtaggataatactactgacattaaagatcaagattatgtcacacacgaacaagaatagcaacaccagatgatattcttgctgcaacttctccaaatcaagccactaatgattctccaatatctccaagaagaacaagcagggttatcaagccacttatagttacttatgtgactatgagtgtcacttagttattcaagataaattctttatgtcacgacccgagccttaggccgtggcagatatgtaatatccataacttgggtggtcaaaggtcacactttgacccttgtaggaagataaagcttataaacgatcctttaatttatatcacaaaatactaatttaaaagtaatggattaactcctacaataataagaaaatagttgttgtgaaaattatatacgcaagtatacacagtcaaacaagtaataaagtgataagtaagatcgtctccacaaggattgcaaacaaagtttgatgtaaa

SEQ ID NO: 169729 - DNA, 506 bp, Cannabis sativa
  modified_base (433)..(449): a, c, t, g, unknown or other
atttattgatctctatagacttgatcatatatatcaaatgcgatatgtgacaccatgcttattttcacctctttatatagacaactcaaagtcaacatatataattaaactgtttaataattcatatataagacacttcaactacatatatatatattatataggtgtatatatttaaggctacccataatattataataatcgtttttgtgggagtacgtaaatgagaggtgtggggagctaggtgtcaaatataattattgaaacccttacatatcaaagcgtgtggatcttccatgtctcttggtttttttcttttttttttctcaaaataaacccatttcaaattatcaaaagccaaactatcttaacgtagtacccattaataaattttcctttttctagtaataataataagggtaaatactatttnnnnnnnnnnnnnnnnnaaaagttacagattggaccatgtgttttgttaaaacaaaatagaccctgtatttttt

SEQ ID NO: 169730 - DNA, 912 bp, Cannabis sativa
tgtacgaaaatggatcaagatattaattctgttaaaaaattgtatttaatttacacagtgtattaaaccaacacatcaattatttaagtattttaagagaaaaaaaaactgtatatataaatggttaattttttaataaataaaaaattagttgatgtattaaacttagattagtttaacacaatataacatacaactttttaaccagagatgttaatttgtaggaatattgagtttttgatattatggagcgtttgaaaatatttattagagatatttttataatcaacaaaaaaaatatattacaaaaatattgaaatatcttttttattatctctaatatacatgagtcggttaaatattaagtagtttggtcatagtaaccttaatattaaaatatcttttttttataatctgtaattaatatatatatatataataatatatataatatttctttttggtaacgtggatataataaatgtcaacatgcacttatatatatataaaaaaaaattgttgtctcaatatatatatatacatgattttaaaattattgcatattctagaattaatgaagtattttttttaaaaaaaaaaataatttataaaatattgattgataatttttttttttaaaataaaatactaattttttttttgtccaaagctcttaaacttcttggcatgttgttagtgtaggaatttttttacttggtgaaattccaagtttaacctacaccactcaagaacacagtcaaaacgacaaggacaaaattgtcctttcaatcaattaaaataatcaatttcacacgacaaccaagaattggtcgttttcacttgcacgacaaaggaacttgtcgttctcaccaacacgacagatcgtttgatctcaaaacgatctgtcgttct

SEQ ID NO: 169731 - DNA, 659 bp, Cannabis sativa
cctcaaggttttgaagaaccatggaaagaacattatgtgtgcaagcttaataagttattgtacggcttaaaacagattccaagggtctggtttgacaagttgaaatctaccataattagttggaatttcaaaaattcgaagtcagatacatctatattcttttataaacatggttgttatattatcatacattaatatatgtagatgatattatagtcacatgaaacaacaatgaaaactttcatcattgaactgaacaaaaattttactctataagatcttaactatttacattacttcttgggaatagaggtttacagagatgagacaagcctctacttgactcaaactaagtacataaatagaggacctccttcgaagagctaataacttcaccaacttaaagccatgtccaacacctgccacaataggaaaatcaatgtctttaatagatggtgattgttgtctagtcctacagcctatagaagcattattggtggtctacaattattatctatcccatgttagagatttatatgtataatatgaaatgtatgtatgtgtatataacatgcggaataaatgaacatatacactatatgaatataggatcgaaatacctccagtcattgaatctttgagctttagtcccatataag

SEQ ID NO: 169732 - DNA, 511 bp, Cannabis sativa
gttcctgatgttgctcttttggcctattccagcagtgtgattataatcactgaggggagatagttgtgccaaacattgtcaattttttgggtttggttttatggttatgttgcctttgttaatagtgacagtttatcttgatttagttccttgtatatgaattggttattttttgagttctttcttattgtctctaattatctttggttttttgttttatctctctgtgtttgttcgatgatcataatttgccaaaggaaaaattgtaagtgccatattttctatggcaaattatgttggttgttgttttgtctattggatttttagttgcatctgttctaactttaatagttgttcatctaagaccgtgttagatgcatctgttaaatttgtttcatttattttttggccggccagtttttagttcgttttatttgtttcgtctctttgccagctgtactcagttggtttattattagttaagtcgattgtaccaaaatattgaatataa

SEQ ID NO: 169733 - DNA, 607 bp, Cannabis sativa
ttttaggtgaaattactatttttgagattttggtaaggttaatgacctctttgaaatgtcagaatgatattttatcacctaaatttattttggtaagctcatttaaaattttgtaccattttgtatggatttagagttttatcacttgctgtgaccaatttgtgttaaatttgagtcttgaaatccttttattattatttaaaaaatgaagagattatttggctgatattttaaattaatttaatataattcctaaaatttataaagaaataattaaattaattatctttttttatctgataatatttatttattatttttaattcaatttaaattttaaattgaattaaatttgagatataatcaactgcttagattttattcctatataaatttcttatgtgctcaacaaaatttccaagaaaatttcacttaaaaagttggttttcacattaatattgcttcgtacatctgtgtccatcaaggatttcatcgactaccacactttatgatttgagtaactattatctttttgactaattagtatttttttttcccgaattttgacatgtaccaaattatgttctctgaatttttttggccgtta

SEQ ID NO: 169734 - DNA, 908 bp, Cannabis sativa
tcacttgtccatttactttgtattccttttcattagttgaatgacagatttgcccataaaaatacacaactatatatgtatatagattgattttcgtttctataataagagcatgttcaagaaaactaattatacctaaaataatattacatttcatttgacacaaattttagatgatttaaacaaatttgattacagattttcatttaattggcatatttgatcaccaataataaatttttagatgacaaatttgattacatttatagggtccctacatttatatacaatattattatactaatataaactaaattaaaaaaaattaaataatcaaaaaaaatatataaactaaattaaaaaaaaatctccttcttaaaattagctacaagtagttgtcttttttttttccgattaggcccaccaactttccctaggtataggtacggcttggtcgggattgtgttttgctattgtgattagttttgtctctatggcataattttaaatgttttagttttatctctatgacatgattttgagtgttttagtcttgtttgtgtaacatgattttattttattttattttattatttggttattctttgttcttcgatgactcgtcatcaaaatattattagtagttataaataacaagttcttcgtgattgaagggttgtcgcgaagtaccaaaatctcgcagtgttggtgccggagagcgccttatcggtgatggaaccctttgcctttgtgtattattatcatcaacaggcatgatggatgcagttactccatctcgttgtatgtttgttggattctctccacgatggttactctcctctcttgcctgaggtattcgactgttctgaccttctttttcagcaacgggtgctggtggctctctccgt

SEQ ID NO: 169735 - DNA, 1310 bp, Cannabis sativa
agagagagagaagtagagaaagtggcagtgacaaaggtgtgagagtgagaaatgagttgtattcttgtttcagcgtgcataaaaataaataaacaagctaataccctaaagtttttttcatttcttttatttatttattttttaaaaaaaaaatgataagtcttatataactatgtttgtcacagtctcgacagtaaatggaaattaggggatgggtcaattaaaaaatattggcaagaatctaacttcattaaattatatttaaccaaactggtaaagcaaaccacatgaagactaaataatgtttctacataataaagtgaaaagcttttggatttctattaatattactcgattatatattaactaggtaacataggttattatactaattaataaatattgatttttttttttttttgtgtttttataatttacagtcactacattaagttatacagcaaatatttttttattgtactataaaaaatgtattaacttttgtgttagctttaaagtagtaacgaataatggttagtttggcaggatttaacaattttattaacaattataaatttcatatttttttaataaatttattaaatgaaaatacaaaaaactgatctctaaagtataaaaaatgcttcattcattccccgattttaattatttaaaaaactgagactaactttataaaaaactaaaatatataataacaaaaacatttaaatagatgaataaatttgtaaaaatagtgatatcatattttttaaaattcaaataataaagaaaaaaaaacaacaaagattaaaacattaaaaaaaaaaattatacactgctcaaatattaatatgtcatatgataaacatataagcttataccttcatactaacacatatatccattcaattatttttcttttttatttgattactttttataaataaaataaaaaattatttttaacttttggacaaataaaatttaaagataaatacttatatagacttacttaaaataatttagtttttaaaaatagtttgtaatttttgaaaataaaaatatatagaaatgtgaaatagaaaaaataatcttaaaaaaatttaatctataaatatataaataataatgtttttaacaattttattaacaattataaatttcatatttttttcacaaatttattgaatgaagatacaaaaaactcatctctaaagtacaaaaaatgcttaattcattccccgattttaattatttaaaaaattgagactaaatttatgaacaactaaaatatataataacaaaaacat

SEQ ID NO: 169736 - DNA, 915 bp, Cannabis sativa
tgcacagtaatgataatcacaaacaagtcagatcagagtagtcaaatggttcacgagttatagtcaagcaacagaattgaggtaaactacattcatatctgacttctgagacagaaaactttgtagcattttcatttgataccacactccattaaaagagacaataggaaaagaaaaagttaaaagaaaagtgaggatcccacccatgtttctttgacaaggaaaagcactttaagagttggcatctgatacatacttaactggaaatgagtctgttacctgtttttacttgcaaactacccctgactagtactgcaattactgcatataataattcgacaggctccaaactcatgaaattgagaactatagcaaactataaataatcttaatttcgttatttcatgtagtggggactaagatttattctttcatttaaccaccaaacaagttgcagaacccaacaagaaccagagaaccacttaagctataatgggttcccagagtcagcaatgaagatctaatcaagtaaatgacacagttcttaaaactccaacctttgaaaaaattaatgaaccaaaactaattatagaagactggtataagagatcagatagtttattaatcagttcaattaaaaactctcaattttgagcaacacttcttcaattaaccattcttaaccttccctaatgcacacatatacgatattgagatcacaatatatcaaatgaatcaaaaagtcaatagaataaagcttaacaaaggaaagctatggtgggagaaattattttcatcccacaaaatacactgggattgatatcttaatcaatttgtatgagtttcaactgcagattacaacttatacagggcaaggtaaagaaaaaatcgcattctctccatccaaaacccttt

SEQ ID NO: 169737 - DNA, 1250 bp, Cannabis sativa
tgtctgaaccgagggcagagtggatgagggaaatgccggaagcatggttgtttgaatttgtgacgctatggaggttgatgccagagtagaggagtaaccaaatggtgcggtggaatggtgttcaaacggtctcgaaatggggagatcggtgacgggataagagctgattactccagtagaggatggatcaaacatgaaggaggaagcaccatacagattcgagattgagttttcaagaggagatgtgacggacggagcaacgtcagagttggtggcggttgtcgatgatggatcttggccatggtggacggtcggagatggcagcagaagggaaggagcttcactaatggaggcggcgacaatggtggaattagttgttcttggagccatgggagaagagagagaagtggtaatggtgaagggggcggctagggttttatggagagtagaaggtatatcactaatgagaaaatacttctcttattttcatatattggcagccgaatatagtggctgctagaaatattatgtagggtttgtttacaaagtaaagtgtctacatatacacagtaaaagcaaggcccaatggaccggtattgggccaagagaaaaagcaatttctatttctaataattttcattatattcctttgtttggttgcatattaaagtattataatattattccaatgaaatgatctttctaccattttggtagaatgacgtactattccattttaaaatagaaagaaataccattccaatacatgacgagaataatttttataatttttttattgatttttttaatacattttaaattttattccaattcatattcacattctcattcttattcctatgtttttattcttcccagccaaacgccacctaagaagtttaatgattagtatatgattttgtgcctcttagtaaaaattagggcttattatcagaaataaatcttagaaaaatattttctctattacggagatatcactattacaaaattaacttttcgcgttagttgttattgacactactttgcgtaagttgaaaatagagatttttagatgttacgtcagttggaaaccgatgcaaagtagcgttagatggaaaccgattcaaataaaacttaaaaaattgtaataattaatcggccgaccgatcacatgtacctaaccctaatacaccatatatcataaaaccttgaaatagctaccccctttagctctctctctctctctttct

SEQ ID NO: 169738 - DNA, 630 bp, Cannabis sativa
  modified_base (600)..(605): a, c, t, g, unknown or other
cgcaccgcgaacacccctaccacctggtagataaggatcttcttcacctcctttaggagatctagcctcgactctgtgtagattcttcttcgtcaagtgaaaactcatttaactcgagatttgacgagtgagaggtcacgagtgactcattggagtctccagaacctgttgtacaacaccaccattacaccggccaaatcagtggagaaggatacaaccaattcatttaggaattaagcaggggctggaggcattgtatatctgcccactacgtggacgtacaaagtccaggctaacgtcccagacacactgccagaaggttgtctaaggcctgtgaagaaaaacttcgcaccagcagaagtccctgttaccgtagctaagcatactaccaaaccaaaccctctgcctagatgttaagcgatggagaaaaccaagaaaatatataagaaagcttcagataaatactaaaaattttctcaggtttttgcgatggccagtgcaaggtaaattgttcatcccagggaaaatattgaagttaccactggggcaccaaggtctaggaagttgaggatgttggaaatattttacgaggatctagannnnnnaccaagtatgttttattaacatcct

SEQ ID NO: 169739 - DNA, 796 bp, Cannabis sativa
gggtgggggctgatatatttatataaaaaattgtaggatttttcgagtgggtctggatttttgggtgtaataattttagaacctgaacccgactcgttacagtaccaggttaagtccgaaaccgttcagcatttttcaaaacccatttttcttggatttcgtgggtttgagtttgctagttgggtgggttttcaggtgcaaatgttcactcctaagagaatctaacaaactttttgttataatggtatgaattcaaattcttcacaataggccttctttttcttaatcacttgtaatctttctcaatgtattcttaatctaatcagattaaagataataattccgaatgaataataattatcacaagaattactagtattttagtatcacaaataagcgaggctatataagtgtattttcatcataattattaaattaaaatacgagaattacttgatattgaattatactattataccaacaataatatcacatttaggtaatactagacaacactaatatcatttagtatttctcgtagcatgcttcaaatatttgaagatccacacggcttttaggttttatagtcacctaaaaaataaataaatttgtttttctttcattgtaatcatcgtttaaacagccaatcaatacaaaatacatgaaattcacagggtcagccttaaactaaagcagattaggcagggataagttaaaaactaccattttttattacacattaactaaatataactctaaaatatttgtaattgataaataccctcttttataatca

SEQ ID NO: 169740 - DNA, 631 bp, Cannabis sativa
acattattaactaaaacaatggttaagagaaatcaattgaccttattaactgctgcatgtgattacactcactttccaacaaaaaatagctttattactaatgccaaaattcttatactaaatattaaaatttcatccactaaaatccacaatacttaagaggctaagaagaaacttttttttttgaatggaaaaatcatctttattaaccattaaattctgttaccttaaaagaggtaacaaatcagttggaacagactccaaactgaaacgacgaccagggtataaattagccactctaataaagctatgagcaaccctatttgctgaccgtttcacaaaataaacagaaacattagacaaatcacttaataaagctttacaatctttaataatgttaccaaacaaagatctcatattaatagcacttcgtaaagcttgagtcacattgaggcaatcagtctccacatgcacacctgcccaccctttctctttgatccagctgaggacctctttgacccctaaggcctcggcaacaacaggttgaatgacaccttgtttgagcaaagagcctccctccacgaatagacccttgtcatctctggcaacaaaaccaattccaaaactgcga

SEQ ID NO: 169741 - DNA, 2588 bp, Cannabis sativa
  modified_base (1050)..(1051): a, c, t, g, unknown or other
aagtttgtaataacacacacgtggtgttccttagagtcagggcgttacacaaagtatcaaagtgtacaacaattccaagtttgtggtgaaccaaatattttgggaatataaaccaagggtgaaaagatggctacctatgtcacacgtccaaagaactattgcatggatttttttttgatgaatcagcgagattatcattactccaaacatccatttacagcttaatagcatctcaatcgagacctgaaaataatctatacatcaacaaatatgcatatgtgtgtttctttccaacttttcaaaccatgacctgtttttggcactaactttcttaggccaaacacgtttaattttatacaagatgtctatccttgttttacttactatttgagcagtttgcacactctttccttcccaaagaactccatttcaggcttgccaagtattgtatgctaaagctgccacaacagcagcatacactctcgtcttgaagttgtttgctttgtgttgttacagccatctcactatctgttgaagtgtacttgagcagatctgtcattgcagccattctttgagctgctgccaacaacctgctacaatattacagcagaaaaaagatggtccaacttctctttgtcattcctgcatagcaaacaatcatcatctagtatgacattaatcttacatagtctttcccttatttttagcttattttggacagctaaccacaagaaaaaactatgccgggggatattcaatctattccatacaatcactgcccactgctttctttctccttcagttttgatcaaattgtaggccttcgagatttggaagcttttccctatcattagctgctggaaatcagtcgagatctttaacttttccttggctgccactatcttttccagtaccaactggcttgaagtggagcttgataactccaccaattatcttctgttaagtacacattgtgcacccatttaatccacatgctgtcttctttgtttgctatcgcccaaatgtattttgtcattgctgccaaattcnnttcttccacctttctaaacccaatccctcctgctgttttggattggcaaactgaatcccaagctaccaaaccagccccttgtgatgtactttggcccttccataaaaaggccctacatatggcttctatctcctttattattttcttaggaaaaatcataatttggctccaatatgagtgaatagctagtagaactgaattgattaaaacatctctaccagcatatgagaggttccttgagctccaaacttattgcatggatttaaaagctaaaatattcacctactcttgagggtctaaaactcattcacgaacatgctagctaaatgatatgagttatcctccttgtccatctcaacagaaaaaaatgctaagtgttgaagaataaatcgtctcgtcacattcctttattggcattaatagtgcaagatgatcttctcgttatgtgtaatgtgaggcagttatgtgttattgcatttgttctgctcgagtggataaatatctccttcttgtctgtatattctgaggcatgcatatgtctcgtcaatctcagtctaatagttattatccttatctcgcttaagactatatagtcaatgagttttgaatattatatatcaaacccttatttaataataacaagttttttaaaatgcatttattgatataacattattatatcattagagttgattcatattccttctgcaggacacgtgttagcttctggagcatagccaaattttaggtataacaattgccctttaacttatttattaattactccttacaaagtttcttaattaataaacaaaccctaaatcttctttttcttctcaaataaacccttacttagtgaaaattcacaaacaagacatagtcttattcaaaattctaattgattaattaaaactaattaattgagtctacaagacaatatgatctcaactagtgtaggggccatgggcctatatcatcaagctcccaataaataattctaaaatttaccaagtaaatttccaatcttattaattcctcctgactccactatagattcgaattgcactcctgtttacatagaacaatcttttaatcaagaataaatatgctataaattatccattatttcaatcaaaataatcaaagatcctctacaaatgatttacatcgagtataaacaaatttaccgttctacccttcagtgtattttatccttgaaatacttagcttcttataaatgatttctcagtaaactaatataataactgaaataagagctcttccatttatgtctgttaagccaagctcaaagaaaattatcatttcacttctaaatatagttataaaagctatagattctatatctatgattagcactcccactcaattgtactaccatgttcccaagatgttagtattaggccgatccaattggtcagctttaacaaacaagtgaaagagcacaagtaatacagttaagctagaactgttggaaattattttaccaggatcttagatcagatcggaagagcggttc

SEQ ID NO: 169742 - DNA, 1095 bp, Cannabis sativa
ataatctactcttaaaagtaatctatttttataagtagaaagcatatatttttttagactaatattaaataggtaacattttagttactaaattatattctcatatttttatagaacagtttggtagatttttgaaataacttataaagaaaccctttaagaaaaaaatctacctacaccgctattcatttgacctcaagatcagaggtaccattacggtctgtttttttctttcgaaatatcattttaatatgtggtaaccataaattttttcattgcataaaattttcagaattaaaagtaatcttatagttccttttatattttttaattaaaaaaagaagtaactaattattaattaaacaaaattcaatatgtcaactaattttatattactaaatattatttgtaatttatatataaaaattaaatatggtatatattctatataaactattttaaagaattatttcaataaatattatacaatgattatatatatttttttaaaaaatagttacgcttattttactaatataagctatttagtaattttttgtattttactaaattttaaatatatttaaaggtaacgtaaaagttgttataaaataacaaacaaaaaaataacataatgatcaataatatataagttaatgaaaataaaattatactttttaagttaaccaactagaataagtaacaaaaatatgtatatgaaataatattatttcacaaactatttagtattttagtgtcttagtttttttattaataacatctcatagttttaaataattttttttgagtaataacatttaataaactaaaaacttgctttgaattttaaatatttgttcacttactgaaatggctgcattaaaaaatagattacaatggtattattctcaaatcattaaagtaattggaaaataatgttagtagctttatcactcataaaatatgcaataataataatcaactccataaataaacatattacatacaattataagtgtataaccatagatctaaagaatacctttgttgattcaaagagaagaactcaaatagcggaagcgtaccttaatccat

SEQ ID NO: 169743 - DNA, 584 bp, Cannabis sativa
ggagttacgaaacaaagccggattgagagctgaggggcgaagtttctggccggcaaaatctgcggacaggctgccgccggcaaggggagagaggaaattagaagagagagaagctcgaagagaggaggaagaagaagaagaagaagacgacgtcgtctgagcacgtagaggagttaaggttcgggaaggggtgggtggtgctaacatgcgcgtgtggagcgcgaaacgcgaagctgtggtggccacttccatagctagcagtcctttgacttgtgtgggaaagaattagatggagagcaacgaagaagataatcgcagaaatgtatttcatgctttcgtgaaacgacgcgtcgtttttctcatggggaatataattattagctactaatattttgccttcctcaaaacgaccaattgttaaaagcaaaacatgtcgtatgatgaaaactacatgtcgtattggaatattatttcaatttcaaatacgtttttgagaagtggaatattattaagtttttggctaattagtattttttttcccgaactttgacatgtactaaattatgccccctgaatttttttgg

SEQ ID NO: 169744 - DNA, 690 bp, Cannabis sativa
acttatactcggtttcaatagatcgcaatatattgctgtcgacctctcacttttgcactcagggacaaggctaaggagattgtccaactgccggatgctgctctgagaatatcactttgttgacctcagaagacaactttgtgaagtacaagctttatccggcagactttataccccagcccgtgaaggggaagaagaagaagtccagtgttggccgggctgagggagttgagcaagagaaggagctcattcaacttaagcatgaggttaagttgaagggtgatgcaggagccaagcagtatgcttaggaatattctgagcaggagaaggaggctcatgaatattcagagtaggagaggccactcaagaagaagaaaaccctcccgaccggacagaggcccattgaacatactatcaagatcagagagcctgatcaacctactcagccatccaccttgtagaaggaaagaggacaaccatcttggaggagcaggaagattcttcgtatgatgacgccccgtctgtgcttgttcaggcaaatgctcgtgccagcgtgcagagtacttcatcttgcatttaattttcttgatttccatgccttcatatatattatactttcttttgacaatattatttttatttcatgcagaaatgtctcaaaagatgattgaagctctgaagaagagagta

SEQ ID NO: 169745 - DNA, 901 bp, Cannabis sativa
tttttttttataagaaccaaatattgtatttacaaacaattagtcctagcgaacaacagacatcgactataagagtcggacaaagaatgattgaatcactatatatggcctaaggcttgttaatcttaagaatccatgcttgcaagtctcggggtatattcgtgcaattcaaaggtcaaccccgcaacaactcatgagtagagttagtaagatcaacttactaagttacgattgttggaggattttcatagtgatgtgttcagaaatagatcttgtcataaacataagattgatatgtatctttctcatctttccaatgcctcttgaatcgtccaattttaatatatatcgagagagttatggcaaaaacactaaggcttctaaattgtaacaacttggcatgcgagcctatggctattgtgcaagcccatgggttgttgtgcgagcccatgggttgttgtgcgagcccatggctcttgtgcgagcccatgggatgttgtgcgagtccatgagccgttgggtgagtcgggggcatttgggtgagtcgtgaaacctttatgcaagtggtggagcatctgttcgacccgcgatggagcacccgtgctattcactattagtcctttagtgatctaatgacgagagtgcgggcaaaagaaggagaggctatacatgtttggattgacgtcatgtgcaggggagtgtcagagcgagtgcatgagggctcacatgcgaacccttagggggctcgcatgcgagtcgtgtgtgagtgataaagggtgtgcgagccgtaggtgagggggaaggggtgtgagcttggcatgatgcgaagggatgtggggctcgcatgcaagtcgtgtctgttgagtgttgggagttgggggctcgcatgcgagcccatggg

SEQ ID NO: 169746 - DNA, 680 bp, Cannabis sativa
cagagcgcccccattttgaaacccagcagacagtcgtgccaggccccatttcgaaacccacaaacagtcgcgccaccattttgaaagaccgtcgaccgcccaccgtcactacaacaaaaattgctttctacaatacatgattatcatttcaatttggatgataagaagtcttatagaaaattaaaaaaagaaaacaaatttgcggtattattttagaaagcccgctccacgttccagtgaaataaacatttttcacttttttctttctgtttgcataacacggggtttctttctatctgagattgggtttctctctgagtcattgctcacctcaacactcacctacatctgtaatcatcgtcgacggtaatgattcacgacctatgcaagttctcagtttgccaattccttagcccatcacctcttcgttgaaaacagctcaggatcaggaaaaagctcatcaacacctcctcatctttggtaccctgttttgtaaattttttacctttctctttattctgggttatctttatttgatttgaagctttgattttaggtatgatgaatatgataaatatttttttttttctgtatttcatttatatattgaaatggtttttttttttttttttttttttccattttttttttaaacccaaaacaagttttttttttttttt

SEQ ID NO: 169747 - DNA, 874 bp, Cannabis sativa
taaataaacaaatgtactacattatatatggatggtttatcttaagctcatggtataataattacgacaaatatcataaaaataaataacaaaaataagaaccagatgaatattataatgagtttaattatattattttaacttgtgtttgtcaagaaaatatactaattaataatctaaaaattgaaaacaagcatctacacatttgtagagagttctattaaagcacaatactataaacaagcatctatttgaaaacaagcaaaatccaatcaaaacacaacactataatatatacatatgctaatttaaattatattttctacaatatcacaatcaattgactttatagagaattctatacaagtgacaacatacatattatgcacacgaagacaacaaacaagacatattttcttgattcgagtccaatcattaatgcaaaataagtgaaatacatgtttacactgcttcagtttaacaaccactttattgatttcgaataatcattcaagacagatagcacattcatcatctttaagatcatatcttgtactattatgtttcctaaaaaaatataatagattgataatatgagattacttcgcatgatcaatatatattatgagaggttctccatcatcatggggatgatcatataactaataaagatgtaagtattatatgcttgtcgtaacaacctccatatattaaagattaaagtatcctaaatttctaaaagcatattaattaaatttaaatcattattaatattaattgtacgacacatatctaattaatgaagtaataggtgtaatgtatgataatgcttaattaaaagatttaagttttataagtaatagttagttgttat

SEQ ID NO: 169748 - DNA, 706 bp, Cannabis sativa
tttattttatcaatgaaaaaagtgagagtgaaacgatgataagggaacaaaggtcgaaatttagagaacacaagttagtatatatgtataaacaaaagaaagaaacattgtattttctgtgacaaactgtaattactactacctgaagaacaaggaaaaaagaccatgcaaaggttccaagtagaaagagcgaacaaccaattaaccatcttttgttagaagaggaatgaggtttgtgttcgtgttgcggatgatgatactctatggggtgatggtggagcaatggattcaagtgagggcctttgtaaagagtaagagtcataacaccacccacgcaagccactagccctgcaatcttcactatccctgctgttttcattattgttacattctccatcctgtaaaatttataaattctttgatgttttcctcaaatcataaccttcatgttttgttgttcaagttacaattcaagatttatggatggtcattttcaacacattgatttgtacagctataataaaatcaacaacccaaaaacgattgctctacttgtgatttggccaagcaaaaacgattaccatttatttctaatcataattttgctactgctatatttgacttgattcaccttgatatttggggaccttttgttagactttttatttgggcttacattaacttttattggttttattaaaacttg

SEQ ID NO: 169749 - DNA, 1058 bp, Cannabis sativa
acatgataaacatataaatacatcgcggtattttcatacaagttaaattaaatataaagctcaatttcataaaagcaattcataatgaaaaactcttaaagagaaaattttattaatattctcaaaaatttcatattgaattgtctgcaaaatatgaaatagggaaaaaaaatcccatactaataattgaaactaaattgttcgataactaaaacaattaactcaaaaattaaataaaagacgagcttcatctttaacttggaaaatctcaacccttccgtccaaccatctgactcaactcgctaggatagcaatccaagtttaagtagatggagctgaaataaaaagaaaataaacatggttagtagatctagaatgaataaccaaaggggatactaattctctaaaacacatgcgtttatagcaaagatataaataccttatttctttgcccaaaacataggacactggggtttccagtgaccctttttgttgcaatagaaacactttcctttttgctttgcctttgaatcagcagcctttttattcttattagttttgttaacagctttaagaggtttcttgctattcttccacttcttctttttgtcaggtttcgaagtagaggtaatgtttgcctcaggattggctgtaccattagcagtcccagaactaggagctttgttttctcgttaattaactcgtggaagtcaaatatcaactttttcatgacataattttatttaaagggcagaaaagctgaaatcaaactatttaagatcaaactcacctgagtttcctgatctataatagctccatgactctcagcttcttagaagtaattagccatttggagcaggtgaccacacatgttctgatgagacttaatctatgcatttataaaaattcttggtcgcctcaaaacgagcttgatctaatgccatcctgaatagtttagttaactgggtcatgatacctgcagtcgtgagagtatttacaaaccttgtctttaaggggtcgacctgttgggttttgtgccctaaataaaaccctttaca

SEQ ID NO: 169750 - DNA, 563 bp, Cannabis sativa
aaaaatctatatacatatataaagcagaaatataagatgatgataaggtggtctaaaattgtttaaaagtacctcatctattttttatttttatttctaatatttttactaaaaaatcattcttaaaacgttaaagaatacacacaggtaagcactttttttaaaaaaactatttgttcttattttttaatatttttactaaaaaaacatataatacctattttttttttcttttttctaatatttttattaaaaaagtcatataaaaatcattcttaaaaccttataaaatgaatacatacggctaaacacttttttttaactatttattctcaattttctaatattcttactaaaaaatcattgttaaaactttataaaaaagaatacaactaagcatttttaataactcataaataacactcattaaaaaaaatataaaaatagttccctatgataaattttaacgatttgatcaatgtatatataaatcggtgcacttttaatgggtattacccatgaatgggtaatattaagtaaatttgagtttttatgcttaaatt

SEQ ID NO: 169751 - DNA, 985 bp, Cannabis sativa
gatgtcggatggccatctgtgtgggtaaggattataactggttgggtaactgcagctctgtacatctggtctctcattgcacctattatgttcccagagagggagttctaaacccttgtttgtaaacaaaccgtggaatttggtactttgcttacgcttgtctattttatactttgttttgctgtaattttggataaatttcgtagtgctatgtaaataaaatggtaatggggaatgactgaactgtgacagttgtgtgttgatcatatatttcctaaatgtactaatatgttgacaattgtgtgctgagtctcaatgaagaaaactcttttgggttttgatgggaaatatgagattgggtggccactatttcaatattggcctacttatttcgtaatcatataattaaagataatttagggtcttaattatattttctaattctcttaactcttgtaattacgaagtatagtattaaatttacagcttttttttattttatttttttttatttttatacttcaaaatagattttattttttattttttatttttttttgcatttttacagaattttacattgaaacttctattgcaactaaatctaaattgtcactaaaattcgtatagcaacctacataaaatcaccggataaattacatgagaaattgaaactgtaattttttaaaaacattaaaaaatagtatatgaggtaatttttcatattatttttgtgttattattaatttataaataattacaaaatactaatttacatattggcaaataaattgtaattagtatttacacaacttttaaatacgttctatagagagattattgtttaatattttatattgttattcgtatattccatttttttcccactaactggttatacaataccagtctagttcgaaaacgggtcaattaccacaaagctatctggagctcaaccatagtgccaaaacacagatttatcctt

SEQ ID NO: 169752 - DNA, 945 bp, Cannabis sativa
tgcggggaccggagtgagaataatgtcgtgcggcacagtgtactcctttgcttcagaaggaatccctaaatcggaactaacgaccggggtgtccctcctcctgggcctcttggaagactcgacctcgaccatcttacccttccgcttacggtcaagggaagctgcaatctcactctcctcctcctcgacctccccttcctcgtctatcaagacgattgtgtctatgggggcactggaagatgacctcccaggggtcgttagttgggtaggagccagaggcagagaagggtccgggctgtaggcctcggtgagaatcgccagaagatcttctattggcttggctgctgctacaaagaaataaacaaagttttagaataactataagaaggcatgcgcccaacagcaaagcgataaatctagtcctaccctgactctctaactcagcgctagcaaagtcttgaactacacgctaacttcgtcatcccaagaaagctgtccgagggaagaaaccagttggaggacaagtaggctgtatgatccaatggaatgagtgcatgaggtctagagcccatccgggatcaacctaagaaatgacccaagtgggaaaaatagaagtctttggcatgatgcccccaccgagtggagggcatcctaaacttaaaaaggcgctcatcaaatcctataggcctacgtcgggtatactctcggacagaggggacgtgatgaatttttaaaggggacttaccagagccatacgtactggcgtcaggagctcctgtgttggggaccggggccagcggtttaggcctagaaggcacccgacctggacccacctccaaacaaagaacccttccggcggcagcctgggctttgatgtaggccagctcctgttccttcctgaagaggtacttctggtaccgttcctctgctgaagtgattatgtcc

SEQ ID NO: 169753 - DNA, 632 bp, Cannabis sativa
tatatatatttattatatatatgaatattttttcttcttttgactcggtcaaactgaggtcttacattctcccttccttaaagaaatttcatcctgaattttaaagtacaacctcaaattgaaagttgaacaagtgagtcaactacttttaattttgtgtgtctttctaaattattatttacttaaacttattattcatcttgccaatctagcaagctggtgttggccattttttaacatcagcaatatttaaatgtcaaagttaattatctggctaaattttccctattttatattgaaattgaccaagtcaatttcatcaattctaattcttctaattgaccaagtcaatttcatcagtcctaattgttacttaaaacgattaattgagtatgtttaaacaaattaatgaaaaaaatggtggggaccatgaacctctaaattcaagctctaatacgtttacagtgaattcattagcttatgaatttcacataattctcctatagactcagaattaaactcttaaattgacaaaagggttttttttcataaatatacaacaaaaataatataattacaaaaaatgtgtaaaaaaaattattttaaaaacttatatattttgaaaacttatt

SEQ ID NO: 169754 - DNA, 2631 bp, Cannabis sativa
ctgaattcttaagtacctctcttataggtcttgtatttatggcatttggtcccagttattcctattctctgatcagattgctctacggtcaaaaatggagtgatggagaagcatctaaagcccttcagtattactgcctgtatatcattgttttggctatgaatggttagtacatctagtgatggtaaaccttctaatcttacaattacgaagtccccggctcagtgatttgccaaataattattgccatgccttaaatacgagactaaaatgtgtccttctgcctcagggacatccgaagcatttcttcacgcagttgcaaatgaaaaccaaatcaaacgctcaaatgattcattactcttattctcggttatatacgtagtaatgaatgtcctcctaatacggtcagctggtgctgttggcttaattatggcaaattcatttagtatcctttctttcttaattgttccttcactaagaaattacctaattttcattaacaggaacgaaatcatcttgtggtagagaacccaatactatttaagatgctagtgaacttagtgtgtgtatagctcacaggtaattagtcattaataatgagtatatagcacaatttaaagttagttagcattaagcaagtcgagtatttaactatgggtatccaatagaaagatagaggaccagtgtattcatgtcgtacttgcatgaaatatagtaggcttctcgcgttagctgctgggaatgatgcttattaaaccgattcacttctatgttagtaatattgagattgtcttatttttcaacctggattgccaagcagccttgtgaggggttacattctctatctttcatgataagatcccaatattgttaatctatggtttcttgactttcttaagatatgactttgaggattatgtactctggagtattcatcaagcgattttttcaggtatgcttcggattatttgaaacttttctgatttgttagtaatatgaatcttacagtccaatatttgtttcccccgtttacaggactcttctgcattttccttttacaaatgcttgccttctggatggacagtcttatttttctcaggcctaattactcttgcatcagagagaatatttcttgatagagaaaacttctggcagacttttgctgtccatctttctatcgggctagcttgcttcagcacttcgttgtttatcatgtatttttctgttctccatattaaacttgctatttaatacattttggctatatcagtttatgattgaaagttatgtaacattctatttcctctacagatatcaacatgaaagacccttcatcaacaaaattattcgattccgcgatcattctgagtagaagtttcaacttattctgcatccattgttgaaggagaggcaatgctgtcatgatagggacaaattcagcattgttcggacaaatgtttgcactgaatttcgaaatcaaaaacctgtcacggtcgcataatcgtagttcacatttcgtcaactaactggaatgttatatacctgacaaaagaaagtcagaatggtttaatcattgagtatgctaagactaggttaccatcataagaaaaattgttcttattttagggatttaacagagttttttttttcttacagtacagacggtttactaattaggctacacagagtgagttttttgtcctcaatttgaacttcaatcatgctatttattttgaggccggtttggcttatatcttgcttactgagaaccaaatgaagcacacaagttcattaatagcttttgaccatgagaaaaagaaatatggtgacaataaatttcccatataagttcaacaatgacttcatctattggttttagatttgaacaatgtgggaaaatatggggattcaagccaaagattaaggaatcaagatgttgtatttgactctcttacacctttctctcaaaagccaaaagaaaaccaaagcaaagtttaacgttcacttcttaaaatgggattttcttttttaggggaatttgcattgctgattctaatgatgatctgtatatgttttgtgtttcatgcttcatcattttacttttctaaaagagattttagagtgtttacattagcaagcatagtatccttcccacttgaaaatattagaagcttagcttagcttagtaaaagagttaggtggattgaattagagggccaaaaaaggggtaaggatgatgattcataggactcccacgggtgtatgggttgtcctccattgtcactagaaatgacctacaatggtaattataacctttgaaagctttggcaaaggggagtgggaaaaaggggggaaaaactactaaaaattatgattaagttgtagactatggattggacaagtgtccaacaaacacataaattaaagtgaacttccatcttccaaaacaaaatgatggtatttttttgtgatttgtcttaagaggttgaatttcttgtcacttattgtcatgctatttattagtcttttgcttcaagttgcatgaaggtatatgcttccactatgcaaacttaagagaaatcaatttttttcttaaaaaaaaaaggtggatggtttatacactaggattcc

SEQ ID NO: 169755 - DNA, 793 bp, Cannabis sativa
ataatctgtctttcacctagctatatattttatttttctttcgcaaggtttgctaatcaaaggatcattgctatttcaatgatacgagatggcttgaagagttccttttggcaacgggtggagttgaccttcgtttcaagggaggccatttcacttggcaaaacaaaaggtttaatggtggcttaatccgggaaagactagatcgctgtataggatcctttgattggacatcagaatttcctcaagcaggggttctgaactttcctattactgtctcagatcatgctccaattttgctagacacggttatgttcaagaacaaaggatacattccttttcgttacaatgaagcatggtcaaatgaagcttcttgtcgtgaagaaatatgcaaagtctggaagaaagagaaccaagagaacacaagaagtttaatgaggaatttcgacagcataaggaaggctcttcaaagatggaaaaaagaaaaagtgggggacttagatcaactcatttgctctttggaaaaacgattacaatggatacagcaacaacaaatttcagctgatcttagtttggaagaacatcaccttcaagctaaactagaagacacatggagaatgaaggagtccatctggagacaaaagtctcgagaatactggttgaaacttggggatagaagcacaagatttttccacgcggctgcctcaatccatagaagaagaaatcaagtgtggtctcttcaaggcaaagatggagtgatgaaagaaaacaccaatgaagtttcaggtataatcac

SEQ ID NO: 169756 - DNA, 739 bp, Cannabis sativa
cagtgtgagcgtcaggcaactgtgaaggctttgtccttcactcgtgttcgtgtgagtttcactcgcctacatagtcacatgtgtgtcatacttctccttgcgcatttggggaagtttttttttttactgtacttttataaataagaaattttaaaaataatatatttaacattaataaacaatataaatatttgtttttgcttgtagtagtataaatatttatttttgcttgtagtagtataaatatttatttaaagtaacattaacctaaaataggaaaaactccaaaataaaattggaccactactacttgcctaatctaatggtggtgaattcgtgatgttgagtagtctcattcactcatcatcacaaagtttgatactctttttatgtaaatgtgcataaaacgtgcatctatatatatatgtggaatagggaccagttgtattagatttttgggaaattacatactacttttaaatttgtatatgaattgctatatgaatttaaattgtgatttaggttactcaattaattactataagagattttatgtagatttttataaaaatataaaagaaaaattattttaaaatgtaaaaatacaaaaattccataaataatatgtaaagaaataagaaaggaaaagacataaccggaaaaagactattgggtgattctacaatgcactcccttaaaagagatgtattgctgcacctttaacttgtttcggcatcca

SEQ ID NO: 169757 - DNA, 689 bp, Cannabis sativa
tttatagaattcctaattaaatcagctttggtatttatttggtgtgtgattgaaatctatatataagaaaaattaactttggtatttcataattaaatataataacacattcattaattgtagtagtatataatatatttatataaacaatattgtcacgagcttatgtgcaagttgaataataaagatgtacactcatctaaaagcttaatcaactcacatcagaataatatgatcacatcttaagtagttggagagtaaatgtgggatttgaattttgtcttttctagatatttattcataattttactaaccttcataattttctatttgttctctctcttaaaatatatctttatacatatatttttaatttataaaatattataaaataaaaatatttcattaaatttaataatgtaagtaaaattagttttataaatatatataaatattaatattatttataacttatactaattttaaattaatttaaatatacatactaatatattatttgtaatatttttatttttaatattaaaattatgctttattttaatatttttttaattttatattcattttcctcaaatttttaaaactttaaatattgctttttaaaaaagttaaaaaattaataagtgatttcttttaatttataaaatttaaaaaatatacataaaaaa

SEQ ID NO: 169758 - DNA, 567 bp, Cannabis sativa
  modified_base (349)..(355): a, c, t, g, unknown or other
  modified_base (538)..(541): a, c, t, g, unknown or other
gatgcacaacgaaggctaaacccccttatgatggaggtagtgaataaagaaatcttgaagctttttggtgtaggcatcatttacccaatctcagacagcaaatgggtgagccatgttcaagtagttccaaagatatttgggatcacaatagtgaaaaatgaagacaatgagttagtgccaacaagaatgcaaatcgggtggcaagtttgcatagattaccgcaagctgaatgcagcgacaagaaaagatcacttcacattgccattcattgatcagatgcttgagaggctagcaggtcatccttactattgctttcacgatgggtattctgttggaatatattttaccnnnnnnnagatttactaacaagtatgttcattaacaccctaaatacgaattctgtaaaataatgtaattaaacacataaagtttaagtaatcttacattgatggtagcagaataatatgtctcctccatctcaaatctctgacccttgttcctttctgtcgtagagtattatctgttgggttttatgccnnnnataaaactctttacaatctgattagt

SEQ ID NO: 169759 - DNA, 1012 bp, Cannabis sativa
ctctttttctttcaatatatactaataaacaatcacttaaaaattgcatctaaagtgtaatttttattatatttatagttgaatagataaacatattttaattagctttcaactaagctgctatggttgactagattaggaaaacaagactacttaatattattaggtaagaaaaaataaatattgtaaaaaggaaacatataattttttttataaaaaatagaaagaaattgtatttaatttagcatttaactttctgatgataaaaacaaaattaaaaatttgaaattttagtttgacttctttgtgaatgggggccaccatataataaataccaaaaaaaaaaaagttcgcactatagccttaagtgtgcatccgcccctgggcaccgagtaattagggttttcatttacgacaactctaaaaagtataagtatatggttgtaatgttttaacagagtatttgtaaacctttttaaatttaggcgattgtgaaacatcgtcaataattcttcttactaatgacgacaggtttcaagtgctagtaaaaaatttgccgacttttttttaccgacacctattctacctagttttgtgatgatcgaataggctttggtcttaaagaccgacgaaaatactatacctagtcataaattgtaacaaactcaaaagaagaaaaaaaaatattgtatgtataaataagtgtttaattttattttagattatgttgtttatataattaagaatgaaatacacatttatggtaaaaaataatataattttatacaaactattaatacaaattaatattaaacatattattgtattaaattatatcaatataatacaatataatctaacactagagaccaaatgagcttttgatctactattaaattactattttttacagttatttattgtatatgtattttttaaatatatatatacacaaaagaaattttaatagttacatcaaatatataactatgatggttatatttacttttaa

SEQ ID NO: 169760 - DNA, 1032 bp, Cannabis sativa
tggcactgttgaaaagagaccacctccggagaaactaagtatggaagatatgttcacacaaataagttgaataccagaatctcttcgtagtaaacatgaaagttatggggggcaaaaaagaaagtgtactaaagaacaagttggttggcgaaaaaagagtatattctttgagctcccatattgggccaacatgaagctacgtcacaatctagatgttatgcatgttgaaaaaaatgtctgtgatagcttagtgggcacaatagttgggttggagaataagaccaaagatacaattaatgctaggttagacctcgaaaaaataaatataagaccagagttgcagctgaaaaaagtaaatggttgattccaaaagcctgctgcaaagtacaccttcacaccaagggatcgacaaaatttttgtcgatttcttaaattagtcaagtttccagatggtttcggatccaacctaaataaaaatgtgaatgataatgacaataagtttactggtttaaaatcacatgattgtcatatcatcatgcaacgcctttttccaattggtgtgaatgcatttttagataaatcaatcagcacaccaattattgagttatgcactttcttcaaacttatatctgctagaactctactagtctcagattcggaaaaagcgaaaatatcaatacttgagattgtttgcaagctataaaatatttttcctccaacttttttcgatattatggttcatctaattattcatttaccacaagaagcaatacttggaggcccagttcacatgagatggatgtatccatttgagagatacatgaaaaagttaaaaaattgtgttcgtaataaagcatgcccggaagggtcaatagtagaaggatatgtgatggatgaggcattaacattttgttcaaaatacttgaaaggagtggagacacgatttaatcgtccagatcgaaatgtagatgttgttccatcactttcaaagttatcagtttttcggtctcaaggtcgtctaatcggtaagaa

SEQ ID NO: 169761 - DNA, 699 bp, Cannabis sativa
atatattctggaatgaagaagaacacctagaacatgggaaattttttttccctccatttacttactttgattctcataaagttgtgcaaaaaagtgtgtaacaccctactagtttaggagtgttatcgtaattttaacttagttgtgcagcttgtcgctaatcaacgagtttattgaaaaaaaaagtgtgattaattaaaattttatttaattacttataaatagaaaaataaacacgcacatatatatataactgggatcccgttataaaatatttacaaatatttcatttgcataatacaaaagttgtcgcctaacgactagacaaaatacaaagctgtcgcaaagaccgtacgctccaagcctaaacgctccgacatgtacaatcttcatgtgcttgatctcacggctactcaaccttagccttgcccttacctacacatgcaagtaatatttgtgagtcgaataatcaataagaaaaagataataaatatcataactataattcgaattataatcagcgcccatacacccaaccataaccctatccccgcgtcccacacggtattgagtctagaacattcaatgatagtactattgaccataatatcagcctatatcggtacttagtcatactctagtcataccgatatgatattatcaagaacgatagtattattgaccataatatcagcctat

SEQ ID NO: 169762 - DNA, 747 bp, Cannabis sativa
aaattagtcatagatttcttttccttattttcttaatttgcatcatatatgatgcaattttatttattagtttggttctaattaggggttcaattaatttcaatggcgagttttacttaaatatttagacttcttttattacatttgttgacttactttgtaccattttttgttggttggttgttgttttttttttcactaattttgtgtcattttgttagcgagcattgctattgagcaccaatagtgtctggaatctctaaatatgtcactttacgattggctagcgatactccataacaattattatattaaaatatatagaactcaatacatagttggactaataacgatattaacaaataagaaggtactagactccactagtatcccttagtatttatcttttgttagcttacctcgtgaacatgaccccaatgaatctcacaaactatcactgacttctactgataaattttacttttgaatcatatattcatttttctcataaaattataacttagaaatttttttatctcaacttaatgttaaaaaaattaataataaacttattaacgcaaattttagtttaatgataataagcctattttcgtgatagggtcaacacagaagttatcagaaattctagaaagaataataaagcaaaaataacactaagttttttacgtagttttgcagttaactctgcatagtccacgagtcaatcttattaagacttttctgata

SEQ ID NO: 169763 - DNA, 671 bp, Cannabis sativa
  modified_base (320)..(326): a, c, t, g, unknown or other
accttcaaatcgttatatatatcatacatatttttctttctttatttctttttcctattgtattttaatttgtgaaagataacagcaatttataaatgctttacttaattttcaatatatcttttgacattttttactctcaactctttctttaggttattatttttatttggatcgaacatgcagaagtcttaaaacgccatgagaagtatatggtaatttcacattaaaatttgttatttttttttcgttcaagattgatatatttatatatggcaggccaagtcaatgtaaatgtagtataataataataataatannnnnnntaataataataataatataatttatttagctgtaatttatttattttttatttttcaaaaaaatctatttaattatgtattcaacattatttcaatgttaaaagtagatactaacaaaaagattattctaatgtttcttcaaaaaaaaaaaaaaaatattatatatccacttaggtattacagttatgacattagttttaaatatagctatgactacagatgtacatcaattatataattataggatgagttttatatagatgtattaattatctttttgttagatccttatttattattttttttttgtaagaattcttcaatttttattattttctccattat

SEQ ID NO: 169764 - DNA, 542 bp, Cannabis sativa
aaaaaaaaaaaaaaaacagatgaactaaccaagtatacatacttattgccaacaatggagtgaagcttgacaatggtttgcttttctgcatagtttaaggtttggccaaaggtagttggagcctacacagctcttcccacatccttcatgagaagtcacagagacaactcttccatctttaaatataagtgttgagtagggaaagtcatataatgagttttcttattgtgttatcttttttgaaaaagagaaagaagtcccttattttagaccgatctttcctcgttatagtgtgaataattagcaaattttcccctgaacttatatcactacttacttgtgcaccctaaaatatactggttgttaaaaaaatttcccaatatattaccattatattaatgtctccattctgttaatttttttaacaaatactgaattatttgatgatgtgatataagagaatctgaggtggcaaaataatttgatgatagttaaaaatttattgcaatattaaataccctttccaaacaaaaaaaaaaaaa

SEQ ID NO: 169765 - DNA, 572 bp, Cannabis sativa
gtgagtttcgtgccttggcaaactgtactgctgaagttaaatggataacctctgttctctctgaacttcatgttccactgccatctgctcctataatttggatcgacaatcaaggagctgcaagtcttccagctaattctgtgttccacgcacgatgcaaacacattgagatagacttacatttcgtacggggtctaattctggccaagacaattgaagtctgatatgtcccttcgatagaccaagtggttgatatcttgacaaaggcattggccaaagatagattttgctacctcaaaactaaactccaattgtgtcttacaccatttcgtttgaggagagatattacaaaacatgattaattttattttattatattttgttttgttttgttttgtgagagttagttacagttgtgactgttataacaactcttccaactattttctgcctataaataaagatcaagtcactacaacaataatggtttataccaacgccactattaccaacgccaaaaagtcctcattaaaaatggtactatcaataacgacacttacctgtcgttggga

SEQ ID NO: 169766 - DNA, 994 bp, Cannabis sativa
agtagggctgttgagcatgtctttcgaattgagatctatatatgcgaggcaaaagtgatacatcaaacacttactcaaaaacatatattagaaaaatgaggaatgaactcctacttaaaggaagttaccataattatcagaagatgacgaggaagaactataataattactaaactccctagacccagtgatcatgtacatatcataagggtttattggagataaatcccaatttgaatctagatggcttgccctatctaagttgataccatactactcggcaatcccataatatgagctagtacaactaagctggacatggaatcgagggtacaaactatcaaacctatgggttatgcggtctatacaaaagttgtcccatgtataaaaattatattggctatccctaaaggttacaagcaaggtacgtgcagtcctaagtatggtgggtgaccatccacattcattaccgggatgcttcttcttcagcttctccaggggttactttctggagatagtggacgtgagcaacataatcctggctttcttcatcagcagggactggaaccttctcccaggaagagtattttggcaccttgtagtgacaagtgaacttgtccgagccaaggaggttgacagtcctcagattggcctcattcaaaaggaaatctgctaatagcaatctgaatggaagaccgagttggattttatggcactcggccatctcgagggtggggattagtcttttggaaacctctgtcaacacaataagtgtaaaaagtaagcgacctctaagtcatgaatataaaaaagaactcaaaaccaagtttttgatatataaattacttgcgtataatgcaaaatgcagacgtgttgataggagaaagaccaatagtccagaagaagtcgtccttgaacttggtcttgtttggtaacctcataatgatcctgcgatcatttgtgtgggtaccaagatagtaaaaacgtcctgaac

SEQ ID NO: 169767 - DNA, 611 bp, Cannabis sativa
  modified_base (556)..(560): a, c, t, g, unknown or other
gtttataatgatgaatgtgtttccaaaacatagataacaaacctttgactgtgtagaaagaatgttgctcgtaataagtgcaattgggtttgtaggtatctgataggaaacatggagcaaattttctggtcacaatcgaagacagaaaactgccaagtaaatttaaataatacaataacaatataaatgtatatgtatcacttttaaatttatggtcaatggggaactccattgataataagaggatacagcaagtaggacataccagcactggttgcccatttcttacaacatatcgtttactctgtgaaattggctgcatagcagaataaaaataaccatggtcagtctccataaagtttcaaatcaagtaatcaactgtaactaacagtgtattcctttaataattcaaagtcgtggcagagaagattaaaaatgtgttaagcaaaatgactgcaaactagctcaacaaacgtatggtttgactcttcagtatgtattacatcgtacagcaagattctaagaaaacttacaaattgttgcttatctctaagtnnnnnattatcaagcagatcttgtacctcaacttcactctcagtctgcacaaagtg

SEQ ID NO: 169768 - DNA, 528 bp, Cannabis sativa
actgtaagcttctttgagctcagccaacacttgtgcaatggttggtctctgtgacgcgtctctctccacagacctaacagcaaccaaggctgcctttctcatgctttcgatatcgaaacttccctttaagctatcatccacaacctcatatgcacctgcctgtaagtatggtttggcctgcaatttttcaatgcaaaatgtcaagaattttcgaaaggaaaacaaggaacagtttaggaactttgaggttggtttttatatatacccatagaactagattgaatgaatctggaattccagaatgagtaagtggttctctcccacaaatgagctctagaagaacaactccaaagctgtatacatcacttttctcagtcaactgctgagttgtatagtatctgcatatcattgttatacacaaaggtcaaaacaaagaggaatcctttttgtttttaactctcatattccaagtagggggcacattaacatttttattattttattaaaatatgggttaatacatagttt

SEQ ID NO: 169769 - DNA, 863 bp, Cannabis sativa
agaatgtcttttccatgacattagcaaagaaaacttgtatcgggtgtatttgctatacatcgaattggatcgatattgataataaaaaaaaatatcataaacttactgtaatataatttctaagtcaatatcacttagttaattttagatcaatgatctcaatcttgggatgattatgttctggcctaaattgtactattcgggttctttgacttgttcgttacctgcttactcgtaggactagtccatacttacatcttgggaacatggtagtacaattaattgggagtgctaatcatagatatgaaatctataacttttataaatacttagaagtgaaacaatagtttccttagaccttggctaaatgagtttaaatggtggagtactcatttcattaattatattagtttactaaaatatcatttacaagtagctaaatattttaaagataaaacacattaaagggtaaaacagtaaatttctctctactcgatgtaaactatccatagaggatcattgattatttagattgaaataatggataattcttacatacctatatttgatatatagagagttctatgtaatcgataatgcaattctaaatctatagtggagtagagagaaattaataaattaggaaatttattcataaattctaggaactacttattaggatcttagttacataggcccatcctcacattatctgagataatattgccttgtagactcaattagttggtttgtttaaataactagaattataaataagacatatttatgaattttactaagaaaatgcaaatttgagaagaaaactaaagggaaaagtttatttattaattaagatattttat

SEQ ID NO: 169770 - DNA, 1051 bp, Cannabis sativa
tatttttataaataaaaactttaatccataaaattgtaaattaaatatatataaaaaaagtagttttttcaaaaattttataataataataataatgggctatactttgtggtccttagtaaagttacctaaaacatagagaatttattgtaagataaataaataagacatcctcattgtttaggtaacacattgataatatgtgcctaacactacttagaggtgttgttctgtgattagttaaatatattctctaaaagttattatcttaaattaaatgggaggtgatactcaattataccaatagcgatataacattaaagaaagtactaagtatactgatatatatatatatatgtaaaagcatctccaatataaatgagtaatgcaaatgtaaaatatagctcactttgttaaaactctactctaatagtgcgtcaaattgtgatacaaatatgtcacatcataacaaaaagtgatctaaattcaaatcacaacatagcatgatgtaaaattttattattaattttagttaacaagttcttttacattaaatgactagcattattattattaaattttatatttatcttcatattattagtactattttatatatttttttaataagttattaattagatagggaaatttgaatttccattcttaataaactcataaattagtcccctaaactaatactatgcataatttgtaaaatgggataactttttcctaaaccccaaaatacccctcccatttttcccaaccgtccctctctcttcctctttttccaaaaaattgactgaccatcgggctggccccatcggacgggcatcgggcccgattttcaaaacctagaattaagccaaactggtgtacaatcgggcacaccatcggacgagcatcgggcaccccatcgacgggcatcagacccacatcggacccgatttttaaaacccagaaataagccaaactggtgtaccatcggacgggcatcaggcacaccatcggacccgaccttcaaaacccagaaatgagctaaattcca

SEQ ID NO: 169771 - DNA, 740 bp, Cannabis sativa
tagaggaccctgcataattacaagaaaaattgtaatacaattcatacataatataacattaatgtaaatacaagtaaattattacattcctcttcagtcaaattcaatttcttaggccaagaaaccaatgtgttacatgcatcataaacatagcatattgcaccacttgaatatgggatttcagcttcccctagaataacttgtgtgatttgaacacgtgcataatcatttgaaattacgacaccatgatatggaaagaaaccaaccgactcaattatgacaccctcagccacgatattgtcaatattatccaaacataattttacacattaacttacatccttacagtccattggttgtcgttgctcttcatcatgctcaggttcttcgtcttcatttgccaagggtttttcttggtcttcatagttgtcagtcggttcttgctcctcagaatagtcttaatgtcgcttttcatctctatattcattgtctaacatttgaagctcttctgtttgtgcatttctttgtacttttagcctctcaattttagcttttaatctcttgatttcagcgacatgttcaataccgacatcgacctcaacttttttctttctttgtattctaccaaacacggtagatgtaatatcccagaaaataaattatatttaaatggacatattttattaaatatgtaatttcttgggaaatgaactaggattatgatcttacttagatgaatt

SEQ ID NO: 169772 - DNA, 688 bp, Cannabis sativa
agtttaggatatttgacttagttagttagtggtgatattaatcaacaaagaacgcatcaagtcaatttatgactatgaatgatcaatctactttaagttttcatctcttaatacaataggtatgtaaagtattattttatttttcattttgtttgtggaattataaaaattagaatactttttttcattgatgtttatcttgttctcccagtacacaaatttacaagtaagaagcaattcctcaagttagtaaaattttgtatcaggacaaaaaaaataaatttgtacaatatgcactcttgaattaaatttgtaatttggttgaattatcagaatctttcaaatgcttttatgtactcgagatattctattgagaagacaatatgtgcgtttggattaattttgctcggttacattttggaatcttataaatgttttattttattttatgaccaattatatatttactaaaaaactattaatactaaaatatcacttgatttaataaataaaattattattatttataatgtgtaattaaacaatttaattttgatattattataataatttgtgagggttttttcatttttatactttaaaataattttttttgtgtatttttacggaattctacatagaaacactattgcaactagcgctacactactacaaaagaagcctttag

SEQ ID NO: 169773 - DNA, 864 bp, Cannabis sativa
aatcatcacagagccacaaaatgacaactgcttcacatcaggctgcaaatcaaactcatataactacccaacgggcttccataacatcaaattctgatccaccttttctggttgctaacaacaacggcaaaacacatattacatcaagttcaggagatgattcgttggttcataagtcatacaatgacaaagcagtgggtacacatgttgaagctcgtggaaaaaaaactgtaacataccccgtggtcacttttactccctctgtacttaaccaaacatcttttgaccaacaagccatcaatcacaagacaatgaataccaaaaacaaggaagagcatactgatttatctagtgtttttacccctctctctgccatggttatgccttccaacacctttgcaacataccctccaactcagccaccgatgcaactactgcataccaataccaaacagatcatgatgcaaatcccagcgacttatcctaatgcttcatccactgctatgacttcagaacattgcacagaaggtgggaaggaaaatgtgtgtcccaaccgtttaataaaaaggcaatcagaaggttcatctttgagacaaatcctaaaaagatgcagaggtacaaactcaccatctttctcttcaaatctgtctgctgaagaggaatgccatcagaatgtttccattgatttaacggattcaactggtgatcaagacatatcagcggaggctgggttccagccccgcaatcagccatgaaaattactagttggaacgctcggggtttggggaacccgagtgctgtccgtcatcttcgtttgcttgtcaaggagcaatccccttgtgttttatttattatggaaactaa

SEQ ID NO: 169774 - DNA, 546 bp, Cannabis sativa
gaatctcagatttcgtagtttgtgaattcatcttctttttcctacggttttgatatctgatttgatagagtttgaaattgaatcccttttatttatttatttatttattttttgggaatcaaactgtttatatgggagtgtctagaaccatagaaattatctctgttgtcatgttggctatgctattagtacacatccttttgaaccttaattaaataaggtcactctgagtttgaacatatttgtgctaaatctcctgcactgcagtcaatctagagtaagaatgaaaatggtaataatctattttccatccaagtaatgtggttttctaagggctcagtaataataactttattatttggtttaatttatttaatagagtttgggttctcctatcctgtaatagctagttgttaatctattcttttttgttgtttattgtttacttcaaacaaaaggtgggttgggttgggcaatgccatgtcagtatttgtccccaaaagctttttttagcttttggttatggtaattagaggttaagtttga

SEQ ID NO: 169775 - DNA, 1827 bp, Cannabis sativa
agtgaagacaagacgacttggaaagtacatgtggaaaagtcagctatagatcaactattcggtgcaggaatttcccttgtcacactggatttaaagcatccaataacgaggccgaaaataagaagctttgatttttggagtaaaactatcccgggagatgaaagctgaacatattgaaatctgtagtgattcacagctagtggtaaatcacgaatctggagaattcaaggctcagggagaaaagaggatagcatatttgagcaaaatacacgatctgctcgcacatttcaaaagctacgctctcagacaaattccaaggggagaaaacatgactgctgacgcattagctcggcttgagagtattaatgtaagtgatagagcaaatttggttcctatcaagttcctcaaagaacctagcatcattggcacagaagagatcgatccagatgttcttaccaagaagcttaaaatttgaaaaggtttattgctcgaagtaaaatcagcattgacaaaaattttgagagcaaaccatgacgtttttgtcaggtaacatgaggatatggtctggattgatccctctctaattttgaaatcctaaatattgatcccaacttccgaccagttcaacaaaagtgaaggctattggacaaagagcgagctctagcactaaaggaagaggtagagaagctacaaaataacaacttcataattgaagctttctacccggcttgggttgccaatctcgtactggtatccaagccgaaaaaaaatggcgagtgtgtattgatttcatagacctcaacaaggtgtggcccaaagactgttttctacttccaaaaatcaatcagcttgtggacgcaatagtaggacactaaatattgggattcatggacgcttattcggggtacaaccaaattaaaatgcgtccaccagacaaagaacatacaagtttccgaacagatataggtctatagtgctataaagtcatgccacttggtctcaaaaatgatggagacacatagcaaagattggtaaacaagatgtttaaagcctagatcgggcgaaacatggaagtatatgtggatcacatgctcgtcaaatgtaggaatgctggggggcacatagatgacttggacgaatgcttcaaagtcctcaggaaatacaacatgaaactcactcccttaaagtgctactttggagaaagctagggtaagtttctgggctttattgtcagcccccgaggaattgaagccaatctggagaagcttcaagccctcctggatatgaaatcgtcaaccagaaccaaggaagtacaaagttcaacaaacaagtgtgttccattcttcaacgtcgtgcaaggaaacaagcaatttgagtggatggagtaatgtgaaagagcttttcatgtggtaaaaacgcaacttgcaaaacctctcgtactcttgaaacctctagatggagaagaacttggcatatgcttggctatcactgagaatgctgcaagtgccgtgctgatcaaagaggagaacaatatacaacatctggtctattacattagtaaaacacttattgaggccgaaggccgatacccattgatagagaaactcccttcctgcctgattctagcaacaagaaagttaaggccctattttcaagctcatcctgtttgagtgtacatagatcaaccgttccgccaaatattacaaaagatggacgcctctggatagttacagaagtggacggtagaactgggtcattaagaaattacttttccaccctaaacagcaatcaaatgccaggccttagcagactttgtagtagaatgca

SEQ ID NO: 169776 - DNA, 540 bp, Cannabis sativa
ttttttttttttttgagaacaaattcaaatacctttcagaaaaaagaaacttcaaatatagttttcaaaataaaaataatagtgacaaggttattgattaaaacttaaaatttaaaataaataaagaaatttctcaaataaataaatacataaataaatttgaatttaattaggcggacatgtgtagatcttatctagttataatggttactttggcctttcctatcatcttggtaggtacaagatggttatacgttaaaaatgacattttacagttcgaagattgtttctattaaataaaaagcgaatagtagtacgtattttatgtactttcacattgatatttcaaaactctattatggcttatccaaatattagaattttattacaggatgtggattaatagtgttgatcgaggttttcggcaaacaataaaataataataaattaaagaacggtaagaaattaggagaaagatttttacgtggttggggcgttaatgaaccttagtccacgagtctgtatatttatgagtgtatt

SEQ ID NO: 169777 - DNA, 688 bp, Cannabis sativa
atatttagtaatacattgaaaccattctctatacctttctttctcatggacttttggaaaaaaaaaattacattacaaaaatttgtttggattagaggatttgtcctatcaaccattttgattctcttacgaaaactaatgtatatgtttatacttatataggcacattgactaacatattgtacatatcatatactttttgtcaccataccatctttttcaattttgaatcttttttttagaaaaagggttttgatattgaatattgacatttcactttcaagtctattgtatacatatatgtaaaagaaacaaaaacaaaacaattcaaactctatgaattgtgtgtgtgtttattattttcttttatagtttaagaaacaaatttttgtttgattatgtaaattgaatgacctcattaatagtattggtttaaggttaaagtagtgatgtaaatacatgtcgagttttttaacatggcatgaaatcagtacgagtataattacacaaaaaatatggacttgaaataacacggtacgatactataaattggcacgacacgattcaaaaaatatgtaattaagcatgacacgacacaaaaaacacaacacataagtacgaatagtccaacctgaaatgcacaataaacgataagcccaaaaaacacagcatgaaatatttaaaaaaa

SEQ ID NO: 169778 - DNA, 625 bp, Cannabis sativa
gtgtatctctttttctaatctaatattgttacattcgatatttttggtgttttatttttttattaatattttattcagttataatataacctatatcatgtaaaaaaaacaatgaagtgaagtagtaataagtgaaaagaaagagcatcataattagggttctaccaaaccccataacgtgaaagccggggactcatgtgctcctgtcaaacccttctccctacctacctatatacctatctaactatacctacatatatagctctatatatacccacctttctccatcttatatattaattcattttgttttttaattttcttacaatcttttcattacacaattttattaggattattaccaattattcatgtgggcgttgtgctttctgtctcaaatttaggaatattttgatcaattttttaacaaacacaataattgtacacactacaagaaatgtcacttttaccagcacagtttgttactgtgctgtgtgctggtaaaagttatttttaccagcacatttcgcaaactgcactggcaaagaaatcaaagttttactagcatataattgcaatggctaaaatctaacttttaccagcgcatttatgtgctgggaaaagt

SEQ ID NO: 169779 - DNA, 663 bp, Cannabis sativa
cattacaaaattataaatacccaaataatacccagaaaaatttaagcaaacctttcatcttggacatctaaaaaacgtccgtttaacacattttagactacatttacactcaagtggtctccattcatatatattcatagatctttcttcacttttataagtatgagatgaagaaaacatgagaaaaaaaaaaaaaaagatgattaaagagggaagacacaaaccagccgtggagaacatagccgtgaaattaatttagaagattttttttaaacaatactatcatgtcattcattaaacgacaaaattaaaagtgaatggaaggactatgttccgtcatttgttataatttgagaggtattcttaacaagcaatatataataaagggtaaaatttgatatggtaaaaaattcttaggataaaaatgcaattgattcaaaaataatatacaaacaataagaaaaacaacaaaataataagaatatattataaaaatacattaaaagatcttattttctgtaaataaaaatcttaaaaaatattcaaaattggggtcctttcaatattatacctaaaattgattttatttataaaaatacctttaagaaaattatttgcacaaataccgattgccacgtcagcataaataccgaaatataaaat

SEQ ID NO: 169780 - DNA, 685 bp, Cannabis sativa
tttggagagaactgacgattataatagtgtcagagtagtagtggcaggtctattggaaattgacattaaagtgaaacccattggtaaaaaagagaacatagtccataactatcaaatcccaaatggagattcttttgctcacttggaaactcaattcaaattctttaatctctcggattctgtggaaggagttttgggtcagacttacaggcctggatacgttagtcctgtcaaggttggagttccaatgccgatgatgggtggggaagataagtaccaaacgacgtcgttgtattctcctgtctgtaagttttgcaggtttcaaaggccatccatgtttgaagaagttgctaagttctaatctatgattatgatgatgataatagaaattaatcataaaaatatggaaattttttctttggttttgagaaataacatcataattgtatatgatgatatacaaattaaaatggaaaataaaagggtatagcagcccatgtattaattcattaatttttttattacaattaatgtaatcattgttatttgattaactttgaactatttggattatttgttactttttatttgctaataaaagtgaaaaaaaaattaagggaattacctcgtatactatttttttaacttatttatttatttttttattaaatttacggtttgggtt

SEQ ID NO: 169781 - DNA, 1298 bp, Cannabis sativa
  modified_base (761)..(766): a, c, t, g, unknown or other
tatgcgtgatcggtggattcattaagtaaaagcggaagcgtagcgacaagagttgccgtgttaatcagtgtgtatatatctaaatatatcgttactacatagatttgtaaatatatttagattattataattagcgttaacttaattatagatttttaagtatgtttagatgttattagcgttagttcaattattgtgactatacagaattttaaatatatttagacgataataactttagtttaattattgtgactatatagatttgtacaaaattaagaaactaatgcagggtaaaaattgcaaattttctattttttccctattttcaaatgtaacgattgaaaaaaaccatcgctaaaaaaattaaaaaacgtaatcagactgaaaggcacggtttaaaaccgtctgctataactgggtataggcgacgattaataaccgtgcctaatactataggcgacgtctcctataaaccgtcgcctatacccagttataggcaacgattttaaaccgtcgagaaacccacattagcgacggttttgaaccttcgcttattctgcaccttatacgacggtcgtataggcaacagttatagaaaccgacgggaatactttaaacaactgttgaaaaacattaggaaaacccatttttgtagtagtgtcaagatgttataaacatggcggtgcatctgaacaatcgacccctgcctccatgattagttgatcttaggtcaatcgatcttaatcctgatatggttnnnnnngatctcaattgtattatttatgttcttggagttgttcgttaaagttgacctatggatcggcccaatacttacatcttgggaacattgtagtataattaagtgggagcgctaatcatagatatggaatacatagcttctataagtatttagaagtgaaatgataatttccttcgagtttggcttagtagagataaatgattgaggctttatttcaataattatattagttaactgaaatattatttataggtagctaattattttaaggataaaatacatcgaagggtagaacagtagatttgtccctatttgatgtagatcatctatagaggatcattgactatttagattgaaacaatgggtaattcaaatggcatctatttttggtaataatgcgttctatgtaattaagagttaatatccaaatttatagtggcacaaggaggaataaacaagttaggaaatttacttggtaaatttcggatctacttattgtaagcttgattacataggccaatggtccccgcactag

SEQ ID NO: 169782 - DNA, 778 bp, Cannabis sativa
tgtaatgcagtttgaagatgatgatggaagagttcatatggagctgaagtattcttttgagatcaaaaagcggtcttagttgaattttgatttttctcgatcttttcgaccttgttccgtaggagcaagttagatttttttttcttttttaatttttatgaattatatatatacccttttgattattaccaaatggtgaattggatttcattttatggacttatgtgtgatacaaatttagaagtgaatttatagagtttctctttttatgttttgtctacatctacaaatgtgataatacttggggttgtgtttggtagattagagaagaaaatgggaaattacaaaaaaaaaatatatatattaattatttattatacgtttcaaattagaagaaaatcatatttgtcttaattagggtcaaatttagtattaaacttttaataaaaaaaaatccaaaatatgctttaaaaagaatataacatcatggtcaaattaatgtataaatattaatttttttccaaatatattgaaagtttaaaataaaattaaatagatttaggtgaaatatctctattatatatgtcaattacaaagataaatatcttatatttaggttaaacttatatttatagtgttgtaaatccgaagaaaatgaagaaattaaggaaatagttaaggtgggttgcttggaatggaatgagaaaaattaaagttgagaaatttgattggaaaaattttggtagggtgtccttttgcaattttctttagtatttat

SEQ ID NO: 169783 - DNA, 689 bp, Cannabis sativa
atagaccttgaggaagccttcttgcttctcggaaggtacgaaatgaagctcaatcccaagaagtgtacatttggtatctcctctaagaagtttttaggtttcatcatcagctcctaagaaattgaagcaaacccagagaaaattaaagccttcaatgatatgccatctccccaaaagcacaaggatgtgcagagtgttattagaaggagtgcagctctcagtaggttcatcttcaaatctataaataagtgcatctcattcttcaatgtgttgcgaggaaacaagaagtttaaatcggctgaagagtgtggtgaagacttctagagactaaaggatcatttcagcaaagctcccatttagtcaaagccggtggaaggggaagatttgtaccttcacttggtagtgtttgatcacgccatttgtgctaccttagtgaaagaagaaggaagggtccaactaccgttgtactacgtcaacaaaggattactgggtgcataatccaggtatcccatgattgaaaatctaacattgttcttactagtcgcctcctgaaagctgagaccctactttcaagcccatgtcatcaaagtattgacaaatcaccctttctaccaagtgcttcaaaagccaaaagcatccaatagactgttaaaatggcaatggaacttagccaatttgacattcagtat

SEQ ID NO: 169784 - DNA, 641 bp, Cannabis sativa
aaaaaaaaattgtttgggataaaacattacacaaaaatcgaacttgtgaattattacttagtttgatatgagatgagagtactaaatttggctggaattgtaataaaatataataaattgatctattaattatttgcatatatatatatatatagattatatacatacatgtatatgtatatataaatatgaatttggatatagattactaatttttttcttatttcaaattttcagtcactaaaaagtgtttaatttgtttaataaaatataattaataagttttgttttaaaaaatatacataattaataagttttgttttaaaaaatatacataattaataagtatttttttaaaaaaattacagttaattaataagtgtataaagcttaggggtgttcattagatcacatccaatatttttagggctatccagatccaattatatattagatgttagattttagcatctgatctgatccaattaatttcaatcatccaatcgatccaacatctaatggatgttggattggatgggttctagctatccgttggatgtatttcatatatatttattagtttaatttagatttatttaatattttagacctagtattttttagatcggattagatccatc

SEQ ID NO: 169785 - DNA, 593 bp, Cannabis sativa
ggatatctattgtttcataactcttgagaaagagtgacttggaataatcaagtttggggtagatttaatactcccaagcacaacttcatctattggttagccatctaggaaaggtaaaaaatcaaagaaagattacatagattcaatgtaattgaagatgccgattgtgtgctttgtcaagcaaaggatgaaactttagaacacttgttcttgcactgttcttttagccaaatgtgtcttcaccagatgaagagttagcttggctggcagtcatcctctatttcttcagagaaggtgacaagatggatagaaagagcaaagatatatcgtgtcaaaaagaaggtttatgcagcagttctagcttctctattgtacaatgtatggagagctaaaaatgggagaatttttctagaagaaaatgtaaatataaaagttacagtgcatagagcaaagaatgatgtaaaaactagaatacaaagcatatggcctaagtgtttggtgttattttaccaagatctagatttactaccaagtatgttgtgtaacattttaaataagaatttctaaaacaatggaatttaaacacatataaa

SEQ ID NO: 169786 - DNA, 1250 bp, Cannabis sativa
agaacattaaccttgaattaaaagttgtacattgtatttataatagtcctaagtggacaaaaggaccaactgtcataactgtcaagacagttatgacattaacaacttaactaactatattacaggacacacaaaatacaacaattctccaccttgacctgtaatatatccaggaaagaatcttgagacacttaaatgttgttgatgctcgaaacattcagtatttggagacactttgagaacttagcagtaggcagggattttgtgagtacatcagttgcattatcatcagttgaaaccttgagtagtttgatctttcctcctgagattatatctcgaataaagtgcatccttacatcaatatgctttgttctctcatggaacacttggtttctactgagatgaagagcactttggctatcacacatgactggtatctctctttgattgatgccaagttctgttgtaatccctttaagccagagagcttctttaatagcttcagtgcaagctatatatatactctgcctcggttgtagataatgccactatggattgaaggttggatttccaactgattgtacacccattcagttgaaaaacatagccagactgagatctcctagtgtcaatatctcctgcatagtccgagtctacaaaaccccttacttcttctccattacaatttgtaccatatataagccctatagttggtgtccctttaagatatctcatgatccaattgactattgtccagtgatgcttccctggttgtcccataaatctgctcaccatactcacagagtagtagagatcaggtctggtgcataccattagatacataatgcttcctactacactagtgtatggtatattctccataagtatgtgatcttcatcagctgctggagcctgagatttggacagtttaacctattgtgtatagggattgcagactggttttacatcctgaaaaccaaatctgtttaagattttggaaatgtaaccactttgtgttagcatgagtttccttgctgatctgtccctagtgatttccattcctagaatcttcctagctggtccaagatccttcatttcgaattcttggttcagcatcttctttactttgttaatttctccaatgctcttgctagcaatgagcatatcataaacatataggagaagatagacaattccttctgtgcttttgacatatacacaattgtcataagtgttgggttttgtgccct

SEQ ID NO: 169787 - DNA, 1431 bp, Cannabis sativa
ttggaagttgtgtaccggcggttcagcttctacccaattggtgtagtagtccgctgctacaatggcatactttgcctctacccttcctgttggtagggctcctattagatatatctaccacatggcaaagggccaagggctggtcatgctggtgagctcagcgggcggaccccgactgtagtttgcgtgtttctagagtttgtcgcatattttagcaaatccttggcgtccttctctagagaaggccaatagtatccttgtttcaaaatcttacgagacatggaatgcccccagcatggttaccatattccccctcatgtatggcggacatgattggctatacttctccctcgtctacgcactgcaggaggggagtcaaaaatcctctcttgcataacactctgtcaataactccgtaacaggtcaccttatataccaccctcctggcctcctttttatcggctggtaactctcctttcaagatgtagctgaggtagggggtcatccaagaatccccattagacactacgtatgcctgctcctcctctatggtaggccttttgagatattccacgagtattgaatctaaggtatcgatatcccgagtcgatgcaaactttgcctatgcatcgacattgacgttgtcatctcagggtatctgttccatagtgtagttttgtagctactctagataaattttcaccttagctaggtacgccatcaacctactccccttcccttggtattctcccttaacttgaaacacaaccagctgcgaatcactaaagacgtctagctcggtgattttcaattctttcgccaaacgcaggccagctagcaaagccttgtacttagcttcattataggaagccttaaactcgaatcttactgcataatacatcttctgtcctccgggtgcaatcattaccactcccgccctagcgcctccatcattcgacgctccatctacatgcaacttccatctcgctgccccatctcgggcgtctccctccaacatctcttgacatttcaattctttaggttgataggtgaattcagctataaagtcggtgagtacctacccattgaccgtcatccacggtacataagaaatgtcgaattggttgagttcaatcgtccattttagaaggcgtcctaaggtttcaggattgtgcaggattggcgcaaagggtggttggtcagcacgactatggagtgagcatggaagtacgactttagtttcctagaggccatcacaagcgcataagccaacttctccatttctagatagcgagtctcagcgtctactaatcttttactaacgcagtacactagttgttgctgctgttgggttttgtgccctaaataaaacccattgcaatctgattagttatcaatttaagagattttaagtgatttatgttaacatgt

SEQ ID NO: 169788 - DNA, 685 bp, Cannabis sativa
tgaatctctcagtataatttctctcacaaaacaaaggaatttttggatttaagaatattgggatgttctgaattatagaaaaaaaatgagatttttgtatttgaatagaattgaaaactttaattgttctcaatcgtaggaaaaaaaaaattggatttaagaatggaatttttgagtttaagaatagaattgaaaaattgcaatggttaattttcttgttgtcattggtagaaaacaaaattctcaatcgtaggaaagaaaatattttatttaatttttttttacttttaatatattttattgggattgaaaactttcaattattaactctcttatattttttattaaaaaaaacgttaaaccaagaattctttaacaaccacatttatttttgaatagaaaacttaaaagaaaaagtcacccatgaatttctcataaaccaaaaattcaaaggcacactttatatagaataaagaataaatataatttagaatttaaattacccaacttttttcttttttttttttctctaaaatttttaatattacttcataaatataatattactttcctcgcataagactttgacaattagaattcgctgaaaatatatataaatatatatatatattcttatcaatagaatagattcttgactatcatcaactattattattattattat

SEQ ID NO: 169789 - DNA, 897 bp, Cannabis sativa
tatagtttatactttttattttgatgaaaatgaaaatagtttataggttttttttttctttttgcaagaaatagtttataggctgttacttataaagtctctacaatacaaatttgtctatatatattacattatctgtatgtgtgttatgcacaaataaagattgaatatttgcaacaaaatctaccaatttctctctcttcttctgtgaaatacacgtatactctctttctctctctctctccacacatatatacacccgtgcatacaatatagagagagaaagtcagcttctctataaaaaaggagtgaacccctttcaaagcctcactccattttttctcttcctcagattttttttagagaaagagtgaaagtgagaaaggatttggcttgaacaagacgttattttaattttactttttattttttgttctgatttctctctgctttacaacatttgttcctgcatttttacacattttcaagaagaaggttcttttttcccctttccttttaaaataactgatccgagaactagggatttttggcttgtgtgggattgggtatgaggttcaacggagaaaacccagctgagaaagaaggagatgaagaagaacagaagggtagggaagtaaattccctccgaggagttgggtttcatcatcaaccacagaagctcatcgttggctatgccttaacgtccaaaaagaagaaaagcttcttacagcctaagctcttggctttagctcggtatgtaataaatttgtatctaattttttaaacccttttctggatatccttgtgttctctattacatgtttgtattttgccttatatatatatataaatatatatctgtttttttttttttttttggtttttcttttttttttt

SEQ ID NO: 169790 - DNA, 509 bp, Cannabis sativa
tggtcacttttccagaactttcgtcgttttaattcattgtcgtttactaaaaactattgtccgatgttagtattctccaagacccgtggttgccagacttggataacccatatgttacttcggttaatcttgggttggtcaatcaaagggtttctagtctgtttcggatgggagagttggcttgggacttggaattggtggaggatatgtttgaagctagagataaaaatcttattgtttctattcagcttagtgctacagctgtgaaggatgattggtattggagttgtgaatcatcggggttttacaccgtgaaaagtgcttataaactgttgcaagatatgtcttcagctggtgtgaatgttgaaaaccaggcgagatggaagtttttgtggcataataaatcttgttcggctatggaggtggttcggtcagctagagttgtcattgaccaatggaagaatgctcaatctcaaaaaggtggtgcgttgttagttaatgatattaac

SEQ ID NO: 169791 - DNA, 507 bp, Cannabis sativa
tatattatattaattttaagattgttcaattaaaaacagataagaaaaggaaaaactgtgatgccatcagtgggacctccttagcaatttgagacgttgcactgaccttataaaggttctgcagaatcaaatattatttaatataattagttagaggttcttcctctcatattataacataaatatttaatattcatatgtaaccaagattatataatacattataatccacggcccttagatatatctcattttgtactctcaaatctcattggaaccatcctctttctacccctacatataataactgaatagcatatataaaatttagattgtatatagatagggaaattctttgtatacttttaccttgatcatgaaggcattttttattttgaaactttgagaaataataacaatatggaaaatttacaaaaatactggaatttgggttaagttttacaaaaatattgttacacggaaaagttttcaaaaatactatatttt

SEQ ID NO: 169792 - DNA, 1327 bp, Cannabis sativa
caaaaacaactaagtattagaaaagaaaaaaaaccttctggactcttccttcaggccgttagagggtttcttcgtcaccctgcttctgtcgtcgttgtcattgtcgccgacaatcgatgttcttgtccttccgggatctacgtctcctggtgacggttgttctcagaaatacccaatcgaaggatgttggttcacgctattaacattctcgcacactagacagccatcatcacgggctactccaccattacaaacctaggtctccttcgagcaggtacgtatcacttccaccattactccctgttttatgtgacttctgccattaatttttcttttccaatccttaattttttcaagatccttggaccattaatattgatgattaataataaacacttataaatccctcattacattataagaagaagacaaagaaaatatcagtctcatttcttttagacctttttaataacaataatttagggtaagtttcaaaaaaaagaaagaaagaaaaagaaaaacaataatttagggttgatatataggaataggggtctgtttataagtctcctgaatagtctcttgagaagttagttcatcgagatgatcagtacgatattagtgtatgaagtcaagtgagaaggacattatatgtataattaattaataatttgcaaatatttatgacatatatgcacacatatttgtcgtttgttttatttttggttatttgacactacttatatataaatgtgggggtattccctacattttatctcctccatgcttgtacatttgtttttttttaaaaaaaaatggatagtaataatttaaaaattctaacagctatagtacgtaattttaaggaccacatactacatacacattattatattcaatcaaattgatcttcacaatcatttttcatgaattggcaaaaataataatccaattatcctgaattcaataaaggattcacttaatttggtattgataataaataaataataagtactcatctctctctttttgttttctggtggataataataatgattccttttttattgcggaccaagcaaatattaatgcattattttgttagtgcatggtacatttatattagagatggaaattgggcggttaatgtacggggaatgcaatccccaccccatctacgttacctatttatacccccatttccgccccatccttgtttaataaccaactgatttggggtagaggagtacccatcggttatggagaacccatcgggtatccattaaggtaaaatgaaaaaaaaaattaaaataattgaaaaaaataa

SEQ ID NO: 169793 - DNA, 775 bp, Cannabis sativa
gtagcccgattgaactgtatattcgccagaattatgattattccaaacccaaatgtcctctgtagcagaggcagcaagaggaatactgaggattcgagccacatctacaactgaaaaatccctcttaagtgaaaccaggtcccaattgaagtcagcagtgatataattggaaacacaattgtgagataaaccagtataacaaactggtgtgaattgagtattgcctggaatccaaggatccgaattacatctaatgttttggccagttccaactttaagacgcactccttgaattaacaaatcacgcccccaacataaaccttgccaagtcattgaagaataggaacctttagcagcagccatgaagtcaccatttggatagtatcttgccttcaaaattcttgcaagcaaagtatttggattttggaagatacgccacgcttgcttcgctaacaaggcttgattgaagtgaacgtaagaacgaaagcccatacccccttccatttttgttttacaaaggaatttccatttcttccaatgtgttttcctatttttttcggttgcaccccaccaaaattgagccatcatagagtccaattgattgcaaaaacttttagaaagtttaaaacaactcatagcataagttgggattgattggacgacagctttcaaaagaatcttttcctccaatggagaaaagtttatcattccaggcatgtaacaatttccaaattcgctctttaatatctgcaaacaaaagcttcttatcttgctc

SEQ ID NO: 169794 - DNA, 1996 bp, Cannabis sativa
  modified_base (1607)..(1608): a, c, t, g, unknown or other
aattaatttaaggttggaatgtaaattaatgtataagtaataaagtaaattaatttggataattataaattaggtaagaggtatctgttgctttgtaataaaatcataattgttgtaaattttaaggatctatataaatgtaggcatatagtatttgctggtaacaatattatatttatgtttattttcatatataggtgaaacctaccaatagggcattaataatttaaatacaattactgagtaacatatatggcattgtacaaatatcatattggcgcccatccacactgtcgagcatagtacaattttattataaatgataatagtaaagtactgactgtattatacatatattttactctaatttttaactttttctccttgatgaatttgcataatatatatatcatgctacttaattttatcacaatatatttgattaattattatacaagctacaatactcaaaacaattaattataatagaattatatattcaatagtgattaccacttaaacaaagttaattaggaggtatttggtaataattttattttttaattataaaaataaaagtaaaatttatatttttaaaaatacaaaataaaagtgtattttttaatttttattttttaattttatttaagtcaagtctagatccgtgtctggggccggggccggggccgtagtctgagttcaggactggggctggagcatgagtccgggtccacaggtccgaattagagtcggagtccaaaatattgattaagaaaaaaaaactatttaaaaaattttgaaagtgattttttttattttcaaaattttaaaaattttgattctcaattaaaaaataaaaaaaaatttatagagcatatttttagaaaatatgtttacttttcgaattacaaaaataaaaaattaaaaaatattgctaaacacactatttttctaagaattggtgctatgcatctcctaaaaaaatgcatcttatttatatttttcacttatggaaaatataatttattcataaataaataaaaaaaaatacataatttatacagcatataatatatattataaatatttagaatattttataataaaaaatatttttaaaaaataatattaaaaataaaactcaaaccataatttattttagggaatatattgatttagtaccttgacttttatcgaaaaatatatttgatattttgtgtttttaataataattatttggtaccctaaaccctaagttatatgtaatcaaatagtttttagatatatgtaatcaaataattaaatttgaatccagaatttataaaattaaagacaatttaattttattgataaaattttatcaaaaaattttaagtttagagtaccaattatatgtatggtttaaaaacacagactgccaaataagcattattaaaaatacagaataccaaacctatatttggataaaacataagataccaaatatgtatacaccttttattttagggaaactacctcatttattatttttcaactttttttttttttcaagtttacggttttttggttgtgatttaagttgctccgctagttgcaataggaatttnnatgtagaattctgtaaaaattaaaaaaaaaattgtttgaagtgtaaaaataaaaaagtctcattattttatatgcgtgtaaaaaaatggtacactttttttattagctcaaaatcgaatttctacatatataatcatttgcaaattaagattatcttaattaaaccacaaagcaatatagatggcatatttaaacataaaattctaattagtcggcctttgaaatttactctcttctaattaagaaaaacaatattattcttttttttttaaaaaaaaaaaggaaaacaatgagcatgtttggtattgttttccgttttttgttttcaaaaaattgtttttagaaatgagaacaaaaaataatttttgaagtttttaaaaacaagtca

SEQ ID NO: 169795 - DNA, 1221 bp, Cannabis sativa
cttaaacttaccctctcccacggtagggctggccaggctctagccaatctaggactgtagctgaatcttgaaaggccaatcaaccaagcccatgcaacattaaatccttcactgcaagcatagttggatcaaatacgagatatgaataagggcttggcaggcctgaaaccatcagaccttgagctggataggtcaaagggccgacctttctctacatacatcaataccttgcccttacctaagttcaagatgccagcttagaagatgtacacgaggaaagaagatcccttagtacacctaaaatagtttgagatccaagcgaatctccaacaagtatctggtgaagtgcgatgtcgaatctttttggcaaccttggctaaaatagcctaacagtgttatttcaagctagccccaagaagatttaattcttgggaataattttcccgagagttctatattcaattctctgcctcaagacaaataccttcatgactggaggatcttgtcaaaataaagtaaagacaagacaaacccctaaaagattgcattcaacggttcatggttgaagccaccaaggtctaaggcctgatagaagaagaccaatatatgaccatactcggaggcatcttaccattgagtgaattctggaaagatattagaaagatctcaacgagcaacatgaaggagctatttgagcgagctgatggcttcataaagttagaaaaagttgtttggctatcccaaacaagagggaagatcaatgtttaataatgttatcccattttttgcaccatgacgtggcaacacatactggtgatacgtgtctgttattctctacatttagctagagagatattctgaacagacttcagtcatacatctgtacggacaaagtctacctaaccaagcagggcaagggcagatgatccggacaacaaatgaagtcatttctctgagcaatgtatcaagacttagctacttcaattttgatatcgtgaagctcaagcacacaagcaatccctaaaatcatgggattgtattaaaaggatatggaaagctgtctgaatccctcaatttatgtattctaaaaatgtaatatatgttcttgccaattatagatactgtaagcaaaagggaaaccttccctcatgcatttagccctataaatagtgatccatcctcactgtaaaaggggttgagagaattgcttcagagagatct

SEQ ID NO: 169796 - DNA, 632 bp, Cannabis sativa
agaaaagtctttatgtttgacttcaaatgccaaagcacccttgttccctcttcaagttatagataaataaagctgattgaaagacgaaagagctggatgatgagaaagttatgaattagcaaaatggcctctcacttattttgtagtataaatgtgtatatattcctcacacatctaaagggaacaggataattttaatattagacatgatgcatggtatctgactattggtagcttgtagaaagaaaacatgaacagacatattatcctagtatgtgtatgatgataggattgttctgtaaaataagggcatatttggtatggaggattggattatatagactaatttgtctagtctagtgtttgggtatactacaagtttggataactaatctagtcaatctcatctaggattatttatcctatccagtatggtgggataaataatcctatataagtaagattttttttttattgtttcttttttcaattatgattttttaatatattttaaatgtaataagaattttaatgaaagaattattataaatttacttataattttttatcaaaaacttttttttattaaaattagtaaaaatgtataattttgaattattatacataagttt

SEQ ID NO: 169797 - DNA, 1045 bp, Cannabis sativa
acaaaatcaaaagtcttttgtcaatccagttccaagctcttccatgtacttctaaagtttgaagtccctccactaggcaacattttttttctttccaacagattaaactacaatgtaatattaacaagttttcccatcatgaactcaatccctgttctgcttacatttctagcaacctttggtaagatcttttcgttatacaaacttgtcttagaccgctttagtttaaagtaccgattactaattctcctcccaaaaagttgggaatcacacgattctaatcttcaatcagctctaacaatcatcactgcctcctaattaaatatttcaaaatgataagatatttgaggctcttatgatttgtataaacttcgtacttttgccaaataggtaaaagagctaaggtcccatggcagaagccactactatcgattcaaaaccataactaaaatactattactcacacttcttcaatcatttagaagcacacgcaataactcttttagactgtatcaaaatacaatataatccttgtttagaagtgtcacatcaaataacaattttcccttcactgtctgacaatattaacacttggggaagggttaacctctgtttcaattctttcgatttgattccactaagggcgtagacaaccctcaacaaatattctatagcatcctattagttctagaaaacctctcaccttcactacaaatttggggtcaacaaaactcgcgtttcttatatttagcacaaaacttatgcttccagagatgttacaacaccatccaaagatgtctctcatatgtttcctatgaatgggaagaaatcataatatcgttaatgaagaaaactacgaagtcatcgatacaaaaactatttagggaatatcctcctttcgagtcttcaactggcaattaccagatcaaagatcgatcctaccctaaacttgttcaacataacatctgttgacttcgcttttacccaatcacaatgagtctttttgataagcgataaacgatatgtcgtaataagaatttgtagt

SEQ ID NO: 169798 - DNA, 576 bp, Cannabis sativa
tcgttgatcggcgacgccggccgatgacgtacaaacgtgaagcaagaggaagacgacgctcctatactgattgtcaatcctggacctagatgtagacgcgatatttttctctctcctaagatgtacgactcgttaggttttctctttcctagacgtacagattgtattattattattattatttaaaatgttaataattattatttttaactttaaataatattactattttttaacgaaatattttttagttaatcttttaataaattactttttaaataaataaataatttttagtattttattcataatttttttcttaagagattgattgtaatttataagataccattagaaagataattgtaaaatctataacttttttatgaaatattatttttcatattgcattatttaaaagtcaaacgttagaaaatatcgatagtaaactcaagagtaatttctatacaatatagaatacaataataatatgtaataattagaaaatgcgtacctgattgatccataacaattaccgtaatttgatagtgcaatactatcaactaagtctttctc

SEQ ID NO: 169799 - DNA, 690 bp, Cannabis sativa
atgaatctcatgtaaacaacatattactaatataaagtaacatgaaaacaacatgtaaacaacatatacctgtcgatttgaattcttggcatagctgtatgggccatctcctcctgtcataggaaacgattcttccatcttcttcaagctattcaagtatatttacataaatataaatatatatatgagtctaataattaagaagaagagcaatactatcaaaatttgaaacttgttcttctctatgtataagtggaattgggattggaatggagcaaagattgctgatatttccggatgaccatcttcttttaaaatgaatggacaaaaataaatgtctaatttttgcatttcttaaataaaaattgtccatcaaactaatatatggacgacctttattttgaacaattaattattttatttatacttttgaatttttgataattttagaaaagatatattttaatcaatttttaagtaatgttagatacattatctaatcttacttataaagtatagatcacatcacaaagtattgactttacatttatatttataagtgacaatcattactctttaatctttattatagccaaaaaaagtagagtaaatggatccaagaaaaaagaaagaggaaattacactttatacccttttttatattgtcctcttttatttttaccctctttt

SEQ ID NO: 169800 - DNA, 960 bp, Cannabis sativa
agagagagagagagagaggaaccaggagtgcgagaattgggtttcattataaggcggtcagatactggatgtggcagacagagctggcaatggaggaatcactattgggagagagtggagacaaaagagaaacagagattgacgaagaagataaatctagggttcttttttattttttatttaattatatatttacttatttatttagtaatgatttttaaaagacagattagacatataatttaattattatttacaatttaaaataaattataaattttaattagaaatataacgtgaacaaattttatgttgacacatgttactttagtaaatctatttagtatttaatggattagtagtaaccgaaatggatggaaattaacttaaggtatttaatccgtggaaaaaaataatataatattttaaatgtataaaatcaaaaacttgttaaagtatttatgccgtaaataatctattattatatatactaatatcaagagtatagtacttgttatattatttaaataatataatatatagattaaatatgtgtaataaattaataatatgtaatatatatgacaatatatattatttattattttgtaatatatgagagagttacttgtcactatgagtaacttccatatttatcaccaatattaagtatgtaaaaggtattacacgtcttaatttagaattcttaatgctataagagttatggtgtgtccatgagttacatttgagtccataacatccatagggggttatgagtttgaatttcaaatggttatatcctaaacactatataaagaggtttcaggtgctcatattgagatgaaccaagtaatctatcaaaaatgcacattgctagaaaactctaaggcttgataatttctaaagttatttctatgagagttctcttagtgcttagagatagggaaaaataagcttttg

SEQ ID NO: 169801 - DNA, 1194 bp, Cannabis sativa
tatagtagttgttacccctgccatttcccaatactgactcaccaagggacaagtcaccaaaatgtgtaaggtaattttatcgtgaagaccacaaattggacacaaactatccataaccactttcttagttataagcataaccatagtaggtagacaattcacataatctctccacatgaaattttttattttgggagggattttcaatctccaaagctcattctaaaattcaaaagttttttgttatataccagtagtcgtttaatttctgcaacaagttgtatgagctcttgacaaaataaaagtcactcatatcatgaaaccagtaataagaacttccaccagggttttgatgaaaggggatactaacaatggttgctctatctctctcgttaaaaagctcggctaataggtccaagttccagccaacaccacctgattgcatcaagttctcaaccgtagcagtaacaagaacagggttagttgatgaaatgaagggattatcctccaaagacagccaaggttcccctagaacagctaagttcttgacatcaccaacttgccatcgaataacaccatgcttgacaatgttttgagcctcccaaatactccgctaaacaaaactcgaattgttccccaactgagctgaaagatacgtaccttaggggtagtaacgggctttgaaattttttgaagctaaggaatgggatcgaaccagaagtctccacctttgtttgccaagaaaagagatgttatgatctctaaggctccaacaactcatgctcccaacacttttatgcatgcataatttatcccaagatatccaatggatgcccttctctttagaattggatgacttacaccaaattttgccatatgttgctccatatcttgactaacatcaaggggaagaagaaatacactcatggcataactcggcaaagcttgcgccactgttttgatgaatagctctttactcgctttagatagaaatttagagtcccaattgaggactttcttgcggactatttcctttaagtaatccaaaactgagtttttattccttcccattgtacttagaaagtctaaggtacttgtgttgggttttatgtcctaaataaaactatttttcaatgtaatctttattctttaaataccaataaagaaatagaagtatttatcactcatttgtgt

SEQ ID NO: 169802 - DNA, 840 bp, Cannabis sativa
aaaaaaaaaaaaaagctaaaaatcaaaatcgcaggtgctctacaaaaccgacctataaaataacaataaataaaactctattactacataatttaatgaaaaaaataaatataaaatatagattgtaaaataatccatattataatataaaataatctaaataaatgcttgaagtacttatctgttaaaactaaaagatcgttgatgtagaagccacgagtatgaaatggatcacttctcttgtccattaattgcactacaaaactaacttaaacattagaagcaagccatagtaaatgacacaaaaatcgtaaaaggcacaaaagcgctcttaaaaggcataaaaataatcaaatcattacgaaaattattgaatgagaaaccattaacaaaataaatataatcaatatactttaatgtatagttttaaaataagataaaatagataattaattaatatactttaaatatttttatttgactttatttataattatgagaaaaatactataaatatataaaaataggctaaaatcagtataaaatattttttttaaaaaaaggatagtataaaaagcaaaaaattatgtaacttactaaaaaaaattaaataataatactaataaataattgattagactttagaagcaaaattaataataaattaatactactaataaagtgtcaaataaataatataatatggaaaacattaaaaagtagaaataacatagacatttttacaccaaaaatacaaattacacactttattacatataaacctacacacggttaaagcaacttttttaccttttctctatattttattacacatatacc

SEQ ID NO: 169803 - DNA, 567 bp, Cannabis sativa
gtacatcagtagactctttttaagtggtgtattgtaaaaactcaataatatatgtatatatatgtatatatatatgtgcaaacagtgttcaagcattttgaataattaataattaattgggattaactttgcttatcaaaaagataatatattagctactagttatcataaaaatatagctaggcgccaaaagtattatctaatgaatataaatatttccaccatgcatggaataataataataatatgggaaagaacacaataattatttaaaaatttgctgttggaaaacccattaattgatcaaaacaaaactcaaatatattaattaatatatatatctcatactactcattattgaaagaaatgtgtttgaggccacgagagagcttaaaaccctttcatgataattatttaatagataagggtatttttggtacaagaataaattgtaattttattttgggtaaatgctattttagaccctgtgttttgcaaaagttacagattggaccctgtattttgttaaatgacaaaatggaccttatattttctaaaatagtaaaa

SEQ ID NO: 169804 - DNA, 546 bp, Cannabis sativa
taaaataacagatgctattaccaagcaaacctttcaataaaaaaaccacagaaaatgattcagcaaaaaataaaaatgaactttaatattttgaaaaaaatcacaatattaaccaaagtgaaatgctagaaggtacacatagtgtctagcacccttataaaatataatattattatcgcctatcggtatgttttaatatcgaattctacttattttaatgatattaagcactttggaacattattatagcacaccaaaatgcctagtatcttataatttattaagagttttctattatctttattaaagtaaaataagataaagatattaaagatggactaaagttagctaattgtttaaccaaaaaaatccttagctacttttcaaaaaaaaaaaagaaaaagcccccttagctaaatcaagtaaactgtttatttcattgcaatttttttttgaaaaagagaaagaggccaaagtcaaaacttgacccctcccccgacatatatagaaagtctcacttgtggcggaggaataccatggttacaa

SEQ ID NO: 169805 - DNA, 596 bp, Cannabis sativa
gttattgtcttggaccattttacccatatgttgttaggttacatcatgattaagtaagggaaaaatgatcattttgccccaagtttagtaaagatttgtttttagtggattgtgtagagaaatcatttttttttttggctgagtaattaatagattatcactagtctatttaaataatatatcataaaagataaaacaaaatcaaacctcctctcctcttctcctagcttcggcataagcaaaccccaagcaaccaggaattttttttcttcatttttagaccttaatccaagggttttgtagtaggaaattcaaggtcttagttagccaagccaagatatgctccttttccctttctcttctttgaattttcaagtgaaaagttaggtttaagtatcaaaattttatattctatttctgttgaagtttaagttgatgagggactttttttgtagtagttttgagtttgtttgagttgttactggttgattgttgtggatatagttgggtttgagttttaaagctcaaacttagcctaacaatcatagaattcatctaagagttgtatagttgaaattttttgatgcactatattt

SEQ ID NO: 169806 - DNA, 535 bp, Cannabis sativa
tccttagttacagatcttgtttgttgaaaaaaaaaaatccaaaatattgtttgtcaaatatatagttgtcaaaaaattgaatttaaaagtattataattataaactactttggaggcgattctatgctaattttaaatttaagcaaaaataaaaaatagggctaagtaaaaagattaggttattaagaattgcattgaattccccataatgagaataaaagaggataggtcaaggagtttaatcaaattaccacttatttgtaatgtatacaatgatttgatattataagtattattttttcttttatattattactaattttatattattttatttttatcgaaatgggaacttgagcggtggagggcctaaggctgctgcctccttcgtctctctttaggaccggaaattagaaatctcaattcgttgctcgggcatatataacccatttcaattatgaggatagatattataataataaagagtccaaacgatgtcaacaaaattaaattgaattttgtagacatcctagtc

SEQ ID NO: 169807 - DNA, 743 bp, Cannabis sativa
  modified_base (654)..(661): a, c, t, g, unknown or other
ggatgtggtgcaaacaagcacctataagaacacaagattaatcaagatacaataaactaaaacaataaaataacagattaagaaatcgataagagtttaacaaggttcaatcacaaattttagataaaacttggatctaatccctggatttgaagcaactctatggctttattaataattggcaatgatgatgattaacactcaaatcaagctctcacaaactcactctaacggtgattcacacaagttacacataatcttacttgaagctatccaatcaaagacatgaaaaagctttttacatccctcaattttcactcaaaaaactagagaattattatgtcaatctaatatgtgttttaaagacttgatcacccctaaacaagttctaagactatcatatatagccccagacagttaggaaatcccaactgtattaactactagttggtagttattatctttgtgattaggacgaagtgagctacgatggtggttttgtcttgtaaggacaatttattgtcctttcattaatgatttaagagtgatgagactcttgggtacagaataacaaagtggagtctagtacatacaatatgaagttttaaataatattttaataattattgttttatttgggtttttttttttttnnnnnnnnaagcgtttatatattacatcatgttttacctgggactcgaacccaggacctccaacactcacacacccacctatggccactt

SEQ ID NO: 169808 - DNA, 812 bp, Cannabis sativa
agattacaatatttttctctagtataactagaagctcacaacaacatcaagattaaacaatcttggatcaccaatacaatcatcatcatttcaaaagatgaatacacaaagaaaaagtttaaatctcaccaaatggatattgtagaagagcacgttaaagaggacaatcaccaaatcgaaatggtagattcgtagagcaccttgcaagaattcaccacccaaaatttgagctaaaatggatgagaatcaaccactgaattttcaatgtaaagcagcaaaacccactttctctctccagctttcttctcttctttccctttctttttcttggctgctgccaggacggacacactaatagtagtgtgggggctatagtgttaaaaaaattaaatatcttctatttaataaaataattatacaacaaaatagtaaaaagccctcccaaaatgattataattttcatgtaaagtacatataaataattttataatatttaagctcccacaaattaaagattctgagttctggctgctactacttgcttctcacgacagccacaccagctcttttttattttaattgcttcatttgattgggccttaagcccttatttggtcaatccgactaaatgtggtggagccaacaaatgttggtgcaactatctttgagaatgaaggtgcttatggagagggtcttataaatcgagttgttgatggttctttacttgaggcttttgctgtttattattcaagttttgtccaagcagtgattgttgagattatgagtatcaaggaagcattaagttgaataaa

SEQ ID NO: 169809 - DNA, 501 bp, Cannabis sativa
aacacaaatcaagatcaaatctccctgtttgatttcacgaccgcatttgaattgagaccaattttattcccaaaacgcttgaagttgagaattggatacacttatatttattgtcctcaatttgaacagaaaaattaatcgaattcaactctcttgttatttctctcggcaaatccattcgatcgctactcatatcttcctcgcttaatttttccaagcactaaaacggctaatttccatgattttgatgattttgttcaggttctttgaagtaggggatcaggattgatgtgaaatctgttattgatgttgtttaatcggatttccagaggagtgtgcgttaagagggagaaataatgttttccttttcttggttttatttatcttgtaaagtctttattttggcaagttagttgataaaatattttttcttttatggtaagattgttttgcattcatacccgatttcttaccttgtatattcggtttttagttgctctt

SEQ ID NO: 169810 - DNA, 632 bp, Cannabis sativa
aatgaagggttcacttgacttacagggcttgaaaaaccatctaaatcagtagaaaagggaaaacaactcttgtggtctgggtaacgtacctttgagatatccatctaaacgatgacctcgaacaaaaactattaccatagttctccataaagagaaattattgcgatccaattttgagacaaacggattgattcaacgtgcttccaaactaaggcaccactacatgcggagctgaaagttgccctgtgacattcgtcacatttggagccaatgaatgttgattggctgttgagtttgcttctgctagtgtagctggcctgccatcaccttccattgttcttgacacacgtcaaaacaagctctgataccaaattagaaatatacaaaaataaagagaaaaaaaaatgaaataaatgcttttagctcaaataattgtgatgaatcaaatacaatgtatagatagtgctagaatacgcaaagaatattctagaaatagtacacgtaaaaagtacaactcaacaattgattacaatacacagaatcaagatatttacaaaatttatatgactaattattagctatgatgagcttttccaacatcgaggcagagaggcatgtgtaatgggcctacg

SEQ ID NO: 169811 - DNA, 615 bp, Cannabis sativa
aaaaaaaaagcaaataaagatatacaaaatctgacacgtgacctatccgtacatctaaaaactgtttaatattgttgtattatttgagataataagcttgaggtaaagtgggatagtgcatgttatgttacatttgtggcaacaaaagatattattattatttgctaggacagaaacctcaattatctggaattaaacaaaataaaaaatataaaagaacctcaattatcttctgtttaggacccacattagtaaaactcaatctaatcacaaaaataattggtttgattaataaagccacgttaacatgataaatatttagaaacaaaggagataattatatattaaaatatttgatcaaacaatttgagttattcttttgttaaatctacaattttgagcactcaaatctttctaattaaaactaaaaagaaaatattggtaagaataaaatcataatttatttattagagtatttttatggataaatacaaaagttattattggactttctattttgttaaatcctgtatttttcaaattgatacaaataggaccttgaattgatttttagtcaaaataaaatttaataataatctgatctaaaagtgttat

SEQ ID NO: 169812 - DNA, 929 bp, Cannabis sativa
ctccgttgacatatttttgaagggagttagtatatttcttgtaatgtcccacacgtttcatattttagtatatgtattatttttttctttgaaaaagaataatagtactgataatttttctttctaataaaatagtaataataattaattgatcacttttatttatttatttttctgcaataattgagcacttcttcgcattgatttttatagttcttcttcttcactgaaactgtactgtatttaatattagtagtctgaaagatatatcagaagaacaagaaatggaaactttagaagaacaaagctcactcttggaaaatcaaattcctcttcttcaggtaattcccattaatatattattacttcactataatattatgacatagttaattacttctcccttttccattgtttgttttttagatccacaatttgatgttcaaataaatatttgaatttcatattggaaacaataatgaagcattttttttgtctttccatatttattttcttagataaaacccaaaactgggtttgttgtaagtgaaaatttgtcaaattaaccaaccaaatgcaaaatgtaaaataactacattgaatgtaaacaataataataagttgtggggactcaatttaaaaaagctataaagtttggtctgctcagattctcatttcatttcataaaatgttgttttgttgtttaagaatggcggagacaccgagctttataccggcgatagctcagttgacgccaatggaaagcgcgcggtgaaacagaatactgggaattggaaagcatgcttcttcattataggtattatatttaacaggaattactctatttactatttttttaacttttttttttttaaaatttccggtttgaatttctaaagtggttgcagcgctagttgcaatatgagttt

SEQ ID NO: 169813 - DNA, 558 bp, Cannabis sativa
gtatctagctggttttttatgcatgtctttatttttaatgatggtgttgcagtacaagtttattttgtttatggtgaggagaaatagtttagccaccttttggatcgttcgtgtgctctcaaatagctcaagttgcttttgggtgggtggtacaattattcttttcttttatcagaaaaaccagttagatatttgtttttcaatctatttttgttatatagctctatgtttcttttgaaaatttttcatattaccaaaataatttgttttgtacatgttctgcatggtgaaacatttaggcctaatatgtcccttcctaccaaaaaaataaaaaatagggataaatctttttacttgagatcttaaactttttgtaattactagagactttgcttctacagatactgcctttgtagtgacagactttgaattcgtagcagtaggaaaattcgtttgaatactagatcttacaaattttgtgattccataactttcagtaccatctgatccaataccaacaaagcctctttgacctgcattctgaacttcctcaaaaat

SEQ ID NO: 169814 - DNA, 1147 bp, Cannabis sativa
tctaatttcatactttaataaacacttacgaaagataatattttcattaaccttaagtaaacatgttatgctatgtcataaggtgactaacattttaagtcgtgtcatattattgtagatatacaatttcttattaaattaaaatatatgagattcgatttttactttcattgaaagcgttatgccatgtcctaaggtgttacactttaaagtgcctttgagtggtgctttggttaaaatatgtaccaacccaatctgtttcaagctcaatacagatgctactgtgagtttggacggttgttgtgctactggtctaggggcgggtgatctaaatgaaacaggtggtgtagtgattgagttttcataaagctttttggctggttacttttctccttataccgctgagttatatgcttgtttagaagcgcttaaatagtgttatactaatggcttgaagattgattacatgagagccattatcttaatgcaattcatgttactaagggaggaggttcgagtgaagatggtgatatccaacatttttttttgttatgtataatgttagtttttgttattttatttttcgagagagaaatattgtagctcataattagctgaactttgttttagagaggattttgatggtctctctgagaatgttattatgaatattgtattacttattggtgaggcaatctaattataataaaattgaggttttttcaaaaaatatatatgtaccaaaatattgttggactaataattaattatggcacattatttttttacacaaagtattggaaaaatctcaagtaaaccctccaaaaatggatgtactactggtacctgtttagagaatagtttttttagtttgatttctttatttttgttatttacatttatatatgttgtagctatatatatatttaaatacaatgatcactttgtagttatatttaagagcaattataaaattttgagtaatttgtaggttaaatattttattagacattttaactatttgtttatgtgcgtgataattaaatactgtttgaacatgtaaagatgaatactaaagggtgcatttttaatgggtattacccatgaatgggtaatattagaaaaatttaaatttttatgattaatt

SEQ ID NO: 169815 - DNA, 1042 bp, Cannabis sativa
aagtagttacaagctctatgtactgctaagttgttataatttgttttaagcttttgtatctctaactacttttggttaggattagcttaagttaactaacttaacagcttgtatttaagggcacttccgctctgattgattcattattacaaatcaaattcagctcatattttctctttcattttctctcttctcctcaacacagtacctaatagtggaaattggtgatttacgtctttactgggatatggggaacttgtaacttcgaaaactgccttattttgttgtttatcattaacatggattgcaaacctgtctaattattgcaggtagaattgtgattggattatatggcaaggttgtacccaaaactgtcggtatgtgtttgatcttctcagtgagttctttttgccaatgatctctaaactcagctaccctgagttttgctctcataatggcagagtttcctaatactttttctttattgtgcagaaaactttagggcgttgtgcacaggtatttaaacattgtctctatattaataacttcacacacatctgttgtcattatcagtatgctcattgtagattcattgcttgcaggggagaaaggaaaaggtgttcatggaaaagaacttcactacaagggatctccgttccatcgtataatatctggttttgttattcaagggggagatataataaacggtgatggaaggggatacgaatccatttatggtggcacctttcctgatgagaacttcaaaataaaacattcacatgctggtatttaatagattctttcttctgcttgtcatttttcaacactaaaaattaaaggagaaacaaaaataaatattatttgttcttaaagctccaatattttaatggttattctaaattgaattctttctgtgaaattgcatatcgtgtccaggcgttgtttccatggtgaattcaggacctgattccaatggctcacaattttttatcactactgtcaaggccagctggtaagctattctttctcttgtttttttttt

SEQ ID NO: 169816 - DNA, 1205 bp, Cannabis sativa
attatttccttttttttcaacactaattaattattaatatcgtagagagtttggaggaaattaaacaaaaataaatgtaggtttatataattagagaaatgataaatgaaatcagtggccaataatatttaaaagaccatgacattagtggtgtctagcaccacttagagatggcgcattacgattagttaacgatattttataaaagttcttatattaaattatatgagacttgatacttaattgtactattacattaaattttataagacccgatatttaattataccaataacgatacgatacttagtaggatactattcactagaagtacattttagtatttctcataaccatataatatattaaagggtgttaggtacaactaaaatattgtagtattttttaatttaaaagtgtctcattattaatgatatagttctatttattttaatataattatataaaatggataacttgataacttttcaagtaacaccactaccaatatgtgatatagttccatttattttttcaatttttaaagtcttacggtacagacagtttgagaaattacaaaaatcgcatatgcggtttggtttgaaaaaatggtcaaaatccacaccgcaaacatccatagaatttcagtgagatattttaaagggtaaatactattttagaccctgtgttttgcaaaagttatcatttagaccctctgttttatcaaatgacaaaatagaccctatattttacaaaatggtaaaataggactctaagctcaattttcaacaattttttttttaaatataaccaactttaaaacaatttccaacacgaacaaatttccaacacgaacagataaacacgaacagatacagaaaatgtgaatagttttgtcataacatcactagaacatattattattaagttttattttgacaaaaaaaatcaattcaggatcttatttgtacaattttagaaaatataggactcattttatgttggctattaaatgggctatgaagctcgctagagagcgagggttcaacaagtttgctggtgcctccgatgcaaaaattctggttgatccgttgaagaagcatatttgtccacctatttggcagttaaagcctttggctttggaggtgttgaggttgtgtaatttgtttgatgattgtaatttcttttttatttctcgtcgagac

SEQ ID NO: 169817 - DNA, 549 bp, Cannabis sativa
aaaaatacatgggttgcaataaaaaatcaaaatgggaacattcatgttaattacagataaaaacccaatgctcccatggatcattttaatcgtaccaagggttttgcgtgaacatttgaacacaaatttcgcccatagttgtagtgccatgtgaatgaagcgaagaaaggttaaagatgagaaaatagttatggctgaaaggaaaatggaagttaaaagggaagagagagattaccttggttcggttcatgtaaaggtgttgttgaggcttcagcattctcgccattgatcgactgatgagatgaaagagcaacgaggaggttgaagaagaagaagaagaagaagaagagaagaagaagaagaagactaatgcttaaagactaatgcttaatgactgataacactatgttttagggcttcgtggctaaatatcacattttgtggggggcttcttcacgttacgtgagttgaagaaataaaaaaataaaaaagagtatattcaaaaagtttcttaactaacttttttccccgaactttgacatgtactaa

SEQ ID NO: 169818 - DNA, 642 bp, Cannabis sativa
tatcagaacaatcttttatgacatttttaagatcagactcgattgctttttgatcaccaaatcgttcaaggaaaatgggatagtaataatttgatttaacagtctccatttcactcaaatcttcattggcatagtgataaggaccaattgaaacaagttgaggagtgtaagctgattcgtttaccttgcgaatttttctgggaattttgtaaattatacgatctgaacactctgattcccagtgtcttatgtctattatgatttgatgatgaacaggcttgtctttagaattttgatcttcagccataatatgatctgtaaaacaaaaacacatttatttcattatttcattacattaacattagtgaaaatatacacacataatcaaaaactatattggtacttaaaataaatggaattttatatttttacggattttaatttatgttttataataatatagagtgttgttttatattatttctaatatcaacaatgtatttaacaatattattttttatatatattaaacaagctagaaaataagaattcatcagtaattattatgttacatccaaatagagttttaattctaaaatatagtataataattaaattgtgtaattattattttagtaacta

SEQ ID NO: 169819 - DNA, 636 bp, Cannabis sativa
  modified_base (343)..(346): a, c, t, g, unknown or other
aatcctaccatggctaggacaaaaaatgtgttgtagggcacctcctcaaaaccctcatattgttgagttgatgacaagagggagggtctgtcatgtcgaggaggctaaatagccttaagttgaagagccagaggccgaccaggaagagaacctgtggccgagcaacccatggtcgaccagggtgaggagacttcagccaatccaggtagtgaatctgaagtcgagcaggccgaatcttctgccaggccaactactttcaagagccagtataagacttacattgtgatcttgggcaatcccttgggctcttattgttgaaacttattttaccaagatctagatnnnntaacatgtatgtttgattataaatctaatatcttaaatatgaattccctaaaacaatgaaataaacacataaaagattaagaaattcttacaatgatggcaacagaataatatgactcattccattcagatctctagcccttgattcctgtctgtagcagagcattatcaaagatctgaacctggatcttctccttcagttaatagtttgaactacacaatcttcctcactatgctaagtattgctttgacatgtgggcatattctcaatcactataggcttcaaaatta

SEQ ID NO: 169820 - DNA, 614 bp, Cannabis sativa
  modified_base (553)..(561): a, c, t, g, unknown or other
cagatgagtttttctctagttcttaacataactaagtacaatttatatatgataattataatagttacataataaaactgatttgatcagatcaaagctagctgtaagcctgtaataatactcttctttccaactttgttttttggggtagcataacgagttgggtgttgggactagtgtttactttagaaaccttttttttggacagttgaggaaaaaggaatgacaaaattaggggtggcaattagtgtttgaaaaatttcaatcttaactcacctatatttatgttataataaaaaattaatataattagtatcacatatttaatttttataaaaataatttattacgaattatcaatgcaataaataaaattcttaatatcaaatttaaagtatctatctaatattcttataagcaattttttttttttttaaatttatatatttttctatgaaatttatcaatactttaacggtaagttaattattttaataatatttaatatgtttagatcaatttgtattgattttggaggaaattacactctatnnnnnnnnnatattgtcctcttttatttttacatttttttttaaaatctatcatttttacct

SEQ ID NO: 169821 - DNA, 682 bp, Cannabis sativa
aaatcatccacattaactaaccacacaaatttccttaaaattaaaatatttacctacaaaagccgaaagttttggtcagttgaagaagaccatcatttttctgaccctcggatattattacatcccaagattgtttgatggtgttaaagcagctgatgctttcacgctatggacacaaacatataaacatattagtataaattatattacagaatgaaccaacaatataaaatagtaaagagagcttgagaaccttgaaaccattggaggttaagtcatagaatgtttccaccggaacaatatcctcaaactgaagaattggagccgaagaagcaagtgctccaatagctatgtgaggatacttgagcctcatccatgatgccaacactgttttttcaattcacaacacctttgtcatacaaaaaaggaaaagaatttttagattcgtatatataatcactaattgaacaacacttacttcctccgtatgatccaccaaataacacaacaggacagccctccgccgaaaagttccgctttaactcagtgatcaagacggcgaaatcagccaatgcttgctccgctgtcagatacgacaatgtacttgcgttcttatacgcctcctctccactcccgaacggcatcgattctccatagtatctatgctgctcataaattaatc

SEQ ID NO: 169822 - DNA, 605 bp, Cannabis sativa
ctcctataacttgtctcagaacatgtgcgacctagacctgaattcgtcttcactcgtgcaagagaggccattggggtgggcgattcagctcgttaagctttgttcatcgacgaagtgggtttcctcgatccaccattaaaatcggtgcaaaaaatagagagagaaaagaggatgagattacgagagaagagatataagtgtggggttttggagtgtaatgtgttgtctccgtttgacgagtcagcgtcgggaagctcaaatctacgaatgggaaggagaagtctatggttcattgatgatttgttaggaatgggagggaggagtgtatggttcagacctaggaatgggagagaggagtgaggactcagggagagagaaagagaacaaaaaaaaatatgacaatatttttaataattttaaaacttaatttttttttttaattttacaataaattttaaaatgatttttataactttgaagaattatattatgtatactaatataaaaatgacatgtgtataaagaaattcacgtaagaaatacatgttggtatttaactgagataaattgatgacaccttaaatttatgggtaaataccattttg

SEQ ID NO: 169823 - DNA, 783 bp, Cannabis sativa
atttggatttgcatgagcccaatttcaaacttcgatcatcgtttgaaaacattgtattaacaacacagagaaaggtgatttttgagggaaattcacaagagtacaaatttcggaaatctttgataaaaatgacatcatttttctttgctacaaaattatcattgaaaataaaacatatttaaccgtgatttgacagaatatagcaaaaataattacaaatctacaacattttctatcatagaattacaaggtactgcaaatatcatcataattcattcatcaaattatcagttaaaatggaagtgtttggcaaaataatcttatatatattcactttgcacaaatagtttccttttgataattatttgcataactacctcaaggtcaaacactgtatttttacttagactcaggtgagtgaatagtggacttaaatattttgttgaaagagatcataacgaaaacaaatattgtatatttaaaagaggcataaatatacctaaaaaagttccagattatatactaagaagaaaaatatgatcaaattatttgttcaaaaaagttccagattatatactaagaagaaaaatatgatcaaattatttgttcaaatacaggcagcttagtgatatttgattttaagtgaaatagtcttaataagatacgactgtatttttaaaaattaaaaattagacattgctctcattgagagttgaactcaagacctcccgcttactaaacgggtgctctaaccaactgagctatgagagcttgatgtctaag

SEQ ID NO: 169824 - DNA, 781 bp, Cannabis sativa
atagagatatggtgatgtttagtatcctttccggttctcattaattccaacacttaattacaatgtgtggattagattggtttggctactcatttctcttttccattgtcactatgttactttatttaatattgagatttaaggtttgaattccttgatgtgagagtggtggcttttcctaggtctttgaaacttgtggctgacctccttgcccgagaggagaagtttgtgtctcttgcttgtttgagagaagtggcccctttgcagttactacttttgcttagttttggattttgaataaagtttgcttctcaccaaaaaaaaaaaaaatcgtaaaaatctgaatttgcatttgtttctacttaattgaatttcaagtctaacattaaataattgtaaccagttatggaggaaaaacgtgaccggattaggatagggtttatgggtcacttgttgctttcttgtctaccaatgtattaaatgcaggaaataattgaattagaaaagtggttatgtaatttaggtatcccatgaatttgtgtaagaagaaaggaaaattaaagccaagaaacgaaaaaagtgaagtaaacattttctatatatgcttttactcattaaaggtttaattttatttagttatcaaccatcactaaaaatcttttttgtaatgaccgaaaaaaatattttctatacattactaatttagggttgttgacagatttatccagtattgtgatttttttttttttgaaaaatcagaacaaaactagaccaaaaatgc

SEQ ID NO: 169825 - DNA, 692 bp, Cannabis sativa
atgtacgatattatttgggttgatctttgaaaagtctcaaagtctttacacttttaaattcatatttaacaattattcccaactaattaatggcatgaaaataaattgaaccacatccaattgccatctatttaaatcaaaccgttttaaactcaaaatatattgatttaatctgaatgccatatcagtttccaagaaacttggatgatttcaaattcaaacataaaactaagttgaataaaatatcaatgagagttcgggttgttgtggaagaaaaatagtttaaagagaaaatgctatgatgcttcccaaaatacaataaaatcagtagcatcaaaagtagtagaagaagagtgtaaaacatcaaacataaagttgtcccacatcataaattatcaaaaaaaaagtgtgaaaacattatctatgatatccaaaagcaagtttttatatgtctagcgtcaaaaaaagctactgatgtcatccattaatgagtggctggtatattttgagaagtggcgggcatattttgggaaggtgcactaaatggtctttgcagtaaaattgtaaatgtaataagagttagtacacatgtagttgattttcaaacaatgtaattaacaagttccaatagctcaaactgtaccatgagtgatctagttgttggctggtattgatgacgacccattaaccta

SEQ ID NO: 169826 - DNA, 520 bp, Cannabis sativa
gagtaactttatgaagtaaaaatgaaatgatggttaatttgtaactaacaaaacagataattaattttacaaaaaggaaatgttccatatgaatggaatttttatttggcttttgaggaatatatatgctactactgcaataataatgatgaaaataattaatcaccattatttcaaataatatgattgaaaagttgaataataatttaataaataatgtttgaatacatgtgcagaaggagtagactgactttgtttgagacttgactcaactaataccatttctacttctagtctttagtggtattcctcttctatttatctttctaaattagatcaagttggcataccatccttatcttgttaattagagcaaattggtcttttttaaaaagtataaataaataggtttttctaaaaaaaaaaaaataaaataaagagaataacaaacccaaaaaaccgcctaaaccgaataacttgcccaaaccgaactgaaaaaaccgataaaaattacaaaccg

SEQ ID NO: 169827 - DNA, 2127 bp, Cannabis sativa
atggccagagtaggtggagtcaactagaccttctggaggtgctcgtggtcacagacctacgaaggaggactagctagtcctcaggcctcacggctccaaaacgggtcacacatcccgtattgggtcgaaatggagctcgacttagtgagtcactccaccaccgtcggtcttggactgacttcctcccttgaccaccaccagtaatcgacgaccaccagacaccgccaccaccaccatttatgactaaattatggctaaccccctccactcgtatatatatatatgtatctgtatgtgtatttatatattttatttattttaataattacattattgaatggaaaataaaataagataaaatatgagatattttagttatgtgcattattctttttattttaatatgttagaaaaatcttttttaaaaaattggttttattattttgggtatatatatttatcattatttttcaaataaacagatatctagatatttaattttttaaattatattttataaaggatatatatatactatatatatatatatatctcaaattttatctacctgatgtggcatgtccatgtaaaccaaagacagagtacaggtggagtacagccctgccagtagcagaacatggtctccatgcaagatatagcaaaaccgtcaagcagcaaccaaatggagtgaagcgagccctcaaggagttgtaccaacatccttagccagctaagagaagcctataggccggccggggtgagcctataggctggctgggatttgtgcacaagctggccaaccaagaagtgaattctggactaagggagctttcgttcgaccaagggaacttggcctctaaaactatcatgcgaattaaaataccaaaaagattaaaatctaatgtgagaattaaaaagtttctaaaagcttaaaaagcttgaaacttatcaatggtaggttcaatgaagagatgtcaaagaaaagaagatgaggcatatatagagagagaagattaaagatctaaaagcatgtcatgcacaaagccaacacttggctagacaaggttgctcgatagagggtattacaagcaagacgagagttggaaagtccttatatgaccagatgttcaaacaaggacttagggagaaaatgttatcctaaattttatccacctgacatggcatgtccacgtaagctgagactgaggacacgtggaatacaaccttgtcaacagaaagacaaagtctccttataaggcatggcagaatcgtctagcaacgagcaagagaagctaagtaagctgtcaaaaagctccacaaccatgtcaggtcggccaaagggagtacataggccgactaggagaagcttgtatggccgactagggtttgagcacaagctggccaaccaaaagggtgattgttagaccaagaaatggcctattttaccaaggaagtctgaactttgcaaggaaagttgtacaaaggcttgccatcacctagaaaggctggccatcacctataaaggttgcccatcatctacaaaggctgaccgtcacctacaaaggttggccatctcctataaaggctagccatcacttgatgtgcagcctgcaggctggcaggcacttaatgtgcagcttgcaggctggcaagcacttgatgtgtaacctgcaaaccctagctgacacatggccggctagaccctagcaggagcgtagctggccagaccatggcagacacatagtcggctagaccctgacaggaacatggctgaccaacgttttcctagcaagcctttggtgcacatccttcatctgtggacaacaagctaagtggcgatttacaattcacgaaattagggtgaaaatattaacaacttccctatttttgagagataattatcctatttattatttactaattaataatgtaaataaacatttatttacttatttttaagggatattagggatgtaaactctactatataaagggaattagtcaaacccaaaaatcctaagtcttaaaccctaagtcctaagcctctaagctctgaactctaagtctgaagccctaattctctcttctcccctcttctacacgccctagactctctctctctctctc

SEQ ID NO: 169828 - DNA, 610 bp, Cannabis sativa
aatatctaaaattagttttacatacgaaaagtctaaattcgtaaaagtttttacggcatttctattagtctatgtgtactaatgacaccattacgaggaggtaaaacattactatgacttaatgattttttttcatataataattattatgtcagaatataaaaatttaattacaccataatattattatgattttttttttcatataaaaatttaatatcatttattatttatttaatttttagtttattgtgtgtttagtaaaccaaaatgaccatatattaaggttttttttttaaaaaaaaaaataaaaataaatgaccatattaagttaacgtggtaattatgtaataggaggaagaaaaatggcatatatgtaagtcaaattcctatactaagtttttatttaaattagtgataatgtcatacttaagtttttattttagaacacacactcatgataagtttggtaagtgtagtgtttcaattaaatatttggaaataatgaaataaagatccatttataatatttttttaaaaaaataatttatatgcatttaaatcagaaatttttacataaaaaatccattttgcacaatttattacctaa

SEQ ID NO: 169829 - DNA, 616 bp, Cannabis sativa
tataaattatataatatgataattatattgatagtatataatataataacattgtttattactattgatgtaaagatcattatcatcaaaattgtgaataaagataatttagaattccttttttaatgatgattttgagaaaagaaaatgtaatttagagaagttacattatttaagaattaaaagtgataattatcttaatttataagataaaaaaaaataaactacaagaattacacttatcagatttatcttgtcaagaatcaaaagtggttagcactgtctattaacaagaacaaataaaatctctaacacataaatagtttaaaggaactcatagaaactttttttgatcacatttaacaaaataatttaaaaaatctccattataaagtgcttagcactcccttatatatattaattaagatacttcgaaacttgtttttgttattgggtcagtcactcactcatcatagaattaactccatcatttccaattcatgtccctgattcgaagagagtggaccactaaacagtagtggaaatattaccaaacatcattttttttttttacctttttgggtacatatataatatttatacatatatatatata

SEQ ID NO: 169830 - DNA, 813 bp, Cannabis sativa
agagtgctttctaattggaacagtgtaagttgctacttttgctctaaacgatttgatgtggtaaacataacaagacgaggcaaatcagtactggaaataggcacatcatcatatcctaatattataattatttcttattttatttattatagctgtactctactctacttctaaacaactctcctacatattacatcgccgcttgtcaatctctccaatctctatattctttttaatgaattttcatcttaattaattctggctttcattttcaaataaaatattctatgggtatattaatatcataagaaacagaggaaggcattacacaaaatatcaaagagattgtattggaaattaataaaatagaaaggaactttttttttaaatagcaattaattcaaaggtgggtataaatgtctaagagaacggatatttgttttatagttttacataaaatactaacactatatttggtaaaaaggagggagaagatgaaggatggatagattacgaaaagtgaagagggtagaataatagaaaggaggagtatttgtggagtttggtcactaatagaggcctattttttttgtttggccaagaagttagcaactaactctaaccaacttacctaactgtcaattatgacagttaggatcaagactaaaagccaaatgctatataaagccatgagttacaatctttgggacgaggaagagacatagaatttttgagagctagtttagactgtaatacagtgagagagttctggtgagatgagttgtaattgaagctttgcttctcgagtttatg

SEQ ID NO: 169831 - DNA, 989 bp, Cannabis sativa
ccaaccaaacgccacctaagtttcatcatctccactaaaacaaacgaacccaaattaaacaaagaaagtattagtgattaattactaacagaatgcgggttttaggagattttgcttagattttagaaattaattgttagccaaataaaagtattagtgattgtgccgtaatttactcatatatttatatagtacaccttgaggatgaaatgaatcttactgctgatctatataattaattggtaaggcatatatatgggaagggagtatccgagtatgggaagttgaggtggactttccatgaattatatttggccagctaggtacatgtacagatttgaaatacatatatcgatctattactctctctgcgaaatttggttggtatgccatcaaatttcatgcttttattttttttttttgaactaatttcatgcttttattttatatttatatataatatattatattcgtaatccagaaaacaatcaccaacatcaacttttgtatgcatgcatgtatatatatataatatatttatatatattaaaattcctatcaaccataaattcttacatattcacaaaattttattattataattttcacttaaattattaattttccattttcgcatctcgcgcaaaaactgggcacgtacatatgtgatatgttcgtcttcattaaatgaagtattagtccaaaggagatcgactacattaattttcacgtggtttcgatgaatttgagtttggtcactcactcacttatcggttatcatttcattcttatctcttccatactggattatttttgtacgaaatataaatataatataggaaatatatttatttcgtactttttttttatttttaaatattactttgtgtttttaataatatttatttagtattttatattttgaaattgtacatatttgttacccttaaataaaatataattaacataattttattaatttgaccaaa

SEQ ID NO: 169832 - DNA, 627 bp, Cannabis sativa
aaaagaaaatggttttaggttcaaaaccacctgagtgtgctaacaagtgcttaggttgcagaccttgcatggctacctattagttgtttctcagcacgaaaagaatgtcaaggcatttcctcacgcacctgagagctactatctcctgggctggaaatgcaagtgtagggataagttctttcaaccatgatcattaactgaaaaccttcccttattgtataattattacctataaatatgatattataagatcatgcatgtacgtacgtattctactcctacgtactctttccttcctaattaagtactagatattagctatcttagagaagtagagttaatcctatatagagccaaaagaaaaaaagaagagtagtaagagttatggttcctttttttagtgttgtgcatgcatgtgtatgctacgtacatctttcttaaccgactagtagaccgagttagttaattaagaatctatgtctagttttgcatgtattttctttctctgttcttgagcgaatatagggttttgaattaccaactttcaattttagtaattagcctaatatatatgtataagaatttagtatattaaatataccaagaaggtttcagtgcttacattat

SEQ ID NO: 169833 - DNA, 642 bp, Cannabis sativa
aaaaaaaacaaaacccaaaccagaaaatgcaataaagaaatatcaaatctccaatccgcaagctccgaccgcctctctaagtgttcactgtgaacttcgacgaagcaagcccagtccgaacctccaatcaccgtcgtcgatggcagatctacatatgagagaggaagagaggaaaagattgatttggtgaaacggttgggcccagtcgaacgacgtcattagctcgtctgaaaagatcactgctgaccgaccattgtgccgcctagcgttgcttgccgactgaccttcacttgcaccaccaatgcataaacgaggtgagagagagacaaatacaaaggagtagaaaaaatgagaaagaagaacaaaactgaaaagaaaaataagaaagaagaacaaaattaaataaatggggcggctgctagggtttgcttgaaagataaatgatacatatatatatattcaattaaaattattaaatattaataaaattaattaaataatatattttgaaaaatgggaaggtgttgagccgcgtgcgtgagtcttccaagaatttttttgaaatgcccaatgttccatatatacatgttaaatgacaagtatatgtaatattaatgacgacattatcgtcattaaaagctt

SEQ ID NO: 169834 - DNA, 560 bp, Cannabis sativa
atttgtggctggttgtttgtgatttttgtattagttatgattctatctaatttcactttcacaacctaataacaaagcccaaacaattaccaaaaatcttaatcaaaatatactatatcgatataataaaaaatacagtggagatggagattaatgcctcatatacgggttctgaaattccacgagagagagaattatttgaagacgacgtcgtattaagctttaacgacgaaacattcgaaccagtagcagcggccgcacagtcgagctctgatcttcgacttctataactttggccgcatcagtatcgtctgattcactctggtggtcttcctcagtggccaattggatacactttagaggagaatgaatagggaatcagaaaaggtacagttatggagcgagaaccatggaaagcgagcgagagagacagaaaaatggatttaggattttcttttagtactctaaatatatattagggtaaattgcggcataaatacttaatgtttcagattttatatacttaaatacctaatatttatttttggaggcaaaaatac

SEQ ID NO: 169835 - DNA, 597 bp, Cannabis sativa
tcatataagcaaattgttttgaaatatgagcaacatataactaaaggggaatgtttaatttgcaacaatttgtataattcgaaaagaattttcgcaataaaaaaatttaaaaacaaaacttaacaagaatcataattaaagggcaaaatcttatttattgttttttatttttattttttttaaaaaatagtaattatttaatttgtaacttcaaagtagaaatagtagttatttgcatggatttgaaagtgatgaatagcattatatagtaaatatttatccttgtgagattagagatgtgatcataattaatatggttgttggaattaatgtatatacagttaggagagttgatgatgagagtcaatatttgtaaagtgaattaatttgctaggtgagtgagttgttgggctgatcactatacaattaaaggccttctgaatttgagagtgatagtaagggtagagttgaatacatcaaattaacattattgttattggacactactatttagggtgacatttttttttttttttaaagaaagtatgttattaactcaaatcaaatcggctgttataggagcactaataaatctag

SEQ ID NO: 169836 - DNA, 952 bp, Cannabis sativa
agtaacctaagtccctcgagactcctgaaagcactcaactgcaccattagctagtagtgcctttcccaccatgttatcataagtggtgttgtcgtcaatagtgatcataagatcatgtttaatttttgggtttaatccatccaagtacttttctttcttgctaaaatcgattagcacaattctcgaggtcaaccaaactaatcagtcaaattgagttatgtatttagtaacaatcatattctccttttgggtcagctgggtaaattcttttctctttgcacttcagaccgcctcattgtagtacttttcattgaacaactcttggaactcttctcaggtaatactagtaacatcacgagtcagggacaccatgtcccaccaaaccagggcatcttcctagaatcggaatgtggtacaagccactctgtcattgctagtgacgcccataaagttcaaaattcttataaaaactctcagccactgctcgactttcatcacaaaatgacctcccaaaaagattggaggggccagcttgtagaatctctccaatagtgattccatctagttcttaaccgcaaccaaccccacctgcctcatatgcctgatctcttcatctcgttcatgggttctagtttgcatagctgcaaacctattttccaaattctaggcaactaatgatagattaacatctctctgatcgcatgctctacctctagggcctctgcctcagccacgtctatttaggggaaacaaaactccctgagcgccattgaatccgaccattcctttttggcttcttgcattttgcctagcgttcattctaatagaacagccagcgaaaccacgaaccagaatagtcaaataactgtcaagaattacttactaattacatcttattttagtaatgaaaacatacacctattcagctatcactctacccattctgctatca

SEQ ID NO: 169837 - DNA, 755 bp, Cannabis sativa
tcccaaccaaacgccttagttttatggttcaatcgttcgagaccctatataaataatattttatctatatattagtaatttcttttacaatttcgagactttaagtatttaggagctcaagatgcactactcgtctcacctctggacttacctgcttacaataaatcagttagctcaatgaattacctacttatatataacctatttataaataaatatattatgatactattctttcaaaagaatatattatgatacatcataaagaaaaatttacataataaagtaaaaaattataaaaatacgttaatacggaaacaaatttacgtttactttttgaaattttttatttacaaaaataactcttcaataaaaataaaaaattgttttttttttgttggtttataatttatttatatttgtattatagttatcatgagattctttttttttttattattattatttttagttattttataatttatttttagttgtcctgaagttgcttttcttattatattttatttatttattttttttttaagtaaagtgtatttttgtaatttttaaattttacaagcgcattattataattaaaaaatttaggtgtaaaattataaaatacttataaaggaagtgtattttttttttttgaatggtaaaatgcaactttattaaccattaaaatccgctaccaaggaaggtagcaagtcgaatggaacagactccatatcgaagatacaaccaggata

SEQ ID NO: 169838 - DNA, 899 bp, Cannabis sativa
tggtccccttgcttcctcacttagggcatccacattgcttaagaaatcattcaaagtgcccatctggatagtctgggagttctatgcaagtaaagcatcaaagttagacacttggaagcaacaataaatgcataaaaatcagtatacaaagaacaaataagactttgatctggatacaaccattgacactattgtattttgaatctccttgagcaaataatgaaatatcctctcagcctaagaagttatcatactggaagaaatctgaacccttcatcaagacgaaaggatttactctaatgtattaggatggtggaagaatatatctataattttatctaccctatcataataatgaatcatgggatattgaagatggtctagttccaagaaataaggatcgaatactccctaattgatgtgatttatctcttccagatgtggagtgcagaataggcggaagggagagttacctctttcggatgtgctagcacatggagtgcctccgtctgaaatgatcgctctaaagcgaatctctaactttgtttcctcattcattggttctagatgtaactgggcccattcttccagcaagcgtttgtccttcttgatggccttctttgcctcatccgcaatgatttctgcgattacttattttgcttcaactgagtcattttgaatgtcacgagcattgtaggtgttaatgctttgatgaggagtgatcataccaactgtcacgagcattataattttaggatttgctaatccattttcttaatctctgggtattacaattacccatccttatagaaatttcgtctcgaaatttacctgaacaactatggatacttctgttgcagatctgtttcaagttcccatgttgcctcttccactttact

SEQ ID NO: 169839 - DNA, 999 bp, Cannabis sativa
ttaccgtttgaatttctaaaatgattgcagcaatagttgcaatgagagtttctatacgattttttattgcaatttaagtttcagcgctaattgcaataaaagtttctatgtaaaattccgtaaaaatacaaaaagaaaaacctattttaaagtgtaaaaataaaaaagccccacaaaaaatatcgtgaagtcaatggattgtttaattaattattttgtctgtttttttttaaaaaaaaaataataatttaattttccaataaaggatttttgttactttctaagttttctaaaattgattaatttgataaaaggtagatggattatttaactaatttcttttctttttttagtttctttttaaaaataaaataatgaatctaaatgcttttacctaattgtaacgacttaaatttggttacaaccttaaatgattgtcaattgtaaaccatttaagtacgactaataaataataaaaatcaacaataaaataaattctattatatttatttactttaatttatttaaattaaagatggaagaacttaattaaataaattataaaatgaaagaatactttccccactaattttctaagagatgttattaaggataataacttctatttatttttatttttaaaattaaatatataataaaaattgtgtcctttaaaatattcttacaaaataatcaccatatattatagtttaactcaaaatgataatttagttaatttaaacattctaattatattttctgataaagtaaacaagataaattattatcattccatattacaaatatcgattaagattatttttcatttattaagttacatctctccattaatttattatgattctgaatattgtgtagtaaacatgtagttttcatcattagaggtgatgaaaaaagaaagaaaagaaaatcattcattctaggaacctaagtacaaaatatatgcattacatttttttaaatataaaaaaaaaaaaa

SEQ ID NO: 169840 - DNA, 1056 bp, Cannabis sativa
aggcttcgacaataatggttccattagggtccgtgttccttatcaaaccaatctcattctctggtcctaattttcaattggacattgtagttcaggtgaattaatcacgacacttatgattagtaataccaataatcctttccaaaaaaattaactacaaatatcaaaattttgaaaatacatttttattattataataaaatatcttagaataaaattattttttattaaaataaaataaaaaagtcacccaataatttatcataaactaagaattctattatatagacacattttatatagaatagatatatatatatataaattgatttgttaatataacactaacataacattaatctagcccagtttaaaagtttagacaaaaaataattacaaaaaataattacataaatagttgtataatgataaattcagagtatgtatgtacatttttaaagctattggttgtatgtttaacgtcaataaactgaattttatgtaattaaaagcttttaaataagtccttgtattgcaattatacatataacttatagcctcaagcaaattgtaacttgaggggatatttgcaatgatttacatagtttaaggggattttttgcaaaaggaaaaaatttagggaacaaaactttacaagatcataattcaaggacaaaaatcttatttattctttttaatataatttataaacagaaaactttaaccttttattgatttatttaaaaataaaaataaagggatttatgtcaaattttatagatttttttttttgaacttataaaaacatatttacatcatacttatatattaataatatttgtaaccaaatattcttaatagttaaaatattaattgaaacagaaataattaataataacctaaaaactaattacgaggttaatataaatcattacttaaaaagcataaaaagaatggttgagatacaaaatggtcctaaatttagaaattaagttagtaaatgtccatttttatatacagaatttcttaatgggtattacccatgaacggttacta

SEQ ID NO: 169841 - DNA, 666 bp, Cannabis sativa
  modified_base (621)..(628): a, c, t, g, unknown or other
gtagtataatatgaaagttactcttaattagtgatgatatatgtagtgttaggtttaggttttgtaattagtttaatgacttatgaatccaatgcacaaagaatacatataagcatttctttctttaatatgaagagaaaacctatatctatttatatgaaaaaaattgagaagatattaaaaaaaattaacaatagacttatgttgcataatattttttattcattaaatagaaaaaaaaaatatatatatatatatataatggccactctaaaaggttatcatactgtaaatatataaatatattttttcttaaaaaaacaatgtataatttaccaagaagagaaaaaatattcgaacttaagagtgcacttgagaatctaaccttatctacaatgtcttgtgttgaggttaggtcactacatagactaataacttaactttattattcaaatgaaatttaatcatctatttctgttcattattaattaagaaagaaacacataatttaaaactaaattcatttatgacaaaacatatcaatagaaaatagaaataatagaaagaatctattcttctataataggtctacttaaatatatatgggataatttcacaaannnnnnnnaacaacaaaaatacggttttacggaattttaaatattt

SEQ ID NO: 169842 - DNA, 785 bp, Cannabis sativa
ttctctctcgctctgttcctcatactaagactcggaccatagactcaaactcctaccccaatcctgaacttagaccctggctctgcctaaccccgaccacaatatttttatttttaaaaaataaaaatagctataactatttttatttttgtttttaaaatttaatttttttttgtttttgaaaaaaattaaaactacaaagccaaggagcgtactattcgtgcagaaagttgtgatgtggcgctgctagtgctagtgatagaaacacgaagaagagtgaaatatataaatataaatctattgggattgggtaccaaccaaaaggcatattcattaaaatgcgaccataaactaaatgtagtttaagagctcaataacagctggatcttactaagtttcaactatattgttcttttcttctttaaaaaaataagccacgtgtaagcttcaaccattcttaaaacaaatatatctttttaatcaggtcaacttcaaaagaataattctaatcacccctcttcataatcatatcactacacatacatatacataatactacttgtactgctaggtatatacgaagtccgtgttcttaagaaggagactattttatagacagacagatcttattgacccaaatatgccttttctttctcatttaaacttttagcctggaaatagattttgcatttttctttcttgtgagaaggcgtttggttgggaggaatgaaaatataggaatatgaatggtaataagaatgagaataggaatggaatggaataaa

SEQ ID NO: 169843 - DNA, 1449 bp, Cannabis sativa
aattttggccaaaaatacaattataaagaaagaatttatatttcgaggtttagtctgttttcatgtacttaataatagatggcagaggtgtatcaatgaagggtaagataacaatgaatctgttaaaataatcataatatataagtttatagttgtaagaatcaaaatttttaggtaatataaaatatttccatagatgtgttagtgtgtgtcaagaaatataattatattgctcaacacctgataagaatattcatatataaagtagagggcatttattataaagttattttaaggtaagaaaagtggaccgttgataattatactgtggagttaggttgtgaaatgtgcttatttagtttgactttggggtcaataaacaacttaggctgctctattttgacttgagaaacataattgatttttttatttttatttatttatttatttttgctgaataaaaacgtaatggtttggtttaattcattacttgttcttctgaccgtggggacaacatagtgaacaaacacatcttttgttgaagaatttgtaatttacggtagattaattataaaaatacgaatgatgacttataacattttttgtccaacttttaagtattttttcttattcaaaattttaggtaatttttaaaatgctctactaattaaatgctactcatgtgtgaatgatgcattaattatgacaaaaaaaaaagtgttatattggttgatgttatacgtttactgggaagtgtacttattgattgactttttacagtcacgtgactcaaatcatatcgtattctaaatcacaatttctcgtgacacccgaactaaaacttaaaaatacatacattactaacgtaaaaataatatacacattttaaaataaaattaaaaagaagaaaagaataaataattttattttcaggcatatctatttggactaaattaaattcaatgtttgtgatcttcatcttcaatacgtacaatgccattatgtttcttctttttccaagataattcattttttttttatattggggagggtggatttgaacttagacttctctaggtgtagaatcactaaactatacctatcaccatccaatataattcatttaagatttttatatatattttttgaagttcttatgtttctttcatttaagatttttatattaaatggatgaaatttcaaagcatatatatgttaggaattgcattatttttattattttcaaatttctgcatattattaggttgaattggaatagtctatttgaaattattcatttgaaataaattgtatatatatttttaataaatcataaatctcaattgatatttctatacttttttgagctttaatttacgtccgaccttacattgctatcgatatttgacaaacatatgttttgttgatcaaagtttttttttttttttt

SEQ ID NO: 169844 - DNA, 543 bp, Cannabis sativa
aacaatctgatcagacaaaattttcagccagcttaaacgtttactttctcaacatatatatacacattaatattttcaatgcaatccagaaagtttcaagagaaaaacaggttggtcttgaaagagaaataataatcttgggaaaaaggattatatatctatagttattatttatgcatgggaaacttatataaataaatgatcaacggttgagattgaactctctaaacaaatccaacggctatagtgtatctgataaaatcttataataaatatatagataaataatatagaaataattaatgtgagtaggtgaccaaattgaatgctagtgaggcaaaaagtcatgcagtgtaacatgggtgggttagggttagggttagggtttacttcttttttctttttttagtaattaatgctccaacactactatagctatagcttcgagctagatattatactactctttatttcattattacagtagaacctctattcaagaatagacttgggactaaccaaattatattctaattgagaggt

SEQ ID NO: 169845 - DNA, 537 bp, Cannabis sativa
aaaaaaaaaaaaaagaaacaagttaagacttttcaaaaattcaaaggaatcaaatttttctaattcaaatcatgtaagagtgtgatacaaaagaaaagaagtctttgctaattaatattatgtgtgtgcggttcaagtcaaaccggatctggttacggaagaagttctgaaactccacaccaccatggtgtggggattgaaaagctcatccctaactaactaagttcatagctaaaattggatgggcatggcattcaaaaggaaggatatgctaaccaggcagtactactaaccaggcaatgttaaactggaaaaactttgacaagtaaagaagatatgctctgacaatgttatgctctggcttattttctctaaatatagtcatgtatataattatatattgagtaatttgcgcgataaagttaatttacagctgtaataatacttaagttataattggttgttggctcaggaaagtaggtttgaaccgctattatttgatgctgctgttgctggtagcagtgtgtgttgggagaa

SEQ ID NO: 169846 - DNA, 652 bp, Cannabis sativa
ttttattaaaaactaatttcagatgaagaatcagatttttttttaccccattcttttaaatatatgcaacgaatattttgagaagaataaacaattaggaaaagaaaataaggaaaaaagataagactgaagcaagagggtaaataggtaaaactaagctcaacataggggtatttatgtcaaatgaagtcgtacttaatttgtgtacacggtgcgcagagtcgcaggccccacttcttgtgccctagttaccgaactactacacactactacaacaactacaaaggttcccatcggctcggctcaatcagaaaaaaataaaagaaaagaaaagaaaagaaaaatcggcttaaaatgcacacattgtaaattcgttttatatatttatttatttttaaaataactttctccatctttggattaaaaaagaaatcacctcctatattatttttaattttttttttacttttacagtttatattattttgatagtttttacggggattaatatatagatttaaattgccatttgtgagttattgtgtaaatttatgtaaaaatatgaaaaaaaaaactactttaaatttaaaaataaaaaacccctaaaaaagaagacaaaggtgttcaacaacctaattcttgggtgataccc

SEQ ID NO: 169847 - DNA, 524 bp, Cannabis sativa
taaatactatctatgtaccaaatccaaatcatactatttaaactcaaatacctacaaaattagtgtccttcaattttaacatgtactaaatcttacatctaaattttcatatacattaggcttcaaaaatcctaattataaaaaaataaattctaatttctccgagttgaaaaatcatatgcttgtaattttttttagtataacataattatataacctatccactaataacttaagggtctttattcgaactatgctttctccctttctcctactattctttcattattgagttagttttagtggcttgagcaccaataaagtgtaatttaatatcacgtcttaaaataaataattttatcgctaactactcataaaacgataccataaaataaattaatattaacatagatcattgctataaagctccagtagcacctaacactacctaataaataattagctatattccacaacagttattaaattgagcattgctattagacactagtggtgcctagtac

SEQ ID NO: 169848 - DNA, 746 bp, Cannabis sativa
cagattctaaattccgaaattctgaagaaaattgatatgggtcgtggtcaaacaaatccagcctaaaggaaaattatatgaattatcaatatcagtaaaaaaggaagaagaatgaagaatgaagtgtgaacctgaagaagaccatcttccaagagcgatctatcctcttcaagggaacccatttctcttctctcgtttctgaacttttttgttgtttttggtgtaacaaagtttgggactttggatacttgtatacctttctttcctttaaagttctttcttttaagtaatatctatatatttatttatttgtttatcggtgctttgaagtttattatttaattattatttattagtttgtttatttgagttgaatatgcttactttgaaatgaggttagggtaagaaagaaggaagttgttttggaagtgatgaaatatctatccatctatccaacttagatgatgtcatgagccaaagacaaaacattggaagttggaaaaagatatacatgttttttggggtattcaaaattggaccatactatcatcatcaatttatgacacacccaacttaaataaaaatgatttctcaaagaaatctttgtagcacaaagtgtatagtatgggaaaagtccatagtaaacatgtttaagagggtattttggtagatattttatcgttcgatatatatatatatactagttaaaagttacgtgcctcgacacgtaaatattagttttattt

SEQ ID NO: 169849 - DNA, 1414 bp, Cannabis sativa
  modified_base (1378)..(1389): a, c, t, g, unknown or other
aggacctaggactggacctagatctgagacccgacccgcaccatgactgaacccaggaccaaaatctggaccccgaacttggaccgaaccagggattggacacggaattgacccgaacccagaccccgaatcgaagacccaggcatagatcttgacttgggactgaacccgggacccgaaccggacccagaccgaacaccagacccagactcgaactcggacccggacataggacctgtacccaaacccagacccgagacttgggacccaaactcagaccccaaacccagacccgcacccgaaatcacacccaagaccggacctgggaccggaacccagactcgttttggaccctggatcccgaatctaaactggaccctagaccgggacccgacccaagaatcggattggacctagacccgaacccgtacccgacctgtagtcagctttaggatcaagtttattgaaactatattataactttacacaactaatacaagtcaataacatagtattttattaaataatactaatacaatacaatataatccaacaataaaataatacaatatgacgtaccgaactagctcaaaagtattttcttgtacaaagctttagactttcttaaacaactttttaagcgcatctaatttattaaaattaaactttattcaaatttaaatttgaaatataacaaaattttgtaaaaattttaatattagaagaggttagcgcacgtgcatttgcaggtgcctagctctctttgttctattttatttatattttgattagttttttttttttttataaataattgtaaaaatttatataatttaatttttatatcttaattgtaatggatattataaaatatattttatcaatatattaaagatacaagagtaaggacaaactctaaaagtgtgcattatagactgtttaaatatcactttttatacattaaattattttaaattttatcaaaattttataggatattttaactaactacaacatacacaccacgaaaaaaatggactaaaaagctcttctaattgtgaaatagtagaatgtgcaacggtgcaccatttttaggagtgcactatgaaggtttcctgcgatatatactactattaaatttcaacctctaatcatttaaaaaaaatattaaacaaaattcaaaacttagaaaatttttagtacaccccccttaaagagtgttatagtagatctccttatctattttagcatcaatgagtttttttagtgcaataatagtgagcgctccttagagcatccccaagaaaacaccaaatttggtgttactgttggaattgttttatcaggatctatatttactaacaagtatatttcattnnnnnnnnnnnntgaatttctaaaataatgtaaataa

SEQ ID NO: 169850 - DNA, 521 bp, Cannabis sativa
atcatatataacaaaggaaaatttcacaaaatgcacccttaataaaaggatgcattgatcatgtacctctatttgtttttgcattcaaaaaaagttttaagtctaattttttttttttgtactcgtgtacatttgtagttatttaagatattttgtaaaattttaagaaatttaaaaaaatttaacatgttgaaacacagtttaaacagtatgttatacgtgtactcttttgttttgtatgcgtattaaattattttaaatttcttaaaattttataaaatattttaaataattgtaatgtacaccactgaaaaaaaaaattctactaactttttttttttaatacatatttatatggagtacataggagcatcttataattcttacaaatttttatgaagaccaaatacctacggcaaaatgcctaacaattacttgtacctgaataaacaaaaacggttaattataattaataatgttataaaaaatggttaattaattatattattagcacataaaat

SEQ ID NO: 169851 - DNA, 1807 bp, Cannabis sativa
  modified_base (1458)..(1472): a, c, t, g, unknown or other
ctttcgattctctctgttcttacaatgtttggtaagaaggaaagagagtaggatggatggagagtgtagaagaaatggggagtaggagggatggagataatatttgtttttctttatgttgttaggtattagaagtatatgtggaacatagagatggaaagtgaaataaatattaaaaattttattttattatttttaatacaattatttattatttttttaagggtagatttatataattttttttttgtctttttctagaatttccacatgttaggaggaattaaaaataatgtgtttggaaggagactctctccttccatctctcctctccattcttctctccctcttgccaaacaaaaagattcgccaaaccctctatctctctctccacccctttctctccctccttctctcctctttatcacacatagtataaatgttgaagttaagttacttaacttcagatcacttcgagttgaagcccctccttatagccatcatttgtgtcatgaggttgttgaaggactaaaaaagagcctcaaaccaatgcaatgtcacctatcatctttggcagcggcgttacacaaattgccactagcttttcttcttgcatcaatatttatttttatcaatccagatttcaattgggaccaatgaatagcctttctatcttgctttggagagcttgtttgatcaccagcaaagccaaaccagtagtttttgcaccagtcaaccatgtccctagcaggatgacttttttcccaaacttcattttatttcgtatgtgtcaaagttgccaagaaataaactaaaatcttcatcttcaagcccttcttgaatcttagaaataaaaatgagtggatcaatctccttgcagccttttataatcgacgaaaaacctgcctttttccgaaagattgagctggcagaatatctccataatgcatagcaaatatctgtaggatctccattcgaacatttaatggcacgtttactacacaatattcagaatcagtataaagtaatagagaaatgcaacggaataaatatttgtaatatgatgtttactaaaactgtttggaaatagaattatagtgatttatcttgtttactttatcaggaaaagtaatcggaatgcttaaattgactaaattacccttttgagttaaactattgtatatgataattattttgtaagacatattttaaaggataaaattgtcattataaatttaatattaaaaaatagggatattggcggctaaaccacctgaattttacggtttgtaacacttaaccacaaaaatcgaaattttggcagcataactacctaaaccctggttccgttttgctctgcacacctccatctaaaaatcacagttaagtgccacgatggaatgtccacgtgtacacacttatacacgtggcaagtttttagtggtccacgtaatattnnnnnnnnnnnnnnnttataaatattaaaaaaaattaaattttttttttttaattttttttttctttttccttttctttttcttttctttttttcttcttctttcttcttatttttcaacagaacccctcccaaccctctctttctctctcttgtctcaccaattagggtttggatctttgaatccgaagggagaagtagcggcggtggagtgatctacagcaacataatcgttggattggtgttgatcgacgggaaaagttgaggaagagaatgaatcgtaggctgagaaattgtcgactacgactacgtcgttgtcgtcaaaatggcggtcggaggagttgagatcgt

SEQ ID NO: 169852 - DNA, 747 bp, Cannabis sativa
aataccaaaatttcacttgttttatttatagttttgtacgaatttctctctctctccaaaacaatcaattacaagatttaattattgtaaaattaaataagagtaaccagttcaagtacgtaaaatgatggaatcatttataaaaagcatgtgctacatattaattgttagtatatacagcaatttctatgttttaatttttacttcttaggtcaaaaattacgctatgcctacaactactaacttattaaattacaactcagcctgcaaacaaaaacttattggtgtttttaggataaataacaaaataagtatttaaagttttaaatttatataaattacataaatttaatattttttttaatagtataaatatttaatatttgtaaaattatatattttttttaattccgtcagtacaacttttattattgtcttaaacatgacacatataaaacatagattctagattattgactctatagaaatatgtagtatcatgtactcacgaaattgaaaaaaaaaattactgttttataaatatttagtacttatatcactaaaaataaatattatatttatgccgtttataaatttaaaacttttgatacttgtacgatattttttcttatttttattatctcatttatatatatatatatatacgaaagagggatttgaagaattattagtaattttttgtgtgtgtatatatatacaaggtgattgttacgtgccaagccacgt

SEQ ID NO: 169853 - DNA, 837 bp, Cannabis sativa
gtaattcaaccactcaatccattcatcatagaaattacgccattacatgcttcctagccattgtcttatgaggcgcataactcttcgcgagaatgggcatgagaaaaagaggtgagagtgactctgaaactccaattcacaaataggataaagaggggaatcaactctcatttgtctcctaatgagcttgtcccttgtcaaaaggtggtcatttaaggcatgtcaaactatgaatcagtgctttggggcagaaagagagcaccacacgacacccacataaccaacacgatcatcattatgtaggaagtgttcatatattttacttactttgaaatggttctcaacacagacagcttggatctcattcagggagaacgtctccatgagcctcatgaactttttccaatactagctcacatattgcttaagctcatgagaccacacatcctggtcctttaagtatatgcaatgtgctcatttgacccataaataatctttctttgaagttactgcccaaaggtactttgcaatagccactttattccatttatatccatcacggaagcccaaacctccaaatagtttcaacttacacacacaatcccatgaagcaagatgcatcttacaggtattacccctttcaccccaaagaaagttcctggaaatcctatcaatctttttacaaatcttttgcgggagcatgaatatactaatccagtagctcctaatttcaattatgatagagttgattaagagagtttgacctacaaatgaaaggtgtcaactgttggactttgtgctctaaataaaactctatttcaatgtaatcttttctat

SEQ ID NO: 169854 - DNA, 720 bp, Cannabis sativa
attcaactcaagttagctagttagcagttattaataataaattaagttcttgcttagttgggattattggtttctgatcatttctctgttttatgtgtgttaaagggtgtcattttttaaagtgttctgattgtgttttttcacgtaccttttaactttaatagaagtatttgttgttctacaaaatctatcttatgttgggatttcttataatttcatgttccatggtgccataggtaaaataatccaatatttactgttgtaattctgtctatagattttttttttctctgttctcttttgaacattatatatttttttcatattaaatcccttcatgtgctttcggaattggaattcccatagtgatattttaaagtctttcttcatgaaccatttgctctaaagactacataagctaaccatttttaatgttccttacttatatatagttatgaacacctcaagttttgaacttacaggatctgttactttaaacacttgagatagatactattgactatgagctaattgtttccaacttttggtagttgccaagaaatttccaacttgaagagagaaagaagaggcttgttttcagggcatactaactacactaaatcttccactgactagtgatggatgagtattttgatcacttgctttattcatcatcatggttagacaaagatttggaggaaagatcatccgagatatgta

SEQ ID NO: 169855 - DNA, 583 bp, Cannabis sativa
aaaaatctttccttttgctcacactactgatatcccacctgatttacagaatttttttcctgcatctggtccagcagttacagcagccccatctcctcactttgcagccacaccagaccccataccagtccccaaatctcctactgaacagtccaaatcaagaccttcttggactgtcatgaaaccttcttacctaaatggctaccattgttttttggctgctaataatgttgttgtttgttcttaggatgcaatgccagtcactgcacatgctctatctcaagtgcttgattactccaagttgtctcccaagtttcgagctattgtattgtctatttctagccactttgaaccagttaatttcagccaagctagagaaattcctgagtgggataatgcaatggataatgaaagtgatgcattggagaagaatcacacttggatagtggttactctatctgcaggtcagcatttcattggttgtaattgggtttacaagataaaatacagtgctgatggctctattgaaaggtttaaagcaagacttgtggctaaaggatacaaccaacttgaaggtattgac

SEQ ID NO: 169856 - DNA, 1048 bp, Cannabis sativa
gagagagagagagagagaattggggtagggttttttgggtcttggggttccttgggtattgcgtgcggctgactgagaaggagaagaaaagtagagagatagcaagagattgagagatttagagtttccagaagaaaaagaaagaaagaagaagaaaatgaaaagtaaaaaaaaataatttttttttctaatttttaaaatttttaaatatttaaaattcttttttcattaatattttgtgaactaaaaaaaattatcacgtgtacacttgtgtacacatgagcaatctattgtggcattcaattgagattttcatacgacaaagaacaaaacagaatggagattcagtaaattttatcgttaaaattttagttttcgtggctaagtgttaaaaattaaaatttaagtaattttacaatcaatagtcctaaaaaatatatataaaaaataaattaaatttagaacaagattatttaattaaaatgagtttgagaggatcatttagctcaatatccttttttttctttattactattaggctaattaggatttttatccaccaaactttgacatgtaccaaatcatggcccctgaacttttaaggtcgttaaaaattccccctgaactattgagattgttggatttaagggcttttgtctaattttagtaagaaaaagtctaacatggatgaaagttcagagagcatgatttggtacatgtcaaaattcgagatgcatgatttggtagatatcaaagtctagggagcatggtttagtacataaacaataactaaaatagtaaaatttaatggtattagacaaaagtctttaaatctaatcacctcaatagttcaggaagaatttttaacggtaagaatagtttaatagtttaagaagcataatttgatacacgttaaaatttaggagacaaaaatgctaattagcctcattattattagaaatttttacaccaaaaatacaaaatacacactttattacatatatatcttcacacggttaaaccaacatttatactctttaactttatt

SEQ ID NO: 169857 - DNA, 584 bp, Cannabis sativa
agtggataatggaagctctgtgaattttctattcaagaacgctttcacggccatcaggctcaccgacagggacctttctcccagcagttcacagctcacaggattcaatgggacgaccctcaccccaatgggaaaggtgagactcccagttaccttgtgtcctaacaccccacaaagcaccttcaagtaatgccccttcgtggtggtggattgtcccactgcctataacgccatcctcagcaggccagccatagtcgattttggagcaattacctccattcgacacatgtgtcttaaattccctacttgggatgtcgttgtaggaacagtgagggggaactaatgagaagcaagaccgtgttacaactctgcagtacatttgtcggtcctaatggtacgagagttaggacgagtgttggcaaaagaacaggacaagttggacccccgtatcgggtttgaagtgattttagagccctaacaaactggatagatggatatatgatttatttaatttaaattaattaagtaattaaattaatttttgaaaattaaataagtaaataaataatttcgaaaataataaa

SEQ ID NO: 169858 - DNA, 984 bp, Cannabis sativa
cagcacaacaaatccgaagaattagctaactaaatagatttgtttattgaacttttgttccatataaaaatagatatgttattgatttagttttgggatattttcataaatacctaaacttgatgaaaaattataaaaatgaattttatttatttattttttgttaaaatgagtggttgtttttatgttgcaaatatttttttatctttaaaaatgtaatcaaaaagaatatccgtgaaaaagtgaacaatagttcgtaaaagaaaatacaattttaggtatttttgtattattttcatgtttaaaaactatttaagtacaatgtttttgaaaattattgtgtaccatatagttatgtgtgtaagttgtgacttattttgtaagtatagtagtttgtgcccagtatgttttgtttggtattaatatatggtggtggttgttttgtgtttatcctaagattatcgtgaagtagcagtgacacatgatctgttctgcagttagtagagataagttttttcttcataacataatatttcgaaatattttttgttttaataaaaattctcatgtgtgctaattaaattttatatattttatataggtattaacttttctagcaacaactcttgctttcttggttggattgagatggactcaaggatatctcaaagtaattcaggcggaagttgtagtcctaatgatggttgcattggattggttgttggaattgcactccctctcatttcttttgagcctgattatttaagatttgatctcggccttttttaagagattttctttctgtaacgatttaggctctctatttgatgtatttttttagtttactgtccaattttcctaaggcgtcccttattcatgcaaatcattcgaccattatggctatgcatgaattagttgcgcacgcacttatgatggatggtgagctaattttgatgaagaatcttcgatctcttctttatgatg

SEQ ID NO: 169859 - DNA, 653 bp, Cannabis sativa
ataattattgtaattctacaacatcaactactagctgcgagatagagagaaagagagagattatggttagaagaagaaaaaaagaaaaaaaaaagaaaaagaaaaaaaaattctaattccagaagaaagagaaggagaaagaaaagaaaaaaaataaagatttttttttttatttttgtaaattgttttttataattttaaattatattttttattaatattatgtgggctactaaaaacgtagacagtctaccgtgacagttaactgagattttggaacgaaatgggtaaatagttagggtttgggtagttttgctaccaaaaaattgatttaggtggttaatttttaaaaaatataaagtataagtagttttgccgccaatattccttctaaaaaaatatttttcatgacgtgtttgaatctgtaggctgtaattcgaaagaaagattgtctcttttattgttctgatgcatagtgaaaaataagtaattaacttgtgttttgagctcaatgtagaacatgagagagttgttacttagtagttttattggtattgtttttggtgacctgttaacatatctcaatatttttttccatataatttatctcaatttttatcaactaaaataaattctttgagtaaagaattagt

SEQ ID NO: 169860 - DNA, 1134 bp, Cannabis sativa
caccaaacttagtctacaagaaccgttgtaaaagtgaagctcaccaaacttagtctacaagaacccttaaaagaattcttatagactagtgccatattgtgagcctagggtatagttggagaaataccataggaatatacaataaatgacaagtacatcaggtggccctccatcatcttgtcgtcgttgatcagttggccttccgtcaactagtcgtccctaagctgactgtccctcaactggccatccctgagttggctgtcccttaactcatcagctgagcgtccctcagctagttgtccctctactggccctccatcagctggtcatccttcagctagccgtccgtcagctggtcatcccttagctagtcatcccttagctggtcatccttcagctggttctctgttagctagtctttcgtcaattgatcgtccatcaattggttctccctcagttggctgtctgtcagttggtcatccgctagctggtcatccctctgttggccctatatcaactagttgtctattagctagtcttcccttagttagccctctgtcaactggttgcctgtcagctagtattcctcagatgatcgtccttcagctggttctccatcagttggttgtccctcgacgcgccatccctcaatttgtcgtctgttagctacccttttgttagctggtcatcactcaacttgcctccgtcagctagtcatccattaactggtcatccctcagctagctctctgtcagctagtcgtccctaagccgactgtccctcagctggtcatccctcagctggtcgtccctcagttggcccttgtcaactgatcatcgctcaactagttgtcctcagttggccctccattagttggtcatcccttaggtgtccgtccctcaatcagttgtgcattagctaatcctccttcagctggttgtttgtcagttggttgcccatcagctggtcctgcccatcagctagttgtatctcaattggatatttgtcagctgactggctaattgtccactggtcctgcatcagctggtcatgcatacttctcatgtgcgagcacaccaacaccttaatacaatgataaggggatgacgaataattagattaagtttgaaagac

SEQ ID NO: 169861 - DNA, 566 bp, Cannabis sativa
aaaaaattatttctactaacactttttgtttcgtaccaaaaatattctaataccaataccgatttgccaaccttttgcgctgacaagcactgtcaaaaatagattttattttgccgaaaaaaatacgctgctaaaaatttcatttcttatagtgaaagtaaaataaaattatctaatattattactatgtacacattattagggtgtctcctgtaatttataaattattttactaattatttattttaattcacaaactttttttttaaaaaaaatatttatgtggatgagaactcaccgaaacaaaaaaatcaaaacgcatcttcccatttcttttttctttagtcttctaaaatttgatttcattcatgatattttgtttgttaggtgtgtgcactgtgcaataacgtgtcactcgtgagaaatacataatacgtgaaagaaaaaatagactaattagtaatttttccttgaattttgacatgtattaaatcatcctttctgaatttttttgacggttaaaaattctccctgaactattgaaattattagatttaaggactttt

SEQ ID NO: 169862 - DNA, 1851 bp, Cannabis sativa
aaaaaaaaaaaaaaaaacgaaaaaattatgtttcatagtcacatcaactgggtagtaatttgatattctcgcattaactggtcgtaatttgatcttctcgcgagtcatagctccgggtctgagatggcaaaatggacccttcccgagggctctcagtgacccaacagcaaaataacattagtagctatttactaccatcaacgtcccaatcctgtcgctttccaggaagtaagaacgaaagaagacgcaggccttggaaccatcaaactacaacaccaacaaaatattcacactaaaacattctctcataaaaaagaataattcaactatttataagaacataataatataaagaatataatgtcataactcgaactatatatttaaagaagcctagccgacgtttgaagttacactaaataaacggtagtcgactgtttgattgaaatcgtcattgaggcaatacaaccctaattcatgagaaagcccaactatgaggaatctgtgctttgtaacgctaaattaatcatacctaaaacgacaagaagtttagtaagcataatcactaatcagaaggactaatactaataataataataataataataatatcatttagtgtttcttctttaatatggagagcgagaattaggtccccaaggcatgacatctggtgaaagttggcagttgattggagttgggctagccacaccatagacagacccctcattaacggcaacaactccagtaccgacgatggaactcttcacatcctcatctccttcttcgtcttcttccgacggaatcttgtaaagggtaggtttaacgaacgtagccgccacaacaactacaagactcgctgccactaccttcccaccgatgatgcctccgaatacttggccttgacctccagcaaggcaaattccgaaagaagaggaagaatacggcggaggctgtgacgacaacatgggcttcgagccagaagttcccattgccatgggagaagaaaaagtactcaagaatgtgcctgacagcgagagcagactaaaaggtccttggagtgaaaataccgccggagagtgagaaagggagtggcggagggtgacgcttgaaatagagccagatccgctgagaaccgtgatgcccattcggcgctttcgggcgaactggacaatcgtgtccacgacatcgcaaccggctttaatctcgagaacaacgggcttcatagcgaaatcgctgtctttggttataacgattggggccttaggcttattcttagaaccgggtggtcttcctctgggcttcttggattgctcgaccggtgaagagaaatcgccagcccctgagaacctccgtggcttagacgaggtggcggagcctcctcctcctgcgccgccagagagcgttcgaatgctcccgggactgtggccggatgattcgtcgtcgtcagaggtgcgagaatgagagaggtctccgggttgggcaagtgtcattgtcggattagccatgtgtttgaggttttggttgggaggctgagtgaatagtgaatagtgaattgtgtgagtaaggaagtagagtatataacaaaggccaatccttatgggcccggccttagtgtgatgggacccatagaaggtttcctaacatatgtcaatcaacacaaatattcttggattgtgatccaaaggcttagaaaactcaaacttaatttttcttgtcaaacttacattaaatatggaattttgtaaaaaggttacaaaaatatatcatttattggtttgtcactcttccatagtatttttacacatttaagattttttatagtatttaatatgtcatatttttgtaaac

SEQ ID NO: 169863 - DNA, 954 bp, Cannabis sativa
gattttttttcttgataacttaaatttgagaatattgataccatgtacgaaatacaatttagtattgttagaattcttgcacaactcacaaattgatttagacattgtttagtacgagaataccggaatcaaattgataaaaaatgtgtaaaatcatgaaagtcgaaaaagaagtctgacgatcgtctttttccctagcttaagcaaagtaactaccctcagagtcatgacagttggaagataagtttaatggccacctttcacatagcttaagaaatgtgactaccccgaaggtcacaactgttaaatttagcggtcacccctccccctagtgtaagcaaggtggctacccctggggacggtggataattactttcacaatggtttaaagaatcaccacaccccagagctattaaattagtctggggatacaccccttaccccttaaagggttactctaggggtacaccccttattccctaaggggttagtctaggggtacaccccttaccccctaagggttagtctaggggcacactccttaccccttaaggagttagtctaggcgtacaccccttacctctaaggggttagtttaagcttacattccttaccccctaagggattagtctaggggtacactctttaccccctaaagagttagtctaggggtacaccccaaaatcctaaggggttagtatacccctacaccctacaccctcaactggaaagggtctcagaggtacctctcgagatggcgaatatcatcccttgcagagtgggtctcgagggtgtcaccctaaaatagtggctactaccttatgagaaagttaaacaaccataccaaactatgggggggaccctcatcgtcattaactaacccctacaccttcaactggaaaaggtcttgaggaagttaaaccatgggtctcaccccaaagtagtggctactac

SEQ ID NO: 169864 - DNA, 554 bp, Cannabis sativa
  modified_base (347)..(358): a, c, t, g, unknown or other
actgtggcgtaagctaaaccatagtaaacaattcaaacattagtttggggttttgtcttttggggcatttacctgtattttatagagtaatttgcggtataaatatttaagtttaacttctggttaaataaattgtcacgtgataatctctgattggtccaaatcattaaatttttattatttaaaaaatttaagttcaaatatattaataaaaaatgacatgtggatataatgcttactatttaacagttaggtatttatagatgttttaaaaatataacaccaatagagtttcaaaaatataatttaagtattattaccggcaaaaattaaacttaaatatttannnnnnnnnnnnagttaaacttaagtatttatttgcaacatagagttaaacttaagtatttatactacaaattactctattttatatctggtttgagagttttcgtagctgtctttgtttaatgtctatcaattctagctagtgtaaattaggggtgtacgtcggtcggtttagtcgggttatagcatatttttattaacccaatata

SEQ ID NO: 169865 - DNA, 553 bp, Cannabis sativa
gtaaattaccaaacaacaactctctttctttctttttttactttactttctctctctagaaaatattttcaattcactttctctctctaaaaagactctgaaaaatcaaatcttcaaatgtcagtccaaacagtgatgatcggcttcggaggtcggaggagaactcccactgttactttcctcaagctttgacggaacgtggtccacacgcgccgcctttactggagaaacaacaatggtcttcaaaggaagattcttctcatcgaagaaatcttccgatacttcttccaacactcaagatgcttcttcaaacagtcctcgatccatcggttcaagttctcctctcagatccgataagaagaaatcgtctaaatcttcatcatcggcttcgcccaaactagtcaaagatggcggcggtggtggtggagcaaagaagaaggggaaagaaactctttctcaaccttctacgccgaattctaaatcgagcttcggtggcggtggtacttcaacttctttactcagtaagattaaaccggcggcggatgtgaaaaac

SEQ ID NO: 169866 - DNA, 543 bp, Cannabis sativa
aagacaactattattatagttaagaaaagtagtcagcaataaacaacataattcgtgtagtttaatattgagggaatttttatttttatggtttttaaattacgaatttgtaaaaatatgtcttttttttttaaaaaaaaatatattttatgagaaaatttaaaaaaagaaaaaaaaagttaaaaaaaaaaaacataaaccctctaatggttactcttacttgatttttcaatattttttaattttttatttaattttcttgtaaaataacctttttgaataaaaatcttaattatgcaaaggcataaaaattcataaaaattgtaatatctccttaatacgagtaggttgatagctaagaatgtcaatcgggccaggccaggcctatcctgccgcaaacccggcctggcccgatatcactttggcccagtccgataaaaaccggaatcagtcgggctaaagttgtagccttagcatatggtgaggttgatccttctaagctatatttgggggtaagttgaaaaatgcctcttttattcatca

SEQ ID NO: 169867 - DNA, 1069 bp, Cannabis sativa
gaaaccgtcgcctatagtatatgacaaggtttaaaactgttgcctataccctgttgtgggtgacggttttaaattgtcgggaagtccacattagcaacagtttttaactgttgcctatttttcccattttacgacggtcatataggcaacggttatagaaactgacgtgaatacttgaacgattgtttaaaaacatcgagaaaaacaatttttatagtagtgaatgctctagtaatgagctaacaagccagcctcctgaagatttttagtagtcacaagctccccaacttgtaactctttggctgacaatgattcatatgattttcctcgcctccaactctagagttaaaggcgacagagggatagaatctaaaagaaataaaagggaagaataagatcaattcataaagcaaggagaagatgattagaaggaaataaaaaggccaagtgatcagttacactcttacttgcattattaaagtcaagaatgagattcaggactctttttagtgggaagtcgaaagtatagaaccaatagttttggatgttgtacgtatacttcacggaactgatgaggcataccaagtctttggaatgcctttccaacctataaaaaccaactttccctttgtggtttctcatattttgtgctttgatcttgtaaaaatacaaaatctcttggagttggagctgcctttttcttctagaagcacaagatgtaccatccagcaagcaaacgatacacttggagaacaaactggtagggagctactccagctactgcgcagaactctgcaaagtagcatctcaaaggaagatgggaacccatctccacataacctaagctccaaaaaccaaaacctccttcagcacattggctcggtttctctcccaagacagacaacgtgttccaaaatagtcctgaaacactttcaagtcatctcagtgtctcgtacttcggaaggttgttataatttcagaatatgttcttataatgatccatcccatggataggaattcaataacaattttggggcaggggctagctccaccactatgttttcttttg

SEQ ID NO: 169868 - DNA, 806 bp, Cannabis sativa
aaatatacacacactcttaacaacttcttaatgaatgttcttctaagtactccccttagatcgtcatttaagaaaataaaacacaaagccttatctaggcatctaaatgagtgagcttaatctatttttttcatgatcgtgtatattatagttatttaagattatctaaaaaaaaaattaaaaattacatagtttataatttggaaaataaggtttgaatattttgttacatgcacgactgctttttcttatacgcacagtaagtaactatttgaactttattttcggtactgtaatatactcagacttttttgaaatttataagtagttctaaatagctataacatatatgattatgagaaaaaaaaaattaaattaaaatttttttctaaataccaaaaaaaatctactaaaatatctcttaaactttttaaggtagtatcctacagaaatttcaaaaccatgtacacatgattacttatataaatgaatcttagctatagctttgcaatgatcagataaaaccatattcatgattacacactataatatatgtatatgttttgtttgaattagtcttttccatttgaagtcaaagttttataaacgcatacacttgttattatatcaaacaatatttctacatattaacatgtcataattgttggtgttgaaagttttatattggctaaaattgaaaatgatcttgagtatacaagagtggacattatttctattagaatgagaccttttagaaaagtgcccaaaaataaatacgtgagtgcttaggcttgttttactagatt

SEQ ID NO: 169869 - DNA, 809 bp, Cannabis sativa
tgaaaattaccgcgtagagagaagcaacaagccaaatgttattggtcaaagaccaagccgacatgttgtgttcgacaatcatgccaatggccccacactccacgctcgccatcgagcacattaacgtcgtcgttgtgtatggagctgggaacttctcactcaatccagcctttttttaatttttcaacaagaaaaaaaaaattaattatacatataatgactctataattagtaattaattattaattattacctggatgatgaaccatgcagcccaaccaacggtgcttagtataatgaaaatagggcctaagagtgggtttgtgggggtagaagtagtggtagtagggactctggcttcgtcaagataagaccagtgaatatttgatttacccaaattgatattttcaccgtggtaaaacgacagtaacatggctccccctacacataacattgttcctaccactttagctattccttctttcttccttaacccagctgattcttgtctgtagacatgtattaataaccaattaaacacaaattattataattaattaatttaaccacattaataatatatatatatacctgaaaatgacagcaaggaggaatgtgactgctgggagaatattagataatgcactagttattattgctgatgagtattttaagccaatgaagtaaaacacttgattagctactgccctgcattaattaattataaaccaattatttaatcatatatcaatgtttaattaagtaaggtatgttagacttttatttgggcttacattaagttttattgg

SEQ ID NO: 169870 - DNA, 1041 bp, Cannabis sativa
  modified_base (989)..(992): a, c, t, g, unknown or other
gatcagtaggcaccgacactaaaggaaaggaggaattctgagggtcttgcatcgaaagaagtttcaccacctatcagcatcgagcaccatgttaaaattttatccgcagaggctccacaagaacaacatggacaagcaattttctaaatttttgaaaatattcaaaaagttgcatatcaacattctatttgcggaggccttagagaaaatgtcaacttacctgaagttcatgaaaattattttagccaagaaaaagacctgctctgataccatattagatcgcagaaagagaaagaaaataagagagtgaaaactacgtttattattcgttgaattgataaaaacagagtacaagctatatatagcttggagatacaagaaactaattagttacatgtaacaagtgactaacaaactaacaacttcttccaaccaacttccctgactgattttaactaactcgggttagctcattcttaatgcacttcattagaagtgtatataatgtgcaaatttagaacttgggttggggccctaaggggtacttaattttgtgcgcatgagtgatgactcacacactggaccaccacacgtgtgcaccattgccgtccggccgaccaacccaagctgagttttatcatggggatgatgaggttgataatctaattccacaattctagatagtgccatgaacgtcttaaagagagtgacctagatcatgactcaacccaaattttaattcgggaaattcgttccttttttttgcagtaactatttacaacaattttaaaacgttgtgtttcttccttgactaccgatgagaattctggtgttgttgatataaacaaacctttttgttttgagggaaaccattttaaaagatgaaaacaaaaaatgttatttttctcactttgaaaaaggttgcttatgttatgacgactaataaacttgttgtttgtgatactgttaaggaagatgaaaagcagaannnnactgctgatttagcaagctaggtccagaatgattttttgtgcaaaaatt

SEQ ID NO: 169871 - DNA, 930 bp, Cannabis sativa
  modified_base (883)..(884): a, c, t, g, unknown or other
caagaaactgtcgccaacggagcttaaagaacggcgagataagggcctttgttttacttgcgatgagaagtttagttttggtcataaatgcaacaataggatgctgattttatgtgcttcgggagatgaggagcaaattgcagtggaggatactatgaacaatgaattagaggagactacagaggatgaggttagtctgaattccttatctaatcctttgaaccctcgaatatttcgaatctcggctcaacatggtacagagactttggaggtattaattgatacgggtagcaacaataattttatacaagaatcattggcgacacaattgggattgccatcggaagagactaaacgttttaaggtgtatatgggcagtggccattttctgttgtgttcaaaaatatgcagaggagttgaattgatgttgcaagggcatcgatttattgtggatttgtgtgtcctacctatttgcgggttggatgttgtgcttgggatgcagtggttacaaaccttaggtccttgtattcatgaccataaggctctaactatggaattcacatgggagggtaacgttgtgaagttagtaggttcgaaggaggtggaggcgcatccaatgtctttctctaagctgcacactatgattttagagggagacgtgcaagattgctttcaaatttgcacagccattttagacaacaaggagagtaccgaagcattctgtgaggttcagagcaatcttcccagcaagggatcagcattactggctgagtttcgtgatgtattcgatgaaccaaaacagctaccccctcggcaagccatggaccatagaatttttctgcaatcaggaacatcttgttggaagttattttaccaggaactnngatctactcacaagtatgttgatctaacaacctaaatatgaacttc

SEQ ID NO: 169872 - DNA, 1332 bp, Cannabis sativa
agacgcagtatgatcatttaactttctctgggggtagtagccatactttggaatgacacccccgagacccactctaaagggaatgatagttgccaccttgtggtggtaccctcgtgaccccttccacttgaactttgacattgttgatgttatgaagatgcactatatcaaccaggtggaatgtgttacttggaccatgagagtgtgggggtctaagggtatacccctagactaattccatcaccttttgagtagatctttatatttaaggtaggggatagtattatatacccgtagacatattcgactcccttaggtgtgtggtgatcgcttattccatttgtgagggtgcttatccaccttccccctgggagtagtcaccttgcttaagctaggggaaaacgtgaccacaacacttctcttctaacggtcgagactaacggtcatgattttacacattcttcatcaattcagtcttggtatcctcgtgccacatgtcatcatttttttcacatcaccatcgtcaaaatttaggtaaatatttgccccccccccaaagtttttagcagtatgactatacggtaaaaaattacttgtgtagcccacgctttgattttgttgttgatgacttggtggtatggtgccaggaataccctgcttatactagaattacattccaaactcaatacacatatatatatatattacatttttacaacatcacaccaattataattttctctttacaagaaaaaataaattacaaggaagaaacacaaattgcttacaagaaagatcatttaattatttaccaagagaagtaatctaattatttgtagaaataattagaagagaggaaatttaaaatgaaaacatagggaaatgactcatatatggtaatgtgggttctttatactttgaagaactcaaggaagagtaacaaaccctcaaaaaatcaaaaaatcaaaaatcatattttctctctcttcttgttatcctaatttttatcctcatgacgtggcatactcacgtggacaggatcagtgccagatggcagtacagctcgctaaaaagaaagccaagtcagcaccccgagcaaacaaagaccccagcacttaaatagggatcaagtgacagacttgctccctatcaggagttggccgaccaacccagggacagcaccatggctgatcaacctggccacaacaggagcttggtcagccaaggaatgctctacaagccttgatggacactcatacacgtggccaatgataaggggttgcgaattgggccctaaaagcccaacagaatggctaaatattatgtagaatc

SEQ ID NO: 169873 - DNA, 627 bp, Cannabis sativa
ttttacattcgtacgtgggactacaggttgtttgcattggccccttgaggattgtattgctgattcttgacataattggcaagaggtccattgcgtatgagtgtctctatatcatcttttaagttcagacactcgttagtggtgtgcccaatgtctttatggtactagcaatactttgttggatccctttttgcacgactcccctttaaaggtttaggtaaccaaaatgccacctgatgttcgtttgccacatagatggtttctgagtttccacaagttctgagtatatggtgaacatggactggtaaactttgctcttcttgacattattttgatctctcccattgtcgccctttctcttgttattgtgcacataattattggcgacagggggttggctaatggttgttttgtatgagtggcagtcgtagtagtggtgagtggagtcaattgtactgaggcaagaggtaggtttttggctatccttacctcctcaatattgatgacttcttggctctcttcataaattttttggtggtgggggcacttcttccttagaggctatcccatagtaaagaacaatgagttatgcctgcccccagtgccatgagtctcccactgtcatca

SEQ ID NO: 169874 - DNA, 1221 bp, Cannabis sativa
ttttggtgacaaaactagccaaatcccatttatgttagctatttatccattcagtctaaaagactatgttatgccacggtgaacatgccacagtgtatataagtgaacacgtttgtatacttgttttttttgtacgcatatagtagaaaataatatcaatatactgaaaaaaagagagaaaaaaaaaacaacaaaaaaaaaaacacaaaataaaagtaatataaataagtaaacaactgtaaaaaaaacacttactgaagaagtcaaaaaattaccacgataactaagcttgtgaaacacatcttgttatcgactttatcaacatcaaaacgaaatgaaagagaaatgttatccttgctcttcagttgttttgctggaacaaaacaatgcatatatatataatgtatatatataaaaatgtaaaaatttcagggataaaaatgtaaaagatttacaacaatttattgttttgctggaaacaagaaaatacatatgtatatatttagatacaatgactctaaaaataataaaattagagaagaaactaataaaaaataaataattacgttaatttcttcgatctcagaccctaccttaaccaaacatcaaaatcagccttcaaaatttggtcaacaggtttcccaatattatcatccaatagacataatctaggaacatatttcacaattttaaaatgagaaccatcaggagaattagatattgaatctaaattagcttcaacagatcctagttccataaagggagactttaaaacaacccctttctttttgtcctttttttcagtaactaagattgaagtgttctaaaaaacaacaatgtcacgaacatcattttgaaccaaatcaatatggcaacaatcaccaacaactttgctagaagattgagcctttaataaaataagaaaagtcaagatacacatacaaggaatcaaaaaacatgaatgaaaaaatatatttatatataaaatgtggatatctaacagttttattggtttaacagaatattttaagaacataagaatatttcgtgaaatttaacggtattagcagggttagttttataaatatatacaaatattaatttcatttgttttagattaatttaaatatatataaataacaatattatttatttttagttaattgatcactaattttagattagtttaaatatatataaatatttatatattatttataa

SEQ ID NO: 169875 - DNA, 604 bp, Cannabis sativa
acgcatcaaactatttgaactaaatttttattttaacctatgatatttttgtgctcgatctctctataattattcgtataataaaaaaatgaatacattatgtctaaaaaatgtatgttcctaaatgagtaattcataatattattgtctttttacacaatgatgtaatttaatttttaccgtagataattatgtatgagaattatattattttaaattgtatggttgtaattaattaataatcacacgttactgtatagatatgtataggtaggatttaatgttgaaatgtcaatataaatatcttggataatgttggatacattaaaaaaaaaaaagagtgggattaattatttctttccattatattaatttgaataatatttttaaattaataaataaatttaaatactatttattataaataaaatattactatatatatttagtctctaagatcgtttttttataactgagttatttttatgttattagtaataacatatatatacagtatacataaattttataaggatggtgttcataaatgatatggcgaacaaaaataaataacatagtgataaaatataggctaattaggatt

SEQ ID NO: 169876 - DNA, 1520 bp, Cannabis sativa
  modified_base (553)..(554): a, c, t, g, unknown or other
tcttatgcaagagtgatattttctcatttttgcaccagttgtctcttatgcatatttacttataattagcattttcaggttgtgtaattgctcaatcatccaagctcaactctaacataatatatattggtaattcaatggcacgaaacaaaatactaagtattatagatccaaaataatcaatccaacgacagttgattttaaaggaaccaactcctcccacatgcacaataacaactcaatcaaatgatgaggtaaatgggtagaacttcaccaaatatgtatgagatttccaaagtcgatttgatatattatatagcttgattggtgttagtaaagctcgaacataattggttgagattataattaaaaatgttagtatatcgactgcttttagtagagctccaccaatgtagtctcaaaagtcttgaaatgttagtttagagctcgaccattcatggtcgagatgtagtctccaaattcttgtaatattagtataaagctcaactcttgaattgagctcaaccatttgtgggtaaagcttgactattanntttgtactcgattgatataatattacctcttttatttgaattagtcaacagaatgttttgaagaacaatcaaaaataaatggagaagaaaaatcagaatcaagtggacaagaagaagcagagtcagatggagaagaataaatagaatcgaatggagaagaagaagcagaattggatggagaagaatgttatattatctataataatataatatatagattaaatatgtgtaataaactaaaaatgtaacatatgacaatttatattagttgtcatccttttgtaacatttaggggagttacttgttactatgagtaacctccaccattattaagtgtataaaaagatattacacatcttaatttgaaattcataatgctataggagttatagtgtgtgcatgagttacatttgagtttataacatctatgggggttatgagttagaatttcaaatggtgatatcataaacactatataaagaggtctaaggtgttcacattgaggggacaagtttttttctatcaaaaaagcacattgctagaaaaccctaaggcttgataatttccaaaattatttcctataaagttcccttagtgcttagagataggggaaataagcttttggacaaaggtgtaataccttgttcaagccatggtgattcccactaattatcatcacttcttgtttattttacctaaattatttagtattcatttttacataattaatttctaatcaatccctgtggagacgatactcttttacttatcattgtattacttgtttgtgactacgtgactacatccatgtttctccctagttggtacttgaacattcagttgaccattcactaataagtggctccaacattcttaagatcaaggtcgtgctcctcgaaggttttagacttaacaaacatatcatctacatatacctccatgtttctgttgggattttatgcccta

SEQ ID NO: 169877 - DNA, 605 bp, Cannabis sativa
  modified_base (558)..(561): a, c, t, g, unknown or other
ttttttttttaattttaaattcctcaagttttatgggtcactcagcttgtcggaattaaaacaatgaaaaaccaaaaacacaaaatcaaagaatgatgatacagtctacagacctttttttagctgtaatttgatatttatatatacatttatatatattttacctgcttcacatattttccatattgaaaccatatctctcttttgggcggtgatgaatgtaaaagctttaatatttgtgtgtgtacttactgtttttcatttttgtaatgcgtgtggtgtggacatccagttggagatatgaaaattcttataattttcataatatggaccgtaatggtaaaagggaattgtgataaacataattttcatggtggattctgtgtgagcaagtcattatacgaaatgcttgctcacacaaaatggcttttcaatgtaaaagactctggattttccaccaacactagggttaatttgggtagattgttttttattttgattaatttaggtgccgtttgttaacacttttgttttctaattttttaatcacaaaataannnnaaaatttttatttttaaaaatttacttttgaaaaataaaaatgc

SEQ ID NO: 169878 - DNA, 775 bp, Cannabis sativa
atccgcaatcaaaattccagccccttcgatacacactttcctcacatttagtatgcttttccaactccttgaatcattatcgcctttgtctacctgccacggatcgagtcttctacagtatttagccaacagtctttcaacccaaacctttctctcgccttttagcaccatccaacacaactttgccaatgacgcctcattcatatcttttagtcttcttaatctaagacccccacaactcttgggttgacaaatttcgctccaactcttgtacgcttggtagtgtttcttttctttgttgccaatccactagaatcttgcgagaattctatcaaggtcatcacaaagtgtctggggaacttgcgctgtagatataaagtagtttgggatgctttgaaggacagccccaattaaagtagttctcccagcttgagagaggtgtttggccttccatccctccaacttcccttgaattttctcctttaagaagtggtaatcttttcttttacttgctgagaaaaagaaaggatttcctaggtatttctctgattgtttaatattttgcatccccaggatctcctttatcacatctttgcaatccctgttggtgttcggagagaacaccacactactcttctctttgctaattacttggctggaccacccttcatatttgtgcaaatagtggagaagtcttatggcattatgagttgtagcttgacaaaaatgttgggttttatgccctaaataagactcatttcaatataatcagatt

SEQ ID NO: 169879 - DNA, 877 bp, Cannabis sativa
tattattttattcatattttccttctattacttttttttaattatttatcaattattaaatactcaatgtgtctaccatttatcctataggaaaatttaatacatgcaataatacgaaaaaaaatttagtttttaagtttaagaagctattgagagaatgttttttgtattgtatgcaaaatttaaaaattgtggcaacttcaggtgagtacagaccactttcaaatgactataaaattttatttttggttacaacttcagtaaagagactagaaggagaaatagttaatatattcggatcaatgggtttcaattcattactccaaatttgactcatttacgtgttaacggtaacacaatattctcatgtattcgtattaacaatatactgtgattttaaaaaaaaaaataataacaacaaataaatgatattttatatatgatatattaaatattgttattatattagaaggaaactcagtttaatcatattataaattcaaagagctatatgtaaaaaatatatatatgtatttatatacgtatttatatgttatatgaatgaaattaatagagttatagatttagatgtaattatatatgttcatataatttaagatatttgtagagagataatatattatgtgatgattataagtgagatgatgagaaagattttaaatatagtgacgactacatttgatagttaaaattattttaggtaattaatttatgatagaatatcatttacttatgtataaaaataattacttaccaattattgtttgatttattataggtatataacaaactaattagaaaagatgttaacgaagactacaagtgagatacagtgattgttggaatttattttacc

SEQ ID NO: 169880 - DNA, 645 bp, Cannabis sativa
ttttaactttaagaattttgtaaaagaatgatgtcaaaactcttgcttttgagttttgatgactttttcttgtagtttttgtatttaagtatcgatgattgttgtttatatgtaggcatttaggtggtatttagtttggaggaataaaaacataagaataaaaatgagaatgagaacataaatatgaataaaatagaatagaatttaaaatgcataaaaaaaattaagaaaaaaatcactaatgaaattacaatactttaaaatacagccaaacaaatgaataaaataaaaattgtttcatttccattccattccatttcattacctccaactaaacgccaccaagattatcattatttttcactattattctggcaatttttccatccaaaagcatgttttatgtttcttttggctccaactaggtttgaatcctagtactgtgtttgatcgggagccttggtagctgagttgcagaatgagcaactgaacatggtagctaggtaaaagaagatgaaggaaatcattgagggttgctaagtgtagcaaatagtgattcgaattgtgtgttgatttcatagaataatacatatttatatacaaagctaggagactaaatatctactaaatatctactaaatatct

SEQ ID NO: 169881 - DNA, 1312 bp, Cannabis sativa
  modified_base (1195)..(1201): a, c, t, g, unknown or other
ggcataaaacccaacaccgacatccctccatgtggtaaaattaagttgccacttacagtcagtactgcctcaaagtagaccaccaccacggtcacattcatagtggttggcgacaagtctccgtacaacgtgatgctcagaaggcctgccctttacgaccttcaagccatctcctcaatatacgacttgtctgtcaagttcccaacgacaactagtatcagttgtccccttggaaatcaaggaactacttgagagtgctataatgcattgctatcactcaccaagaagacctcttctgctgctacagaggggacgaacaagacctcctctgctgctatggcactagggggacgagcaaggcctctcctataaaagtcagagagttaattaagacctctggagatcaaaataaggagaagatagagacaacatctaaagccactttaaggtgcgcctaagatggggatgacattgaccactgttttggggaaattgacttgggagttggtccaaccgaggaacttagagaactttccctcaacatatcacacccgaccgaggttgtcaagattagaacaaatcttatagaggtcttgagtgagatgctcatggcttgccttaggagaaatcaagacatttttgcttggttgcatgaggacatgattgggatcgaccctttagtcatctgtcatgccctcaacatagacaaagtcaacttcaagcctgtacaatagaaacgcaagctcctcaacaaagagcattcctaatccctcaaggaagaagttgaaagattacaggagaataactttattagggaagctttctactcggtttgggtatccatctctgttatggtgcctaaatcaaatggaaagtagagaacatgcatcgacttcacttacttcaacaaagcatgccctaaagattatttcccacgaccaagaattgatcaactggtggacgcaacaattggccatgaactcctcacattcatggatgcctattcctagggctgagcatgaaatccagaaaactaaaaaaatcggtcaaaccgacctaccaaacaccgctggaaccgaaattgaaaaaactgacaacagttaaaactgccattaaacggtcggttttttttttgggttctgaaccgacaactaaaactataattgatcgactttatacatatatatatatatannnnnnnttcattttatttaaggcgtgcacagttatacatatatacacatataacatataacatttatacttctttaaaaaaaaataacatttatactattatataataataataaat

SEQ ID NO: 169882 - DNA, 693 bp, Cannabis sativa
ccccttctcatttgattctccctctctcacaactcttcgtcgataccaccgttgctgaccatttcttcaactcactatggttggaacccttgaagatgggttctctctccctcgtcccttccctccctctataaagattctctctttatgttctccaaattcgagttctctttctctgagattgttctagctagttcgaggagatgggtcgaaaggccttttgggtcttcgttggctctgggtgggtcttatggtgatttgggttaggggatctaggttggtggtttttcagaggtcattgtcggggttttgggccttgtagttttcagatctgggcaatttcttttgttttaaatgtttttgttgagtttgaatgtatattgagattttgagttagggtgtctttactctatttttgggtagaagaatgtgtgtttggtttatttttttggtcttttgttgttgttgtttgggatattggcggctaaactacctaaactttaaattttttaacactttaccacaaaaattgatttttggggggcaaatctacctaaactcccattccgttttgctttgtatctattcgtccaaaaatcacagttatgtgccacagtggacatcccacgtgtacacacttgtatacgtgaaaattttttagtggcccacataatattaattttaaaaaataat

SEQ ID NO: 169883 - DNA, 1087 bp, Cannabis sativa
gggtgctgagggtcgagaaactcgatctttgtctgagcatatgcgcgcgataccttgtgtgcaaggtatgtgattcagacaggaggcacacatgaggggccgcttgttcgtacattttcacatggaacacgagccacatctccgagaattatggcacacaaaggttgtttgcatggtgtctcaacagccatggcttccaaccttcaaaattgttttttaatttcagtttcgacccaaattcgattttataaaaccttaaattgcttaagactttgtaaggaatatttctaaaataattttagtcacataataaaattatttattatcaaaatctcatactttcacataaaaatcatcaaactcacataaacacaacatgaaccatccaaatcacacccaaaacaatacatatcattttaaattcttatttcatgaaagtaaatcattaccatggctctgataccacttgttggaacttattttaccaggatattaatttactaatcatgtatgctgattataaatctataatctaacatcctagatataaaaatcataaaataaataaatacataagagattagaaatccttatattggttgcaataaaatataatgtctccttctattcagtagtctaacccttattcttttttattgcagagtagtaacaagtactaaacctgatctcctctttaaatccataaaaaaagacaattcttcataatctttcacaaaggtctaagtatatcaccttgaatagtgtgaattgatacccaaatcacttttggaacaaattttgagagaggaaaaggctatgttgactttagaatttcataaagagagaataagagagctttttagggttagaatcaattaactagctctctatcatcacttcttttatatagtcaccacttggggtaggtttagatgagatgggctaaaataaagataattgagcttaaaattaacctagggccaaaatccactaaaggaagccaatggatttgatttttgccactttattttattcaaatgaaacaatatgtattttcctaaacttaccaattatctcatctaattat

SEQ ID NO: 169884 - DNA, 922 bp, Cannabis sativa
tcttcttcttcttcttcttgtttaaggctgtgatgaagaatgaagttttggagaaagtgtggttgatgagacagagagtgccatttaaagcacacactactaagcttgataacattcttgaaatcaggaagtcggatcagtatttcgagcaaaagatcttcgttgttcatcacactcatgatcgattctgattcggataaattactttttgctttcttcatgactgcttttgctaatctcttattcttcttcttcttgttcttcaatcctaacatgaacaatcctttcttcataggaattattccatcccacttagggttgtacattgttcttggtcgagtttatgcaatatattaatcaacacgagtacaacctgcccaaacattcaaagaaaaaaacagttttttttttcactttaactaaacataatcaaaatcaaaactacccaaaacataattaatactaatcgtgcataaatacttggtaaaaaagaattaacagaattgagatgaatacttagttagtaaaacttgatgaacaaacaagaatatagttaatctctgtacgattcaggcatttagtcaaacactgaagctacaaacaaaaggagataaactgagcctaaagaaaagttgattatggtaaagacgagagcagagagagaagaaaaattgaatacctgccgtggttggtgattctacagctgctgattatcggcagtgaccagacgagagagaaacccagagagagagagagagaggcaatcgataccgaaaataggtaagttcaaatctgacttcaaataaataggtaagttccttaatttttcacgttaataatatcaaattatatttatgtgtagataatatttgggaaatttacgtggcatagtaacttttgccatttttttataaaaatactg

SEQ ID NO: 169885 - DNA, 527 bp, Cannabis sativa
atatatatatgtacgtagatggagaagataattaagaaaaaacagcacacaaatcataattataatatattatgatcatatatatgatgatcacatgccacaataggagtggagagcagatagggctgtttgaccagcgtgggtatgaaaaaagtcaatgaatttgaaatggtcaaagggcttgaacaacaaaggattgtcttcatcaacaagttcttcaggggctttcactatgtaccctgcttttgggatcgaaaacaatgccgtcgagtaccttacctcatttcctctcatcattactctgtgagttggagaatgcaatctaccatttgcccatgcctatacaaaaataacatatacatatattagtctcaaaatttgttgattaattggttagcaatatatataacatgtcttttaacatttctcatagaataagtactcacgtaaagacaatccccaatcatggcgatgaaagagtgagaagatgagggtttgacatcaaaccattggccatgtttggtttg

SEQ ID NO: 169886 - DNA, 821 bp, Cannabis sativa
agtgaaaaggtctttctctgagtgtctctaatttttggaactgcatttgccgccactctcacgtcgaaggggttgggttagtgtgtgacaactctactcaacattacaatagtgcgcttgaaagcaagaatgacttacgacatttcaattgtcgtcgttaatggactttcttaattaagtataggcctcagcgacttgggtccttcacccctagtttacgagtttggataattcaaggcaaaatacaaattacactcattatgggtattctttagagaaatttacgctcacagaagtaattttaaaataaatattacaattaacgtgactatttaattgtgtaaaatgtacaggtctttttaatttttttttttgaaaatgtgtatacacgcttactaaattaattagtattattttttttattattttttttttctctaaaaagtttaaaaagattttttagtcactgtgataattatttgagcttaaaaattatattattacaatctactctttgaggtgattattttaacatgtgggaagcctatattttttctccattaacgaaaaatactaaaaattaaaagtaacttttaagtttcttttaaatttagttagcaaaaataattaaaattttaaatttaacaaaatttaatatatcaactatttttattggattagcaaataatattttgttatttcatatttaaaataccaattgtaatctacataaatttattttgttgaacaagtttgttaagtttctaaaataatttataagaaaatcaactttattgattactttgaaaagtttataattt

SEQ ID NO: 169887 - DNA, 566 bp, Cannabis sativa
gtatttcttttaacatataggaagaattgcaattaaattactagagattcgttattttaagcacaaatttttaggtatatatatttacataaccttttttttttgataaaatgtaggctaggattttttttttctttttaacagaattttacttaaatatattttacacaagaatttgtaagtatatatatccaactaaataaatatattttacacaaaaatttataagtatatatcaaattaaataagtatattctatttaaaatatttagtattatttttattaataatttaaaataattaatttatgatataatcatatcacgactactagtaaaaggatatataatttaataaaataatgcaccattcaaaggataggaaatttgattttctatacttacatatacctaatattttatatataaactaatacatatcatcattaaaaatagtggacttttatttgcaccccaccaaattataaatacactccattattaaaaaaatataaacttaaataatttataaaaattactctcaatatttttttttatttttttctc

SEQ ID NO: 169888 - DNA, 598 bp, Cannabis sativa
tactttgtaaaaagaaataaaaaaagtccaatgacaattgaaaattattgacatattttaattgaaataagaatgcaagaaaaagagagtgtaaactggttttttgtgtgacatgtaacgacaaagcactaaagaatctaattagaatatatcatatctacgtttctatactaatagtatgatatatatactatatatattcacgcttattgccccttctcttccaaaaaaaataaaaatgaagttaatatatattcattttgggctgcatcatatttgatccatttgaatatcatattttgggctgcatcatatttgatccatttgataaagtaaaaggccaacattttatttgtcaacccactcaaaataatgactaattaatttggacttcagtgagtccaataaaacttttatgacatatcaactcctttaattttcgtttcattttttttaaactcattttgacacctcataagtctaaattttatatgttatctcctatcaaacacacacaacattgagattaacacttataaaataaaaaactaaataaaattaataaaatattacaaaattatttaaaaattaatctaaa

SEQ ID NO: 169889 - DNA, 1434 bp, Cannabis sativa
  modified_base (698)..(698): a, c, t, g, unknown or other
aataattaatatgtagattttatatgttgtcgtaaatatagttagttttcttataaatatatatttatatatatacaattaatagtagtattgttagctatatgtttcgtgtttaatgctgtattgatgtgttttaagtagtatttgtgattttttttatattattgcctcttaaaaaattaggaaaaaaatgtgtattataatatatatttgtaattaaaggtaataaataaatataatattaattttggtatgatgattaaattattttatattataaaggtgaagagtttaaatgcaaagcatatatatttgataccctgtgatagtcagtagtcccgtgatctgtaagagaaaatattgagtaagttgtgcaatcctacaccacctggaaatgtcaagtgggataattctgagactgtgtaggtatgagactacatagttgaaaatgacttaaatggattgattgataccacctatatcagcaaggtgcatcttatttttcggtagcccatcacgaaagaactccacggttaagcgtgcttgacctgggataatttcaggatgagtgatctcctagaaagttttcacaggaagcgtgccagtgaggacaaagcacgcaggaaacactcatgttggtctgtaggatcagccatcaatctatgaagcaactagagtgacatactcgtgtataaganccattattccgtgggtgtaagggctcaatgaaggcttgaagcggggacgatacaatggtatcagagctttgatccagatggaaatgtgatcaacgagaacgttgaaccccgtaaaaggggaagattgtgatagtcagtagtcccgtgatctgtaagggaaaataccaggtaagttgtgcaatctcacaccgcctagggaaggtcaagtggcatggtttcgagactgtgtaggtatgggagtacacaattaattaaagagggcttaaatagattgattggttatatcaacaaggtgcatcttatttttcggtagcccatcacgaaataatttcatggttaagcgtgcttgacctgggataataatcctacacggttaagcacgattcgtgggataaatttcaaagagaaaatgattaattctactttttctttatgtacatattttatgataagagataagagatgatcatacatcttagtaattatattttttttattctaattaagtattaaacttattaataattagtgtgtcctctctatatgttttttttttcttcaaaaataatataaggtgatattttctttgataatgcgtacgtaataaaaatggtattatgatatttgatttaactttataataataaatattataattatgtaaagtaagttttttttttttttttgaagaaaagcgtacatatattagaataaaagcagttagacctcgcggtca

SEQ ID NO: 169890 - DNA, 533 bp, Cannabis sativa
gggttaaattttgatttgagcagactgatacggcatcagtgcttcatgaagcgatgggatacatcaggtttctgcaagatcaggttcaagttttgtgctctccttacctgcaacgtttgccttgtgtacccgtaagtgtcagaaatttatgatcaggactcaacatttcgttttcacctcattcttatttatttatttatttatttaaatatggacccttgtatcacgtggtactagaatactagggagtctgactagaatttttgaggtgggaaatgttaaaggatactgtcagttatattggtatttgggcaatttaataggtagtattggggcactatggtgcctttgccttactatcaataacaatcaataaaaacaaaaaaatatttattgtgttgacactgtgccaaattttagtatcaatccaattatagactctaaaattgcagttcaggctttgtcaaccaattctcttcctgactggagagtagctagtgtgttttatctatctttaaacttggctaaaaagt

SEQ ID NO: 169891 - DNA, 1294 bp, Cannabis sativa
atgcctctcaaaaacatcctctatcattgaaaaggctctctttcttatagccatttgtggttttgttaactaaatgtcctacaaccaagaacaccataaataatagtaaatgattaaaatttcaagtggttatttttacctttggaagcttgggaagtcttctagtttcattgctttccacaatctccttcgcagtaccttcatatcaccacaaacaccaatctcatccttcgcagcatagctaatccccaaaatccatcaaattaaaccctgtcatgtcaactttcgaagcatcacatgatatcgcggccactgcatctgcaattgtcgaaagcgccgccgtttggtggtccagaagggcaaaaactccgtacatagaagagatcagccccaatgtttctagcgtagtagcctccttttgggtcaagtctagcaagtcaatctctagcttttgcgagttcttcgtgttcaatgcttcatcaattcgtacttgtgcaaggccattggcaaatcaatggcatagacagatgatgaggacagagacgatatcatcccttgcctcaccctatcgtggtaacaaagtcttcgactttctctgccattgtattttagggtttttggttagagaacagaaaaaaaccattttcgtctacagatattccattttgtggactcagccatatcagatgagaagctataccattcgactttaacataattgatctaatatagttatagttattacagttattactttggtgaacataatagctacataatctcaatgcgttacatacataaggaagatattatataattgttcggtttttcacaatttttttcatttctcattacaaacaagagtggtgacatgttttcacctctctttgcccaaaaaatcatgcaaaggaatcattaaaaagaaaactaaattttgcgatacgaatacaaatcattttttagaactgaaaagcaaacatcatttcctctaagaaatctctcataggccttttgtaagtcaagtttgagaatacagttagccttaacattcttcatcttatagtgcttcactaaatagtaacatacttatattataggtaatgagtctcccttgaatgaattcaccttgattttgggctattagattcggaaatatatatcttccctagtcgtgcaaaaattatttttgttgcaactttgtatattatattacaacaagaaataggtttgaaattatttacagaatcaggacaagaaatcttaggaatcaaagtgattgttgtggagtttattt

SEQ ID NO: 169892 - DNA, 1016 bp, Cannabis sativa
aataaaaaactgattgtttttttttttgttaataatatcttctagtttaggaattgtttattatgtatcattttttatctttttagttcttaaagatttaatttttataatatttaagtgagttattgatagaattctatatcatgagatggtagaaatttttgctatgataaaaaaatatttataaatatacttagtttagaacttttgagttatataataattttaatagtcttgacaatgaaaggtaacagaaatagctagtaatgtaatgtaatgtaataagttatatatttttagtttgaaacttttaatacttagtaagaaacttttatgaactaaaattattaattaggtgtttggtttattgtaatgtaataaaaatggtaatatgaatagtaatataatgtaatgtaataagaatatatagtaagtataaattaattgtagtgctaaataatgtgtaattatataagtatgtagtcactagttatatatttattagttacttgttactattctcacttaattttaatttaaatatttttaaattgaatttaatattgtaggttgtggataactattagaaaacgaatcaaaatatcgatgatcattaactgctagttagagatacattattgaccaacaaatttttactaattataaagctattagaggagattgaatatgttagaaattcatccgtaatgaagtaggttctgcgatataaatgtactgtggtcggatgagtgacaattattatattgttaaatgcttttatgattattttttcttgttacccgatttaattgcattgtttgttgcattgttagatagttattaaattgaataaatttgtaaaaataggggaacctttgccaaattttgtaaaaataggggaaactttgccaaattttttaggattcttaaatgaacatattttttaatatttaattactaagcgtgcttaggatttttctagcaacttttaagtttttttttagatcggaagagcg

SEQ ID NO: 169893 - DNA, 991 bp, Cannabis sativa
actctccaccataacaaaatgatgatgcatagagatcgccgtctccaaagctaacagacacgccgctgcttctccgatgatagagtcagcgaagttaagcaatttagttgccagccacaaaatcgaccccgtagagtccctggcaattgccacaacacacatggaatcaccaccgactctgacgtcgcagttaattttaatccaatcctccggcggtggcgaccaagccgtggtaccatcatcttgaaaagtcttaaacaaacaggaaccataatctgcgtaacaataagcaatagagtcaatataatgtatcaagctacccatagtgttgttatggaccttatcattcctagccctccagatcgtgtcaaccacaatcgaagcaaaaaggaacacctcatcagtgtccactccaattattatgaagcttgagtagtgttaaattcacaccaaattgtagattatttgtgaatttttcttttctttattaatgtgaattatatcaatgaatttatttttttgtattctagattagtaaagtgggattggaaaaaaaaaaatcatcatcacactagacactactacaaattatgtaattgcatctagcttggtgagtttaattatttatcatttttttaatttagaatttaaaagtttatcatttgtattgaatagtagttgataacgataagaaaaactaaacaattatcattgaaaagtaatactcctagttgtgattcctatgtaatggtaaatcttcaatactaaaaaccaattatgtcatgtaagaaaaatataggtaaaaacatcaaaccaaaccagtatattataattctcccctcaatgatggtagtcatatataatagaaaaaactcttcaaaaaataaaaatatatatataggcagaagttacgtgtctagccacgtatagttagttttattttaggttttagttatagttatggttttttttcaaatgtcatacgtaattt

SEQ ID NO: 169894 - DNA, 549 bp, Cannabis sativa
catagcaatcaaaatagaccttcacactaaaggtctcctagtgtggtttattagaagattattaaaaaccgttataatctgatgagcattgccatttgccatgcatcgtttcatgtctcttatttctttaaccacaaaataacatgatttgttaaattgagaaaaaaaaaatactaaaatgaacagacaataataaattaatataatataaatatttattgaaactaaaattttatccgctaaaattatattgttatagtttctagagtaattttctgtagagtttcagtattatttacaagaatcttccccctctctctgtgtcaatatataagaaaagttgacgcctttaggtttgcttgttttacaatcgggttgcccatattcataaatctatgttgagtggactcatatcggctcatgacttcgactgatccctgtcctcatcctagcactactacaaaattgggctttagaggcggtttttaagggctttcagcgtcggtattggcaaaattcgctaccgacgctgttccgggtgacgctaaa

SEQ ID NO: 169895 - DNA, 876 bp, Cannabis sativa
tatctcttgtttgataagatgatcattttctcttttactaaaaattttaatatttctacaatcttccattgacctactaggattccacaaaatcaaattcccataattatcaggtctatgtcgatagagacaaaagattccattaactgaattgacctttctaagatacatgtctgagattgtttttgacatgtaaagttgtagtttattattgttattatttatgtagtaataaagctctttcttattagaactcgaataacatttgaatatgtttttgttgcgttgtgaaatattattgatttgataatcgaagtgattttgaaggaaatctaaagttgatataaacatgttatattgtttggagacacttttcaatctcgttagtgatttcacatcacatcttaatagaatctcataaaccatctcgaaagggagggagaaatcttcataattcatcttgatcatatgacccaatattattaattatagggataaatatttattaacaatctcagatttatatatagatagtactatatatatgtatgatataatcctatatgtattagaatttgtgtgtattgtactatatctacgcctattattaattcaaaaaatatgttaataataatttttaaatttgataaaacatacaaatattaatttttaaaacatctttttttatattattgaaaattattaaattaaaaaataagatataattaagtaattattgaaaaatatggaattattaaagaattacattagaatttagaacctatataattgaagactgcttataatattgtacttgttttgccctttatattaacaatattaattaactctttaggggctcgtttggaacgccgt

SEQ ID NO: 169896 - DNA, 519 bp, Cannabis sativa
cttaattcaaacttagaaaccataatcagaacatatctaaacctatagccccgaaacacatataaaatctaacaaaacctaacctagaatccttaaaaataataataaaaaaaaattagtgaagagttacctcaaagcttgaacaatccctaaccttggttgattctactagagattcttgaattgtgatgaaatttctccttaattctgctggttcttagaactgtcgagagaagagaaagagaaatcgggttttgtgtgtaattatctcttttctaagttaatcttcttatttctttaattatataaaataatataaacttttattaaattaactttagcttgaatcaataccataagagataaaattccaattcaatgaaaagactaatttacccctctttaatcacttaagcctaaaatagaacttaagggtattttggtcactttctagctaccctgaaaaatgacatcttaacattttagactagtccagtataattctaatataactcaact

SEQ ID NO: 169897 - DNA, 1301 bp, Cannabis sativa
ccaaggcccaagggtcccccgggggggggggagttcggatgaacctgagtaggctaaaactagatccgagctggccaggagtggatttgaacatgttaggccccttgcccaaccttctgtattgtgcatagagacaaagagaggcaaagacatgattaatcactatgtgaaccggtcgatcccagaggtgaatgagcagttggctggggcagacaattctttgtccttggaactggtcctgggaggagttctgaaagagctttcaagagtaagtcctttctaacacctttctttaatttctctttgactagttcagattttaatgctttttccgcgcagactggtgtgaagatggcttacgcctattcctgagctaaattggctgatgtcaagaagcttgccacttccaacacgatgcgaagggaagtggactttacgaaaaaggacgccgaagatgcacgggcccagcttgagactgtgtggacagaactcagagaggtcaataagaaagttcttgctgcggagaccagagttgtcgagctgaccacggaactggaggagatgtcgttaacctagtaacttgaggcagataatgtttctttgtctcaagaaattgccagccttaaagacgagagagagggtctccgaactctccttcgcaggttggaggatgaggccaagggcaagaagacttgggaggaggaacttgaggctaaggtgaagaagcttgggtagaaggtgaattccttagagactgttggtcttgagattttttatgacttcttgaaggctaatcccaaagcaaattttgaatatcttggcacttccaaagacatgttcgtcgactactgtacggctcaggaaaccaatgagaatctagaggcaactacttctgcttctcctaccgactagaatgttggggctccttctgcccagactgatggtccttcggcctcttcagacctggctaatccttcggcgcctttagatccagctgacccgtacaaagagcctgggactcctgctgtttaattgccttctttttactgtcttttttttatgttcggccagtgggccttattttgagaaaagatgaccagccaagcgatctttaaacttcgaatatgatttttcatttttgaacaactggctgactgggcggcctttagtcccgagtttgaatgcttcattattcttaatgaatttcatcctttatttataatcatggtgcaaatgtgttcggttttttttttaccaaatgctttgtacaggtataggtgccccccaagtgaccgagcaga

SEQ ID NO: 169898 - DNA, 529 bp, Cannabis sativa
gaaaaacgtaccgattaggaacaagaatggaatccgagaagggaggaagaaaatgtttggtgcattagatttattgagggttttgctaaatatttatatatatatatatattatatttagaagattcttgaagaacaatttagagtatgaacaggaggaactgggatgtttcttagtcttatggcgggttttgttgcaggtgagaggggtatttagggaattccattctaaatattttcaaaggctttctggtattgccaattctggtcttgtttcgacaaatagcatttctatctagcaatttttttcttttctttttttgaaaaagcatcacttagcaatttaaagtgtccaacaatatatgtttagtttaataatgagataattacataaaatataatttttacttaagatttttttttttatatatttttacggttttctatgaaaataatacgaaaacaacaagaaaattacataaaagtaacaggaaaataacatttaaataacatcaaagcaacaacaaaaa

SEQ ID NO: 169899 - DNA, 1317 bp, Cannabis sativa
actagcccacacaagtccttgtgtatggtagaagatttggaaaatcaaggtgctagttttgacatcaccgttctaaggatacaacatacaaaagactcgaagatacactgataggattgaggtaaataatcttttcacgcttttactttcaaatttgatacatatacatatctatcgtgatcttgagaatatagtacgatgattctcaaaaacagtttttttcactgcgtgcctgatttagtaccataaaaccaacacaattttatagtgtttgagagaaaagattaaatcagattaatcctaattaagctttccaaaaaattacgttaaaaatctttctttttgaattcggtttatacggtatattaaataaacccaataaaaattttatttaattaattatttaaataaaaatattttacatattcaattatttggataaataatataatcaaattctgttataaatatttattttctataaccgattgagggaatctctcaacttccttgaaagaatatcttgaccaaaagagatatctataactactttcaaatttaaattcaaataaatatttatattaaattatttaattaattaattaattaatccaaaaataaatccagtggagatcaccctatatgataggcacctatcactgtgttaggacacagtgatagtggtgccacctatgtcttaattatgacattggtggtgtctttttttaatataacttttgtcttttttctaatttatttaattaataaatttgaaaattaaattatttcttacaaaataaaaaatttctatttggacaaattaaaacaaactttttaaaactttcatatacaacttttgttcctacctttgacagtgttttaaggtggctattcggggaccatggacccataattctaagctccaataaattagattatttattgaatctctttaaccatataatcatgtttattaagttctatggtcactccactataaatattaaattgaactctttgtaattatagaattatatttattgagttttatagtagtttctattgatataatcaatttcagtgattagccctccttgtgtcaattcgtaattaattttgtttaaattattattttaccctttgaattgcttattgatccttcagtaccgttaattcagtggggaaagtataatttagatccaatctaaatttgtgcataacatttcaattctaggattagcatttaaagggaaccaacattcgatatgttaggaaagtcatgattccataattgtagatcatgttcccaactatcca

SEQ ID NO: 169900 - DNA, 1343 bp, Cannabis sativa
  modified_base (1284)..(1296): a, c, t, g, unknown or other
ttgtattttatagcattatatatagtttaaagtaaaacaaatcaaaaataacattcaaaaatttgacttcaatgattaaggtactaaatacaagtcttattgataaatgtttaaaaaataaactttaaatattaaaaataaaattactcttatttgaattagaaccttgacatatattatatgaataagatagcttaaccattataccatatctaatacactacatttaaatatagagtaatttgtggcataacctccttaagtggtcaggtttttacaactaacccccaattctaaaaattttgcgataaaactccctaaactcgtgttctgttagcagtttaatatttccatctatttttagctgttaactgccatggtggaatgtctacgtgtacaccgtgtacacgtggcacaattttattggtccacgcaaataaatatttgaaaaataaaaaattaattattttaaaaataaaaataaaaaaaaatctttttctttaaaaattaaaaaaacaattttaaaaaataaaaattaaaaaaaccctaattacataattccctctttctcttcttctcgttctctctgtcaaattctcaaactccaaaaatggtacaattccatgaaccaataattgcagagcttatcgaagaacctcccaatggcagcggcctctctctacccaaactcatctcttctctcctcctcctccactccccatctcagggtaccctcctcctcctctctccctcctcccccgccctcaaatcccaaatcctccaccactacaacccctataactgaatcttcgaaatctcctccgaaatccccgctcaccaacgcctctctctactcctccgactctgtcttcttcatcactcctcgaattctcattgtcggcctcctcaactccaaaatccccacctctgccatcaccggcctggttatcctcaccgttcattctctctccgagacctccaccgaggctttcatcgtcagaatcttccgctccctgaacagagatgcctacgtctcactcgatggtttcagggttttctaaggctgagaggatcatgaagtgtttgtgtattaagaagttgcacctttggccttgcttccatgtttatgtatctcaagagttggagaaggaggctcctgaagtggtggatattagggttctcatggctaaacacatattggcgattttggaggtcatggatgggtgtttgaaggagatgaggaagatgattttggcggctagggtagggcaatgagagagagannnnnnnnnnnnnagagagagagaagaagaagaagagaattagagaattagggttttttt

SEQ ID NO: 169901 - DNA, 706 bp, Cannabis sativa
acggtgttaccaatactagtacaggtgagtacgtagtgcatatggtacaacgcctagtagcagccgagagtacggtttagccctaccaacactagtacgggagtagtacttcagtgcatgtggtatagaggtcatacttctattaagaacgttcttgactatttggtgagccttgtaaataggcacatgagggcctaagtacaagttggcattacattttatgtgtattttatacatatcttactaagtctgttgactcatcagtgtgctaccatgtgtaggtaaaggaaagactaaagcggaggagctataagtttgaggcttggcaatgattgtgcatatcgtggtagtacaacatgaagggtttcggtctaaatatattttggatttagtttttgttatcactatgtgacatgtaaaatatatatatatattgtatttttcgaaagcaattttaatacaggatcccgacttgtaaaactttatatgtgtttctatatatgattgtaattggtttatatgattaaagtttaaatccaagtggttttcaagtttgggcgttacaggtaacatccaatttaactaattcaactgaatcgatccaatataatataattgtaaaatattagatatccaattacaattggattggattgaatgctaaaagttagattttaattgaattagatcggttattggatgtcaa

SEQ ID NO: 169902 - DNA, 626 bp, Cannabis sativa
gtgaggtattagaattactttgctaggaaagtggtgagaatgattactttatgaagtaacgactaaagttattatcattagactagtaattttgtataactgtatatctttatattgacatacattatgtttgaatatatgtactaacccaatttgaattatgagtaatgtatgattaattgattatgataatgtaagtttacttgttgatattgtgtggtgaattatatgattgttgttattacttttcttaccgagtttttgtgactcacaggttctatatggtgcaagcaataggtagaaatgcttggacaaccatgagtcaggaatattctctaacaaatgtacatatcaacttatttggcaggtggtgctgagttgtcaagaattgcatttcaaatgttccaaacttttaaatgtattttatgataatattgtaatatcatgtcttgtaatatttcaaataagggacccccaatcgtaaaaagggactatgccatgattttataatttagattagttagtaaaaaatttattaaatcacattttatctaaactgcaactttattatcataaactagtttataaatgcacacacgtggcatccctaagggttagggcattac

SEQ ID NO: 169903 - DNA, 838 bp, Cannabis sativa
aagcttctttgattaatggtgtgtcgctcgtcacaaacttctttagataactgtaagcactagtatgagccaatgaataacatgattaaagttaatataaatgctataacatttcattatgagggcaagcataattactcttttgtagattgagattctattggagctctatcacaggtggagatggttgaagctcttggagtgaaggatcaaggtgttgagttggttgataacaatctaaattttcatgcgatagtagaaacaaattgttaggttgttgttaaagctattcatagttcttttgaaatgtttttgtagttttggcttactcatttatgattgtaggtctttattgctttctttggagaatgtttatctttgttttgctaagcaatcttctaacagtgctcatgcttatccaagcatagtattttattcatgactatattattaaagtggtcagttgtccttttgatttgttgtcgttgttgactgctgaccgctattctttattaagattaatatttttctttaaaaagaaatagttattattattcttttttaggatcatgtagttgtctaaaacatcaaatttaaaataagtcaaaaccttcacttatgcaagaaatttataataagcaacacactattatccctaacaacatcaaacgatacaacacttcgtgggtgcccttcatcctttctcatattcaaataaaggcacaatgcccgtaggttgaactaagctacgcttggacccaaccgatccaatctaactatttattggatattgaattttgtcatccgatccaatccaatcgaattgagtcatttgatc

SEQ ID NO: 169904 - DNA, 738 bp, Cannabis sativa
  modified_base (160)..(164): a, c, t, g, unknown or other
ttaatatcacaagacttgttattatagaagaaatttggacaactagtgtgtttccaccacttacctgtcctggaacactctaagagagaatgagtattagaatcaattcggtttaaacaaaagggctgtatgggtcatcgagaatctttcttgagaaaannnnnaagtttagatggaagaaggtggttgaaagcctttcaaataaaatgttttattttaggaggaacattggaagaccaaacatatttccaccacggcttaaaggtattagaattggaggagctaggataggaataattggaatttgcaagatggtaagctaaagtgacaatgaggaatcctaaagggctatgtccccaaatgagacagtcctggtttgtggggtcaattggctcttagaggtagagttgacaaggtcttcttcaaagtgattggtgagcttatcaatatcccaaagaccatcctccctaataaagtaagaaactgtagcctcaagatgaattgagtcatttttaaaagagataaagttggagcctggaacccaattagggatagcgatctggaaagatttaccatctcccaccttccaaactaaaccttttataagaaggtctcttccccaaaggatacttctccaaataaaagaaggataatgccatattgtagcttagagaaagtcattatgtttaaaatatttacttttaagagggaagccacaagggaatcagggttagtgta

SEQ ID NO: 169905 - DNA, 514 bp, Cannabis sativa
ataatttttaaagagcatcgctagccaattacaaggtgcggcacatctagaggtgctacgtaccattaatgtctaatagcaatattcattcgaatatattaaatgttaattatccatgtatacactttgacatgtttttgttgttgcacataaattataattatttaagattacaaaaattatttaaaattatgttcaaatttaaaaaataattaaaaattaaaaaaaatatttttctttcattttattttttcttttcttcttttctaacctgttttctctacaccacaatcatcataacataaaagaaaaattagaaatattaccaccattaccaaactccatgaacacattaatccccaaattccaaatcaaatttaaaaaaatattcaaactacatgaacacaacctattaagatagttggtttagctaattcagtttgaaattccgtattttaatattcctagtttaattatttaattaagagattaattaaatgcggaataataaaac

SEQ ID NO: 169906 - DNA, 958 bp, Cannabis sativa
tggaaaatttacataatttaacagagaatttttctgagtaccaacaattttcataaagttcgatttttctatgacccatttttgcaataggcaaaattcacaagcatgtcatcatgaatcgaagctcaattttggtagaagattttaatttttgtttgacatgaaaatgacaacaatggaaaaaaattgagagagggagagtgacagaacatagatctgagagagaaatgagaaacccatgaaatttgaagaaaatagaatcatgttggggtttttcgtcgaaacccattaaagaagagacttactgatgggaagacaagagacttatcgttggggtttctgtctgaatcatgttggattttcgtagaataatcgccagagcggaggagaatcttcagaggttgaaggcaaagtaaagtgtgtgaatcgattgaggggttagggtaaattatataacattagtgtcagtggatcataaaagcgtatctttttagtgtcagtttttgagtgaagctagagacgttagcctcaatttcaaaatgacgcgaaaaaaaagacaaaataataaatttgctattagcgtcgggtacattattagcgacatacaagtaaccgacactaattaataattttttatgtcggtttaaaaatgacgccccaatgatcccttatactatttacgtcggtcaacgcaatgaatagtagcattgaccgacgtaaatagtgttttttgtagtagtgtcatagctatacatacatactgggctcagattatgatactacctaagaagttgctcaaggatattgaggcaatatgtagatcttacttatggaagggaactcaaatgtcaatgggtccttgtttagtggcttgggagcatgtattgggacatagctagcaagaaagattgtttgtttgtcaaatggatacataatgtatacttgaaagataggtgct

SEQ ID NO: 169907 - DNA, 891 bp, Cannabis sativa
catctaggtgggtatggtggttgtcatcccatcctccatgtgacaagatggagagagaaaattgggtgaaaagaagagtgaatagttgtgagttgaaaacttttggtagaaggtaatgttagacttttttttatttaggtttatattaatttttattagttttattaaaatgttgattttagataattttttactgttgctgacttcaaaaagtgatcaattgacagcggagttgtatagatctgatacttgtcacgtgttacacaaacaaaatgaaaaagtacaacacacaaatttattataaaggttcgccccccttgtgatagcagataatgactataaagaccgcttaattttaatataaaaaatagtagataattagggtttaattcagaaattagacgaagtataatgcttcacatttcgaggaacatttgctaccagtcggtaggtggattagcattattcacctccgcattatcccccagattctgtggaggcgcaggcggtgtcagtagattggtttgatcattaccaggctctacgtgctcgccctgtggtctaaatgattgtgtagggtctattttttttcaaatagccctgaaatcaacaaccccaacgagttaggcaccaactccacacttacgcacttattgtcttagccctaacttatacttatataataaacatttatcaaattatacactagtcgtgcttttcatataacattcatttttagatgttcatatactgcctaaaatgaaaagcggtaaataattaatcacaaaagtagttagggtgcgtttggaaagccacaatgtaattggatttgtgtgtaattggaggtaattacacaatttggcatgtttgtctgaccatgtaattacactg

SEQ ID NO: 169908 - DNA, 656 bp, Cannabis sativa
ccgtagtactatacttattgtttttgagacacgatatatctaattattaattaattgatcaagaaccactacaaaaccactatatagttttttaaaggatgtatactagatcacaaaaatgatataattatatgttgaccctcaaaagtaaccaatatagttgatgtagctagcgggagcaagagtggatgatccaaccgaggtaactgctgcttttctcaattattagcaaaatctgcttggcactagtttgcaaaataggaaattggtgcaaattgagatcatgttgcagggtcttcttgtatctaaacagcaagcagattttttaatatctccctacactagagaagaggtcaaaagagcaatatttgacatatataccaggtattaaggctcctgggctggatggatttagaatttttttcttccaagataattggaaaatagttggagatgataaagctgcagcaatcatgtctttcttgaattctgggcagatgctaaaggagataaactcaacggtgctaactctagtacctaaagttaaatgtcctaatgcagtgactgaatataggctaattgcttgctgcaatgtcctatacaaagcagcaaccaaactaatatgttcaagactcaagcatatcttgccagatatc

SEQ ID NO: 169909 - DNA, 540 bp, Cannabis sativa
gggatcaagaatcgggcagggtccctaacaggcccaaagcacctagcagggtccctaacggatccaaaatcctattttttaaattcaaagttacatttttcgtgtttttggaaccccgaagttcaaaatgtcaaaacaataaagcacaagattcaatctttttcataaaagggtcacacattaatacatcctaaagctattgagcgggtcataatgtataaagactactctaaagcatggaaattaaaaagttcaaaagcttgaaattcaataatggcagaagcttaatgaacaaaaaagagagaagaagctttgaacttacccactaagaagatgcagagaagatcatcctagcccgcacaacgagtgtaaactttgagaaagtcaaactccacaaagaactcgggcttgcaaggctatggagtttctgagagagtttttactcaaagaaaacaaatgagaagtaagaaatgaagaaagatgatgaggcacttatatagtttctggaaaatcatttcccccccccccccaaaaaaaaaa

SEQ ID NO: 169910 - DNA, 1025 bp, Cannabis sativa
  modified_base (341)..(342): a, c, t, g, unknown or other
atgttattcttagtcctggaccacgtttttttgaagtatttgatctaaagacaatattctcaaaggcttttaaaaaaaccttataagagtatcaaaaaactaattgcattaaagaggaaaagatgaagaaaaattctaagattgctctttcaccaccgagatgtccatctacatcaacaatcccaaaattacttgcacagttgcaccgaatagcgagcatcagtgaaccgtactagtaactgttgattaaagattatataattttattattttcatgattatttcttttatggctaatgatcttatttctatgtacaatacaagtcacaacctcatatatnnataaagaattttttgatatttatatattaattattaatcactaatattcaaccatatatcaaattgttcaacttatatttataatcaaaaatgtctttacttgtttttcaagacataaattataacagtctatactccaacattatcgaccaataatagagaccgtaagttacattgacatgcactccttctcctactcactattttaagattaatgtgttttacatattaaccactttaatctatatgattaatttatttataataaaacagtctgattttatcaataaataaattacttatgataaacattaaacattatttgaaactctttttaaatacaatagtgaattttattttaccaagtcatataaattaattaaaattattcaatttacatgctttttgttttaaacaaaaacaataagcatataaacacaaagaacaatcctaatatattatgtttttacaattagatgcataatagttaaacagtgtgagattttcatatataggatgtcattcactaatgcatgattatgttgtcaatcaactatcaatgaacattccttccaaaaaaaactatcaataaacatttatttaaatttaaataaataaacaatgatgatgaaccgagtaataattgagtatttttttttttaatttacaacctttatatatat

SEQ ID NO: 169911 - DNA, 686 bp, Cannabis sativa
gggaaatatatattttttaaaattaacttaaaaatttatctaaatgtctataatatgacacttttgttggtaaacaatagatgcccagcaaatagttagtagatttcttatacaaaattttcctaaacaatttatatattacgatccctcaaaaaaatattacatattacaaaaataaaatatcatattaatatatcatgttgttaatcacgcaaaaagtgtcatattatttaaaataaaaaatatttaaaatttttaatgtaatttgtaggacttgggttgtccctccctcccacacaatataaggtgagtcacatgatatataaatgtaatatttaaaatacacaatgtaataattaaaataatgtttcaaaatattgttttaagaataatttaaatttttctaagtaaatttaacttattttttaattaatttaatattttattaggtttttaaatattttttataatttttttttaaattaatttttattaatagtacattgtaatttttaaaattatttttttttaaaaaaaaaaaacaaaattttgtattggtcaaaattcataagagtaaaaaaatgaaacctaacaaaaagaacataattatggaaaattctacaatgcatccccttaaaattgacatattgatgtacccttatctgttttagcatccgaaataattt

SEQ ID NO: 169912 - DNA, 714 bp, Cannabis sativa
aaataacttattcgtgggtccatcaatctcaaagacctcacaattttcctaaggctattcctttactttggccctatgatgaaccagagaagcaaaagttgttcttcaaattgtatgagccggactttgttgataaatttaaagtccaacaatctattatctcaaacccctccagatctttcaaaaatgataatacatttactaggcactagtaaatgcaaggctcatacttggtacaatctagttccttcaccatttaagtgttcgtttattgacctacttgttgagaagatatttctattcctagagaaaaggcttgataactctatgaaagcagatttatttaattttttttgtgcattaatttagttctgttctcaagcatttttagcttattaaaataatttttacttagttttatttagttttgtaataatattaattttagtatttttagattaattttgtaatattttatcaatttaatttagtttctcattttataagtgttaatctcaattttatgtatttttagggatttcaatttaaatattgaaattaaagaatattaaaatagagagcaatttaattatgtggcttattgggttttcatctcaccaaagccaaaaggggtaagttgaaaaataccacttttattaatcaattgatcaaatttacctctaattatatatttaattgaaacatacctctttt

SEQ ID NO: 169913 - DNA, 590 bp, Cannabis sativa
tatctctgttcatcacgtgtaccaagctatagatctaaccatgtatcattttatcttaaatctaaaaaagtttaaataattcattatctttctaactgctgtggttactggtaaatggtaacttttggtaacagtaccatttttattttcttatagaaaaaaatgataatgagtttatagatagaagttgggatttaagattatacgaccacttttttagtcatagtaacataataatgtttttgatttttttaattaactaattaaatattacctttaatcagaataaaaaatggcttgtatattgtttagataaattgttactaatttaactttagttgtcactaataacacatttagtaatacaaaattataatttttgtgaataaatacttctcgctatagaattttaacgataacaaggatttaatactatttcttataacaagtttttttattattattatttttatctttagcaacaaattttgttaaaaggtttttttagtgatagcattataaatttttagtaatttttttttttttgtagtgttaagttttagtaaaaatttttatgtagtgataacaaa

SEQ ID NO: 169914 - DNA, 888 bp, Cannabis sativa
gtttcacctcaacaaatggaattcaaaattcttttccaaagggggtaaagaaatccttttgaaatctgttgtccaagctataccctcttacgctatggcttgtttcaagcttcctgcttctttccacaataagattgaatcaatgatgtctcaattttggtggggaggttcggtccatacacgtaaaatccactggaaaaactggtcttccttttgtttttcaaaattccatgggggccttggttttcgctctatgaaagctttcaatcaagcgatgttggctaaacaggcttggcggcttcttcagtctcgtcactcctttgttgccactttactcaaagcccgatactttcccaatactaattttcttgactctgggaagggccataggccttcactggtttggaccagtatctcttggggcaaaaaacttctccagttaggtcttcgcagatcagttggtgatggtaccacggtctccattttcaatgatgcctggatttcagggtatggtaaacttcactaccttagacacaactctgacgctaacatgacagtggcaaaccttttaacatataataaggaatggaacctcactcttctccaaactatcttcccagcggatgtttgtcaagccatccttacaattcctcttactaacctcaacacacctgatacgtactattggtcccttaccccacatggtacctaccgagtcaattttggttatcaccaagcccatagcatcctacacaaaaatgacctaacaccctccaatagtgccattgcccaaacatggtggaagcaaatgtggtctcttcctttagctcctaaactgaagcactttctttggcgagctagccatgacattcttgttgggttttatgc

SEQ ID NO: 169915 - DNA, 1377 bp, Cannabis sativa
cataataaagcttatgcataaatcgagggcaaaaatgtcatttacttcacacacaacacttatataattttcagaatattcacatataattataataccaataattccatttcaaattgcatttcggtgccgaactcggctagacccgaaatacccagttttgactataccgtgccaacctatcaaaacacacctcaaaaggacaacacaagcatactaaataataatatagtcccataagcacgttaataaattaattccattactttaccattctcgggtcaaaattactaaaatgctcctagctcaccaacggggtcttaacatagcataaatcatataaattctcatatattaagttatataataatataatttctcaaataagatatataattatctttttaggattttgctaatccattttataatcctagggtattacaacgttgacgacatgttagtgaagttagtaaaaagtgaggatcatatggaggacctcgcagaatgttttgctatacttagaaagtatgctatgaagcttaaccctaaaaaatgttctttcgggatttgctcaagaaattttttaggcttcattgtgaatgcgagaggaattaaagctaatccaaagaagatagaagccttaatcgagatgccttcaccgagaaagcaaaaggaggttcaagctttaacaggaagaacgtaaacactcaatagattcatttcaaagtaaactaatgagtgtctcccattttttaacgtcctgcaaggcaataagaaattcgagtggaaggaagaatacgaggaagcatttaaaggaataaagaagcatctttccacacctctagttttggctaaaccaattactgggaaacactatacctatatcttgctatctcaaaaaattccataagttcaacattagtgcgagaagagggtaaaaaccagcaacctatttactatgttagtaaaaggttaatgggggcagaattgagatacacacctatagaaaaactcgcactattcatgattcatgcatctcccaaactatggccatatttttaagcacatcctattaaggccgtaaagaatcaaccattggtacaagtactatcaaaacttgatgctttgggaagattaataaaatggtcgattaaattaagaaaatttaaagtaacttaccacccgaggacttcaatcaaaggacaggctttagctgactttttgatagaaggagtaaactcaggagaagattccagaatatgaagtgtggtagaaacatggaaactttttgttgatggggcatcaaatgagaatggctcgggggtaggagttattatgatgtctcctgataacttcaaattctactacgcattg

SEQ ID NO: 169916 - DNA, 1023 bp, Cannabis sativa
  modified_base (890)..(894): a, c, t, g, unknown or other
tggtggtggtgggggtggacacccttgaggatcttgttaagtgcatgtgaagttatgaatatagtgcatggtttgggataggaaaataaaataagtgactgagagtgtgtcaaaggttggtatcggccttggcttaatatagattgcatttagcagtttttagtgtatcaaagccttgccttgccaaatctgctcctatgattaggatgtcctattcagatgctatgctatcttatctacacaattggagttaataaataattatttcagtttccataatgttttacattaattacttactacaaaattgaatatttgttaaataattagtataacatagtaaatatgtgtgtttatagtaacaaaatcttggtagactatagacccctctaccacagcttttgttaaaaggtatttttaaaaaaagttagtgataaaaaattatttggtaaactctataaaaatatgaagaatttaataaaaggttacaattaaaagctaaatttgttataatcaaaaaaaaaaagaaaaattgattaaaagactctataataaatctatttgtattaaaaatgtatttgcttatttattatatattaaaaaatatttaaataaataaattataaaaaaataaataatatttaaatatcttattttcttttattttatcttaaaaaatattttatattttatatatttaatattaacattctatatgaacttagaatttcttatatatttgagtttctttttcatgataaaatataatttaaaaatactataattgattttatcaaatgtatataaatttatactttgaattgtttcacaaatacacaaaaacaacaaaaacattacaaaatataattgtacgaaattttaaatatttnnnnnatttttatgattttatttacatatgtagtcttttatatatttttatgttgtactcttgttaatttattattgattttttattatttatatgttattttttgctgttattttaatgttatttagatttta

SEQ ID NO: 169917 - DNA, 745 bp, Cannabis sativa
acattaagaccacaattccattgctattttttaaagatacattcccaaacttttagtaataaatttttttgggataatttcataaatccacaaaaacaacaaataaattacaaaaagaatgatcgtacataattttaaatatttttacggtttttaaaatttatttacaaaaaatatgatcttttgatgtatttttatattgtacttttgttattttattgttgatttttttatttgtatataatttttttttatgttattttgttgttgtttttttgctactttcatgtggatttcttattattttcttgtatttttataaaataatataaatatgtaaaaaagaaactttgaacataaaaatgtaaaacaacaaaaataggcatttttttcaaaaaattgggccttagaaaatggggggccttgtgcaatggcccaagctgcccaaagcttgggccggccctaaagatacgcaactaatgtcatttatagatttaggaataaaaactctaatagcacattcaattaaagtactaatcaatcgtccataaaaaaagtgcgagaatactctaattttaataaatatgtgacaaattacacctatcaataactatcaatcaaatctcataataaaaattggataacaacctttttacttaggaggcgtttggttgggaggaaagaaaatataggaataggaatgggaatgggaatgggaatgggaatggaatggaataaaatttaa

SEQ ID NO: 169918 - DNA, 950 bp, Cannabis sativa
tttttttttttttttatcttatactttatttattcattgatttttttttttgaaatgaaatatcaacttcattgaaataattagcattatgaatagataagattttttaagtcttccgaaacatgaaaattagaaatactaaaacaagtgttgaaatgggagttcctatcaacgtaatgtgccacccgatttgctgatcgtttgataaaatgtaactggacattatgtaattgtaacgccctgacccacaggagcgccacgtgtgtatttttacaaacttatttctaactaatctattagtttaaggaatgtgtagttttattaaaaatcccattattaaatttaaaataaaactttcatacaaaatactgtcacaatacggggatcgcctatttataaaaattcttttacatccatttaccaataccgttgctacaaaagtaaggttatacttccaaacatagaaaaggggttgatcctgcttcccagaagccaagacaacggttgatatgtacattgctgagagacctctgactcatggccgaacacaactactatctttcttacctataccacgaagcacccatgagtcacaatgactcagcaagaaaagctactaaaatcaaaatattgaaaataaaagtattcttatcataacatagtatacgtgctcatgattcattgcataatcaacatgcatacatattttacaatctatgcaaacacattcattacatattataagaaagtcataacaactcataatcaacaatttcatcatctcactaacagatattcattcaatacataatcacatactaacatgcttatacaatttcatattgttaatcacataatctcgatatttcattaagcacccttaccactcgttaaccacgagctacgtatgtcactattgttgcccgatacagcaaacgataagtaagaaa

SEQ ID NO: 169919 - DNA, 723 bp, Cannabis sativa
attaatgttgaaaaacctctaaagaggagaatgaaattgaagaaaccagatggtgattggttgtggactgatttcaaatatgagttcattcccaccttttgctttatatgtggcattattagccattcagagagattttgctctcgactctatgatactccattggaactaattaaaaagccttatggattgtggatgaaagctgaaccccagagaaagaataaactgatcggagctaggtggcttcgaaccggcacggcggctgatgctcagtttgttgagggtgatgataatggcattaatgctcttgtcattaatcccacaagaaatcagggattgaaggataaaaacactgttgtagaagttgactttgcaatggatagcacgaatcaggggattggtcttcacaaaggaatagccattgatcaagggaattctctaattaatgctgataaggagatatctgaagaaaacttccttactgagtccatgattttcattgattccaaaaaaagaaggccaggacagaatgggaaacaattaatggaggaggatgaggtggaaggaattgttcatgagcttgttggatcaaaaaacgggtctttggtgggtcttggttctcaggcccacctaggattatgagtgttctgagttggaattgtcgtgggcttgtgttaggttataatttgcctatgttttgggtctttaaagttagcattatct

SEQ ID NO: 169920 - DNA, 2381 bp, Cannabis sativa
gcttttgtccacttggtagagtagtcaattacgactatggcatactgcacacttccttttccctttaatagttgaccaatgaggtctattccccatatggaaaagggccaacgagactgcatcaatgtgagtttattgggtggagctcttggatctttgagaatctctagcacttatcacattttttcacatagtctatcaaatcctcgatcatggtggccaaaagtatccctgtcggagtaacgttttggataggctttgcccccagcattattgctacaaaagccttcatgcacttctatcaataaatgcccaacttatgtcttagtgacacaccttaggagcggtattgtgaaacctcgtctatacattactttcctaaaattagatacctagcaacttttcttctcatcttttttgcctcgtttttgttctcaagctaggcttcagtttggaggtaagctgcaataggtgacatccaggttggattttcatctaacatgttgaccttttctaggatggtaatgctttgttcttttaagaaatgtataggcaccaagttttccttgtcgacaatggtgctgtttgccagatgggcaagtgcatcggctgttgcattatcttatctagggatctgccttattgtatagcctctgagccaacttagcaagtcttggatcttgctaaaataggctaacattcttttacctcgagctatgtactcacttaggacttgatttaggactaattgaaagtcgttgtatatgtctaggtggtcagcccgtactttgtgcagcaacttaaggccaacaattcgggcttcatattcaacctcattattagaggctttgaacccaaacttgatttccccgtacagttgttgctcctaggtatgatgagggcaatgcctgcaccggatagttggtcagtgtagcttccatcaacatgcaatttccatgttgattcttcaagtttttactgctgctcttgctctcacttcttctctggttcttgtttttcccctaaatcttgagagacttcaggagatatgcttgtacatttagccacgaagttgataatagcttggctttttatggccactctcagttgatatgcgatctcaaattagctgaactcgatggcccacttgagtagtctactagatgcttcaggtttttgtaaaacctgtcgtaatggctagtcaatgtacacccttatcgggtgagcttgaaagtataaccttagctttcttgatgctaagagtaagttgtatgttagcttctccatgagtgggtatcgactttcaatgtcgattagtcttttgccaatgtagtatactagatgttgtataccatattcttctcttatcaagactgcactcacaatatgttctgtgacagccaagtacacacccagatcttcattgtctagaggttttgataggataagaggttgagccaattattttttcagctcttggaatgctttttcacactcccttgtccactcaaattttttgttgcctttaagtatgttgaagaaaggcacgcatttgtccgtggatttggacacaaattttcttagtgcagcaatacacccatcaggctttgtacttttttgattgttgtgggtgacttcatgtctcaaagggcttggatcttgtccgggtttggttctattaccctggcattgattatgaagctaatgaattatcccaagcctactccaaatgatcatttgagggggttgagtttcatgttgtactcttagaagatcttgaagcattcatctagatcctccacatgcccccaacttttttggacttaactagcatgttatttgcgtgaacttccatattgcggccaatgagatctttgaacattttattcacaagtctctaataggtggcccctacattttcaacccaaagggcatgaccttgtagcagtataggcctagatctatcatgaagcttgtgtattcttgatttggtgggtgcatcttgatttggttgtaacctgaatacgcatccatgaagcttaggatctcatggctagttgtagcatctactagctgctcaatccttggaagcagaaagcagtcctttggacatgctttattcaggttggtgaaatctatacacaccctccacctgttgtcaggttgggtaccaacacggggttggatacccaaagtggatagaccgctttagtgatgaagtcattggcactcaacctttcgacttcatcttttagcgcttgggcacgctctttatccaataaccttcttttctattgcacagatcagaagtgtaataccctagaattgagaagtggattagtaaaaccctaattagataattatgaataattgaggaatta

SEQ ID NO: 169921 - DNA, 1471 bp, Cannabis sativa
gaagacacactgaaaggttcaggcaaagcatcatctcgcaagaaacggcgtttgcctttagtagtttcttgcaagaagtgtctgtggcgactagcaatctcttcctggtgaattttcactaagttttgtctaattcttgcatcatttatctctaatttggattggggttctgaaatcttgggtttgtgagggatggcaatctcaatagggtattcaatttccaaatcttctagacgataaacttctgaaccaaattgggacattgctacaaggagaaagcaatcccaattcctggaagaaatttatcaaactagaagttggtaaattggagattctagaaaacctatgtactgtctaaaccctaatatttacccagatataattcggccctaaaaactgctaaaaccaaatgagataacaccgatgctaacccagaagatagtaattaaatccagaaatacaacataataagcatgtgagatattaaagagaaaagccacttaatgtttgaagttaggatgtgggacgatgaacggctgtgtaatctgtgaatcactaaatgtcgtgaagatctcttcgagtgcttgaagtcgaaaattaaatcagatgaaattcgtagaaaaaatgttaaggacaaaaatagcatgcaaatttttgagcaaatcaagtaatggttttttgatggagaagcttagaaaattctcagagtttctaaaatggaagagatggtgcaaaggtggttccttttttctattttatactcttgggttaatttccgttaaatcagggagatacttgatcctgcgtgtagaatttgaaatagaagtagaaaggatggtcattaaatgttaatgtacctcaaaatcacaaaaccgccaaaatcagaggacatgcgtttttttaaaatggattatgacaaatataccctctatattcattaaaaagcactttttattaaaaaaaactttttaaggggcaattgttatactcaaaatttggccagcactttaaaggaggacacatgtcaaactgggagaatacgaaccaaaaaatataatgatatttatatttgaaaatggaaaactcattaaatgcagaactgacagagtatgtttacaacttgctgactgtaaagtcttacgcgagataaaaatatacaaactgttgcctcgtatattaacgagaaaccatacgacacaagtagtgcaaggtgaggcatcaacctcactacgcatgaagagacatagacgagacattaaggcacgtagcatataatatactatatacaaactaagtacaatagtcgagtgagtccaaacaactaatagcgaggtatccatctcgctataggaaggcgcgctcatagtaccttcgctaatcagctctagacatctttcaatgagatccacaactttgtcgagtcggctctctaaaatagaaactgacatttaaatgatgttgactgctgaag

SEQ ID NO: 169922 - DNA, 1159 bp, Cannabis sativa
agatctacataaccaccatgcgatctcaagacacggacactcagatatgtattctcttatttttactttttttccataaatgtttctacaattcgttattactcttttttgtttttctcatttgatttaacatagagttttgatcttatcaatttttctcttatctatgtgtttcgtttttttttatttgtttactgtctttttctttgttctgtatattttatttttctagaggtacttatatactacaatttgaaatagtgtcagtcctttacaatatttcttgactgctattttcatcttgggttcaatcaaactcctttttctatctctggattccctaccattaacaccatatcgccacttttctgtatgttgatctgaatggagatttcagtgctgatccaacaatgtctttccaacttatgttttatcattattattattataataataataatttttaaatactcatttttaaaatatttttttttttttttgttgtgtgaccaaatcactatgcgactgtcaaatttttggtagtttttatttgtcactaatgatcaggggtgattactcatgcagcagtttcttatggctggttgggtggtttgttgaaagtggtgtagattttcttggttacttttttacgtgcctaattaatttttaatttttttaacagaattattggtagttattaaggtaaatatattattttaggtagcattacttattttttattgatttattattttaaaatattgttatttattttttagttattagattagtttagttttctttttcttattacactttttaatttttcatttatgttgttaagttttatccaatttttcttttaataagttattttatttgtcttaacattgctagtattttttatatattgttaggttattttgtacggtaatattattttgttatgctaatgttcattagtttattatgtaaaattttattttttggagttgacaaaaatttaacgagtttgagcaagatctctcttcaagtattcaagttcgagataagcttctatcttttttattttatctattacattattattattattattattttcattggtataatatgttctaattattatttatttttctttggttttgtagggagg

SEQ ID NO: 169923 - DNA, 1627 bp, Cannabis sativa
ttttatatcgttcatttaattcaggtttgcaatatttttcccactaaggactccagtctgtgtagaacccggttctaatctcgaagtacatttttggcgttgttgtggtcctaccaaggtaaaactatctgctatttatttcattgactactgatttatgtatatgtatttgcgagtgtaatttgacatggcctgaattgtgatgatatatacaggtatggtatgagtggggtgtcacatcaccaagtgcatcagccattcacaacagtaatggacggtcatactgggttggtctttaagagcatctccactctcattttttttttattaaaatagctaaacagttaaaatagttaaaatagagtatttttattgttgttactctaatcatacttttttactatagttagtgtttgattattttcataatattttataatttaaatttataaatataaattaatttataaaacaaaaaaaagtatagtatttttgattaaaaaacttaaacaaaaaatagtttcttacatttagactgtttgattattttaataatattttataatttagatttataaatataaattaattttataaaaaaaaaaaaagtaatagtgtttttattaaaatactattaaaaaagttgaacaaaaaaaagtagtttcttacatttagagtgattcctatcaactttctattagtctttttaattttaagttttattttttattttaattaaggagtgtttagagagtatggttagagatattttaagtttaaatctttttaattgatataatatatatatggttaattagaatttttacttcttaaactttgacatgcatcaaattatgttcgtgaacttttaaggtcgttaaaaataactcttgaactattaagattgttggatttaaggatttttttttattttttttaaaaaaatatctaacatggataaaagtttaagggacataatttagtacatgtcaaaatttggtaggcatgatttggtataaacaatctgaaatagtaaaattgaatgaaatttgacaaaaattcttaaatctaacaatctcaatagttcagggggtatttttaacgggcatgatttgatacatgtcaaagttcagacgataaaaatcttaattagcccatatatatttatatttgaaaacaaaacaaatagattaaaggaaagtttaagtcggtcaggaacatcagaaacaaagccaaatgtaatctaagctctattcaaatccagttttgtttgtagtactgtactagtgtgtctgaatcaaaccaaccatttaatcaggatgtctgtacattttgagatggtgagattcttgctattgttctctatcttattcaggtatccatagagtcatctaatctaattacaattgactgatctaataaaattagatattcaaaataattagattgaatcggatgtaaattttgaaaatccaatcggattggattggatgggacatccgattcaaaaccgatccaattattattcaatggtcatttaattatatttatatatttttaaaatacatttataattttagggaaaaaaacaggaatattctaaaaatggaaaaatattacaacaata

SEQ ID NO: 169924 - DNA, 561 bp, Cannabis sativa
aactcaactcaactcaacctgatcctgattcttgaaattctctcctataaatatggaatcgataatggaatgaattttgtttttttgaggtgagatgaaaattggtggaaatggggggaaagttttgagttttgatggaatggaattatggggagaaagggaaagaggagggaattaagggatgaacggaacggagttggttgaggagagagagagagagagagacagagagagaatgggagaaagagaaacgttgcttataataagcggccgaagcatgtgaagcctccatttcaggaaaagaaatataaggcattaaacaatattattataataagacttattttccctctttttttccaaaaaaaaaaaaaaattgatatcatatttatcataatttttttatttatttttgctaattagaaaaaaaaaatctaaattttaacaaaattgggacactcgaatttctcaaatctttaaatagaattatgggaatatactgatttaataccttattttttctcttaaaatatatttggtatcttgtgttttcaataatac

SEQ ID NO: 169925 - DNA, 524 bp, Cannabis sativa
acaaaaataacactaatctttttggtaccaaacctgaaatagcttgaaacatcttcttctctaaaagtactatcagctggaaaagtcaagtagatctgtctagaagctggattaacaccaccattcattgcaaaatcattcctttcaagtcttgatctaccaaatttatgtaaatcttcaccacccatcatcatagctgctgctgctgcagctgctgacctatacatacacacatatatatataaacaaacaaaaataaaaatcaaaactttaaatccaaaaatggtaaagattgtacctttgagtttcattttgctgttggagaagaaaattcatagactttggtgagtaaggaaatgagttagctgcagcagccatgagctgagaagctgcagctaagtgttgtctttgttgatgagctgacttagatctgagaagctgttgctcatgatgacatggctcagctgcagctgctgcagcagccatcatgttatcaagcttaggtgatgagccatctgagccac

SEQ ID NO: 169926 - DNA, 639 bp, Cannabis sativa
ggaaagagttggagaaaagataaaagagtgaattttttatatcgaatttgtccaagaatgtagaagctaatttttgttcagagataaagtttttaaggcaagttttggaagctggtgtgcatgaaattttcattgaagatgacaagagttcatggtctttagtaagaaaaatttgtgtaattaatgtttgttcaaagttttaacctataatagaaaaatttcaagaagaagaagaagaagagattacattgtttattgtgtttctttattgctgactttgactagttataaatgatcacatcagaatgaaatattaccactaattcaagcaccaaacataaccaaattagccatggttagctctggttctagggggaaattcaatgtcaaatcgatctatgtttcactaatcttggctgtgaagattgactatgctgctgccatcttgtttatatccagtttgactgttgctttgctaagaaaattgttgctgaaattacttcatggcgggttttggaagttgtttgtaacgccattctctcagcggtttactatggtgccgtttggtaacacttttgttttttaatttttaaatcataaaatgaaagtaaaatttttgttttaaaaaaatttattttt

SEQ ID NO: 169927 - DNA, 1323 bp, Cannabis sativa
  modified_base (904)..(905): a, c, t, g, unknown or other
  modified_base (1078)..(1084): a, c, t, g, unknown or other
  modified_base (1270)..(1276): a, c, t, g, unknown or other
atccactacctagaattgacaatttatttaatcaactttaaggaaagacagtcttttttaagattgaacttcactagggttatcatcagttgagaatctgagaggaagatattttgaaggctacattttccactagatatggcactatgaatttttagttatgtcctttggactaaccaatgcttaggcaaatttaatagatctcagaaatcgggtattcaaggatttcatcgatatttttatcatagtattttatcgatgatattcttgtatattctcagtcagaagcaaagcatgaacaatacctaagaatggttttgcagtgactaaggaagcataagctttatgctaagttcaaaaaatgcgagtttttattatcacaagtgtctaatctgggtcacattgctagtaaagatggaattatggtggatctagagaagattgaattggctagggattcgccaatataaggaggaaaaactgttaatattgattatatctatcgactattattaataaactcactaatataattttataataaactaagagcgtaattctatatttatagtggagtaatttattggaacttagtgttatatgtatacggtctccaagttgcctctataccacactgtcaagggtatgaatgtcacaaaataaaagagggaggagaatttattttacaagtgcaaaatattaattacttattttataataaataattaatattaaataaattaagggaaaatatctttttttggacaagacaagatggagtcactttgtctgttaggacaagattgcgctgcaagtgtcctgttcgaacaataggtagtgatacctacactgtctgtataaaactcatttcaatataatttgatttgttatcaatagaagattnnaagtcatttatgtttacatatagttttcatgtttatgatttaatgtgtacaaaatctgttaaatccaaaacatatagttattaataattacagtgttgtcaacacagtggaaggtaattatgattatatgtttcaaaagacaatgtcccttgattcatcagtgcactggattnnnnnnnatgtgatagtcagcgataaagtatacttacaccttggataactgttatcttctttctagaacattggcaaagtatactagtttcggatgtatggagtatacattggactgggactgatattgatcttggtaaagatatgataatcttaccgttgtattttcttaagtcaatatcactggttgatcnnnnnnnaaaagatcttaatcctgacatggttagcttcgatctcaagagtgtta

SEQ ID NO: 169928 - DNA, 931 bp, Cannabis sativa
aaagtttgttgatttgatgttgttgttttttttaaagcaaattttgttgaaatttatttatgaatatatatagtattgtttgatattaaattagaattacgtactcatgattaaaacactttttttttcattttaaataaatatatttatataaaaaataataatttatattcgtttcaaataaaaataaagaaaattcaatacaacttatactaccaaatatatttgttattcacatttttggatggataacacatgtactttcaaattaattaaagatcaaaattaattaagacgttcatttacaagctcaatcaaactcgtgagtcagcctatcatggggccatggctcctgattcagctacaaattccatgtatagatataataaagccgaaacttatcgatcccaaaaggtcgacttgcctagaagatgaaagaccaagcaaagcgtatccgaatgccctcatgggataatccaggaggggaatctaaagagacatctgggagtaatcctacgtggtacctttttgatactgaatcccaccaaatcagaggtttatcccatatgttagacatggggagtgcgcacaccaccaaaatgaacataccttttgtccaacatcttcttctctaaaatctattgtgtgctatcagcgacacgcaacacccctgtcactgtcaagtggtcccctttcatacggataactgttgtctcacaaattggatctcatctaacctgcacaaagtcaatataatattgtatcttacacatcagtgggcttagttgacacatgcaaaccctatcaggtccaagtttacccatagactacaaaaaattttatttttagtcacaacgaaatttgtgattaaaagtgaaaaagttgtgactaattataaattatcattttaaaagtgaaaaagttgtgacta

SEQ ID NO: 169929 - DNA, 589 bp, Cannabis sativa
atatatatatatataccaataggtttactctattttggcataaattataaccaaaatatatatatgtatatgtttacataatgttagcaaacatatatatattggaaaatactaaataatttatcgtatgaaaagatcaaggtttcaaatttacttatttattttacacgcatataaaataaaatattttttaataatgtaaaccttaagctttatgttgttaccctaaattattcaaaaaatttagaacattaaaagatgcttacattatacatcgtcatatacaaaaatttacttataataattgggtgccaaaaatagagaatacctaccaattgaagttaaagtaacacctactaaaatcatataaaaataacaccatctaatattaatatatatgagcatatttggtattgttttctgttttttattttcgaaagagtgtttttagaaatgagaaaaaaaaaacaatttttgaagatttcaaaacacaaatagcatttggttagtgtacgttttctataaaaacaatattgaccaaattaaagtgaaatattttttaaaacaaaaaataacattttgttgtttt

SEQ ID NO: 169930 - DNA, 526 bp, Cannabis sativa
ataagaaattttttaattattcacatttttaattaaccttgctgatcagcaacgagctgcacaatacgtttaaaatcacgctaacacacctatgctagttagggtgttacatctgacgtaacatgttttgaaataggctctagataagtgattgagtagtacttggtggtgtttatatattgtggataggcgtttttagatagattagttagccattggtagtttagtttgtgagggcatttgtatcaggctagaatgtatcaagctttatatgttttggccctttagagaaaatgtttgtattgtattttatggagttctttcactagctaaagggttatccctttggctagttttttccttttttcatttatctttcttttttgcattgttggctttatcgtttatttgggttgagtttctcgtggtagtttctgtctatagtttctacttatagcttatcattgtggtgttttctggttgttttgtgtttaggtagtatctctgtattacaagcggagacctt

SEQ ID NO: 169931 - DNA, 1108 bp, Cannabis sativa
cttctcatagtaattgtacatttgctaatattcaaaaaaacttgcataagtctaaaagaaatgtagactgatattacttagatcacattttttttagatctatgcaagtttttgtgaataggccatagcccacatttcttttagacctatgcttacttttgtgaataggtcatacactacatttcttttagacctattcaagtttttgtgaatgggctataaaccacctttcttttaacttttcactagtaattgtacatttgaatgatatagaaagatatttttttttttagttataaataagaatattaagcatataaatttaaattttattaaaaaattattacattgaaaatataaattgacactttatttacaaaaatacttccataagatgtgaacaatatttataccttttatgatttaatatgaacaaattcactattataaatttagaaaataatgaaaataaactaggacgtaatttttttggattatccttgagttgaattgtttgggaactccagttcaattttttgagatatgcctttcatggatttaaaaattgaaaaaatattagttttatgcaaattaaattggatttccaatcgaattttagtttcgtagtagtttttctatgcttttttttttcatgaattcgaaacagcccctgttttgattgatcctggtcatcttctcaagtgaaatcactagaattaatggtagttctctttctggttggattttcgtttcagttgtgttttgcgtgatatttgcccaggaaacacaaatcctgggttgaaggtgtgtgtaagtggtatttgtgtactttttttatttgggttgtatatttgtttatttggctagctagctggaagtatttttgtaatattattactttttttagtgaaaattgaaaaaacccttttattaatattactccttcataaaaataatactaattattaatatctgtcatatatatatgggtaagctcttaattagtattacacatgtatgggtattttattattgacaattggatcagatctaatggttaatatttataatcattaattaaatattaaaaaattaatatttcctattt

SEQ ID NO: 169932 - DNA, 668 bp, Cannabis sativa
gggagaagagtgatggcgaagttctgagggtcccaaaccacaaaactgttgttgcctctactccatgaaacgacgtcgttggttgccggatcttctacgatttcataggtcttggtcagaaacggcggtggacccacctcatgaagtccctccattgggtgaggagccaccggatccagctccacctcttcacccttcacttccttgctcctttgatgatctttatcactcccactcccgatcctactatgcattaataatctcaaataatatatatcttattatatgaagggtttggatttggagaggaagaagaaggagggtgaatattgaaagagcagtgttgttgtactaatattgattggctagaaaagaaacaagaactactagaagtaagtagcatataataaggagaaaggtgcctccatcaatattatatgtattattataatgtgtatatataaggacatgattagttattggagatgttaagcagatattttctcactcctccattctttctcctttaggaaagtattactttattgtttattgtttttaatttttaattgctcaaaattaaatgttttatactaaaactatgctttgttttgaagaagatttgttggtaaagagaggtacaatacaagcctatttattattattat

SEQ ID NO: 169933 - DNA, 529 bp, Cannabis sativa
tagcaacagggaacaatagacagtggtaaagtaggaagaggtcccaacccaataggtagctataagcgatgtgtagtgtacaatacatctcttttaactctatctaatctacacgagacgagactgtcccgctatctgtttctttctatgggcccactatctgctcttttttattaactgcccattcttaatgagagcaaacctttcaaggaaggcccacaatctccactgctccagtgactagctgggccatccaatcttaaaaatgacaaaaaagtaaaatggacctaattaggtgcttcaaaaaaaaagttgattttagaattatgtttgttaacaaaatacacattttcgtacgttatgttcttgactatgatcattcgatgctttatacttcaaattagtattatgcagtgctctactctcaaaattgatcaaatatattattatgtattatgcatactgaatggctctaaaatagtattgtttaaatttagtatacaagtattttcaaaaaaaaaaaaaagaa

SEQ ID NO: 169934 - DNA, 886 bp, Cannabis sativa
ttatttttggttccccacattgatcaatctttgaggagtctcaacaattattttattttagtcataaaaaataaatcacaaaaaccttcattttttatttacttaccaaaagctcattttctctttttttattttaaaattttacattacaatatatatcaagttatttgaaatacatcactaaaattttatttttttaaattatcttaatatattttatttatttcaatttataatattagtatacatatatgtagaaagaaaaattaatacttaaaaaaataattaataaaatatacttagaataataaataatagtatataaacatagagaacatgaatatttttttaaaaaaaataagttttaaaatgaagtatcattagtttagacatttgttattattcaaatattttcaaaaatctctattttagagctattgatgagaatacttagagcatctttaatacaatgttataaatatggtgtctatgtaatttttagtccatgttcataaaattaaattttaatagtgttctataatatgatctaaatttgacatatgttaaaagttatgttaaatttgacacaaaatataacatgagttaaaatttaaactataataaatattatttttttatttacttttttgctagtcattaatgtaattaatgactttgtagatttgtatttatatatttaatataatttttatatactttcaataaaaatttaagggaattactccatgtattattttttaatttttttttttcaaattacggtttgtgttgctccgctagtttctatgtgagttgctatatgtgggttttagttacaatttagattgcttcattggttgctatgtggattttagttacaatttag

SEQ ID NO: 169935 - DNA, 636 bp, Cannabis sativa
aagcttgagaccatcttcatggccgctcaagagacggtcccataccgaaagccttttctaatcagaagggagataggcaagagggacattccaaaaatctgtagataccacaatgactttggccatgacactaatgagtgttaaaatttgaagagggagattgagtacctgataaggcgtaacaatccccacctacatcgttacgtgaaagacgaccagacccaggcgcaaggaggccaaaatggagaccctaaaaagtgatcaactaacaacggggtcgacagatctaatgcttgccaagtgtatgcacaaataagaataagaaacaatagacaacaagatttgttatagagggtcgacctccttgtgatagcgagtaatgacttactccccttttagttgtattataccgagggaatcactatccagatcgctataggtggaatctgctattgttccatttaggattataatgtatgaatcggtgtctggcagactcatgtgctggacaacctagagtgttgtactgccctatgcttaggcgtgtgagagagtgaagtagagagagagagatatagagatagatagagagagagagagagagagtttgaaacttagagaatatgaggtttgtag

SEQ ID NO: 169936 - DNA, 639 bp, Cannabis sativa
tttaacgcttatatagaaagatagatgttagtgttacttattgttgcttatagatttgttttaatttgtcttggcaaataatgatttgcaatcaatgtttgtctttttttgaccttttaataagtgtagaaacaaaaactgaagcagaaagctttttctttcaaaaacaataattgaaaatatatatataaacaataacgtggtgaaggtgaaccactcacaaagacttggtttgtgttcaaattcatgataacaatcattaattaattaaaatggaaatccaattttcagcaacatgagccacacgcaaaagaattatatagaatatttttcccctacccattttgttagaaatatttttaaatctgaaaatttcaatataattgtacgtacaccttataaagtttttaggtttctctaatagacactaaaatctcaaaaataataaagtttgaatataaaactgttctaataaaactctaaatgtgatcctatgtgggagtctataaggtttgtaatattaaaataatatatttatgatttaatttttatatttatatattataatgtaagatagtttaataaaaggagaattatcctatatattattggaaaattttacaatgcaccctcttaaaa

SEQ ID NO: 169937 - DNA, 525 bp, Cannabis sativa
tctctctctctctctcatctttgagactgatattctcctgggataaagaaacattgttcgcttcaagctgagcggtcgatggcgcatcctgcagctcattggtcagctcgacaaccctggtctcaacagcaaggagtttcttgtttgcttctccaagttcctcttacgacctcgagctgagtccccacatcctcagcatctttcttggccaagtccacgtcccttcgcatcgtgttaaaagtggcaaggttcttgacaacggtcgatttggctcgagagtacacattagccatcttcacaccagcctgtacggagaatgcattaaattctgaactacccaaagaaaaataaaaagaaaagtgatagcgggaagttacttgagagatttccttcagaactcctctcaagacaagctccaaggacagttcactgtccgccctggtcagtgttgggctttgtgccctaaataaaactttatttcaatgtaatctctatcatttaattatcaataaagagacaaaagta

SEQ ID NO: 169938 - DNA, 1095 bp, Cannabis sativa
  modified_base (307)..(308): a, c, t, g, unknown or other
agaatccacactacccacctcataagtaaacacagttgactcatcagtatttagggctaaggaattagacacattagcaaaaaactcatccatcttgacaaacaaacaccaacccagtaaatacaaagcaacagtatggaaagacaaagtggaatggaaaagacggtaccttgatcttcccttaaatagataaaaccataaatccctttgtgatcgcctggaggatctagccatcttgtcccaaatcctagacctgataggaaaaatgatgattttaagcttcaaatcatcattaaacccaagctcnncctccattttccaaaacccaaagtatttaattacagtaatgatgaaatttgggggagaggaagaagaaagagatagagagaacgagaaagtaggaagtctgatgagaagaaaattggagggatttgcacatttaatgctctgaaagaagatattaggatgggatggatattcattatatccctcagagcaataaatgcaagagttaatgagagaaaagaaaggaaacagagaaggcttaggagagaagaattggattagaggaacaaaaccatcacaaaaccattttggatggaccagatccaccatgaacggtggagcaacggagggatgcatgccactagagttctctagaaccaacagaataaattttattatatgataattaactaaatgatgagcttattggtcagcttttatgtgtggttatgagattttggttaacgacactctttaataattaggagaactacttcatatatattattttttaatttttttttcaatttatgatttaagttattatgatggtttttatgtaagttgctatgtgaattttggttgaaatttaggttgctaaataaattttagttgcgatttagattactacgtaaatttttgtaaaaatacaaaaaatttcaaaaaaatgcaaaaattatttttaaagcgtaaaaatgcaaaaaacataaaagtgtgataagtacccctacataaccaactttttttttttttttttgaaaataatgaatatatcattgtacaaaaacagaatgtttgattacaaaaacg

SEQ ID NO: 169939 - DNA, 692 bp, Cannabis sativa
catttatggacgttgagaatcaacgttctacaccaaaaccaatggtcagagctacaaccaacacaaccaccacctataagctattacactaaaaaaagaacgatcaaacactgagaatatatttttgagtatgaaaaatgaaagatttttttaaaaagaaatcggtgaaaaaatgagaaaatatgggggttgtttgggtggtgggtggccaagggtttcgtgagatgaaaaaatgaagaagtggcaagggggatttgtgggtatataatttttaacaccatatgccatcaaatattttgtaataatcgaagcaataggagtgtgcacctatggtgccagttattaccaaataaccgactgacgacataggctcttacagaaattggtccatcgtaagcctaaacgtacaaaaataaatcgttaattggcatagatattcgagtactctatagttacgattttataaagtaaccgcatttaaatgccaattttcaataagcgggaactggaactaataaattaaaaatgctttagctactcttcttttattatttagctttaaaaaatgggaaattttacaaaagtactagaatttgggttattaactgttacaaaaatactcacacggaaaagtttttaaaaatactgttttttataaaacaccagtaaaacacaaagcagaacaactcaaa

SEQ ID NO: 169940 - DNA, 979 bp, Cannabis sativa
attaaaattttcctatggaggttggctagagacatccttccgtttggcaatagacttcaacgtatctttggtaatagttctcaatgtgtgctttgtaattctggggaggattcggctagccatttgatctttcactgtgatgttgctgtccaagtgtggagatcggggccgtggggcttctgttcagattctatggtatttggtgataatttggagctggtcaagtggttattgcaaccgactggcactcctttgggtgagaatgatttggttcggttcactatatatgctatatctctttgttttgtgttgtggagggttagaaactcttccttccatgagggtctttgcccgatggtgtctaaaattcagcaagagatttcctctttggtggccgactgctctttggataggccttcttctttggagatgcagggatccattcctgcagtggcggaagaaaattggagaggtctttggactgatgttaacgtgtttgtggatgcggcaattcgtgaggagttcggtatcgtggcgattctggtgttggatcgttcagggactgtgatcgaagctgttactgctaagaggaaggtgccaactccttttgttgctgaactggaggctttcttttcgggttgctgcagaattctgcagtcgggttgggaaaatgttaccattttctccgactgccagacattggtgaagagtttggcggctggcccctcgcctgaatggagagcgtgtgggctgttcgatgccacccgcaacctcctcgctcgactgccgcattgtcaataccgctagataccacgccgtttgaactccggagctcactatctagctgcttgggctgctgatcatagtagcttcaagttttttacttcaagggaagtggcaccctttgttgccactatgaaccatggctgttaagccttttgcttttcttcaataaagctttgtttttcataaaaaaaaa

SEQ ID NO: 169941 - DNA, 726 bp, Cannabis sativa
agcttttcgtggctttcaaggcctgttcgacggtaggaacagtcaagcctagatgcaacatctttgctctttctcttcaccatatatagttctacattatatttcattttaacctttctatcataaagcctttacttttattaatctatagttcatcacgatcgtgctaataaaaactttcctagtgtagtttgaattgtttcatattgtgtgcaatggcatggttggatatcatttcaacgattgtcggaaggagttgagaataagaaatgttaaagggcaccagtagcttagtaccatcctgtgtgtcagtatcactattggtgcagctaagtatcgggtcccacatagtttaatataataacttttataaagtatcgctagccaatcgcaacgtgacatgtcgaaaagatgttaggcaccactgatgcctaatactaatatcaatgctctaatctaccaatattttttaataagtggacgggtgatgattgacgttgaattaggaatcaactatttttttgactttattaattaatatgcataaattatctattttaatatatctaatatctaatagagcaaagaggtttcatgatttggtgtgtaagttatagcttatttgattggtttgtgattcaaaaattgtgttttttaaaaatgtgttttggaaacaaaaatttaaattttgtaagtgaaaatttgtttttaaatatgtgattggtt

SEQ ID NO: 169942 - DNA, 664 bp, Cannabis sativa
gcagaatagcatccacacgtgtacttagcatacacatatataatatgtaagcatatatatacataacatgtccactaaacattttaaaagtttttttttaacaacattttataattttaactcaaataatcactttaatacttgctatagcaagttttggctaccgttttatgtgttgttaggatattattgtcattcaacaaatttatttagagaaattttatttctaccttataaagttacagtacactctattttaataatttttattttatataaaatatatctttagtttatattaattttttaattttttcttccttcgcatattcttaaaaaaatataccaataatataaaattaaaatatattttaaatactaaagaaaaaattaaaacaaagaattatatgaaattttattagaaaaaattataaaaaaatatacataatttaaaaaaaaatgtgaaaacaaaattataataattattgatattaagaaaaagtaatgtgaaagagaaaatttagaaaaatattgaaattaatttgtaaaaattaattaaagttaatttatttaatattagggtaaacttatctataaaaaaaattcatttatttattttcatgtagttttcaagtactgagtttagttgggaggaatgaaaata

SEQ ID NO: 169943 - DNA, 639 bp, Cannabis sativa
  modified_base (329)..(329): a, c, t, g, unknown or other
  modified_base (453)..(456): a, c, t, g, unknown or other
  modified_base (600)..(604): a, c, t, g, unknown or other
taatatctcacgtaataatatgctaataattcacttttttacctaaaatagtactcttaactaaaatttggaaagttatataatgcacccccttaccagggatacactgatacatctttatctttatctgttttagtatctaatataactttttagtcaatttttttcttattgtcatgtaaattatagtcatttaagacaccctgcaaaattttaagaaattcggaaaagtttaacacggcgaaaattacattcaaacaatgtgttgcacgcgtgactattttattttatacgcgtgtataaaagactatttgaacattattttttanattgtaaattattccgaatttcttaaaagtttgtaggatatctcaaatagttataacgtacatgaatatgaaaaaaaaattagatgccgaaacaagtagagggtgcatcaatacatcccttttnnnngggtgcattatagaatcacccaattctttatcttcaccctttttttcttctctccttctcctccctcttctcccatagagtcaactaccatacttagatatcatatatatatatactagtaaaagttacgtgcgaggcacgtannnnnaattttatgctaatttttttttatgttatttgaaa

SEQ ID NO: 169944 - DNA, 659 bp, Cannabis sativa
  modified_base (593)..(602): a, c, t, g, unknown or other
tatatatatagatactcaatcaattgcaataataattttttttatgttcaaaaaaaaaaaaatcaattgcaataatatgaaaaataataaaaaaataaattaaaaatgtatagtagtgaagagatagtgaagagaaaatatataggaaagctatgaatctgatctgacacatgccaatctgccatgaatgtccgtacaatggtgtttattggatgaagattcaattcaaccactcttacctcaattatgccatcatctctgtggtccatcctcttcctcttctttttttttttttttttttatctttcaaaaattataaaaaaaaaaaaaaaaatctaaaaaataattgaaataattgaaagttaaatattattttagacattctattttaaaaaaagaaattaatgattgcatctgtaacgttctcgcctgaagccttcattgggcccttacacccacgtaataataactcttatacacgagtacgtcactctggttgctttatggaaaacttctcaagaggtcacccatcctaaaattgccccaggccatacacgcttaatagtggaattctttcgagatgggctaccgannnnnnnnnngcaccttattgatataggtagtattaatcaatccatttagggctcgtttggaacgcc

SEQ ID NO: 169945 - DNA, 1023 bp, Cannabis sativa
ttttttttttttttttaattaagccatgtatttaagaagttttctatagaattgatgaaaaaaaatttcttaatcactgtacacgttgactaaattaaaaaataataatatattttggatgataaaaaacgaaaaagtaggttaatgataatataatatagtataattttatttgtttatttatttatttattttaaaagaatatttatttattgcaggttctttttctttgccttttcttggtagaaatttttatctgattcatacaattttttcttttgtcagctaaatggacagtgagaaataaattaatgaatgaaaaaagtaaataaataaaacagctaccacaaaaattgtctgaaaaaataaaataagaatataatacaataatgacaacgacaaaaaaaaaaagttcttttttgagaaaaataataatattgttttgacatacaataaagctaattgataaaagagaatgattaaatatgtcatacatcaatgtattttatatgtatttttttttagtattgttattaagtattactaatttatattaggtataagtaatatttagtaaatagttagtcatattttataataattattaaattaagttatgtataatttaatatttagttatactaataattatacattttaagttgtgcttttttttttcttctaaagcaataaatagtattttttttatatgtgaaaaaaaatactattcattactttaaatattttattaaatttttgtttattttatatctatgtatgtgtgtatataataatattataacgttaattaaaatgaaaatatgtctttctgtaaatagtggcataaattttaacttttaattaagaggtgatataaacctaatatttatttttagtggtataagtatctaatatttataaaattgtaatttttttctaatttcgttaatacagactctattattattttaaaagaataattacataagacaccattttttataaaatatttatatttttacg

SEQ ID NO: 169946 - DNA, 760 bp, Cannabis sativa
ttttaacctttttcgaatttttctttcaaacaaataaaacaatgctagagtttcataagaaaaaaaatgatgctagagtgacggcggcattcacgtttgaaccgtcacagtctgacagacccaaaaattggtttttcttttctagccgtccaaccaaaataaattacattgattaattaaggccactagatgcaagaataatgaatgatcattctttaacttcttttttctcgtttttttttttactgctcgacggaacgatgctcatgaaataagttattttagaaaatataatggtttttattaacaaataagttaataactaaccttaatttatattgatatatcgtgattcattaataaaagtttgcaagtacatctggggcaatcaatcttttttatccctactaattattttctcaactgaaatttgactacaaaaatcattagacatggtttcggcttgcaaaaagaattatacttgttttgtttgatttgagggggaatatggtgttgctggtcatcttactgaacaactaactcttggtgaattttagtatgagaaaatgttagattaaaattctattgtgggcaatatgtataatgtataagtgtgatataaaattaagtagctaattatctaatgggtattaaaaaaaagtattaaattatgataaaaatgatatgtagatatcatatattgatttataatttgttgagggattaaattataagataaatgttaaagggcaacagtggt

SEQ ID NO: 169947 - DNA, 999 bp, Cannabis sativa
taatatctctattatcacttcgttgggtcttgtattggatgatattcttaatctttgtaataggctcaaagttgttaattgttttcattgtaagagatcttgtaatggtattgctcatgttttagccaaacttgcattaacaacaagttgcagcttgatttagtggccagggagtcctaattgtatcaaggatctattgataactgatgcaatctttgaacaaattctcacccccactgttttagagtacatattgctcttggtgtttggtggttgagactctttcctaaaaaaaatataagtatgagcagttaattttgaagaaacttttgtttagaaaaaaatgttttggaaccttatttatctacaaataaaaattcttaatttttcttttgagtgctatcaactcccaatcgccatgtagactttccttttgggatattaataccatatactaacttttcttcaaagtttaaatttacccttttgcaagagaacttttacatttatacttttcctacatattttttttattatttattaaagcttccataatctttttttttccttacttatatagctttctctttttttttattgacttctttttttttttttttttccgtggcttctctctttttattttttttatcttctctctttttattttttttttccatttccttttctctttttttttttccacactattttttttttaattttatatctttttttaacacttttcaatctctcacaaaattttatttcattatttaaaaaaaaaatacaaaagttattatagtttttttctctcttttatattttcttactattcacaacaaactattgcttagaatttctcctgaaatacgtggcaattaggagcaagtcatatggcaatggtgttagaaatactgtaaatctgtatatagccctaattaattcaagagaatcaaacaataaaattaaggaatagcggaagcgtaccggagtcca

SEQ ID NO: 169948 - DNA, 717 bp, Cannabis sativa
aatatttttcaatgttctttttttttgttccattagatttaaattgacagcaaatactttataagaaacttgtcaccgcctagttcattaaagccaaaatataaagaagaaaaaagagtgtgaaagtataaagaggaacatagcagcacattccttgtatttactatatagcaggctgtcaagtattgagggaaaacccatcaaagtgttcatctaaaggtttctcaatgttcttggatctgcccttttggtccccactcgtatatgagatttaatagtgtgctccaatgtattaatatgttatataatccaaaaaatctcgactgtcggtgggaagtttgacccataaattgcagtaaaaagcaaaacagatcttttttaaaaaaaacaaaaaaagcaaaaagaaaaaaagaaatgctgtttttgttaagggaaattgattgccctcattaacctcacaaaactagcaaaatttgatcacttatggctaacaaaaaagtcattgaaagctctcttgtactctgtccaatctgtaaattcaattgaatttaatctacagatataaaggtaactgatgcaatctaatttatacgtatttttataaaattttaaaaaattatgtatacaaaacaattactatttttatgtaaaaaaattaataatttaaaaatttaatatatataatataaatatatttaaaaatttaataaattaaat

SEQ ID NO: 169949 - DNA, 2883 bp, Cannabis sativa
ttaacactcaaaaatgaatggaaatggtaatttgctaacagaaaacgggtttgggaggagggtttactgctaaaaaataagtttgagaagttaattgctagtaagataatacttctgaggattttgctgcaattcactcaatttttaataattaatcactaaattcgagaattgtgcaaaatgctagactaagggcattcttggtttatacatcacatttaaaccccaatttcatctatatatctttaagttacatattttagagacactttgaaaataaccaacaacttcatatatgtatattttatcagtaacacatatatattcaagattaataaccagtagatgatatactaactttattgacgatacataatcaaaattaataaccaataataatcaacaacatcggtgctaagtttatcaagaacacatgttcaagatcaataactgataacaattagtaactttctaatttttcgataatatatataaggtcaatatccaataacgatcaataatttttaaacttttgcaattttttttttttatgattccactactattaatagatacatatacagtataattaaaactgtaaagaaggaagaataaagctctaaaaaaatagaattacatgacaaatgataaaataaagtacatattcacctagatttctttggttccgatcatagagtgcttagtcttgagtttggattatctccgatttcttcgtcaaattcatgtaaaaaaacgtaaaagattttgctatgaagctctatgaaaagatgatccggaatgtcaacatataatagctaactcatggttacctacatcagaattttatgcattagatactgctatcatcaatatcgcttcatgctctaaaagtttagattattggcacctaggaaaatatggtgcactacctaaagagatccgaagtaccaaacataaattatccttagcccaaattatggatcataacttgtacaatcgggaggaagttgctcaacttgaatctagtttattcagtctcctagagaaagaagagatcttttggcaacaaagatcaagagtccaatggttaaaggctggtgaccaaaacacaaaatattttcatcgtcatgctaatactagatttcaaaataatcttattcgaggtaattacgattgatgtgtacttagactttatgatatgcaattcttttacttaaacggaatctaattatttatctgagatatctataggaagaaatctaatattttgataatctgctaatttaataatgtgttgattttaattcttgaaatatttatttaaacaatatgacttataatgtgataggaatgacttctattggatcacagttggatccttaattgtaaggtagttgatattcatactttatttgtattttcactatcagttcatatatacatatagaaacaatttctaacttaaacttcatatagtgcttccaggattattaaaatctaattaagtatgacttcttatttgttactttatttttatgataccataatattagctctgatagtgggtctcgatcttttctcttaattttcacatattttataataagtttggctccactatcatccgactgtattaagtatgatttatgaggacgttctttgtactatactagatgtatgttgattagattaatttgggatttatgatacaagcttcctcaggatataataaccactgcttattaaatttctgttcaatgctcgtttttggtattattctactattactactatagtccaaattattggttgggattatatttgtaaggaaattattataagaaaagaacattagaatatttaccttagcaaccccaatattttaaagatatgttcctctcttttctaattcttttagtattgtacttgaatgtttatgttttattaccattttgtcaaaaaagaatttcaaaattatgataaatcgtgggaattatatgtgattgactattttcttgtgctgtttattagggctttttaattcagaagggatttggtgtacagatgcaatggacatccaaggaataatagaaagttactacacctttctttttatgtcctcttatccttctaaagcagaaattgaggctgtccttttggttgtgcagtgtcgagtcactccagagatgaataattcatttttacttccttttactgagaatgaagtgaaagaagcggtcttttctatgccttccgataaaagtcttggcgaagatggtatgaatagaatgttctaccaaaatcattggaatgatgttggggatgtagttattaaagaagttttagaatgtttgaatgggcaaggagatatgtcttctattaattctacgattgtcactctagtccctaaaactaaagcaaccaacaatatgaaagatttcagactgattagtttgtgcaatgttctgtacaaaattgtatctatagttttggttcatcgattacaaccatggttagactctatcgtacactcttctcaaagtgctttcattggaggtcgccgaattacagataatgcaatggtagcttatgagttattacataatctctgaggcgttactagtggaaggcgatgttattcggtgatgaaattggatatgagtaaagcttatgatagagtggagtggattttctagaatcaattatgcttcaactcggctttgcaactccatgggttagtctactcatgaagtgtgttcgaacggttcacgtctcttttaatataaatggtgaagtcaaagggaaggtggttccgactcgaggtttacgccaaggagatcctctttcaccatatctttttcttttttgtgcggaaggtttctc

SEQ ID NO: 169950 - DNA, 990 bp, Cannabis sativa
ttgcataagttagttataggaagaaaagcttagactgtgagtatagtgcagggaattataatgcacttgagtatcagaataaagtgaggaagagttttcagtagttctcggcgtttctgttacccaattacagatttaacgtatcttttccatggttgatactttattatttcaatgaaatacataacataaaatcacttttattattattattattaaattttatttagatattaaaaacaagtaggcaacgctgttttttaaaaagaatttgaatatggtttctggtttattattctagctatagttgttggagggtctattccccattcttaaatgaaggtttcatgaaaagaagcctttatgcagatcagtgaagataagccatacatcttattttatagtgatgaacttgaattaatgaaagggaaacgtcacattaattttatatattttaaaggaaaggtctctcactaattaacaaagactaattgcatatatattccttacataagcatatttgactttactaatggtgtgacataatatctacaattaaacaaagaattaatatataaacggatcaccaagttgcaaagccatttttaatgccaactttgatcagatgggattaaaaataagcatctaaggtggacaatagtataattcttttagggtggcttctctaacactttttttatttagaaaagtaaaatcaatctatctatctatatctatatataatataaaggaaagcacaaaaaaagtctatgtgtcattttataaaattttcttcctctttttcctaatttctaacgcattttcttttttttttttttgaaaactaaaccacacaaacaaactaaaagtcccacattgttcaaaaaatgtttaggttttatctgtgtaggttataaataatattcttattacaatactttgctatgtctaaaaaatattattttttatgggtgattgattaatttctta

SEQ ID NO: 169951 - DNA, 1300 bp, Cannabis sativa
gagattcttattgatatggatcagagagatgagcgatctggagccatggtagaaatccatcaaatgttgcaaacagcctactgccaattcacagtgaatcctcatgacattttcaaatgtggatgttcaaatcatcacgatgataacctttgcgtcccggttccaagccaagagaattgtccagaagaatcagctagccacaagtgaaaagagctttttttctttgttaatattttggtgtgcatatttacacctttgtaaaaactgtagtcatcattaagttgagttaatgtgcttgtgaaattcttagacacaaaaacctattgaaactgcttagaatatcttagttaaaaggttctgagtttttggagagccaaaacttcttgttctgacaattcgtgtgttaaaatggctgcttgtaactctatgacttgatgggtttttaaacaaaaatcaaatcaacaaggccagtcctgataaatgttgtgctgtttactaacagtgcatatttctttttccatggagataagtaaaaaaagttgttcaaaacaaaaccaatagctagtatgataatagtttttatcaacttctccataacattaacctaacattttttaaacccaatggcaaaactgttatggttatttttctctccattcagcaccaaatattgatatttgttagagaatcaatgtttggaccggtctttcttccaattactagtgtttatttaggcccttaacgagatgtgtttgacctcctcaatgactacaagcttgggatttagaaacaataacaatgtttatgtaatattccgactctttctaacttataagcatccattctcaagtttgagacaaaaacaccaaataagaataataaaaaccttgatcaatttaaataaataaaaaccatttataacttttattttttgaataatgaactttcataaaccatttataacttcattatgaatagaaacccatgaaaaaacttatatggagaacaagtggcaaaatgggtttaagaattaacctctaatcgtatctagtattcaaaaataatattcagttctatcacaattaaatatctaatatttaaaaaagagcataaaggtgagggagatcgtctacaaagccaaggcaacttctgtgataattggattggtttctgaacaatcatgtcgcaaagctcgatcaaagaattcatggagctagatttgaggttaatcaaagaagaaaaaggtattgtcttgtttttctctactcccatactctaatttaattagatttattttata

SEQ ID NO: 169952 - DNA, 644 bp, Cannabis sativa
ttttctttaaaaaacaaatttgcttatgtagtcatgaacaataggtatacttcacgactatgaataatacaatctacattgttcaacatgtcggttaatcccaaaaattgacccaaggtcgcctttaaaattttgcatctgttttcaaccgacaagaatttacgttagtttatagaaaaaaaaaacccaaaaaatttaaaatctcttctataaatatgaaatcctagcataaaatcttaatatatatacatactatcccatttcaatatctcagccgctccccttctctctctatgcctagccgagaagcacgaccacatccacttacccaaggacggctctaagtatagataggctaggctcgtggtctagggcccatactttctgggggctcaaaataaaaataaaaggtctcattagatttttatttaagtaaaattaagtatattgtaaacaataaatattcacagcttggttcgttgtagtgtataacatattacacaatagtgtgggtttgagtctcataatactcttttttaatattttttttatataattctaaaagtaagggtccgaaaaggcctatatagtctcagatttggccttacatgtaccaaaccctctttctttctttctctctctct

SEQ ID NO: 169953 - DNA, 1850 bp, Cannabis sativa
  modified_base (349)..(349): a, c, t, g, unknown or other
attattatttcattaggttacaatttaaacaaactaatattaagtacaagtcatcattgttatttgttgactatgatttccttggaagttagaaattcattttttttttttattttattattatttttcttttaggaaaagatttcatttcaaggttaagtggaaaaaatttaacatggtcaaacaaaaataaaacttaacatggatgaaagtttatgaggcatgatttagtatatatcaaagttcgaggggtatgatttggtagatatcaaagtttggagagcatggtaattagtacataacaatcactgaaatggtaaaattaaattaaattagacaaaagtccttnaatttaacaatctcaatagttcatggggaatttttaacggccacaaaagttcaagggacatgatttggtacatgttaaagtttaaagggaaaaaatcattattagccaaactaaaaagacaaaacaaacatctaataagtgaattaagatcttatgaaaattggtgtctcataatatactaagtcactataaaaaattgccacttttaatgataatcttttagtcataatataaaactttttgactaaatatgacttttagtcacaacaaaaaattacttgtgactaaaacatagttatgtgaaccacttaaatttactttatgaattaatgtaattgttcaatttcctcttcttcttttaattcaatttcatgtatacaatctgttttaattttataattatttactgaccatttatgattgttatatatgaattcgaatcaaaattctaaaaagtgagatttgaatatgatctgatattgttatggatacaaattaatttaggacgaaataatctagattacttgatggttttatgagttgttttgcgtaatgttttctttgtgattattttttccataggaatatagagagttttcacatagatttgagtttgtaagtcttgataactagattataaactatttaattcaacttgccaatagaatatggagaagaaaaattaggtaattacattaggaagtaaaagaaaagatagtcggggatcataataatccttatctttattaatattatttctttaaattttaattatattgtcttgctttatttacttttctccaataataatttttattaatcaaatagaattaaagaattaattgattggtaattgataatcaatccttatgggaatgttattatatttgtcattatattacttgattcaattgtgtatacctacttactaaattaaccgaacatacatggtattattttacccctatatagcaaagttaatattattaattttacctctacctttaacattctcaaatttatacctcaaataaatatcttttatgaacataataatcttttattataattattctcttaatcaatttgtaacctaaaaaaattgagattatacagcatttaacaagaatatattttatatttatatttttaagataaatacataatttttatataattaatatttaataatagagatattgacggtaaaatacttatactttatattttttaaaattaaccacctaaatcatttttttagtggcaagactatctaaattctctttctattagctatttactccttccgtccaaaaaactatattaagtgtcatggtggacatgccacagtatacacaagtgtatacatgatacatttttaatgctccacgtaatatttaatattaacaaataatttaaatatttaaaaatttagaaaataagaaaaaccctgtattttgcaaaagttacagattgaactctctgttttgtcaaatgataa

SEQ ID NO: 169954 - DNA, 905 bp, Cannabis sativa
atggtgggaacagaggacttggtaaaccacacactaaagcagaatgcattttccccaacagggtaaaatcctgccgagaaatctccgttggatgaaaccaaaatgtcagtgtctgctttttcaacacttagggacgaaccttgcttcagagtattgctagtagaggttgttgtggatgaacataatgttgcttgaacgaaaagaagaataagaaagtaaagaacatttttatgcaagatttggttcattattgcctaatttaatgaactagtcataatttcttatgcatttttatatatagactactgaatgatacgaatgtaggagtcctagtccacacgttaactgaatgaactttcagtgcatatatacaaggtaaatgtctttaattaatttccatattcaaatcggcagattttactattgactcttaacacagtttgtggtgaccgagaaaatctaatgggaacaaaagtaatgtcaaagatcctggttggcgatatcaatcaaggttgaaataattggagttaggagagaaaccactcaacattttccgttggaaagacggcactgactgacaagtcacaaccacgaaacatattcaaggtgactctgactttcggcagtaataaatcgctggtgttgacaaggtattactatcttgctcttttgtgaatgaggggtgtgattattaacaatttcacggggctctcgtttcctattaactgtatattattaaagtaaactggttaacaaagcacgaagtgcatatactaattttgaaaattttattatatactttttttattagtacaacaaaacacaatttttttttattacatataaaaaataataaaattacaacttaataccaaaaatattaaaagtacatataaatagcaaaa

SEQ ID NO: 169955 - DNA, 820 bp, Cannabis sativa
tatttcagcttgagatgcttgtaacagagagtatgtatattgtatggcctaatatttaaaataaaaaatcatttaacaatttattgagtaagatttaaaataaaaattaatgagtttaccaatagacatatagcaaggctgagctagggagtttttcgcagaattatattcaatgtgttgtattacgagctcatagttgtttgtcgaggaagatcggtgtgagatttcaagaattgttatacgaaaagatagcagcaagaatggactttagaatggtgaatcaaaacataaatgaaagaaaaatgaatgctaagtcattggtagtatatgcttagttggttacgacagttccaagtaagctagtggatctcatcacatggggaaagtgtttgtggaaaagctactaaaaaatctaaaattcttgaaggttttacctcgtcaagtaaagaatttttgacggtatataaaagagcgtcacgaatactaggtagaatatgcaatggtgaaaaaatgtcaggaaaatgaatttctaatagtttaaaactgtcgattatagtcagaccacggtttaatattttcggctatactataactgaaagtttttaactatggcctatagtatagctaacagttttaaattgtcgctatagtggattaaaaaattatcgtcttcatcatcctggaaactacttctcgcatatatcacagctgctccaaaacctttacaatcttcatcctcttccaccgttgttgtgcttgtcttcatctgttgggttttgtgccctaaataaaactttatttcaatgtaatcttttctatt

SEQ ID NO: 169956 - DNA, 983 bp, Cannabis sativa
tcagtctattgtattatacataatcaataatcatatctgacaagtaatatagaaaattgagttccaaaaattaattcttttgaggaaaaaaaataagggcatgctataagacaaactatatatatagaactgattatgtaacaaaaatcaattcttttgagtaacaaaataagggaaactattaaatttagattaggtaagaaattaagagcaacatataccttttcattggctgaagagctggcatgcaggttcatgaacgagttgaaataatgagtgacaaagaagatgatgaactctgttgcatttgaagtgtggagagagaaaatttgacctcatcttacatgtacagcctgtattggattttttgttttgtctttttacaaggcaattcttcattcctcaagtatatatatggtggtgggtgcacttctatttttatatttcgaaaagaatgtttagtggctaaccctttttcacttgtacttaatttttaaagttaaattttaatagtaaaattttaaattattagtaaataaagtaatttgcgataaaatttttataaatatttagtttattgtaattaatttttaattttaaaattttggtagtaaaaccctctaaactcgtattctgttaacagtttaatatttctatccatttttagctattaaccgtcatggaagaatgtctacgtgtacacagtgcacatgtgacacaattttattagtctacataaataattattttaaaaaataaaaaatttaaaaaataatttgaaattaggaaaagaaataaattttgaaataaaaaaaatataattaaattaaaaactaaaaaaaaccctaattttgaaacctaattcgcattcgcaccctctccctctcagtcgcatctccaaccttctccttgtgctcaatattgcacctctctccctttgttcattaatctcatctatttttctgttcttcttcttcttctcg

SEQ ID NO: 169957 - DNA, 744 bp, Cannabis sativa
aaaaaaaaaataatttttttgttttgtatttttcatttcagaaattcataatttaagtagttgttaatatgtatactatataagtaaaatattataaaccatgatcatttgctatatttaattattttttaaatgaaaatataataatttgttaaaggtaccttaatttgttttataagatgatgagagatattttgattaggacaaaatactttaagcttgaaactaaattattttcaattgttttttgagtacaatcattttcaattgttgcaagcacaatttttttttttatatagaaattaaagtataaaataattttatcctaaaatctatcattaatattatataaaacaacaaattattggtgaaattaagaaaatggaaattagagaaagatattattggtccagctaatgttagccttttgagatgaatgtaacttattagaaaaacaaagaatgataaacaaaactctatcaggatgtcatgtcaacactctcaacagtagcattatatagatatatagataatcaatttgacagtatttttacttcttatttatttaattttttttataataattagataacttatacttattagttaggtttctaaatttttagtatttatataataataataaaccatcaaattttattatgaaaacataaacaattcgaaaacttaaaatattatcataaaattatcattgtatgttatatatttaggagtagttatatt

SEQ ID NO: 169958 - DNA, 603 bp, Cannabis sativa
attaaattataacttttaaactttcatacttttttaattaaaattagaaaaaattccccatcttaataatttaagaagatttttaacggcctaattaactaataaaatatcaataaatggttagcgtgacgcattaggagactttttaacaatttttatttttttgttattattatatataaaatatcaaaataagaaaaattcatagcacgttccttcagagaagacaaattaattttgagtcacaaaaaatttagaaattaattttgaaaaaaaaaaaaaaaatattatatgtgctgctaaaagttgagacgtcccctatgctctgccgtgtatttaaatttgttgttatttggcacataacgataacggccatgtcataatttttgtgacgggcttgggcttctttatggatttagataaaatgaaataaaatgggtggggagtttacaaatatatggaaaagattgatataatttacgaaaatatgagaaaaattaaagtagcatttaataatacttttttaattagttttctatttttaaaattaaaaaaataaaaatatttttttaaaaaagaaataattacataaggtaccatttt

SEQ ID NO: 169959 - DNA, 1177 bp, Cannabis sativa
  modified_base (1139)..(1147): a, c, t, g, unknown or other
tatcttgctttaaaatgtccctcctctgcataatgagaacatagaagagttcgtctgctcagttgttctttgattgtctctattgctggttcaatttgaattgtagcttttaaaattgaacttaaagaagcagcattgtcagcggtgtcatcctcaatatcttcagcttttcttttgcccttatcagcaattctagagtgagccctccttgcaagtgacaatgtctgttcataagcacgcatttcaactttctagcttatccatgaaacctcaacttaaagttgttcatcatgtatacaacaaatttgttatacttaggtgaaagggtattgagaatgaactgcacccattgctcttttgataaaacaattttcaacaaatttgctttctagaactttaagttcatcaaaagtaagtgtgaagtaacgctctgaccagaagacatcttcgcactatagagttcatttgcaaaggcatataatagttgaggattggggtgagggttgttcattttcacgctacaaatatcaataaacagaaataaattacttggtttaaataaattcatacacaaattcaaaaaataacaagtaaagaaaatatgtttgcaaaaatatttaatttaagtttttctaaaataactatttttttttttcactaaagagaagatttcattaatcaaaactaaccaattacaacaaggctacaacaaccaaccccaaaacagacctctacagccgacaaaaacagccaacaaaaccgctactaaataaggcgcaaaaacaagcctttttcagtaagcacaactttcctatccttcatgctatacaacctgtaatgaactatttctttaatatcttttacagttttcaaaatttaattaaataacaaattaagtatcttgaactaaccaccttaatttgaaaaatatctcaatttaagttgatctaaagttaacacatttttaacttaaatatatttttaaaagaatatctaaataactaatttcctagaaaaaaaaactacttaattattaattttaaaaaaatattctaatttaagttgatccaaaatcaaattaaaaaaataattttcaccataaatacattttgtaagaaaattcaaataattaagtatcnnnnnnnnnctaattagttataacttctttatttaatta

SEQ ID NO: 169960 - DNA, 872 bp, Cannabis sativa
gcttctatgcttcctttctctacaatctcaaccaacataatatctgcaaaactgctaatcaagcaaaccattaaatatgcctaaatttaggaagagaaaaagagggtaattaagaaattttaattctatatgataagaataccaaataaatggaactaagtattaagctgatagaatagttatgagataaatgcaaacaaactcgagcatcgaaacactaagaccaatattaatttggcaagtgagaaaatagaaggaaaagatgaagttaagtactataaattatatcccgttataagatagagcggcgtcagagttcaaggtggacaaaatgggggctgaaacgaatgggcaccagagttcaaagagagaacggagccagagttctcaagaatgaaaaacagagccagaaaatcgatttctctctgaaattttcgatcgagcaggctgtgagatgaaatagggagaatgtgggttttgttatataactatttatatatatatatatatgtggatttgagagaagaaagaagaatgggggatgaagaatcgcagataaaacaatagcaatatgtattttgttttttttttttttttgaaagaatgaaagttcatatgtattttggtttgaatcgcattaattaaaagacggatggtctccgttaaagttaacggaataaaaaataacaaaaggttaaaccactccgttaaagttaacagaataaaaaataacaaaatgttaaactaagaattgtattacatagccacattttatatagaatagatatttgtatatactaggttgaagttacgtgcaatgcacgtacacttagttatacaaaatttgaaaaaaatatataatagtaatttaa

SEQ ID NO: 169961 - DNA, 699 bp, Cannabis sativa
  modified_base (628)..(635): a, c, t, g, unknown or other
tccttccatactttattgttgtcttaacttctctataagactctgacaatgaattaagtatgataatggcctgattttcatcacttagggctttgttctctcctaatttggctaactcaatatgcattctaaagaatgtatgcaagttctactcaagtgtattggagtgagacatcttgaacccaaatattctttctttcaagaatattttggtagtgagtgactttatgttggaaatgtccttccaacttcctccaaatcttggcaagagtatcttcattgtccaccaatatgataattgcatttgttagattgaaaataatgataccaacagttgtttcaagcaattcttcctgctgagtttgagatacatcagctgcccactcaataggttcatttagaaccctcaaagtttctattgagtaagtaaagctttgatcttcttcctcaatattatgtagtcacatgaaccatcaaacttatcaatatctaatttaatattacacatactgggtttagtaaaagaattagatagagtttttgttgggttttgtaccctaaataaaacctattttatataatttgatttattaattaatgaaagattagaaatcattttatgttgcannnnnnnnataatttatttcatgattatgtttaatatataaattctaataagtccaaaacatatataaatat

SEQ ID NO: 169962 - DNA, 1104 bp, Cannabis sativa
actattaaagaagggtaaaagaaatctttcttctctgttgtacttgtgttgtagttaaagctcctctccaaaaaaaaatggcagctgctcacatactggataatgaagatgatgatggtgtacttccctctttctcttctttttgatgttgggtttttagggtacaaacttcataccccaaaatagaagcccaaacttttctactttggcccactaggtttagtccttcttcttccacaacagccagctggagtgtttttagtgactgggccgaatttgttgaggtgtacaagtgaaactcgtgtttccacgtcactgccaggatgttgaattcgcttcagcattgcttcagcaatctgccccaatttcatgcgtcagcttgtgttccttttcttccttgcttccttttctttttcctatcaatttaattcttcctttttcaacaacaaacaagcataattaattggaaaaacacacccaacaatatcaatatttacaatacttaaaagttagcttactaaatagaaaataacactaaaactaactaaaattaagcaaacaaacacattttcactgctcttctcacaatacttttagtttaaaagcataaaaataactctataccatagagttatcactagccttgtacatcctaccaactagagaagcctcattcgttaacaatcgccatccttgttttgcaagaaaggataagttgtagtgacggagatctcggaagccaagaccaccaacatggttgtgtttagtcaacctcttccaactcatccaactcacacctttgctagaagaattagattgggacttccaccaaaacttaggcattagtccttctaaatccgaacaaatttccttagtaagtaagaagacactcatagcataactaggcagtgcttgagcaacagaacgaatcaagacttctttgccagctttagataaaaaccgtctctccaaattaaaaatcctcttcttcattttgtctttgagaaagctaagaattccatgttagaattattattgtggactaatataatcataagcttaataccataaacacaatcattaactatgtgcctaatatttgtt

SEQ ID NO: 169963 - DNA, 641 bp, Cannabis sativa
gaggggtttatggtagaaacatcaattattcacccaaatatgatgagaagctttggctctggtgtaacttctgcaataaatctcgtcatactcttaagacttgttggaaaattcatgggaaatcttggaaaggcaaagctgagagaccaggaagggccatgccaatgactaatgaagttgaaactagtccattcactaaggagcaactagatcatcttcatccattgctgaaaacttcctcaacctcacctggtattcctactgttttctgatcatatgacctatttttctaaattgttttaacttttatatacctgtctaggtagtaaaaaagttaagctagctcttccaccagtctttcgcggaattgctcaaagtcagtgaaatgcaaagacattttgcttcatgtgattgtacttggacaggtggtcctggggtttgtcctacctttgtacaattccatttgtggcattttgaagtggtccggtagttgtgcatctattattcttttcacacatggttttgagtcttcttcttcagagtctgacacattaccattttgcttttggagaccttctctgtgagattcatcaactctttgactttgcgttctaagcgttgagtcttgtcacttgaagatt

SEQ ID NO: 169964 - DNA, 520 bp, Cannabis sativa
ccaaatatatattgagatgttactttttaaatttgtgattgctttagtttagcattaatattcttaacaattttgacaaaaggttgtatgtgttgtgtacattgtcccacatacatagaataaagggtagagaattgagccatacataagaacatgggctactccacttattgctaattggttttgagatgaaacacagtactaaataaattagtgatttggaactaagagtatctacaatagagactccaaaatctataaatatggtaaaagttgtgacaaattttttcagctacagttaccacatcactcatccttattaccctttcttcaatcttctcatcctgatcactagacggaattcccactaccatggtattggttttggtagaagatttgtcgaacgacgtagttttgggaggagacactgataatggaggggccacgtgagtcgcacgtgagattgaagccagggtaaccgcagtaaggctgttgttggccttgaatgaagaaagggaag

SEQ ID NO: 169965 - DNA, 1389 bp, Cannabis sativa
aaaaaaaaaaaaaaaaactttcgcagcaaaattatatgtcacgacgttgaaattgcatcgaagtgttaggtattaggtattatttgcactacttcttggttgcgcaaacaatacctaggttttaaaaaattgggttttttgtttctttttcctaataaattatactaagtatatcatttatctaattattaaaattcagtcatgagattatagattcatagctattaaatgtaatataaaatcacaaattaccgaaggcaaaaaaaaagaaaaaagagttatttagaatactattttccaccgcaaatacctagctcttaaaaaattggattatttggactactatttgcggtgaaaaatatcaccacaaacagctcaatctttcccgtaaaaaaacattgtgtgtaggaaatttaagaggttttttttttttgttcctatttataacaatttttatatatttaattatatttttatttttagggaaattgtctaatatattattttttaagttttttttttttttttaatttttatgttgttggattacttcaataatttttatgtttgttattatgtaaattttaatttcgatttaagttgcttcattgattgttatgtgagttgctatgagaattttttaaattttttttataataaattttatattcttgttggcatttttttataattatatatgttattttaatatactaaatttcttttgtttgtgaaatggacggtacatgattagcattgaaataattatcattaatttgcgatgatgtatattctttttaggtcttgctaagatgaatggcgatcaagattaattggggtcgtttgatcattaaaatcaagaaaagcactatagattgattactttcattattcatgttggaaaattgtaggtggaggtccgactgttaatagtgcctaaatacaattttttggtaagattaatgtcggtcaagatcgatgactgttgaccacacactaatataatcgagtattataaatctgttgtatatgtatattttaatccatatacataaaattaagataaacttatagaaatattagaaaataagagaaagtttacaaaaaaaatataggacatagatatttttacattttttattactgtattgagttaataattatactgtattaaaattttaaattataaaaataatatgtttcaataaaaaaaaataaaaaataaccctaaaataaccctaaaataacttaacaaaaaacatgaaaacagctataaaataataaaattaaagataattacaaatcaagaaaaataataataataaaacattgacctaattacaataactccttaatatgtttttgtattataatttattttacttaatt

SEQ ID NO: 169966 - DNA, 926 bp, Cannabis sativa
ttaataattattaaaacaaaatatgtgaagcctgataattaattacagttagtctatagtctatgtacttcctaataatgttaagcatgtctttttaaaacttcacatttaattaaaatgagaaaatattttgtgtgatggtaggcggtagcttcaaaatgctcaaataaatatggtctggttaggtatgaattttcacatgtttctaaggactgcactattaaattatagaaataaagtcttaataaaatcaaccacacacactagtttgccttggttgacaatccattactcctaaaatatgtaggagatactttattcatcacacatcaatgggtactttcatagtaattaaaagttatatatattgaattgttgcaacatacctttaactttttcttctttctttataatcttgtaaaattatatatagtgtataagtacttaaatgtattaaagtataattttgttaattttttattgttagatctgttagtatgctgagtcagatgatatgtgtcatttttttactagttcaactcttaatatttttttactactttgttgaccatccatattaatactccaaaaacatctaggagatactttattcctcacatcaattcgtaccctcatagtaatgaaaagtatatattgaattgatgcaactataaatttcactttttctcctttctttataatcatgtactgttatctatatgcaatgttaattttttttaagaacctgtatccattaaaaatcagaaatgaaagttcaggatacaaattattaaagaagaaaatcagatcctttccataaagcttcctaaactagacctaaagtatacttagggtgtgtttggaaggagggagacatgagtggatggagaggaaaggagggagagggatgggggagatgaaaaatc

SEQ ID NO: 169967 - DNA, 754 bp, Cannabis sativa
ggaggaatgttagcatattttggtggaagtaagaaccagcgagctcaactttacaaggaagaccttaattacaaattttgacaaccttagaggcagaactggacttggagttcaagatgaaagtcttagatttcgttctagattttcgaaacatcttgaatcatccaattccgagttgtattgaagaggttatggtcaaaatactaatcagctgacaaaaatttttcggtagagagctgtggccgcgacaagcaaacctgtggccgcggcgagtggtcaaaagctgaactgcgatttttttatctttttttttgaaaagatgagttatcttttcgtttaataagatattttctagtactataattaggacatcttaggccgcgaatttaatcattctagagctacaaaatagtgagagaaacttagagagacagagcaaggaagagacggagattggattcgaagtgttcttcattctagttcttttattcttctccttcaactcttactaaatattatgattttcattataatgactagttcagagaagttttcttttagttaaaggttatttcaaaactagagacgtgaattctttatttcattattgaatgttaatttctagtttccattatgtattgaattattgcttctattcttctatgttcaatgtcatgattattgttttaatcttgtttagactgccgctaaattaggtttactttaatctaccgtcatctcaggattactattc

SEQ ID NO: 169968 - DNA, 559 bp, Cannabis sativa
ttaatcaacttgcaatgatttaaaagggagctgtgacagtgaacatttggggaaaagggaaaacaaacccaattaattatttcaacaaatacaataaaattttgaaagtctagctcaatcactatctcataagttaatcataataaaagcctataaaatcctccaacaccttgtaaaaacttaacccatttgcacaaacagaaaagaatagcaaaaaaagtaaaagttatttataagacatgaatgagtaaagatcaggacccatttatcattagggtaaaagaaaacttatacctaatcttgactgcatattgatacctggattcaattgggcattataaattttggctaattaaaatttttgtcttctaaactttgacatctactaaatcatgtctcttgaattcttttagtcgttaaaatttctcctgaaatattaagattgttggatttaaaaatttttgtccaattttattcaattttattagtttagttgattatttacgtgctaaatcatgcttcctaaattttgatatctaccaaatcatgcccttcaaat

SEQ ID NO: 169969 - DNA, 584 bp, Cannabis sativa
  modified_base (530)..(536): a, c, t, g, unknown or other
tatatatatatactttaagtgtctcaatagagttatgcattttaattattctcttatttatttatttatttattttgcaactacttaagtttctcaatcaccattaaccaaaagaataaaaagtagacagcatgtgatcacaaagagtagagaataaaaaaaaaaaaaaaaggaaaattggaatcggaaaagtgcacatttaatttagcttaatacttttatcaattacacaacaacaagaatctttatatccatatataaatcttttttttaatgaaattgttatgtatatagtatatttttttttttacagtttttttttttttatattcactacaagaaatgttacttttgccagcacatttttgtgctagtaaaagttggccgtattgtgctggtaaaatagaatttacttatgatgtgttggcaaaaaggggttggcaaatcaatgttggtattagaacttttgccagcataaaatgaaaactactggcaaaaaagatttttctcagcgcgtaaatgtgctggtnnnnnnnagattttagccactgcaaatatacactagtaaaactttgatctctttg

SEQ ID NO: 169970 - DNA, 544 bp, Cannabis sativa
acatcaagaatacaagtagtcatgaaaatttgattcgcgcggacgagtatccataggtacccatcctgaatggggcggggatcacccatcttattgggtaatggagtgggagtggggtgcaatttatatacccgaagcaggttcgaggtggggtcggagatgataccatccaccccatattcaacccatatatatagtttctaaagttttcgtataatttttaaattattacatataaaactattagttatacgataattaatcttctctaatttactgtgcaataaagactttttaataagtagaatgtttatttattttaaagtcaatatcttatattttattttttaaaattatattacattattttcttattattacttaattttaattttaatgaatatccaatgggttcccacccaatggggattcccctgccccgaacccatagggaattaggcggggcgagggcaggaatggggggcataaatagaaaatggggatagagttgagaggtgcattacccgcttattaaccacccaat

SEQ ID NO: 169971 - DNA, 795 bp, Cannabis sativa
caaatagctttagtttccttcgttttcctacatactgatgtgccatgtcccagaccaatacaatgaccacaaacaattggtagccattcgtatttgaccataatatcaatatcttgttgcaattcattgcgaaaagatatcatctctggaaactcttgaaacaatctaacttcaatcataattctaggaaaattcagcctctccttctttttagttatgtcatccaacatgatcggtttccctagttgttctacaatcttgaaaagagccttttctccccaatgccttagttccaaaccatggagttgaatccatattggagctgaagtaacatcctcctttttataatctgtatatggctcccacggtttcataatgataggctttttatcaaaaacataaaacccccattgagaatttcatccctcgtgttaagagcttgaaatctaactatgaacacccctggtttgagtacacccaccttgtcaagtcctttatccttccacattcttcttgcaaatccttcaaaaggaccaagaggtggatttccaatataaaataatagaccatagctgatttcaactctgccaatccacctcttggtccttttgaaggatttgcaagaagaatgtggaagaataacagaccacctcttggaaattaggaccatagctgatttcgtaaagtacataacagaccatagctgatttccaatataaaatttcctcttcaacatcatccatgtcaatctaaactaatggtttcttgtaaagaccgcttagtttaatttgaaaa

SEQ ID NO: 169972 - DNA, 538 bp, Cannabis sativa
ggttttagggtttcggaccagaccgctttttttttggttgatccattgttgattgatttaagatcattgttttttctttcttccttgtaaaagattggcgtttatattcgatttttaactattggtaagcgaaaatgaattatttgatttgcaattattgtcttaatccagctaattattgagctgatctatctgaaattgaagcagctattaattgattttgatactgttcttggcaattggtctggtgatttcaatttattgattaatctacttcgccaattaatcttatgtagatacgatattatgtctgctactattgcagttttgtgtgtttgcgatgatatttttagtgtatatgtgattttgcattagatatggttaatttgtttctgatttctttgatcactgttcaggggttccagccaaaaatttaataatataaaaatatattactttaaatatacacatatatcatatatataaatatataaacatatatcatatatatatgtatactgctttaaataaaaataag

SEQ ID NO: 169973 - DNA, 555 bp, Cannabis sativa
agccccttcacggcagagagaattttgtgctttccatatactttcaaaaatgatggctgcccctcccaagaaggaatcagaatgtatcatacctggtgtgttctgagggatagagaaccacttcaaccggtcatcccaggagctgaatgacgtagccgaagttctcatttgccaggagcatccaaaccagatagcccttgcgtactcacactcccagaagagatgtaaagaactttctttagggagcacgtagggcaaagagtatcaataccaagaaagatggtgataagttgctctttggtaagaaggctatggggtaagatttttcaccaaaagaactttagtctattgtgtatcttggctccccacacaaatctccatttactatccgtgtcaagcttcccctgcaggtttttgacgactcgatacgtcgacttaactgagaaccgctcattcggatctggtaaccaaagccagccgtcttccttgggtctgttagaaagtagagctgaacatttagacccgcagacccggaaaacccgaccacccgccccg

SEQ ID NO: 169974 - DNA, 1396 bp, Cannabis sativa
ccatgatttcctttgcgatttccaccaggttgtagcttccatctctgaaaattactctgtttctccatttctagattccctcgcacagacaagccacatagagcttaagatcattatccttcaaatctctccaccattttccaaactccataatgtttttctaatgcatcacatcaactcggattccccaacgactctggaaccacaaagctctcatgaaactacacatacagaaaatatgtatagctgattcaatctcaaagttgcagaaaaaacatctattttccttgagaccaatgcactctttggttggtaggatatcagaccagattttccatagcagtagtttcaaacgagggtgtaaatctactctccaaagtgcttctcagaccttattaggttccttgaatctagccttctgactcacccaataagcacttttcattgaaaattttccagacttagacgctttccagaaaaggacatctttatcgtccgagagaggtctgatctgtaatataaaggttaccacgtcttctgcaaagctggccttaataatgtccacattccacatttttgttccatcaagaaataaatctgagaccttcaaaaacacatgtcttctggtatattggaaccttgctttgatttcctccacagttttctccggaatccaaggcctgtcccacaaatcaatatcaccctttccaatcaagatccctgccccttcttaacatatatatcgtgcttcaaaaattccctgccagcatcgagaatctctagcatgcttctcaaccttccaagcatcgaataattgacagcactttgattccataatgctcacccaaaccttattttctttttgtaacatcatccaacataatttagcaagtaaggcaagatttatgtccaaaaatttcctcaaacccaagcctccacatctctttggttggcataagtcatttcaacttttcaaagcacgatatcgcttcttctccgaatttcccacccactataacctagccaccaccctatccaactcttcacataaagtgtaacgtcctaatgctaaggcacgctacattactttttcaattacagtgcagtctttgctaatcaaagaattttcttgaaaaacgtgtcaacttaaaacttttatattaaatattagactttatattatactaaattatttacaagtatcgggatcccgttttcaaacttttaaaacataatataccaaaatacatattattcaggtcgcatagcgactacaaaatacaattccaagatgtcctgagaccgaacactccaggtcgcgctgcttcaacatgtacaaccttatcttagctcaggttcactcctgttcggctttcgcctttcttttacctacaca

SEQ ID NO: 169975 - DNA, 818 bp, Cannabis sativa
ataatttataatttcaaatataagattcaaataattacttatattttaaaatggtacattattcagatttttttgaaaatttatgggtagttttataaataatcaaaacataaaatattatgaaaaaaaagggattaaaaaatgagaaaattataatattatatacattaaatattttattacaaaatatttatgtaataaattaattacatatacatataatagtcattagtgaaaatttattttcatttttttaaacataagtatataataaaaaggttttcttgattaaatttaaatatttactttgttaataaattaataattctaaataatcaatagttaaataatttttttttcaattttaactaaaaaatacaataatattacaaaaaatactttcaattgggcaaataaataaatatacgcccaaataaaaaaaaattacacaatacctcttatacacaccttcaaacaaggattcatgcttcctgggcaaccatcgaggaaccacgcagcaattcaatacaaccgaaacgaaaatctaaccagaaagagaactaccattgattctggcgacttcaccttaaaagacgaacagaattaattaaaataggggttgtttcgagttcataaaaaaaatacagaaaaactactacgaaactaaaattcaaccagaaatctaatttaatccgcataaaattaatgtcctaactttaatttttatattcatcaaatgcagatctcaaaaagttgaactagagttctcaaacaatcccactcaaatataattctaaaaaaattacatcaatactata

SEQ ID NO: 169976 - DNA, 659 bp, Cannabis sativa
aaaaagacgaaacataaacccattggagcatttcatcaaacaggtaagaacccatcaaacaaaacctggcaaatgcgaacccatggtcgagtggagaagcgcatgacttcttcacagaaagtacttttcccgctgcccggtggaccaatcaagattaccaccatagcattccctttcccttgctgttcttcgccttcaaacataatcaatttttttttttttgttttgatgagcaatgttaaaatgttagaatattgatcatattcgagtttaacccaataacagtaattagacatatatatatttataccttttggttttgaacaagtatcgatatccatgtccgccatttttcttcacctggagattgcatatacggtctcaaacacttctttctttcttttttttttgagtgactgaacacttgtttgtcagttgcaaatatttgaactttgatgttttgctatgatatccttatgtctttttgctttcctatttgttattgtgatctcatttaattttgagatgtttgcctcgaaatttttgtaatatttataaggctaattagtaatttttttccctaaactttaacaggtagtaaattgtgcctctgaacttttttgaccgttaaaaatttctctcgaactattgagattgtt

SEQ ID NO: 169977 - DNA, 548 bp, Cannabis sativa
ttaataaactgtatttttgaggctaagtttgccttttagttcagcaagcaatttgaaggagcctaacaaaatggtttggaataagaaaatcctaaatgtggaaggtgtagtaatgttggctaatttgactttggacagtggttagttgctcaaacaaaagttgtcatagcaaacttcactatcaaaagtagagaagatgtgttgcagtggtacaagccttagttgaatacagccaaagttaatgttgatgttgctacatttgacaagctaggaggagtgatttggatttggtttcttagcccgtgatcatcaaggtgggctgattcaagcagttcagcaatgtaagagcggtcatgtagctgctgatgtagttgagcattgagctgaaggaggcattgagttggataaagggtggggaagggtcattcttgaaaccgattgtttcgttgtggttcaagctcttaatagttctaaataggggtgaaaatcggtcggttatggtcggtttttaaaattttatagccgaccgtttagaaattataaccgta

SEQ ID NO: 169978 - DNA, 657 bp, Cannabis sativa
cttaagttttggaaggaggggtaaaatggtcaattaccctaatttgtcttttgttatttttggtttttcttgtgagtgtgggctgattatacttaggctttatgtgttataatggagggttatttaaaaaaaatatatatataaataaataaaaggaaggaaacctagaaaaatataacaagttctattttctttcttctaccattcgaagccttaggagcagcagcaaggaagctttttcttctcaacttcaaccaatttctagcagttttgactatggataaaagtcccttaagttgtgtggtaagttttctatctttttccacttgttttattgaagtttaggttgagttttgggttaggtttctaagaatttcgggctgggtatttgcttcatgttcagggttggttttggtcttaattctatggtatgtttgagttccaattagcttcaatggtggctgtgtggtttggagattgaaagcttgatttttggagcttagttgtggttttaacatggtgaaatgaattagtgattgaattattgtggtttgatgctttgaatatattgagtttatggtattatgttgatctggagctgctgggcaggtttggaaggagtttggttcgaatttggggaagaaaactcatgaaatt

SEQ ID NO: 169979 - DNA, 606 bp, Cannabis sativa
ttgttacatctgagatatgaaccagttgtctcatgtagttgcagatttgaaaagttgttgcactatctagacccgttgaaatctcatccattaaaagaactttggctggaccgaccaacatttcccctgcaagttattcaatgcatgagctattaggctatgatgaatattatattaagatgaagtagtttttatcttataattaatttgtaatgaatgaggtgaactattatcaagttctctagatgtgttactctagcatagtaatgaataccaaataatgcaaaatatttttttagatgttataggacaattttcaattatatatataagtaaatgtacaatattaaaaaaaaactacaaaagaatataattacataattctatataattttacgaatttgtaattacaaataaatataaaatttaaaacgaaattaatatatatatatatatatatatacaaattttgtttatattttataaatggtatatatattattattaaatatttgattagtatgctttatgtttataatattattattaatcaagtatatttattatgatatatttcaatagaataaatataatttatttattaaa

SEQ ID NO: 169980 - DNA, 2295 bp, Cannabis sativa
ggtaaaataattccaacaattttcttgtctcaaagacaatatgctttacaactcctagaagatcttggacaattaggatgcaaggctgccaatacccctatggaaatctgaggggattgagcttcatgttgtagctacgaaggattttgaagaactctcttaggtcctccatatgcccccaacctttttggaatagacaagcatgtcgtccacatacacctccatgttgtggccgatgagatctgtgaacatcatgttcatcatcctttgataagtggccactacattttttagcccaaagggcatgactttgtagtagtataggcctaggtcagtcatgaaattggtaccctcttgatcaggttgatgcatctctatctgattgtaaccttaatatgcgtccataaaactcagttggtcaattctgggcagcgggaagcagtcctttggacatgatttgttcaggatggtgaagtcgatagaaaccctccacttcttgttgggtttaggtaccaacactgggctggatacccagtgagggtagaatgcttctgttatgaagtcattagccctcagtctttcgacttcgtctttgagcaccttggcacactccttgtctagcaaccgcctcttttgctaaacagaccagatgcttggatcaatgttgagtgcatggattatcatcgaggggtcgattccaaccatgtctccatgtgaccatgtgaacaggtccaggcttaccgttagaaattttgtcaatactgacttgatttcttgacccaagcctataccaatcttcagtcttcttgttgggtgagtgggatcaacttccacttcttccaactcttctacaggtccgaagcttcatgtaggatccccaaagcaaggatctatgtctgtgtccccagcttgggctagacttcattgtcccttgctaggcttgtcttctttacttttgacgggcatcttctccgttttggccttggataaggccaagttgttacagtgacgggtagactattggtctcccctcacgcatgccactccatgccttgttggaaatttaaggcataagtggtagatagactattggcccacttctaattgctgttaaccctgtctttgacgagagaactaaacacaaagaaatcgattgtcatctcgtgagggaaaatgtccaagagggagttgtgaaaactgttcataccagcaaagagcaaataacagacatatgcacaaaagctttacttcctaaccaattcgaaattctcaaagaaaaaatgggaatttgcaatatatacactccaccttaagggggagtagtatcaagagtttgttgtgtattgagttagttaggtagttagaattctgttatgtctattatttttcttgttcattagttgttggtgtgtgctagttgatggtgtatgttatatatatgcccaccatttgtactgaactatttgatcaatgaataatcattttttcatttctctagttctttctctgcttcagaactaaaagctttaaaataaataatagaggtttaggtgaatccattaaaatcctagaaagataatttagctcatcatcaaagtaataccatccatgaaataataattaagagacatcaaaaataaaaatagaataagaagagaggaaaaactatatataattgaaggacgctatcaatcttgatccaagatttatctccaagtttccgttggtgttttttccagtttaaatagtctacgaatgattaaaatcacactaagtagtgtttaaatagaagcccaaacgatttgtgatgaaaataccatgttacccctcttaaaatgcataaatttgagtcttgtatgaacgcaagctccacaacactcaaataggcactgtgactcctcttgggtagcgttgtgactcaaaagttagtatctcaatggaaaatatggtaatgcgcctagggtttcacaattacgaccttgttctggcttcagttgggctgcacaccacttatatatgggacatttacatctcatatttttcccatttatttcaattatactgttatacggcagttttttcttttttactgtctatttttatactgccttcttattttgtgtattttatattgttttgttgataaaagttttttttattcttttttgtttacacgtgtaagcctagagttttgcatgtttttattattattattttttcttttgtattttaagttttaaaaaggttgatgtgactgtgtattgtcacatttgtggcagggtttttttttttttt

SEQ ID NO: 169981 - DNA, 561 bp, Cannabis sativa
  modified_base (496)..(517): a, c, t, g, unknown or other
gtaaaataatttccaacactgtcatgggcatactcatgacccatctactgtttttgtaaaaaggcccactattagtgtgaaatacattaaaaatctaacttttgggcccttaagatggttctttcttgtgtgacgacctgtccatatagtggggaccattgttggtgttgggcacattgggaaaaggcttgcacttagtggacaaaatgcttagaggaaccatcggacaaagtagagtgtttagagggtgtgggcacactatcattgtctaacacggtagacaagatctgcttcaatgtcagacaagaataactgtcataaagctattcgacttttgcctcgcatgtggcttccgattctccttgtgcaatcgacatccatcttagactcttttcatgactctttgacatctgcctgcacttatagataagttgatcttctattattttgccacgtgtcctttatccaaaagcacatattgttggaaattattttnnnnnnnnnnnnnnnnnnnnnncaagtatgtttattaacaccctaagtatgaactttctaaaacga

SEQ ID NO: 169982 - DNA, 678 bp, Cannabis sativa
agattttaacagttacctttcaaactttaacaagtctgggggtagttctactgaccaggcctctatggactgctttcatgattttcttcatcagtttactatgacccctctttcttattttgggaataaatttacttggacaaataagactattcgtgaaagacttgattgggctgtagcctctgatccttggttcgatttttttccttaacattccttggatcatctaggcttctatgggtctgatcatagagttcttaagttagtcttaacctcctctaaccctcgagctaatcctccttctattcattaacgctttaggtttgaaaatatttggttagaggaccccagtttctattccacggttgataccgtttggaaggaatggtctaattctcattctactggcagtgatttccatagtttccttgctcagcaaggctattgtgtctctgctcttaaggcttaaagtaagaatagcaaccattcgtctcagtccagaatccaatcgttgatgcaggaaatcaattacctgcaaaataaggatacactcactagggggggtaactttaaactttcccagttccaatctaggctttattctttgctttacaaggatgaaatctattggaagcaaagggctagagttcgatggcttaaggcaggtgatcgaaacac

SEQ ID NO: 169983 - DNA, 1603 bp, Cannabis sativa
taccttgagttttatgtttgaggtgatggactaattcaaaggcaaccaggacattgtcagtgatcagacggttgggcaggaaagcactctgattttctgatatcaccaatggtaggacatctttgaaccgaagcactaacactttagagatcaacttgtaaatcacattgcaaaggctaataggtctataatcacccattactttcggctgtttaacttttgggattagtgtgatgattgatttatttaatctactcatatcttggccttcattcaacacaccaaggacaacagccgtaacatcagagcctatatgatcccaataattttgataaaacatggcagacataccatcgcttccggggctcttatcgggactcattgagtggagggcagccgtgacttcactggcagtaaaagggctgagcagtgagcagttcattgcttcagtaacagtggtcggtatagcattcaatacttgatttaaagcctcttcattggtgcctgaagcagtgaataaatcaccaaaaaaagagcagattaaatcggtcagaccttgtttcgaagttactgcaacaccagcagaattttgcaacattttaatcttgttattggactttcttgaagacgcataggcatgaaaaaatttagtgttctcatctccactttgaagccaatctattcttgatcgttgttgccaatatacctcttcttgtgacagcaattcatctaaagtgtcctccatctttttcagattacacattgaagtcgtggttcgggtctgttggttatttagcaattctacttccttatgagctgctgcaattttctttttaaagttgccaaatttgttgtggtgccacttttgtaaagaatcggagcaagcttctaagttattgcagaagttatcaattaaatttccttccaaatttgatttccaattctgatgaataatatcagttgctgcagaatcagataaccaaattttttcgaacctgaaccttgaaatttttttactgtcatgaggttgtgctgccaagggaacaacttcaacagagatcgccctatgatccgatttgtaatagtccagatgccttgttgaaatcggcttaaaggtgttgttccattgatcattgataaaacaccaatcaagcctttctttgattgcattaacattgaggcgccctttaatccatgtgaaaggatcaccttcgaaaggttgctcataaaggtagcatttatccaaaacagatctgaatttatccatttgttgttcacttcgtaaagcaccacccaacttgttttggtttgaaagtatttcattgaaatcgccaatcactagccaaggcatcaaaggtgcgacatctttacatctctcaaggagtgtccatgtatgaatgcgtttttgtgcttcaggggcaccataaaaggcagagaaatgccaagaaggaccattatcacactttatgtagcagtcaaatatattactattataattaagaagagttacatctacattgtctttccataacaaaagcaaacccccacttaacccaactctaggaacttctaacccatcaggaaaacgtaaagcttgacaaaa

SEQ ID NO: 169984 - DNA, 648 bp, Cannabis sativa
acttctttaaaagaggtggattcgttgcctacagtaattgctggcaaaaattgggtgtgtcttgcagaaaacttatcacaatttacataataagcaataataaaaggagtacctgaggactgtgacggagcattggtaggtgatgtgacaggctttattactcgaacagtgttggtgatgaagtccttgagtttactagatggtttcttgattcgatgtccacgactaattcctgtggaacaatatcttcattaatcacaacctccccaatagctgaagtggtaccaatcacatcctcactacctacacttgtaagaggtgggattagttgttcattgccagcgtcaatattgtgaccccaagtgaatgttcctcactcccccttggaagggaagtctcttcatacggagtgacatggtcataatactccttactttgaaatacatcattatgggtattatgtaaagagatgtcactagcaaaaggaaactgttgttcgcaaaaaacaacatcacgagagatataaaacaccttctgttctaagtcatacaaacgccactgttgtcgagtgaatttcacaacaccagattgtgtaatgttattagtaacaaaaaagaaatttacgtgaagaacaagtgcgagtattca

SEQ ID NO: 169985 - DNA, 738 bp, Cannabis sativa
caaagtggctcccggagccaagaattctcaaaccgaaagaaccttttaacagctactctctcaatagtttcaaccaacaagtgtattggacaatgatcagatgtagatatttcaagattaattagcttagcaagggggaataagtcgaaccaggtttgagtaacaactgctctatcaattctgacctctatccacgcatcactgcctcttcctctctcccacgtatacgggtagcctcccagctccatgtcaatgagtccacaatcttctaaagtgtcacaaaaaccttctataagcctattgggataaggattgcctccacgtttgtcttgttgagaagcgacattgttgaggtctccaataatacaccaaggcaggttcgatcggggttttaaagttcgcatcaggttccatgttttgtgtctcaaactcctattcggctctccatataacccagtgagtctccaacttccttgctccccaattgaaactgaaacatcaatatagttagagccatatcctaaaagggtaacttcctcttcaaccttccacaacaaagctacaccaccactctttccctgagaatccacagaaaaaacaccatcgaattggacagcaacccgaagcttctccaaagtatccttcttcgacagagtttcacaaaggaacactaacttgggcttcttttggataattaaatccttaatgaattgtacagcccatgggttcccaagccca

SEQ ID NO: 169986 - DNA, 571 bp, Cannabis sativa
  modified_base (486)..(486): a, c, t, g, unknown or other
tcttacccatagaatgaaggatctttttagtgatcatggaattgtttcgaatgatctattctgaacaaaggtcaattgggtgggagacatcactttactcaaaatggttctaagtgcacaacaatgattttcaaaatcaccttatagaacacattacacaaagagatcaggcagaagtcattgactgtagtttgtccttcctttttaggaatgagcacaatattagtttagttgaggacctttggtaactcagaaattagaaaagtgtatgatcatccctactaaattgtgcttcacaatattccaacgatgtagaaagaatgagagtggaaatctatctagcccgaataccttatttacatccatcatctgaatacatttaatgatttcctcttttactggtatttcagcgagcatgtcattagtgggatcattaacttgcggggggatgcaatgtaatatcctgataagcctaatggtaaatanttagggtttatatttatattatgggttaataaagtaataagtggaattatgaatctactaatctatttcagcataaaatttaaat

SEQ ID NO: 169987 - DNA, 789 bp, Cannabis sativa
tgacttggatacactaagatctttttggaaaacctctgaatcaggcagcgaaaacaccaaccctagttgggttctaaggtgttcgaaaaagagagatagaactaggagagagagtgtgtcttttcttgaaattttcataattttttaaaatagaagaataaaaaggttttatctaactataatattagcttaataaacattaaaaattcggattaatacttaacattaaatccctactaaaagacagaaactcaataggcaaaaagaccataatgcccttgccttacactaaaagtcataaaaaaaatcacttaagggtaaattggtcactttaaaatctcgactattcctgacattccccatgtctaaacttgcccgctatactaaaaatacaaaaatgtgattatataccaaacgcggtcgggcacaaaacatgcaaaaatataaatttttatatatgatatataaaatgcattctgaattcaaataaatctccgtaaactgaaaaattcataacaaatatacaagtttcataattaaatcctatttatctgctaattttcaaattaacgttaagcggtctttacaattatccccgcattaaaaggatttcgtcctcgaaatctaacctgaacaactttggatactgagttctcatatcgaattctaactcccaggtgtgaatattttaccagcatctagatttactaacaagtctgttgattaacatcctaaatataaattctctaaaacaatgaaacaaacacataagggtttaagaaaacatta

SEQ ID NO: 169988 - DNA, 970 bp, Cannabis sativa
ggcataaaacccaacaatcctcatcacaggtgctgacaccactgccatacaccagctcatctctgatttacacactaatttttcactcaaaaacctcggtccagttcaatacttcctggggtttgaagttcaaagaacagcaactgcaatctgcctgacacaacaaaaatataccagagatcttcttgccagaactcaactacttgactctaagcctcaatcaacacctatgtgctctaccacaaaactgtctgcaacatcaggtactcctatggacaatcccactcactaccgaagcattattggtgctctacaatatctcacaatgtcaagacccgatattgcttttgctattaataaattgagtcaatacatgcaagctccaacatctgaacattggggtgcatgtaaaagattactaagatacctagctggctcaataggacatggattgatttttagactcacaaatcgacttgacattcaaggatatactgatgctgattgggcagggtgctttgatgacagaaaatcaacatccggatattgcatattttttggagggactctaattagttggtgttctaaaaagcaaactgttgttgctagatcaagcaccgaatcagaatatagagcacttgctcttgccactgcagaaataatcttgattcaatctcttcttactgagatttgcatttccactccatcaccaccaattctttggtgtgataatcttggagctggatccttagcctccaaccccgtgtttcatgctcggacaaaacacattgaggtggatcttcattttgtttgagatagagttattgcaaagcagctgacatccgatatgttgaaacaaaaaatcaaatagctgatctgttcaccaaaccacttcctgcaatgccttttcaatttcttcacaacaagttaacatctggtttacaccaatgtcacttgaggggggctattg

SEQ ID NO: 169989 - DNA, 658 bp, Cannabis sativa
  modified_base (456)..(456): a, c, t, g, unknown or other
  modified_base (596)..(624): a, c, t, g, unknown or other
acctaaaatgaataaatataaatataagtcattcatttgcatcaatttgctacaaagtaataaaaccttcactgagttagtcaaatgtaactcatgtggtgtgttgtgtaacttcagcattttttttatcaacaagaagaacttcattaaatcaataaacaatacaaactcaagctccaagccactccacactaattacaaatcaatccacccagaaacaaattttatgttttgaataacgtcttattctttatcatgtgtaatctatactttacatctttttttaatatcatttacaatactgtaagctgatttagaaaaattatcaaagtgatatctatttttattccgccaaagatggtagatgacagcagcaagagtgatagagctaattcaatagttgcctaagtccttctaagagaataccctaatgataggaaaatttcagaatgatgnaatggttgtgtacttagtgtaaactattactagattcatagatgtcttgatgtgaacttaagaaaatctagaactgttaaccaatgttttcatgtttgatagttattttaaagtaattaggggtggaccatcctatggtnnnnnnnnnnnnnnnnnnnnnnnnnnnnnaaatactacttttctaagagatcggaagagcggt

SEQ ID NO: 169990 - DNA, 576 bp, Cannabis sativa
tgtatgtgtatgtgaatgcagctcgggcctgaaaaaaagtgagcctaagacaattttaataaattaaaaaaataagcttttttgtatatgtaattttttttttatgtaattctttttttctttctttgcttggacttacaccttttggagtgtaagttagagttagaccactccatttaatgtttagttgggctggcttaggctgagagtaaaaactgactgggcttatttattatttttttttttgaagatgatgaagagtttatatggttgtttttcggccctgcgatggggtgggctttaggtacgggcctagcccgtctatgtccaggaccgaccctgtgtggatgtgtatgtaaaaaaaagagttataactctacttaaaatcgtcgaaaggtttacatgcaattgttgtcttattagacaaacaattaatattggaaatgattgtcttattggacaaacaatattaaaaatggttatcttattaaggatcaaccttgaaatgattattttataataatatatgattgtcttattagataaatatttaatattaatgtctgtttgcaatgt

SEQ ID NO: 169991 - DNA, 624 bp, Cannabis sativa
tagtttccactaattaatgctttaatttgaaattggtaatgtatggtgagctttttttatatatttctcaaattttttcttttgtttagacatcttgatctttggtgagtttttttacaaatttctcaattttaatcttttatttcttataaaatttacaaatatctctaattaattttgcttctatattgtgggtaaatttttcataaatttcttaattttttgttttttttttttgttttttgttttttgtcttttaattttaaccttttcatctcatttttatttgattatattacttatgtttctttaatggtgagagttttatgtaaaaaaatattagatatatcagtatattttctataaatttttatttttgcgaattctttacaaaatttttaattttcaatttttcgtttgattaaatttgacatactaaattttaacttcagtatttcaaaaaaaaaaatatattatattgcttccattatctatttttttcctttttcttctatttcctaaaaaactaaaataattaactctgaaaaataattatatcaaacaaaaatatctaaccttaaaaaataattataataaaatttgttttgaatttatattgccaaa

SEQ ID NO: 169992 - DNA, 742 bp, Cannabis sativa
tcgaattttatctgctttcaagaaactcagagagacatttcttagtgtttggacaaccattgttgactccggttctaatgactatcttttgtttattgaaaaaaaaagagaaaaataaaataaatcttttataattttaatgtttattttaaatgaaaaaagaaaaaagattttttagtttgttttgtaattttatattaatttttagattttgatttttaaattattttatggtaattaaataattaaaatgacgtggaccagtgaaaatcgaccatgtgtatattgtgtttacatcagtaatacaatttggtatttaacaacaacatactaaaagaatagtgaataacaaagcagaatgtgaatttggagagttttaccactgaaaaatgagtttgtggaattaaatgtaacataatgaataattcaagtatttttgttttgccaccaaatatcccatataattatttagttaatactaatttcatgttatcttatatattttttaatgggaaatttacatggtatactaacttttgacattttttttacaaaaataatgtcaggcaaatttttttacttttttactgtgttttttcaaaagtttcatactgcagtatactgggttaagtttcattggggttctactggtgttttttagttgttttactgttgttttgagttgttctgctttgtgttttattggtattttataaaaacacagtattttgaaaaaatttcc

SEQ ID NO: 169993 - DNA, 797 bp, Cannabis sativa
attatgttgaggagttctaagtaccgtggtttcatgttaaatttaatgtttagagcaataatttctaaactcatgagaagtgtattcgccttcattgtctattctgagacactttaacaactttccagtttctctttcaaccataacatgggactgttgaaaaatccaaacacctagtcttttgtctttagcatatagacctacacttttctcgatgcatcatttatgaaagtcacaaaaattggctcctcccaacgattcaacttctatgggaccatacacgtcagagtaaactcgctccagtacctcatttttcttagcagaggaactcttaaatgaaactctatgttactttccaaataagcaatatgttcacaaggatccgatatagtacctttctcctaaagaatgaacttcttctttgcgagtagttgcgaaccctattcactcatatggccaagtcgtttgtgccataaatttggagaagtgccatttgctacattaatattattgttgcaagccttcccataagtcttgtacaatgaacaacataaattttctctcacaacgatcattgaccctttacagagtttccaattctttttgccgaattaactttcgtacccttgctcatctaatttatagagattagattaaggcacaaatctgaaacatgccttaccttcttcattgtcaaatgacaaccaacattcgtttaaataattacatctccaattccaataattttggagcatgtagaattacccatctttacatttccaaagtcaccagctttg

SEQ ID NO: 169994 - DNA, 847 bp, Cannabis sativa
ttagcttgaagctagaggtgttggcgtttgagatccactcccaaaagcttgtccatttttgcccttgttcttgccttctttggcaatctcatgaacctcctcagatctggagctaatattatccaagaactttttaagcagacccatttgtaatgtagctggctggtctgcaaggaacaaacaaaaaaaatatattatgtaagactatgtcaaatatggtcattgcaacgagctatcaaataaaattttagaaggatccaaaccgtttatcttaagataattgattttctcgtagcagaaagggcaatgtcctctccacctaaagtagtctcatgctagaagaaccctatgaagtgaattttactaagcacgtccactctaacgtgattgtaatgccctaatatatagggaagccacatgtgtgattttataaactagtttaatactaatagaataattaattattaagaaccatgataatgttaaaaactttgctaatataaaacactaaaaatagacattacaatggcataaaaagcctaaaccgggaatccctgttataaaaagttttactaaagaaatatatacggcaactatttaaacagaaactcaaaatacacagtagatacatccaacccaaaacaactcctaaaaactcggcacgtaggccggtgagctcaatttgtacattactggagaaggtagtcacctcatagtagctctaacttttccttgcctttaactgaaccacatagcacccgtgagtcacaaggactcagcaagaaaagcaataataataatcatatagtttattattcgaatattatcagttatacacaatcagaat

SEQ ID NO: 169995 - DNA, 2633 bp, Cannabis sativa
  modified_base (2049)..(2050): a, c, t, g, unknown or other
  modified_base (2438)..(2443): a, c, t, g, unknown or other
  modified_base (2514)..(2516): a, c, t, g, unknown or other
agagagagagagttcaagaaaatgtaattttcttctaattttgatttttccttcaaatgaaaataattaatctaatctaatatgcttgctgagtaaaatggataagtgtcccctccctaggcagccaccaaatcacctattaacaattacaaaaatacccttaagcctacaacttaggcatttccaaaactaggggtaaaatggtcaaattccataactccgtctaatcttcgtattttattttctttaaaatatttcccactaagaaataaggttctaaacttatccatatgatccaacaagccatccatcgcattttccgttgtcgccgaccaaaaattacaaaaataacatatttcacacataaatcaaataatacccctagagtttaataaaatatccagaattgagaaattataactctaatattcatttctaaatattgagaccgacaaataaaaaattcataaataattataaaattaacaggaattagtgctaattgcctttactaagccaaattactaaagcggtcattacaagaaggccttccaacttacggttcaaacggaccacccgctctaggaggacccaacctgagggtggccccagcactcggaccactcgttccaggagaacccaacttggggttggttccagtacacgaactacacgttcgaggaggactcaacatgggaatggccaaaatcctggaatgagaaatgaagggcctagtcgtggaggtgctcagcctagaggtaagagtactcatgaaatggaaaactgccgtcttagacgccgcttagaggaggcaaactggcagaacactgaattagagcgtgacgcaacctcagctagggcggcataggggaataacactcaaaatcaacttgacctttgagtgagaagaccacgaggcagacctcatggctcacaaaccagtagataggaaaatgctcagctagaactctctcatagaaatgaggtttaccctaaaaatcctaatgatcagctagaaccctctcatagaaatgagaatgggaggcagccaaaaaccaccaaacaggaaattccttgtacaaatgaggaagaccctgggacgcaacccagggaacgtaggtcaccgacgaggaatcaccaatgttcttctcgaacccatagagagagggctcgtacaaaccccagtgggggaaatatgacaaaccacgctcgaggggaagaatagatcgtgaagaagtaagtgtcacctcatggcgctcaaggacccatagtcgatcaactcgaggaagagaaaatgctcgtgctaatgatcaagaaagcacgggaaccagtaaatttgtaagtcactcaaggacaagatccatgagcaagacaagatccgtaagtaggacacaatctgtgagtagaacgaggtctgctaataattattcccaaccgaatttgcgagagcacttgaattagaaaaaactagatcttcaccaataactcgatccaaagtaagaggatcctatccaattacgaatagacgagttggaagataagtttaggagatatcaagtgggggaatgaggaagacaatctggatacgagtcagacgaggagctcgagtcgtaccatccagatatcatgaatactccattccctcagagggattaaaaaaccctcacatttcatcggataatgggaccaccgatccggtctcgcatttgaataactttaacacaataatgcgagctagtaatgtgacaaacaatttacgttgtattttgtttcccacctcgttagttggagcagcaagtagttgaatcaacaaatttgctcatcattccattacttcatgggaacagctgtccaacgacttcaaaaaatagtttcaggccgcaagggataggcaacccgaggcatccttgctaaccaatataaagcaacagtaaggctagacacttaaagcatatttaatttattttagcacgggtgctacaagagttagaaatctggatgatagtacacaactcattgttggaatatattttaccatgatctagattnnctaccatgtatgttatttaacatcgtaaatatgaataaataaacacatataaagtttcaaaaaccttatagtgggtgcagcagaattataatggctccttccactcagatctctaacccttgtatcttgtctgtagtagagtatcaccaagatccgagtctgaatctccttctcttgagtctggattcttcacagccttacacactatgaatgagtaccacttgatgtgtgtgggcacgtactcaatcactatagggtttggaattatgaagagaggaagagaagagagtggttcgaatggcatagaatagatggctcaaaccttttactgaaggcaattgttttcatcatcttttaatatgcggcatcactatctatttataggcannnnnntaggtttaggttagaattatttgacattaaaatattgaaaaattaaatggtaaattcccttcaagtggccnnncataggatgtgggcccccactttacaaatttgccatttttcaaatttttccttattttctcaaaaacaccatttttccaattcaaccacttaaatgctaaaactatttatttaataa

SEQ ID NO: 169996 - DNA, 1018 bp, Cannabis sativa
aaaaactctccgttaaggttatctaaaattcaaagaaaattcaaaagatattaaaagatggagctaaaactagtggtgaacggaatatgttaaaagaagatatgaaaaaaatatataagacaaataagaacagtcatgggaagatcaatcgctagtcaaagaccgagaatagaaaatgaaactgggaaagcttgctactacaagaaggagggtcattttttagatgaatgtacgcttttaaaaaacaaattggccagagcgaagaaagaaaaaagagacaattattgtctgtgatggatatgagtcagttgatgtgctcattgtatctatatacttatattatttgaaaataaaatataatatatataccaaaaataataatttatttttaaaaaaaattattttaatttattaaaataaaagataatacacatttcaaatgttgaggtatcaaaatatctcaattttttttatttctacaaataataataatcaaattatttaataataaaataaattgtaaaagatatatatatatatacatatatttagcgtatatacatgcatatacatagttggagtcaggcatggatggccgtgtatggtggtgataggggtggggccagccaagtggaggcagtggcagagggaagtcgaccaacacgaccaacacctcgaagaccaccaggcccatggagatcaacgccaagggccagtagtggaaattgggtccatttgacccgcctaaatgtcaaattggagtgggagctcctggacctttcgatcctctccttctaccttcacgtgtcgaccatgggacccataggttcggtcgaccaccacaagatagtcataggatttgtaaagaccgcttaatttaaatttaaaaattggcatataattagggtttaactatggaaattatttattgatattaaaataattatttatgatgatttatttgaattcagaatgcatttaatatgtcatatattgaaattttatatttttgcatgtt

SEQ ID NO: 169997 - DNA, 1133 bp, Cannabis sativa
tttgcatggttttgttttgtctcattcccacagttggatgatctgatcatctcaatcatcatttttaccattcttactcaacactagttgagtattgtattttaccaaggttgagtcagtctctctgatcaataatgatttgaagttgcaaaagaaaaatcactgttctttccacttggtaaaacaatcaaaacacttggagtgcatcgcatcattcccctttaatatagaacattattattgatcatcactttctatttctagcaccatcttataattaattagcaacatgtcctaaaaattattactttaaattatgtaagacctaatagtaagcatttaatttattggattgcttgagaatttttgttcatttgattataaatgtaagataatatataatctcatttctagtcaatgtggaattaataaaataataatgtaggtatttaatcaataataaatattataaaacttataaacgtcgatacacgaaatttatagaggttcagctcctttaacggtaatagtctatccctatttttgttgtattacttttacaaaaatatatcaagatcacaaggtctgacaaggtgagtttctcaatatctctcgaaaaaaattataaatattttaaagtgctttctgtcatagtgtgtatgttatactcaattttttgcaaaaaaaaaaaaataaaaataaaaataaatacaattactactcttgcacaaaagctcacatgctaagagtaccttgaagacactcaagtcaatcctacgactttgaccaagacttataaatatcaaatgagttaagacatcattcttgagggtcccatgacacctctagagaactcgaaaatattaaccaatcatttagtgtcgagactcacacacccaagtgtgcccaaactagggttcatgggcttgcgcgagtattttcactctagagacctctatctgccaaagaaactaacaaggacttgactcatttaggtatgaaatgacttaaatttatgcataaagtcaaaatagcatcaaaccctcgaggaataaggcacatgcgcccactgccacatagaaatattggcaatgatcttcaattttggagagcaatgccataagaaaatgaca

SEQ ID NO: 169998 - DNA, 650 bp, Cannabis sativa
aaataaataaataaataaatacgagcaaattatattttatacctactttattttatttgttttaatttttagttttaaaattatattctttaagatatatccacttttttaattaataaatacaaaaaaaaatatttttcaacttatctcttaaaatatactaataattataatataggcttgtacttaggacctaactaatctaggaatctaaaaaaaattatacccttttaaagatattattttttttttttactaatttgtaaaaatattatttttttaaaaaaaaataaataaaggtccaaaaatatttttttaatatcgtaatgatatgatacttttgataagtaacttagaatcaaattaaatgatatttctttaaaattaaatgtgatgtgtatattattaattttatggtggtgaaaggtgttgcctattgaattgtaaaagtatacgtattttcataataataataataataataataatattgacataccggccaatcatcattaaggtggcttgaggattggtcccaggagaaataacaaaagttgatccatcaacaactcgaagtgaattagttccaataactttaaaatcaccatccacaaccttcccaacttggcatcccccatgataatgccaaa

SEQ ID NO: 169999 - DNA, 845 bp, Cannabis sativa
  modified_base (360)..(363): a, c, t, g, unknown or other
atttcagacgcggatattgattaagaagttgtaataggtgttgtggaatcgatccaaaaattcgccacaaaacacaaacaagatcactatcttccagtgatgagatcagaaaaataaactatttgagtactacaaacaaagaacacatatgaaacttaaacacatacagatttaactacaatcgccactttatttcatttcatgaaattcatctcagagtattacaattctcttactcttcctttctttaccgttctaacagaattaaggtagtgtttggctggaaggcatgaaaatataggaataggaatatgagaaagaaaataggaatatgaattgaatggaataaaatttaaaatnnnnaaaaaaattgataaaaaaattattcaattttttctcatcatgtattagaatggtcttttctttcatttcaaaatagaagtcattcaactaaaatggtggaaaggttatcgtattagaatgatattccaatactttaatatgcaatcaaacaaaggaatggaatgaagattgttttctttgcattccattctatttcatttaaattacttccaaccaaacactacctaagagaattcaatcacttgatttatagagaaaaaatttacatgaaatcattgcttagcttgctcggggttaaaagtttcaatttatagaagattgactattaactaccaaaacaaaattgactaacaccctagctaatttggaccaacatgaatcaataagaataagacttgatgagtggaccaactaagaagttgtaattaatactcctcttaaaagaatagataggattttttttttcttttgctttataaaat

SEQ ID NO: 170000 - DNA, 671 bp, Cannabis sativa
tcaaatataataccaagtattaaaattctttgaccaaaaactatcagaaaatgtaacactaacactaaaactaaaactaaaactatagattaatttattttaaaatttgtgagtaataaatatgagtatttattagtaaatattgaaaatataaaaattatttttacttaagtaattaccgtgccaaatttaccttttaaaatattaatatacctcaaaatgatataatttatgtatatatttttgtaagttttcaaaactctgactaaatcatatagaaagttaaaattgagatgcaaagttcacttataagttcgatgttcatttaatacattttttgttatttgaaaagggaaatttaaatttccatgcttaataaacccataaattagtcccctaatactatgaataattagttatatataacactttttgtgttttccccataataccctccccacctacatctacccactccaaccctttttctcatcaatttcacataagaattccctacgcctatctttcacaaccaccaatattttttttcttctcttcactcatcactagaagctacaacattctacactacaagccaccatactaatccaccacattagaagctagaacacactacaagctccatcaatgggtaagtaattaattttttt

SEQ ID NO: 170001 - DNA, 598 bp, Cannabis sativa
cgatagtgtttctatttatttattaataaattttccaaatttctattatattttctattttttaaaaaatttaggcattaatatttttataaaattttcttttcatactttatattaattattttctaagtgatattttatttaataaaattatataaaaattaagtatataattaagtatacgtatggccatacgtgcaatcgcacgtaacttcggctagtatatatataaattgaaaacattttatataactcataaaaccattaattattagatattagataatatttattagtatttatcccaaaaattatatttattaattatttaagagagaaaagttagaggattgtaacttaatagagaagcaaaaggattgtaactgatatgttgttgtcattatttttcatgtttttttattttcacattttattttttatttatattttatttactctatccaaactaaacataaactctaattgtttcataaaattgtcactactacaaaacaaggctttagcttcccttttttgaacccattttataaaaagggaagctaaagggtctgaaaatacccgcctattgaaaatttac

SEQ ID NO: 170002 - DNA, 1004 bp, Cannabis sativa
tgattcaaaggaaagattatctactagacttgtaacatgaactactacagggtcatatttaggacccaaaccatttagtaagtgcattatcaaatcagtttcatccattggatggccagcagtggataaagaatcagctaacaacttgactttatcatagtaatcagatatagagagattacccttttggattgttgataactgagatttaatttgaagaagacgagccttggactgacttgaaaatctttgagccagggcacgccagacatcaaaagatgattcatgctgggtgagggaaccaagaatggtttctgtcattgaggagcggagccaactgagaaggaattgatcctttcgtttccatgccgtgaattctgggttgctttctccattgatgaggtgctgaacatgagccacactagtgagaagtatgtcatcaagaccatgcccaatgaccgtgggaatcacctgagatttccatgcaagatagttcgtgcgatcgaggcgaacagtaagggacgaattgagtgaattttggaaaggattccattgatgtagagttgcaggtggtggtggagtggcagcggaaggtgttgctgaagtatgctcagggtgtcgaggatccatagatgacgcaggtcaagggcttcctgatgccatgaaagagatgctcatcaatacaattcctaactggaacaatatagaattggacacaaagaattgtaaaagctctaaaacattatgagctgaacctttcatttatatagggaaagagtacagggaaagaggctgataacagaacataacaaactctgttatgacagagtacaagtgggaaaaaaaactaacggtctgaacaacagaaggaaaaacagaatacaaagtattggaaaagtttgttatttatcatttctaaaagttatttagaattatttttatttctttcaataaaattcatattttttttattttcgttcttttctctctctctctctttctct

SEQ ID NO: 170003 - DNA, 948 bp, Cannabis sativa
aaaaaaaaaaaaaaatacatatatgatttggagggcaagaaagaaagtgttgtggcataaagaaataaaaggttggtttgagagataatgtgaatgattgtataggatgattgggtgttaaggggtcaagggattttcaattgtaagttgatgtacttaattgattttaagtgcacgaaatgtatatatttatcattttattttatattttatggttaaaaagatttatagtacacactctaaaagagttgttttaatattttattttatatgtttcactaatttagtataatatatatttttcttcataattgcatacgttgtatttatttaagatctttataaatttttagaaaattttaaataatttatagtgtcgaaaataagattcaaacagttatttacctcccgtgtagaaaaaaaacagtcatgcttgcaactttatttcagtactataaaccatttagaatttttttaaaaaatttataaatagtctttaataacaacaacacatacaataatgaaaaaaaattaagctaaaaaattatttgggatgctagccgatcatttaagagggtgtactactaccttttaaattttatttttcggcactataaattattcaaaattttgtaaaaatttacatgtgatcttaaataattacaacatatacaattacaaaaaagtattaaaataaaaaaaaatcgagatgccaaaataaatacaatattttgatttttttttttttttttgtaaatacaacataatatacaattatgataaaaacgattatttaacaacttttagaataattctttttttcctcactaaaatttaacttctaaaaaaatatatgataaataatattttggacctcatattttataaaacttactgattggactctctattttgttaaatgacaaattgaaccctgtattttttaaa

SEQ ID NO: 170004 - DNA, 605 bp, Cannabis sativa
attattattgttatagttattgttattgcaatccaatcaataatacaatattaaacttatgcatgtttattttatatttagactctaaaaattaaaaacatttattgttgaaagaaatgatataagatattgaaacgctatatatatacttgaagaaatgtgaagtattattttcttaaaaaatatggtattttaaaacataatatgtaaaaatatggcactatactaaagtctaactttaagaaaattaactataaaaaatccataactaatatggtttttacaaaatactattaaaaaataatacagcttagatgtggaaataacagcagaaaaagccatgtgctaaatgtaattgccactgatctagttatattttgctgttaatgaacctgcagtttactaaaataacacgagaagactgtttattaggaattataatcggagatgagcaagcaattaaagtcattttgcatttagtttgtaaaaagcttattttcttattaactgctttggttattatagcccttttggtttttgggccttttgggtttttgggccttttgggtttttgggtttggtttgttttacgttgtagagatttc

SEQ ID NO: 170005 - DNA, 711 bp, Cannabis sativa
gatgatcgcaaatcaacttctggctactgcatatttcttggagggaatttaattagctggtgctccaagaagcaaactgtcgttgctcgttccagtactgaatcggagtaccgtgcattagccttagccacttcagaaattatatggattgaatccattctcacagaactcggcatctctctatctcagtgtccaaatttatggtgtgacaacatgggagctggatcccttgcctcgaatcctgtcttccacgcacgcaccaaacacatagaagttgatttgcactttgttcgggatcgtgtcttagcacacaaactggatgttcgttatgtggaatctgaacatcaaatagctgatctattcacaaaacctctacctacttcaacattttcctatttacttgacaagttaactcatggcttaccccaggtgttaacttgaggggggatgttagaatataaaaatagttacctctgttattagtttactgttagtaatattcagttaaaagtagttagagttgttattctgttagtgattagttaagctattgtaaagattcctttcttgattcttctctttgtaacaaacattcagtataaataataacaagtctcaatcagttggtattgagcatttttactttccatcactttcactttcatctctctcttttctctctgctcaaactctgttttcagagttctttca

SEQ ID NO: 170006 - DNA, 960 bp, Cannabis sativa
atatatatatatatcgagtatttataggtagtaaataagattaaaaataaagttataattacaagcatgaaaatccctccaaaaaggggtcggcaaagaattataattcattgcaaaaaataaaatagttaaaaggaaacttaaagaactatatatatatatatatatataaatcaacatcatgcatgaaaatgatatataagaataattgaaaactattggtttagggtctataaatatataggataatcccttttcatatatatatatgctcgatcatgatgatgatcatgatcatcatgatcagtcatattttttgctacagttaactaattatattaagaccaatcattccattgaattcattcatcttgatgatcaaaatctaaaatgcatatacaatatctatatatatatatgctttaatttctatcacatatataatgcaatagatgtttagtccctttcatatgaaagctcatcgaaaatgatatataagtaagttaaattttagtaaattcataaaaaagattttcttggtgactatataaattagaattgactgattaattaagaaaatataaatatatttatatataaaatatatgaaaatagttattaattaggccaaaccaaccattcatgtatgtgtagtctactataacttattatttactttagctatatatagttaataactttgaattttattataggtgatcattagttttttattattgtcaactatatatatattctgtctattttttggttggatcacaatggaaatgtttgtgttatataaaatggtgattaaaatatataatttacatttttatggttggtataagtttgcaaaattaaatatggtgtttttttccaaaaaaaaaaaagttaataaaatatgaaaaaaaaaaagtaatttgcagcataattgacaataatatctaagttataatt

SEQ ID NO: 170007 - DNA, 590 bp, Cannabis sativa
tttttttttttttaaaaagaataatattcaattctttttaaaatatatcaaaatcattaaaattaattaatatcagatttttttaatcaaaacaataaactataaacttttttttaactgaatcactcatcaaaaaatacacatgagtggacaatgactcaaatattatataaaaaaaatctcaatctcaaagctatgtacaaggctcactaattcaacaagtgattcaacaaacaatatgaaaatttattaagcctaaattaactctgaagtatatacagaaacaccatattcataatagttaaaaaaaccagaaatagaccattggaacaaaaagaaaacttaacacattctgtgaaaccttctagaacaactcagcagcattactagttttgtttacctggtatattcaagtagtacattttatacactcactgcaattattaacgcagtatcagtatataaatttaacctttacatctatacatacataatatagggatataattttgtcccgttattgtactttcacagattgtaatccgtgatgtacggcaaccgtcaaatgagggagttatttgatctgacgg

SEQ ID NO: 170008 - DNA, 503 bp, Cannabis sativa
acttaagagacaaattgagtctagtttctttatcccagctcagtttgttgggggtgttaagtagataattagttagtttatattagtttaagaaatatgttttgtacaattacaatcttttactaattttagttgtagttaattgaagttatttcattcgaatcttgtatttatagagctgatgctcattcaattctataataaaaaattttatgttagtaattttatgatttatttttatttttttttacaccataagttgtttacagcacagaaaattcaaatttactatgaattagtttttgttttcaggaatgagagttttggaggtctaagctgcttccaatgatgaatagttatttttttgggggcagtataaagtgctgatgtgacagggtataaaaaatatatcattaatatgcactatttttatgtaattttaatgtatatatagtatattaataaaaaaaaaaatttaaaaaataccattgtgatctgctttt

SEQ ID NO: 170009 - DNA, 684 bp, Cannabis sativa
tcttccgatcttcgagctcggaaaattgaattaccgctctactccggcgacgacccagatgaatggacttaccgagctgaacgctacttcgggttgcagcgactctcaccaccagaacagttggaggcagcggtattgtgcctcgaaggagcggcgttgaactggttttgctgggaaaatcagaggcaggccattaagtcgtgggaggagctcaaatcactccttctccggcgatttcgtccgaaggcagagggtacggtttttgacagattttttgttcttcatcaagtcacaacggtgcaagattacagacgaaggtttgaatcattagcttcgacaatcggaccgatgggagaccaagctctgcaagcagctttcctcaaagggttgaagatagagatccaagccccattgagaattctggagcccaatggacttgtacacatgatggacttggctgaacaggtggaagcaaatcaggccctaactagactacacagaaatgggctgactgggcccatgaggtcaagcccaagaccaccattgtccactcttttcatacccgactccagcaaaggcacgtatgtgacatctccgaattcttcatcacactctacccagctttcaccaggggctagctctaaacaatcatcttctcaggcgacatctccggtgtaccgccgg

SEQ ID NO: 170010 - DNA, 666 bp, Cannabis sativa
  modified_base (534)..(554): a, c, t, g, unknown or other
agtattcaactgattttgtgcagctcataatctcaggaatgatttgagtagaagaagaggtctagacgaacaatacgttcaaccagctactcaactaggcatcctcatccaggacccaactctaagacatcctgacgtgacacaggtcggtcaagaggctgaactagttcacccatctctgcaagcacatttagatgaactaaaaaatatggttcaaggcctgaccggcccaaaactcactgatcttaagttggacagagcacgcagatcacccttcacttccgaattcaacgtccttaagctacacctaatgttcaagatgccgacctggaagatgtacacagggaaagaagatcccttatcacatcttaaatattttgagatgaaaatggacctgtaaggagtacggggcaatgtgcggtgtagggtattccctgccagacttacaaaagccacacaacagtgatacttcaagctaccgcaagggatatttaattcatggaaggctttttctgttagaattattttaccagnnnnnnnnnnnnnnnnnnnnnatgttgtttaacatcctaatatgaatttataaaacaatgaaataaatacatgtaaagtttaagaaaccttacggtgggtacatcgcaattaaatgactcattccgctcagat

SEQ ID NO: 170011 - DNA, 549 bp, Cannabis sativa
ttttatatgatcatctaaattttttcataattatctaaattttgatattaattttttttttttattgagtaatattttatttagctcaagatcttcagacatcaatcttgagtaattttggtgatgattatgtctacttgccagattagtttttagtttaatgaccttcgttatactcctgagactaagacatatgggattactgttcttgctgcaacaaaattagaaaaaaagcgtaaggcataatattcttaagattacaccaatccttgtaagaaacagtctcatttgacggattcatctaatgagtttgtacctcctgactcatggattcatctaaagtttttatctttttggcatctggctttttcagtgagttaggacgtgcaaactcattagatgaattcgtcaaacgagaccattttttacaacgattggtgtaatcttcaaaatattatgcattgtgactcttttttttttctttctaattttgttgcagcaagaacagtaactgcataccactacaagaaaattaccctatctcggcgg

SEQ ID NO: 170012 - DNA, 927 bp, Cannabis sativa
atattactatattctactttattagttttccatcctttttaggttttcacttttattttggccctctcattccatttatataatttttataatagtagtattgtgtcatcaatatagaatataatgcaccactaaaaaataaaaaaagattctttcaaaaaaaaaaaaattgtagaattttgacttaatatcctaagattttataaacccattttatttttctaaagaacttttttttttccatttataaataatgcacaaatcacataaattcatgtgaataataactattttgaaaagagatccaaaagtctattttgtaatatttttaattagaatttaactttttcctaaatatactcaattactgtgtacatgtctaccattgtggtctagagactagaccaaagctgtataaatataggtgtatttcatgcgagttgactcatattttagaacctcacaatcatattagctaagttgtgtcggtccataaaataatatgaactatggtgtgtcaaccgttaaaagaatataaatcgtattgtgtcttactaatattttaaagggtaagagcaacatcaaggagacgccaaatatcatatatggcgatatgacgtgaatggaggatccaacgagactgcattgtttgcagcattttgaagttttgtctgcatatcttttttcttatatataatttaaataatctttatatatatatatctatattattacaattataaaattaagaattattttttgggaaattttataatgtatatttttaaaaatgatgtatgaatttattcctatttgtttagtcacccgttagatttttttagtctattttttatatagtcgtatataagttttgtctgcatatcttttttcttatatataatttaaataatctttatatatatatat

SEQ ID NO: 170013 - DNA, 1022 bp, Cannabis sativa
agccgctaaattcatggctctcaagaaagagaagagctgccattgaccttattctgagtgacaaacaaggatgcaacaattttttttcctaacatttttttcttttcttttgagggataattaatgctgatcataagatggtttgtgtgttgagtttataacattcattctttgtaattgtatcacataattgtgtacatacagatatatataatgatgttgttctttctcaatatttgaatatgggtgaagaaaaaaaaaacctaattgagccccgaggaaaaaaattagttagactatctctaacggtaacaccaatttaatataagattttttttttacagtaacacttctaataattcacactaaatatacaactaaataaatatattttacttacaatatctcgccttttatattatttatataaataacctaaaatggttaatattttaaaattttaaaaattataataaaataaaatatttatttaatcaattgaatactacacatttttttttaaaaaaaaaaataattaaaggatttaaattttataattaatcctaataaacacgaacattttcaaaatgagaatacgagaattatgcaaaaaagaactcaccaataatattaagattctcaaaatacttcaagtccatatcactaatattttaatatttttcaagactaaaattctcatacgatcaacttgactatcaaattattaattgtctttttttcttttttttttttttttttttttttccgtttatgttgtttttttaagttttataacttagtgttattttgtttttattttattttatattagtatttttgttattgttattttatactttctaatatgttagtattttgaaggaatgattacataagataccattttttgtaaaatatttagatttttacgttcaaagaatgttttttttttttgttacattttcacgattttccaaaaattaacacgaaaacaacataaaatcaacaagaaaactacataa

SEQ ID NO: 170014 - DNA, 636 bp, Cannabis sativa
caatgaactatttctagaaggcagactacaattccttctaggcgtgaattgatccggaagccagtctcttctaccaacaatcctcaacagatttagggagggttaaggagaagcataagcacttgtcatcttcaccaattcttgccacttgcataatttttttatatttttgcaaatgtgtctttggatctgtttgcccatcatacagctcaatttgggccatcttaaagttctccaagggtaaagcttttttgatccttctaatgcatggctctaggtcctcattctcagaatcagtgatgaccccactttgcttctagacaaattttatcagtccaacgattttttcatccaatcttttggtgccattatctaggagatcttgtccctggaatttttcatttaagtgttttctgaggttgttaccacgtggcctggccttcttactttttacttctttgtacttggcatcaagaaaccttctgagatccattgtggacaaactagcattagagtactgtcccctggtcctgttggaatttattttaccaggatcttagatctaatcacaagtatgttgtttgaacaccctaaatatgaactttgtaaaacgataaattaaagacatataaagtt

SEQ ID NO: 170015 - DNA, 562 bp, Cannabis sativa
aagactattcatgtacttaaagggaacaattcatgagggacttttcattcaacctgctgctcgattggaacttcaagcttattctgatgttgattgggaaacaagcattgatgatcgaaaatccaccagtggttatgcagtatttcttagtggaaacttgatatcatggtccgcaaaaaagcaacaagtggttgctagatcaagcacggaaagcgaattccgtgccttaacaaatgctgttgttgaagtgaactggatctgtcacttactcaaggaaatccaggttcctttaccagcttgtccaatcatttgggttgacaactaaggtgttgcctctcttgcagctaatccagtctttcatgcacgatctaagcatatcgaaatcgatcaacacttcatccaagaccaacttctggccaagacactcgaggttcgttatgtaccctcagtcgatcaaattgctgatatcctcaccaagtgtctctctaccgatcgatttcactacctcaaagacaagctcaaagtgtgtccatcaccatttcgcttgagggaggatgataaa

SEQ ID NO: 170016 - DNA, 560 bp, Cannabis sativa
attattaattaggagagaagagttgacaagggcgttagcgtttttactccgtgtgtgtcactctcatagtatctccttaattaattgtcatgtatttaagcactggatatgtatgcatcaccaaaattctactgtcagtactgtagactacctactcataaatgttggcctcgtatacaacatagttatagcaaaaaccaatatctagttagttcccctttccttgaggaaagtgccaatatgagaaagaggaaagagagagagaatgcctcgtgtgaaacttagtcatctctcatcactctctacttattctttttttaagatctctttaaattttatttatatatttttccgaaataattaaggggtcactcaagttctgatatattgcaatcctacgtacctttttcttttacaaacataaaattaataaaaaaactatttcaacgtaatgcttagagcatctctaaagagacaccaaatttggtgttacactatcaccaaatttagtgtcaaaaattatttctactccaaccacaacaccaaaaattacactaaaa

SEQ ID NO: 170017 - DNA, 1084 bp, Cannabis sativa
aatagtaataataataataataggtacgattaggtgtgtataagcttttctctctagctcttggttctcgcagctaccttagctggcgccatggcaaaaacgagatcgaaggttcaagggaggcaaccaacaactatgaagacgaggaaggttcgaaagaagggtcctgtatctactgttgatgtcaaaaaaaccaaatccatggatgaggttcttggcatcgaaccgattcatttcacggatgaggagagtgtcgatgaaggggacggtcatgaaccagatgcgaatttgtttcaagcacctctttctcccaaatcgtcacttcgctcgatccagaggcaagaagaaatcagggcagactttgccactttcatggaggctaatgctcaatgtagcagtagcatctcacaaggtaaaacctccatccctccaattctgcgatctggtaacattcaaagaaatttggatagttcttttaaaaacttggagaaggagaaggtgaagataactgatgaggacattgaagaggaggttaacttttggaattcagcaattgtatgctatgttctaggagctaaccctcctctgtccgttattgatggatttgcaagaagagtgtggaaagataggattgataaggttgaaatgatttcatatggagtgttttttattcgatttcacactattgaatacagggataatgttttgaagggtatatctttttcaacaaccgtcctatagtcatgaaaccgtggaattcagatgggaattctaaaaaagaaaatctcggtgtaattccaatctgggtgcagctggaaaatttggaattgaaatattggggtgagaggtcattattcaagattattggtcaattgggaaaaccacttatggtagactcaatcaccaaagagagagggaagctaatgtatccaagagttcatcttgaagtctcgatacatcatgaactacctgacctcattgagttcaaagatgaacatggtttcaacacttcggttggagttaaatatgagtggaaaccagtcctttgtgagcactgcaagggaatggggcatcaaacaagtga

SEQ ID NO: 170018 - DNA, 523 bp, Cannabis sativa
ctgcgttgcatgaggctgtgaggttcggacatgatgaggttgtaagaatattgaccggagaagaccctggtttccggtattcggctaatgaagcgggtgagactccgctttacttagccatacaaagaagctactggtgcttgaaattggttgatgaactattgaagaattggtcgacactggacactggtgttcctaatggaggaactctactgcatgctgcagttaaaacaggcaaccaaggtactatattttgagcaatgctaatatatattaggcattaatacttcccaataattacaatagactatagtatctaactacttttgacattgacagtagttattaaattaaaatatgtaagattcaattgattcttgaccacaaaatctttacggatttgaacttatagactaaactaattaagatgcaaactagaactcaataaataactaggttgcgtttgtttggaatgaatgaaaacataggaataagaataagaataggaataggaataggaata

SEQ ID NO: 170019 - DNA, 867 bp, Cannabis sativa
tgaagatgtgggcaagataatcatctgcggggaatatgaaatacaaataataggattgtttggaaacttataactgtgtttggttggttagggtgtatggtattatacaatgatataggttcgagtcccacaatcctcttttttatatttttcccatatactctcaaggctggccctgacaaaagggagaagggaagatagaatattgacgtggaggcttttttcctttaaatacacaatttttaatctctccaaaaatgagagaatctaaaaaaaggacaaaaaaaaaacaatataaaatgactttttctattcttcaaaataaaaaatatatataattatattaaaaataacaaaacaataattttaatatttatttacacttcatccttccaactttatttctaataccaattctttaaaatttcttccttcattctactcttttttttcttcctaccaaacatagccttagtgcattaaaaaaggccggcctttgccgtgcctgaccaaccgttatgattttctttatttcaagtgatagtgataataactacttattatttatgaacaacaaaagaaaagagaaattctattctcactaatagtcaccatccatccacataagtagtaccttgtttgtctggttgtttagaaattcaattttaataataacaattaaaaaaatgaaatatataaattcatacaataaaaacattatatgtatagtgtttttggatatgatatagtaataatcctagtggatcccacacaaataattcaaatgtgaattgaaatctatatatatatatatatatatatatttatatatattcattgtattgtatttctaaattttggttctct

SEQ ID NO: 170020 - DNA, 586 bp, Cannabis sativa
aaaaaaatacaaactctaataaatagagaattttcaatttcccaagctggtgcatgttaagcttttgtctagctacaggaccacatttatatgtcaaaaagaaaaataatgtaagaaaaagaaacattgggttatgatcaatttctaaagttatgtttttgacttgacttagtctcatcttagaacatataaacaatagagaaagagaaaagagagaatataaaactaatcagctggttggaaaaccttgaaactagtagtgtactaatgtatatgtatacatattacaaaaccccatatgtaaatgtatccaagtttacaaaagtttaaccattaaaagtacatttttcagaaaatatataaatatatatatatacatgtgggtggggcccaagataattgagtaccagcccttatagaatgttgcatatacttcatttttcaataacttccattgcaatattttgaaaaatgctaaaggagaccagtggtacttagcatcttcctatgtgtcaatatcgctattggtacaactaagtatcgggtctcatataatttaatataatagtttttagagagtatcgct

SEQ ID NO: 170021 - DNA, 504 bp, Cannabis sativa
gtacttaactacaatccttatgggttcgacatcactcatgtgattaaacatttacaattgatatgtatagttgcatgttaaaaatcaacaacagttatgctgattacacttcttcatctcgcaatacaaatgctcctcttaagttgctttttcctgaaggtgactttctacgcttaagtatactttgggcagtacctctcgtgtccttctataatattgaaataagcaaacgcgatgcacatacagacaatgtgtaccaatgagatgagtgacatcgggtgtatttcctttagtctttcaacatagagtttcacacaaaaacaagaaattgggcttctttgaagacatatatcttctaagaactgaatggcccgtaggttcccaagttcgctgcagttccaaagtaaaacgctcataatgtgtggtgggcctgaacaccagagcccacattttccccgttttttggaatatatatatttgtaaaggcatctccaatggagaaac

SEQ ID NO: 170022 - DNA, 608 bp, Cannabis sativa
  modified_base (569)..(578): a, c, t, g, unknown or other
ttaaaaaataccaacaaaatctttacatttgtagtactatgtataattcgtgcttaaacatgtaaattgtattgtaataagtgtatataaaaagaataaagattatacttttatatttgtgctcttaactatatgtttttcaatttgtttctttattttcatgaatatatggtatttgtacacataaattatatataaatttaatatatatgtgtaataagtaatttcaactaattattcacagcaattgacaatttaaattttatttttacattgtaaattattcagagttttttaaaaaagaacatcattttattataactatagtaatattatagctgaagtgttattagaactatagtgtaagctaatatataaaaaaattgagtaatttgcagcgtataatttaaatttaatttttggttgctgataaatacttaagtttaaattttgacagtaatttaatatttaagttatatttttagaaaatctataagtaatgttgcgaaaattattaaatactacgcaagtgcacgcaatcaagtagtatacttacgcaagtgaggtcnnnnnnnnnngaatttgattaattactactaaactatact

SEQ ID NO: 170023 - DNA, 641 bp, Cannabis sativa
tttccatttcattctaatttattacggccaatgatattcggaagacccaaataagttctgtgatcatctgcctcatgaattcctaggtcaccacagattgcatcacgggtgtggacatcaatattgcgactgaagaaaatggaagatttatcaaaatttatcttttgaccagaagcttgctcgaacacatttaatagtgttaacacattggttgcttctccctcattagccttgcaaaagatataactgtcgtctgcaaaaaatatatgggacaacatcggtgcaccacgagtgacctgaatacctcgtaagagatgacgttgttcgtaatgttttaatagtgcaaagaagccctcagtgcatataataaacaaataggaggacaatgggtctccttgtcgtaaccctcttccaggaataatagaaccaaacattctaccggcatgacaaatctgatatctggctgaagtgacacaaaccataagtagagaaactatgcgctcatcaaaacccactttccttagaattgcttgtagatagccccactcaactctatcatatgccttactcagataggggtgttcataagatagccgatcaaatctaatctgcaaagtgcggatatccgtaatgtgtagatt

SEQ ID NO: 170024 - DNA, 793 bp, Cannabis sativa
ttatggagaagaacgtcactgggtatgtaagcactaattttttctagctagttgtgactacattgtcccatggtttacacaaaatcaaactttttttctttctttttgttttcctgtaaggcaccaaaaagaaacatggacagtcagtagtatcactgtatttgtttgctacgatagacaacataaacaattacttgcttacgtcactgaatacacatgcaaagtcaattattatttcaaagaattattagcaagtttacattttccacattacttatgtcctttcaaatataaagtttgttaaaatacttattttgaatatttatatttatagaaatttaatttttttttttattttgttaagttctgtcatattattccacttaaatactgatatggttttttaaattaataattttataatttaaattttgacaattattaaatggtactttttaaaataaaaataaaatttttataaatgtacaacaaaagcaacataattacaaaaattttacaaaaaaaaaaaagttattccaaaaatttatacattttcaaaacatattacatgaaagcaaatattttaatcattaaataatataaatcattaatgatcaaattaattacaataaatagattcatataattagtgtttataatattattttgtaatattttatgtttattatattaatgttttaaaagttattaatgataaaatatgtttattaaaattcaaaataaataattttataaaattaataaataaataataaacagttttataaaaata

SEQ ID NO: 170025 - DNA, 866 bp, Cannabis sativa
ttgtagtcctgaattcgtacctataatgttcgataatgatgtgtttttctcaatgtcagttcatcttaagagtaatgttgtcgagtagaaattggaaagagttggagaaaaaaataaacgagtgaatgtttgatatcaaatttgtccaagaatgtattcatgaagattatttttgttctgagatgaagttcttaaggcaagttttggaagctggtgttcaagaaattttcactgaacatgacagagttcatggtctttagtaaatctagtgtctctttaattagtaagataacaaagtagtttcatgtgttgaatttgtgtaattattaatgtttctttaaaggtttaatctataatagaaaattttcaagaagaagagattacactgttgggttttgtttgaataaatcttttcctttgctaaaaaaaagtgaatcatatagagtttcattcaagtacttcttccccagcaatgcttcctccaatcttcttcgaatgtcgtctttgttctcgatatcacactttttagaagtgacaccctcaaagatctctcttgttatcttcgaaatatcaaattgatctgacactgtaacccacactcttagctcaaaatgattaataacgcgaacatcatcgtaaacaagttgagcaagagtggtcttgcgaacaccacccatcccgacaatggggataacagaaatgttagcaccaccatcaacatctcgtgtttcagcagcaaatcaacaatggcttctttctcatcttgcctcccataaacattagaatcttcgagtaaaggagcaggaggcctttgagaagaagtgttttgaaggccttctctctgataaagtcaatagtgtacattc

SEQ ID NO: 170026 - DNA, 615 bp, Cannabis sativa
aagtgcaaatcaaatggatgaattcagatcagttttggattcatgtccattgaatgaactacctttaatggagatcctttcacgtggattaaaggaagacacaatgtggacactattaaggaacgattgaattggtgttttaccaataattcatggacatctcatttccaacctttagttacttctcacttggactacttttcctcggatcaccgagccattgcagtcaatgtcatagaaattggttcaaaccagacctctcctcacagaaaaactcgattcagatttgaaaaactgtggttaaaggatgttgaagctgccaccattattcgggaacactggtctgaagacaatgcagggaatatttctggttttctgcataatcttagcactgaggcattacagcagtgacactttcaaaaattcagacgaatgaaaagagatatctctcaattgcagaaatctgttgctactttaaataatgtagctgacagatctcaagctaatgtttctcagcttaaaaatttcgaagcaattcttgatgagttgcttgcaaaagaagaggaatattggcatcaaaggtcgagagtagattggttgcaatgtggagatcaa

SEQ ID NO: 170027 - DNA, 778 bp, Cannabis sativa
tcttcgtcacagtaattaaatgtaggagttgtcactgaatcgttagatgtgtttagaatctaacatagacgtttatcaattatataaaacaactaaaaaaatttaacacataaaaactaattttttttggtgttctccaaggttattttctcaaaaaaaaaaaaaaaaccatattatctaaactaattaaataaaaaattaaaatgtagaattcacgtaaaacaacaaaatcaacaatacacatagaaaatactagttacgaaatacagttagttaaaaaaaattgaataataacacgactaaaacaattataagataattaaaatataaaagccaattacttaaaaaaaatatcataaaaactcagctatgtttgttagctgagaaataattaaattaaagtaactttttattagttatgaaataattatatgattagctgaaataattaaataacaaatatgttgagaaaaaaaaaacattaattgacaagttagattggcagcaaaatcctttttcctttttgtattaattgaagtgactgacatagttcattaattctgtacaacaaattgacgtggatgttgaaacaagaaatattccatgcaggaatcaagacaaataggcaatagcatagccctatttatatattgaaataaattccatttttttaatcaaacatttttctttgactaagaaaattaaaaaccatagctcaagtggtcataggtaggtgtgtgtcttggaggtcctggattcgagttccaaataaaatatg

SEQ ID NO: 170028 - DNA, 557 bp, Cannabis sativa
attaatttgcttcaataacttccttaaaatgattatcatttgtgactaatatgtgtgaatgaaaatgatcaccgagtttattaatgtgactctaccagcaaaaaaatatattctttgaactccaaagacggattcttactaccatttcatcaatcaaaactccacactccttttactgaaattcttttagcacaaataagaatccccaaatatttaaaaggcatcgaaccattatagaaactaaaatacatcaaactgaatttagaatacattccactttaatcaaagtatatacaaaacaaagttatacaaaataagactttttttatttaggcctctaagataggtgagtcttatgcgtgagcctaatctgccttagcctaggaccgatcctgattaatagatgcccaagttgccaaccattaacagctaattcatgtttgtaaatatttatatttatatatataatgtaacaaaattggagtaactcatataatcattaaaatgtgggattaattgtataaattgaatattgatgcaggaaattgatttgcaca

SEQ ID NO: 170029 - DNA, 821 bp, Cannabis sativa
  modified_base (742)..(753): a, c, t, g, unknown or other
agaagtagttcaaataggtctgtttggagatgaaacatcaaaattggaaatgctttcatgctgaatatcagaagcagcaggttctccaatagtttttgaaaagaaatcttgatattcaacaggaagagtatcatttttgtaaaatgaaaaaaattgtttcatggaagtaaacatctcttcaacaaaacaccttattagaattcaaatctaaaagcttgtaagcttttaaaccagtaggatagcctataaaaacacatggtacaactcttggagaaaacttagtgccataattaggtaatgtagatgcataggataaacatccaaaagcttttaaatggctataattaggtggtttggatttgagaatctcaaaaggggaaacattttggaagttaagtgtgggagttctattgattaaatatacaacagtagccacacattcatcctagtaaggtatagggacatgggatttaaacaaaagtgatcgagcaacattcaacaagtgttgatattttctctcaacaacagaattttgttatggtctataaatgcaagaatattgatgtacaattctaagagaactaaacagcttgtcaaactgcaattattttgcattatcagaccttatgactttagcagtcttcttttggtactgagttttaatgagcagctgaatgaaattcagaatggcagtttatgcctcaaatttttttttggtaaaattgttggaaatattttaccnnnnnnnnnnnntactaccatgtatgttttattaacatcctaatatgaattctaagacaatgaaataaacacatataaag

SEQ ID NO: 170030 - DNA, 1399 bp, Cannabis sativa
aactcggtagccctatccataactaaatctgaatatatagccgcgggtagttgctgtgcacaaatactttggatgacacaaactcttatggattttaatgttgattttgagtgtacgcccataaagtgtgacaatactagtgtcattaacctctctaagaatccaatattacattctagagccaagcatgccttatcttgtttttaacacaaaaaaaaaagttaaaaggtatgtaaactagagtaataaactctagaaaccacttcaaaataacttccatcatttctaaattttattctacctattctagcattgttgagtgaataaccaatgaagaacataaaactaaattctttgcaccttattttgtcgatcttgagtgaataaaatgttgattttgaaattaaaagataatatcattttctattctacaatatttttgcttctgaaatttactcgacattatgtgacatattcgtgtatttttgtacagagacttatatttttgtcttggttacttgttaagtgttgaatttgacgagatggaatgaagcggatgcacggagggtcaccttagtttccttcgcccaaatgctttcaactgatttaggagagtaccaattcgttatcatgtactcaattttgttttctggatggacagtgtttattttttcaatgctctatttattttgaaaagagaaagaaagaaaagaaaaatcaacaaaataaaatggtgtatacgtggatagtcccaattttgtttgttcatattccaacaaacgagctcacatgctctatggtatttgtactcgcagggtggccttcgggcctatcattttgaatgtctacgctcatctatgattgcattgttggacattctatgtgtcgacaacatggaacatgcaagttcctgacgagttgttgaatacactaatcaatcaaaccaaaacttatgtaaagaaacgatctctattagttgcaagatacttggtcatcacatatacttggtatatgtgcaaccagtattaaattctctcggtcttacttatgtttttgactatgcgagacataatatgcgattagactttatctcggtggtatcttctcacaagttctcatcaagcgagattaaccctataagaactatctactaaaacatcatccttgccattaaaaattggatatcaattttatccaaggttgtactcatacttctaaacaaaaaattcacagtataacacttttttttttgtttgaaaaagaggatgttttaaaacctgagataaagaatacaacacaacaagaatcctcaggaaagccaggaaggcaaacagccattccaacaatactcaccatctaatcctaaccctgccctagcacaattgtgagccaatttatt

SEQ ID NO: 170031 - DNA, 509 bp, Cannabis sativa
tggtaaccagatttgacagagtaaattccggagttggttggctcccaaatcaactcgtcactagaaggacggagagggagggggatagcaagaatcgcgtcaataacatgggaaggataatatctcctcaggatagatatgtcccaagtcatggagggggagataaaggcagcgaccttatctggggctgaagaaaaaggggtgatctgtcggaaacctggtatccaatgattctcgatagtggaggtgttctgcccattaccaatcttagaaatcagacctttctgcagcaactcttttccccaacaaatactacgccaaacaaaagaaggcgagtgacctaatgcactatttaggaaagaggagtttggataatatctggcagccaggattttggaaacagttgagtttggttgtttcaagatacgccaagcttgcttagcgaggagagcctgattgaagtgaacaagggagcgaaaaccaagcccaccatcttttttggacctaca

SEQ ID NO: 170032 - DNA, 737 bp, Cannabis sativa
tgtactctgtattccaaaaaatattcctaataaaacggactcgtagagtatgtagattttaagtacaaaaacatgtaaaatatttggtgtttattactattattaaattctatagtgtatttattgctaaaaaggctatttatttagttaatgaaaatttgcattcacaagctttatgaagagactagtaggcagtcatagtggagaactttttgttattagagtctttccaaataagtagatctttagaggtgtgaaaaagcttttagaaatgatgaattttctccaccatgtaaggtttgaaccacaaagatatctcaccccttaaccagtttccttgagagttaagaagactatcaaaagtaacagataaaggaataaccatagtattgaaaatcgcatgcaacaggtcccaatcatctcaaatcagccaaggggaatgccaactatcaatatatctaccagaacctataatgtaacatcctactagtttaggcgtgttatcataattttatattatttgtgtaatccgttgctaatcaacatgtttattgaaaattgtaatttattaaaacttttacttaattactctttaattgaaaatagttatctcttacataactgggatcccgtatttaaaatattatcttaatacaaaattttgatacaaaagttgtcgccgagcgatcaatcaaaatataccctgatatcctaaagatcgtacgctccaagcctaa

SEQ ID NO: 170033 - DNA, 823 bp, Cannabis sativa
tcatccaagtcttgcatcaggaggaagctaacaccgctatcttcgggagagaagatactacaagtcttgcatcgagaggaagcaatcattcaccaagtaatttgaagggagttcaaaccatggtgtcctaaggagatttattcaacaaataagagtacatcaagcttgtggcaaaatcatgagagagagtttaagttttatttaagtcaattactttgtaattgttgaattttgactaataaattttatctctggacatgactccgtgaactaatagcaatctataaaattttttgataccacatataaaatatcacgcatcattttgatttctggacttttattctattgtatcaagttcagtttttgatagagcaaattttgattttgttcaaataattttatcacattaattaaattgtttgttatttttatttggtaatcataaaaatgaaatttcaattatttcattaatatttgactaaaattaattataatgtatatttttattaattaagtctttttgatcctgttaaaataatactgactacttataattggatctgtaatgtagggatagggagtatgttaaatgcacaacatagggaaacattttttcaaacacattattaagagggtaaatactattttggatcctgtattttataaaaattatcaattggattctgtattttgttaaatgataaaatggaccttatatttttcaaaaccgtaaaaataagacactgagctcaattttcaacaattttattttttaatataattaatgttaagacaatttctaatacgaacagatacaaaa

SEQ ID NO: 170034 - DNA, 551 bp, Cannabis sativa
caaccggtcttggacgtcgtagaattggatggcggtgtgggcggacaatcggactcggcggtctcgtgggcctttggcggtgtaaactttgctgtgacggtcctttcggccagttgagcggacaatgtgacctccttggacttgaacaatctctcctccaacacccttcattcccattgatgttgaagaagatggtctatctctgggatttgcattatttgattggttgtgagaattcagtctatgatctaaacctacataagatggtagatgatttgggactagttggagatggtggtgatggttgtagttgtttctactattactcctactactaccactgtctagattttgttcttcttgtgggtgttgtaataataatgggtctaaaatttgtgggataggtcttatttggtggtgcagctgatgattcctctgaaaatccagattcctaactcttttttataattttttattcaggatttggttctttccaagtggtctcttttttggggttttgggtggggaaattctttttcttttcttgtagt

SEQ ID NO: 170035 - DNA, 521 bp, Cannabis sativa
ttccagcgccagtggcggacgtggacgtcgtaacttcacgaatgattaaaatcactttgtcaaaaaaaaaaaaaaatcacaaaaaattctctctaaaaaatattacaataaaattaaattattaaataaatatcacaataaaattaattgaaaacaagatactactaccagtaacaaaaacacatattgaatgtggtctacaaataaaaattattcaacaacttgtcaaaaattaaaaaaaataaaaatgaaaaatagtacgtacatctacgaaacacattagcaactataaaataaacaaatttcagcaaaaaaaaaaataacaataaaatacacactaagatatatagttttgtaataattaaatatgttatatattgaaaaaaactccaccaaatacacaatgacaaacacaaaacaaagtataaaaatgagtaggggtgttcaacaaaatttacaaactttccaaactaaaccgaataaaccgacaaaaaatacaatcagaaataatacaattaaaa

SEQ ID NO: 170036 - DNA, 651 bp, Cannabis sativa
  modified_base (407)..(408): a, c, t, g, unknown or other
taaatcaatcacatttagtacacaacggtataattacatccaaatatatagcaattataaattctatttcaaattatagatgcactccctcacccgttgtatttttaatataattaagaaaaatatttaaaagtattaatagtgcattatttataaccttctattattatttgtgtaattaaatttcgaatctaacaaatataatttaatttaataattatgcaatattcctaatttgaggtggaactatagagctttttggggcaatcacccctaattgtttaattttgataatacacatatacattgaagaattaggcttaattaggatttttgcactctgaactttgacgtgaacaaaattatgccccttgaacttttaaggtcgttaaaaatgcccctgaacnnttgagattgttggatttaatgattttttctaattttagtaaaaaaagtctaacatggatgaaaattcagaaggcataatttagtatatatcaaagttcgaggggcatgatttggtagacatcaaaatcttggcagcatagtttagtacataaacaattaaaatagtaaaattgaataaaattagacaaaaacatttaaatccaataatcttaataattcaagagtatttttaacgactttaaa

SEQ ID NO: 170037 - DNA, 514 bp, Cannabis sativa
  modified_base (466)..(485): a, c, t, g, unknown or other
attccaacagaagcaactccatcattttagctctattcatgaggggagggcaaggctcatcccatttgtcatagttagtgaattcaaagttacgtctggtggagatattgttggttactttcttcattgcttcgtactcactactatgccttttttggtagaactgctccacggcctccaggcatgccttgtctccttccatcatcgacaaaggcctaaaaagaatttaaaaggtgttggaggcaatggaggtaactcagttttcagcgtagaaaattgagtagaggtggctaaaataatctttcatgctgggtggtggaggaggatcttgaatgtcccttgtagttttggtgcttcatctaggcggccttctaccatcagatacattagatccatttcggcactgagcatccacaacctgcctccttgaagctaccaattgtaagaactgttgggttttatgccnnnnnnnnnnnnnnnnnnnntataatcaaatttacttattaatatagat

SEQ ID NO: 170038 - DNA, 1184 bp, Cannabis sativa
gcataaaacccaacagaaagaccttttgattttgagcaagggttgttgacattagtggagagaggtaggtcatgtaagcatattgaacattggtttgtggaaagttggtaagagtagaatgattgtgatgtttttcaaatattgaaatgtaatttgcatttatacattgtttttcaaagaaagtatctgagttaattgttagagtttttggatcaaaattctggtttaacttattgattgaagtttcacaggtggcaacggtagtttgattatttggaggcctgattatctatcagtttgtttgtttgtttacttgtttgtctttagtttttagtcttactcgagggcatgtaagaatctagtttgggggaatatgctaggctatttttagcctaagttttgggtgaccttttgtagttgtttttcttctttcttattacttttggaatagttttacgcttgcttttctctatttcaggttttcgggtttaaaataaaaatttgtcaaatatcaaaaagcggtggcctataaaatagtgaaaattttgtgagaaaataaagctgaaacttcaagcctaaatttgactatattatgtttagatttcgggaaaagtcaagacatagaagctttaaatttcttttttatctttccaatgcatccatatttagcttatttggagttcgtatgtgaaagttatgtgcattttactgagaaaggtcgaagcaaaaaaacgtgttgtcgccgtggtgaggtttttggtggccgcggcgggggactacaaaaacattattttttttcacttttttatacagccatcgcggcaaggctattggctgccacgacattggctccatacgggtcaaggagaacttcgtcttttctccattttggactaaaaaacactattttaatgaaagggggttgcgatttttgatggattaatcaaaattagagacctagaagcaaaggagagacttcaagagaaacgtggaggcaatccgaatgattctgccaatctgtttttctcttctctttatgtttctatgttattttctattttgattttaattttggatttgttaatggagattatgaactaaactcctatttggggagatgatgaatgttgattgacattatatctgttggaatttattttagcaggatcttagatctactcaca

SEQ ID NO: 170039 - DNA, 876 bp, Cannabis sativa
aaaaaaaaaaaaaaaaacttaactctaaaatttaccgaccatgatttcacattatattgaattaatgattttttaggtagaaaataattttttttttaaatcaaatattatatgatgattatttatattttcatataaaattaatcttaaaaatatatggcaagaccagccgttggagatgctttacagccttacacggccaattgcacttgtataatatttgattttgaaattcacacgtgattaagctttatatattttaactcacacttgcacttaatataattttaatcatatttttattgcagtttaatgtatgttgagtacaaagctgaattaaattataaaaaaaaaaaaaaaaactgaaaaaaggtggctaccaaattcatcaacggtggttatctacagtggccagtttggccaccagcttccacagtgtaagtaagcacaattgttaggtagcttatattattgtataaaagtagtctaattatcattctcttctaattctattttatttttgaactctttaatttcatttccttctattttgcatggcttatacatatgattaatgagtcatgctgctctaattataattcaggtccttatattttgttttttctttatttaaatatgagaatgttggcagagtggagggctccaacaaatccactttctccctctctcttttgaacaaatccttaatagtagttctctcttctgaactatggaaaagtagtaaaattgttcatattcatattttaaaaaaacttataggaaaattctacaatacactctcttaaaatagatacattgatgtacttttatctattttagcacccgaaataattttgtagtcaaattttttctcat

SEQ ID NO: 170040 - DNA, 852 bp, Cannabis sativa
gttgacacaaatagctctatggtcacggtacggtgagattaagtaaaataaatattaaaaaacctcaatatttataccacaccatatatataatattaatattttatatattattatagttgtttaatgtaaaatagatatgagttcaaaaaaaaaaatgtaaaatagatatatatttcttgatgataaattacaatattttttttatttttttaagagaattattttatatattatttttttaaaatttataatttgagttgttcctgatttctctggtaatttttaagtgtattgttatatgaattttgagtatgatttaaattggttcgttagttgttattgaaatttttgtgtgaaattcaataaaaatacaaaaaatatattaaatttcacacaaaaatatcagtagctaaaaaaattctttctttatattactagcagtatggccaaaaaactttaatatgtttattgaatttgttttacatttttatttaatatataaaattattaatttaattatagttaatcacattattttgcaccggacataggtacggtgtagtttttttttttgagagataagtaaggtgtagtttgtggttaagaaatataaaattaatcttgcagttaattttttttatttaacagtactttgcgggtttgttaaattttcatcaattctctgcccaactcaaactatcctcgtctctatagttgacaatgaaaattcttccctaaatatatctattctatataaagtgtgcctatataaccgaattcttggtttatgagaaattcatggtgacatcttatttatattaaaaataaaatagtttattattaaaaata

SEQ ID NO: 170041 - DNA, 1056 bp, Cannabis sativa
  modified_base (1023)..(1031): a, c, t, g, unknown or other
aaaaatatattataatatttaaataataatacattaaaaattagtactgatcacaaattaaaaataatagtcaatttttgattagtatggttgaataattaatttaattatttattacatcaagtagagatggtgacaatactagatatagagataacataacaaataatagctaatttcatcagcatgattgaatcacaattagatttttgatagcgtcataagtacttaatattttgattctgtaagtagcataaatttaataatatttttagcggtataagtattaaatatttataaaactgtgatttctctctaattttgtgagtacatagacttcgttattgtcttaaataaggtatatataagatcaaaatttaaattgttgattcgggttaacctaaatttacatctaactttttatatttttcaaatatttatattaaaaaattaataaatttattaaaatttaatgtaattttattatttagttatcataaaataaaatacataatttatttcatatatataatttaattttttttagtatctgccgccaaaagttattggggagttctatttgcagctcgtaaacttataaatataccccattattaaaaaaaaaaatataaacttaaataatttttaaaatttactcttaatatttttttttaattttttttcacattattttatgttaatttcaatacttattttgatttcattttcataattttttctaactcatgtgtatttttatttttatttttttctaagaaaattcatataatatattgttttaatttttttgtcataatatttaaaatatagtttatttttgtttgataggtatagttttttaagaatataaattggaagaaaaaagttaaaaaaagcttagaacaattaaaaataaaattttatataaaataaaaattatcaaaatgggatgacttaagaaatttttgtggtgtaaataaaatttcccaagttatttactagtaggggtgttcataaaatagnnnnnnnnntccaatccaatccgcaaagtgcgga

SEQ ID NO: 170042 - DNA, 749 bp, Cannabis sativa
  modified_base (633)..(656): a, c, t, g, unknown or other
ctatttgtggaggctaggcttcgtgatgaagagtccaagataggaatgaagggttgttgcattgaatcccaatggacatttgtttttctctggtgcgtttctaagtattggcacctttgagtcacacattaattgtggaggtctttgccttgttttataggctctccctttgccttcgattggggtttaagactgttacagtcttctttgattgtctctgcttgatttttactgtgaatggtagatactcaatataatgagtttagtatcttgcttaatgatatttctcatgtttgaaagtaattttattatctcattgtaaaaggtttaagaatattgatgttcattctttagcaaaccatctctttgtatagatgagtctcatatttggtggctcgaaactttctccgaatttatttataatcttttgagcttttttgtattttgagactttttcagactttgtgcctattaagagaattgatccgatttctttaaaaaatataaataaataaattttttaacgcatcattcaaatataattaaaagtattattcattattaattttaaagtgttttttgtgtaaatgtctaagatggctctttttttatttttttagggaaatttacatnnnnnnnnnnnnnnnnnnnnnnnnttacaaaaatactgccagacggtattttttacttttttactgcattttttataagtttcatattgcagtatactgtgttaagtttttactaat

SEQ ID NO: 170043 - DNA, 687 bp, Cannabis sativa
tgttttctgaactgggtttcctcttctgtttaattcaaaattttcagctaatgacctcattgttaaaatcttcttcatttatttctttttggttactgaactgaagcatatcaaaattactggactgttgttggctaatattgtattaaaggattggttgaagctatttatcattgtgaatgcacataaactagaaatttgtccatgaactgattttactaaacaaatgaggagaagaatataagttgatatttgttttgattgaaaagttttgagtgctttcatgatgatgagttcgtcttgtcttggttttgaattgctttgtgacctttttttgtgttgatgttttaattttttgaattgctaattgaaaaatataaaataacaataacaaaaatattaatattaatattaaataaaataaaaataatataacacaacctataaaattaaaaagaacaacataaatgaaataaacaaatcaagaatacagaaatcaaatgaaaatgttagtctcccaatataacactctattatttctttttctgctgtaaaagccacttgttagtgggcaactacctatcagttttctttagttgtgaatctgagaatcaggggagagagcttaagaatgatgaactcagaaatgtaaacccttctttttttctttatttaggatcccttttg

SEQ ID NO: 170044 - DNA, 575 bp, Cannabis sativa
aaaaaaagtaaattaagtaaaaaaatattttaattgactcaattaataccccaattgtactatttttgtgtgtcattataaactttgtcactaaatatttttggtaaagaaattgatatacttttattatgaagaccaaactatcatttattatattactaaatatataaatgctagtttactctattacgtcaaaacaaacaaataaataaataaataatatataatataataaatccaaataaatgcaactgtattaagtgattattttttactcaattttttaatatgtatatcttataaaattttattatatgttgttcctatcccattagaaattaaaataaataaataaataaaggaaaagtgaaatagcaatgtgtttcttgtgtgagaaaatgccaagagaagaaaaagtcattgctctttccttttcaaactagtgggtgtgtatactatatatatgagcaattagaacattctatatatatagtttactaattttgaaaattatataatattattattttgttaataaaataagggtttttttttttatttttgcactttaaagt

SEQ ID NO: 170045 - DNA, 628 bp, Cannabis sativa
tggtgttgcactactagagaaagacaactgggaaatatacttgtgttttagaaacatttttagattgtatggatggtaagatgcctttaactgtgttgactgacaattgtaaatcgatggacaaagtactatctaatgtcatgcctgatgttgtccatcgaatttgctcatggcacatattaaaaaatgcaatgcaccatatacacaaaacaggataatacagatttgaggaaatttattttcaggtatgatttgaattgattattttattttcttattattatgtttagaggagtaaatttaaatgtttttggtattataaaataggtattacaagcttgaagaatgggaatataattggatagagatgctggagaaatatgacttggctaataacaagtggattaaagagcagtacaagtcaatatgtaagtgggcagatacttatcttcgaggtcattattttgatggtgctagagcaacgggtagatgtgagtctataaatgtattattaaaaaaaaacttgcaaaataaaataccattgtggatgtttctacgacattttgaccatgctttgtctatgttacgctacactgaaattaaagagcactacaaaactacgatgaca

SEQ ID NO: 170046 - DNA, 740 bp, Cannabis sativa
ctggtgctgcaatttgttctgctacgtcagctgctagtgtatgatcttgcaaaacagaattaggacgaacaaagctattgtctacgattggataatctgcaataggggtgttagttacatgatcatttggaaaaataaaaggcaagaatggatcaatatttttagcagcattattgagtttgtgaaaaggaaaaacatgttcatgaaaaacaacgtttcgagaaataaaaatctgcttagtgttaagatcatataaccgatagccttttactcctctaggatatcctaaaaacacacaagttcttgcccgaggttcaaacttagttctgtgggaagtaagtgttgaagcaaaggcaagacacccgaaacatctaaaattagtatagtcgggttgtttcttaaaaagaattttataaggagttttgtttgcaagatttggtgtgggcgtgcgattgatcaaaaacacagcagtgagaaggcactcagtccaatattgaatgggaattttggattgaaaaagcaaagctctagccacatttagaagatgttgatgttttctttcagcaacggagttttgttcaggtgtttcaatgcaagaaaagtcatgtaaaatgccatgcttaaagaacaattctttgaaattaagttcaggagcattatcggacctgaaacgtttgaaaacacaattatattgggtttgtatgtaagagataaaatcaggaacaatagtaataacatca

SEQ ID NO: 170047 - DNA, 837 bp, Cannabis sativa
taaaattatttatgctaaacactactgcacaaggcccctatagaggaaaagctttatcccacccaatagaagatgctctgctattcaatcataaaaatatttgaacaacataaaattatttatgctaaacactaattcaatcactaatttaatataaatattaattttctaagatattgatataaattttctagtagtttatttttttttaatattattgttatattgtttcttttataatcaattttataatcaatttaagtataattattgtttaattaatattattttaaattttgaaagcttttgtatgataattcaaaattataaattttcaataattttaagaataagttttgataaaaaaatttgttataattcttccatttaaattcttattaaatttaaaatatattaataaaattaagattaaaaaaagataaaaaagacttacatgtatgagattatttatcctactttactggatggatgggataaataataatagacagatgtgattaggtggattaattatccagctttccaacatacctaaatcaagattggacaaattactctctctaatcaaatctaatcttatgtataagaagaaaaataaataatgatgagtgaataagatgtcaatcagatgtcaaattaagaaaaaatagacaatttgggacaaaaaaaagatgaagagagtaattgaacttcagtagctagtaaaagaaaagaaaaatggctctcggcatatacacatagcaatttaagaagaaaaatcgacattcagagtatattaaaatattggagcacattttcataaatattttagaaagt

SEQ ID NO: 170048 - DNA, 797 bp, Cannabis sativa
cacctccaaaccttcagaagaaataaagcctctgaccttctgacctaggttctctcgttccccatggcgaggaagaaaaaaccaggtcgtcggccgggattgaaggtggcgattgaagcaggttctccggagcagcgtcgggaactggagttggagagtgtagctggatctctcgatagccaggaatctcagatggttcctttgcatccagaccagagcacggttcgggaagaagaggagtctctgccatcagaaaggaaaagttgggctgatgaggttgaaaatctacaatcagcatcgcagaaccattggcaacagttttcaggaggtaaggtgctaaactctgatgcaaaattatcctttacgtaaccagtgattaaggagggtaggaaaatagcccacatagatttggaagaggtgaaattggaagaggaaagctggaaatcagcagttattcatatggtgttgggagcaaacattccagctgtgctcgttgaaggttttattcgtagaatttgggggcacttaggcattgttcaagttgctaaaatgactaaggggctcactatgattaagttcaatgatgaagcaactagagatgaggttcttgagaatggaatgtttcaatttgataagaagcctgttattggtcaaccttggtccgcagatttgaatatgattaggttggtgaaattggttctgttgtcgattgaatttcgcaacaccaaaatgtattatttaattaatataaaggagaattttcagggaagcgacaagtgcgagtattcgacctagaa

SEQ ID NO: 170049 - DNA, 776 bp, Cannabis sativa
ataattccttttaaataaatcatatgcactcaattattgaaagaaaattataaaactagaaggatacataagtgtggctcgaattcaagcacatatggtaattcggtgggatttcatctcaaaattaatcgacaatgacaggagtagctcatacattttatatattgtattatctttccatatattagcaatatgagactctttctaatactccattttcacatttggatttgggaagtgtggatataatatgcaacttttgagaaatttgtacatttttttaaaacaggttaaagaaccaaacactaaaaatttacacacattggtcgaaaggttccaaatagaacggaaattttttaattgttatgatatcatgttagaatttaagataaggtatataagattccatatcaaaaccaattggtaataaaatgtgttcacgctaaaaagtggccaatatcagctcactagattgggaagatgaataatgagtttaagtgattaatttagagcgacacaaaatttatagtaattcactcttcacgtcgtaatagtaatgaagttacatctacttcgagtttttatttctcacgagaattataagaaaattagctaagtctgaaagctctaatttctattttctagagagagatgctctaactttatatatatttttttaaacttaaaacgagctattgaaacttttcttttatagagaatgaggtcctattaaaataataataataataaaagaggatgtttcaatagttacatta

SEQ ID NO: 170050 - DNA, 956 bp, Cannabis sativa
tgtacttgtaaatcgtggcttcaaaccaataaaagagagcttgattgaccaagaaaggtcaagaaagtaggagtattcttggtgcaagtgatatgagttgtaattgtattttttatactatataatttagtgttaataatttgtgcagtataagcgatttgatgaacacccgaaaaagttatttttctataaaaaatcaagctcacccacccatagtgccttgtaaaactgaatagacaaagaaagtatctttcttataaaatatgaataaactccgttttaagtcaacattttaagtattttgacaatgttaaactaaaaaacaatatactaatttttattttatttgtaattatggcataggtttgataatttagagatataggtgtaaaaatggggtttgatggttgaatataaaactcactttaacgtgtcattcctatcactttgaattcgctgttgttatgatctacatcgaagcaaccgacaaataataggataataccgtaaattaatgccaacttgtaccaaatattacaacaccttataagaaactccacatattaatttattataattaattaaaaacaaattttattaaaataaaaaaaaaaaaatgagaaaatgacatctcctaatttagaaaacaaaacacttaactcatttgtagttgtaaaacattaataccatttagccaaaaaaaccttaccatttcttctcaaaagaaaaaaaaatggaagaaaccaaagctcatcaacttcatgtcttcttcttccctttcatggctcaaggccacacaatgccaaccatggacatggccaagctcttcgcttcaagagggctaaaagccaccattgttacaacctcttactacgcacaaaacttttctaaaacaatcgagaaaagcagagcctttttaggcacacaagtcaaagtccttacaatcaaaatccctt

SEQ ID NO: 170051 - DNA, 910 bp, Cannabis sativa
agacctagcctcagccccgaactcgagccttgacctggaccctgtccctaaactctagaccctgatctcgacctgattcgtggacccggactcagaccttgaccctaacccagccctaggccttggactccgaaccacgacccaaacctagactcgcccccgaacccgaaagagataagtcagagttggagtcaagtttatggtaaagataatatgattttatacaagttattaaagtcaataccaaacatagtattgtcttacataatattaatacaatacaatataatctaacacaatacaatacaacacgaccaacccacgagctattacaattttttatattgatcaacatcgatatttcaactaatttattcccttaaatgatgagtaattccaaaactcaagtggcaaatgattaaacaagcttataacagatacaataatatagataatcaacaatagaattattagcgtttctacattgatgtttacaatccaattaatacttttcatcacatatatataatcctctttttatttagttcattcattattaattatttataataaaagcaaagtctcaaccctaactctacttcattcttttttggtgagcttgaaacgatccaagggcttagttccttcattgcatttttcactaaaataagaaatatactcttgcactgtggtttctctatactttggaggatcattctctgataacaattccttgatgggtccatataatttggaggttggatttacatatttggcaaagaagcatgcaatagaaattctaggaccctcatgactcgctagaactcggtgttcaacacttttgaatctatcatttgttataagctgcaaaacgtaacaaaaaataaaattattaataatttgatcgcat

SEQ ID NO: 170052 - DNA, 740 bp, Cannabis sativa
  modified_base (683)..(709): a, c, t, g, unknown or other
gagtctaaggcggaaactcctcacaccaggaaaatcgaaagtctgtcacatgacgagagtcagacgcacttatgacggttatacttttctgacacaggatcaaatcttgtcccctgtgtcaaacgatagtggtgcgcacacctcctctgaatactatacttaatttgtttgatggctcctttggggtttttttctaccaagtgcaaactttgtcccaacacgtgccttgcaccaacaatagtccccactgtacgaactcttcgcctcacgagaaagaaccctcttgggggcccaatagttagatgtttatgtattttaccccaatagtaagtagccttttgtaaaaaaccctaggcggttatccaacaacatttccctagcttcaatattgcgtcttattgtcttgaagctattcaattgatccatagcaaggaggatgggtgcagagattagggttgtacataaaattttggaaacagcccaacccgaacaacctgcccaaaccaaaccgagataacctaacgaaaaatatatatcaaaaaactcgacgaaaatatatctttatattggacgagttaaaaataataccaacccgcccaatcaagccctaacccgaccaatccaatcaagagcgtttatatatatatatatatatgtatttattatacagtagaacctctatnnnnnnnnnnnnnnnnnnnnnnnnnnntctaatttgttataaaaaaataaagtcccaa

SEQ ID NO: 170053 - DNA, 572 bp, Cannabis sativa
cagagatgctatccgtctcatgtggttgaggacatcatttccattccccttcctctcactccttctagagatgaactgatttggaagtcttcaaaatctggtgtttactcggtcagattgggttatcaccttagcttttcttctactaccccacctgatatcccctcttcttcttcccttttgccttggtggaaaaatttgtggcatcttacaatccccgccaaggtgaaacactttaccgtgccacaaactcaacccttcccactgccaaaaacctagcctataggaaaatcattcagtctccggtctgtgaccgttgtggaaacctggaagaatctgtgtcacatgcgctgttctactgtaagagcattcgaagagtctgaaaaggtacgcaattttatccttacattttctcttgctcttctgaggttatgtttcatgatatagctcatatgatatacacatctttaaccaaagaagatgtagaattttttctttgtactgcttggtttatctggtttaacaggaacaaagctctaaaaggacaagcacatgatcaggcccatgccatt

SEQ ID NO: 170054 - DNA, 568 bp, Cannabis sativa
aattgagtttaatcccaacactaatttattctatttatataatttgtaaatgaaattttattatctaattttttttagagcatatttgaagcctttagatgctcctcttttaatatatatatatatatatacatatatttataaatatatatattaaccattaatgggtatagttatatataaaaaacgacggtgaactaatacaaatttatcaatcacataggatcttcttatttttcatgtatcttatctcatcttttacttttttttaaaaaatgaggaataattgaggccacaatttattctctattagtcaagattataataaatacaaatttaaattagttatcattagcagaccgattactgtccgaacacttctcaattgataatactcatcaatgggtatttaaaaaaagaatgatgtggtaatatgttgattacctatagcaagttaccaataagtattttattaaaaaatattttttatatttaataataggaaataataattcttaaaattaaaagttatttttagaaacttacttattttatttaaattactact

SEQ ID NO: 170055 - DNA, 2302 bp, Cannabis sativa
gacccgcacctgggacccaaacttagaccaggagttgaaccaagactgggatccgtacctggacccagacccaaacccggacccagactcgaactaggctcatcccccaaccaaaactttgacccaaacccgaacccaaacactcaatccaaatctaaactgggactaggacccaaacccgaatatggacccagaccaggacctaggacccgaacttggatgggggacttggacgtgggccttagaacctagaccaagatcagatgtcgggacatggacgcgaacccgaacttggacctagactaggatctaggagtcgcactaggatgggggacctagaccagggacgtaggccttggaacaagacccaaatctaaatccaggactcgaacctcaaccatgacctgacctggaatcgggaatccgaagtcggaccaagacccggacccaaaaccttcctcggacccaaactaggacaggaacgtagacatgaacccatactaggaccaaacccaaactcagacccagacccaaacctagacctgcacccagacccgaagtcgaacacatactgggattggaagccaagacttagaccctgactaaacccagactcagatcgagattgaaacctgggacttggacccgaacctggacccagacccaggaccctaacccacacttggagcccgatctgaacctagaccaatatccggacccgattccaaactaggaccaggactcgagccccaacccgaactcgaacccaaactcgaattcataattgaaactagagctggaatgggactaggactaggaccaagacaaggactaggacctacacccgaactcaaacccaaataaaaacccagactgagacccaaacccaaaccgcgacttggacgcaaacccgaacctagaccaggacccaaacccatactagaactgggacttggaaccagaatcgggatagggacctgggcatttggacaaggatcgggactcgggtcccggacttcaaactagaacccagctcgtgatccgagacccgaaatggaaccatagcaggactcgagatcggtgtcttgatctgggagccagcccagagctccacctagaccaggtccggaacccatacccaaactcaaacccagtcccagcccaaacctagacccgaacacttaccctgtgacccaaaattggaacttaaactagaagtatagcagcacccgagaacgggaccagaaccagaactttgacctagacctgaaactgtaactagacctgcacgtagactcgaaaccgtaatccgaccaggaccacgactctaacctagacctagactcgaacttggacccggacccagatcccaacctagacctagactgattgtcgaacttggactcgaactcaggcccaaacatggaacaagattcgggacacaaaatttgggtcgagacctagaattgcactccagtctcggtcctgaacccaaactcggacctgggactcgggacttgaaccagaactagaccaggatacgtgacagggatccagatttgggactcagaccaggacccaaacccagaccccgaccaaaactcggtacctgaaattggaacttgaataagaatcgcaagactaggcccctcgaacaagacaaggaccgtgaccaggacccgaacccagacctagaaccgaactcggacctagtcctagtcccaaactgagagcggaacttgggcccatacacggtcgtgtacccagaccgggatccagacccgaacccaaactcggactcggacccgaacctggacccggatctgaacctagacctgggacgcgatcccaaacctagactcagacctagatagggatcctgatacaaacctaaactcgaaccgagacctggacccacaccgggatcaaaactcgggacctagatccggaccgagaccttgacccatacctagacctagacccacacatgagagccgagctccgacctagacctggacctgaatccatacccaaataaggatctagacctggatctagacccgaacccaaactccaaccaggactcagccccaaacccgaacccagacactaaatcgaaatcgatattgggactaggacccaaacccgaacatggacccagcccgagacctacgactcggaccttgatggggacctggacctgggctgtaacgccctgactctcaggaacgccacgtgtgtgcttttataacttaatattattaatctataatttttagaaaagtgtggtttaatttaaatc

SEQ ID NO: 170056 - DNA, 1032 bp, Cannabis sativa
tatatcagtaactgaatttgattacagattttgaataataaaatatgatttaattaatggagaattaactactataaatgaagcctgattttagacactagaaaataatttttcacatgttattttcaaaataccaaggagaaaataaaaactgtttttctttgagaattaatcaagaacaaaattatacactttattctaatagcccacattattctttgtgtgtgctgcatcgatttggaagattgcgatgtgagtttttaatcaaccaaaaggattcaatttacgagaaattttgaggatatcctgatagtcatcaagaggtacatattattttcatgtaatttatgtttttatttaatgtttatacatctggagatatattaggctatggtacaatgataattaaatttacgaatatttcgctgcgtacttgatttagtaccataaaactaccataacatatatttgtcacattttaatctatattatattattgaataatataacactctctgtttaatctaagtctctaacgacccccattccccatttttttctcgacagtggttgttcatctcgatccttaggtgaaattgcttctccttgtcatgcaggttctaataacctaggccccaatattatttccttcaactgctctggtctgagaccaattacataaggactaggctcttcctttcagtccaatatatgtaatttaaatgtgtcacaatcattattcattatatataggaccacataattttctttacatcatgtgtagatagtgtatacatttttttatagggaagatactgtagaggtgttcgcggtacaggtggtgagagttgtgatatttttttcaaaccaaaccgcatatgtgcattttttgtaatttctcaaactgcaaccgcatcacgagatcttaaacccgcaaaaactgtactgtgaaaatatggtatagtgtgatgcgatttgagcaatttacactatcatcattatcaaatattataattaaaattttaaaatcaa

SEQ ID NO: 170057 - DNA, 604 bp, Cannabis sativa
atatgatgttcggattgtccactgttcgactgggaggacctcgtccgtataggtatacacggcgctcgactcggaacatctcctttgggcagatatggggaatcacttccacgtgttaccaacatgtgatgccacgtcagagtgcgaaaattgggataactgatattgactcggataggtacctacagaagttctaaaaatatatataacttaagtattattaccgtaaaaattaaacttgtattcgaaaattaaatttaaatatttatgctacaaattaatcttatgaaaaatctcccatatgttcatacattacttagacttaataaattttaattgaagtggccttaaattggacttttcttttcaatatactattcaatgtgagtgtcacattatttgatagtaaataaattaggataatgcttaatagcggtcttaaaataattttatagtcatttttttgaaatagatgtcattgttttattttattttcatatttaattttatttctttaattagttattttttataattttgaaaaatcttctaagtcaagcacacttaactgtggagttctttcgtgatgggctactgaaaaaca

SEQ ID NO: 170058 - DNA, 954 bp, Cannabis sativa
cttaaaatatctattcaaacaaaagttaattaactattcaaaaatttcatgttattttaaaaaaatataaattatattttagataaatatcttaataagatataatgtcaaataattaacatttacttaatcttataatttaaaataataaaatatatttaaaaataacaagtttttgaaattttgatatttatggttagcaatttgaatttatagattattttaaattttattaatattttaatgttaaaagaagaccatttcattttatcaataaaatatgtaaatatttaattttataattaaaattaataaatcaaaataaaataatcaaatttcaaaataccaataatggcaagtttgttaagaaatcaattttttaaatttaaagcttaataatatctaaaactaatttaatttaataataaaattaataaaaattaattttaatctaataattaaatttttatttgaaagataagattctacacaaaattttatcaaaatttgaattttatttcattgaaaaataatttttaagagttgaaaaatggtaaaaatggtgaagtcaagggagttataagtactgcatactccccccgcacgcgaaataggcctccagccgagaaaccaggctccaatgtagcctccttgatcgaggtttctcggtcagatgcagcctcggataggatcttttctgagaaatctcgaacatggccttatctgaatccgtgttcgactaagctgcactcggatccgcgtgcgcacgtgggtgaaaatcctagccaagattttctccaacttccaaaaatcataactaattcaatttaaatccaaattgagttctgtaaaagtctaaattgattaattttccaccaaatttctaaaaaaaatacttctagaacgaaatttaaaatattttttgtagaaaaattgtaattaatattcaatcat

SEQ ID NO: 170059 - DNA, 588 bp, Cannabis sativa
tttataattttactgttacacgcaacttttaacaataatagtgtgtttttataaaataaccttaaaataacaactaaaaaataaccgtagaacaatagtaaaaaattaacacagtacacagtattttttaaaaaaattccattccacaattaaaaaaataaaaaaaattgaaatttaaaatcccaattctatttcatctccctttttcttaaatttcaacatgttttggtgaaaggtcttatgttaggcccagtggggccaacgtgatgctaggattgggcttccgccggcaacctttttgcccttaaactgaaacacatggtgccggcagcatggtacttttgggcccaggaaaggcctttcataatgggccccaccataagtcttttttgtctattctctaaccgaataacaaacatttaaaattagtctttgcctcggatccgaaccaaatgtttgaatattagaactttggagggaaacaacttacttatttgacaagggaaatttgattttttatgcttacatattcttgaaatttttcccttaaactcataatatttgatatttgtgggatatgaaacattt

SEQ ID NO: 170060 - DNA, 707 bp, Cannabis sativa
gtcagccagtttgtcacctgctcgtgttatgttggtcgcagcttctgctcgaccaggagcctcggccaacatacacaccaccactagtgtcatcacttgaaagagtggtactacattaagcttattaccagccattttgtgttgttgttgtaatgaagttgtttggtgatgtgaaaaactaatgagcatatatagttgctcttggtcaattgtcaaacactgtacagatcaagttgatacgattgaatctttgtctcaatgtgcctaagtaaaagaaaagattaattcaaagtgtagtattaagtttatttcacttttgtgtgttaattttctctttttaagttttgtatttttgtgatttgaaaaatcttggtattgaatggagttataaaatccaaaagggccttcccaacttttgtggaaaaatttagttacgtaagtgtttaactagctatacatagttatagataataaggttaatcttttttctttggctgtagataataaggttaatctaatcttaggtcaagacaaccgaggaaaagtatttaataataatatgggtgagatgtaaaatagttctaatttttttttttaataatatgtgatgatgtaaaaattaaaggtgcgtttggtaatatttttttaattaagtttttgtttttaaaattagaaaagtaaatatattttctaaaatcatgttctat

SEQ ID NO: 170061 - DNA, 1329 bp, Cannabis sativa
  modified_base (1260)..(1286): a, c, t, g, unknown or other
gattaccatcgatatatggtgactttgtttgcgatatattgcgatttattttacgatattttggaacactttttttttatgtgttttaataatagtttctctttttttgtcataaattttgcagatggctcctgaacttaagctgctagtgaccgagtatttcacaggccatcgaacttattggggctcaaataggtttaaagatattaaagccaagtttgaagcaatgatattgactgaaaaggttttggtcagccctttcagaccattctaggaagctggagaagtagctttcccgggcacattggtccacagcctactcctgcagaagataaaagttgaaacagagaaggaagatgagatatggttttatgttggtaaaaatgacatgagattcgggcagcttgagtttggattgattactggcttacctatgggtagtggccctacagaggaagagatagaagccaagttcagtgaccatttagtgaggatgtattttgaagggaagagtggtgtgtagttggacacactattgctccaattggagagatgtgatgtagtagaagatgtgtacaggcttgatcttatcgcttttattaagggtgtattggtttcaaaagaaggaaatgtccaagtttggccagagatgttgaaatttgttaaggacctcgaattcttcttcaaaaatctgtggggtgagcgtgctttttgaaagttgatgtggtctatgagtaaggacatgacacgttacaagaagaacgttgataagaaaaagagcaagaagattgctcaggaggcaaagtataccgtacatggctatgtacctgccatacaatattgagcagatgaagccataaagaaagtgggaaagaagtatgctgattgtagtggcactaggttccctcgaatgataaatttaaaaaccaaggagggccagcggaaacaagacttgaaggcaattgacattgcacaactgtaaccaaagggtaagtcctaattttttttttcattttgatattttaatacattttgagtttttgtttttgctaaaactaacatttttaatttttttaattttagttatttataaagaagtgcttgtgccctcgacccagtgaagcgaagtacttcaagtccatcaatgagggtgaacctcctctttgttttgagatggacgttgatgtgacggtggacagtgatggacaaccataaaggagcaaatgcctgttggggattattttaccaagatctagattnnnnnnnnnnnnnnnnnnnnnnnnnnntaaatatgaatttctaaaataatggaatttaaacacatataaa

SEQ ID NO: 170062 - DNA, 640 bp, Cannabis sativa
aacctctttcctatttcattaaatcgtacacgtaaataatttataacatcgatctctcacatataatttggttcaagaatatcaagactcaagaacctattaagtaggagtacttaaagtctttacattcacaatttatataagtctatagaattcacttgcatattttggttttacattcacaaaagttttttttttcttatatgttgacgtgttgtaattatttagagcaatttataaattataaaaaattttcaaataatttataatactaaaaataaaatttaaatattttgtattattgttttttattatatgtagtaagtaactgaattttatttttaatgtcttaaataactaaacataaaaatggattaaaaaattcttataaatactaaaataaataggattgtacagaaaaggtttgtataacattaaaatttatataactgaaatcgtaactaattattcacattgaataactagtaaagaaaatagaaaaacagcaggggatttttccaagtattaatcgaacacaataatgctgccaaatatataataattgtgtaaggaggaggttctaatggttacatttttattgtaaccatcatggttacgttttttttagccattggatcag

SEQ ID NO: 170063 - DNA, 831 bp, Cannabis sativa
  modified_base (385)..(396): a, c, t, g, unknown or other
tttttttttttttgtgttagatcatattataatgaattgttttttaatttaaaagaaactttttattactagtcatttttaagacgctatttcaagatgtgaataggatgttcatttattaaagatgatatttataagtaaaatgctaattacattctcctattacaaccttttagttaattttcacgtccgaaattacatgccgatatattatttttaaaatttttttatattatagttacaaatattatccctgtaaatttttaaaaaattccgaatagtttacagtaccgaaaaacagagttcctaatattccagttaattaccacgtgcgttcaaaaaatttcaaatgtattttcagtactgtaaattattcgaaattttnnnnnnnnnnnnagggatgatgttgtaagcataacaaacacccacgttaaaaaaatttgagaaaaatatatcctgacatatgttttcggacgtgaaaattgattaagaggttgtaaaaaaggttgagggtagtattcctctatttataattaattaacaaattgttaactttgctttaatagttaaaataatttaggtgtacctttcaaaatgatacgttatttgtgtttaaaatatatataatatttaggtacatatatgctgttataaattttattttagtgataacaaatattatcactaaaaatatatttaatcacaataaattgtaatttttgttactaatatttttaactatgtacaaattttttaatcacaatataagaataaataataatttataattagtcataatttttttactttttactacaaaaaatcttactt

SEQ ID NO: 170064 - DNA, 594 bp, Cannabis sativa
tatatatatatatatattaactacataatatatttttttgaaaaggacataatattatatttagtaaatatttaagtgaacgtacgtgtacatttttttacaagttgaaatctattattagtgattgtattatcattggttgtttgaaaattttataataacattattatttattaaaatattttatgataggtgtgaactgctcgcactacatttcaccgtaaaatgatgcagtaatcactggcactattaataccattcacaaatttaatttaataattaaatataaaaaagattataagtttttttttttataaaaagcatttttagattagtactataaattaaattttatggtcattacataagatattattcgatatatcgagaagattgactatactaattacattcttgacgaaagtttactaaaattataagttatttgtagagcgcaaccagggtcggctctaggcataggtgggctaggcccgtacgtgcctagggccaggggcggagctaggactaaatattagggggggccaataacaagcaacacgtgcaaaaataaggcttcatgtttataaattttag

SEQ ID NO: 170065 - DNA, 502 bp, Cannabis sativa
tttcttaagtaggttagtgccttggtggcattctttgttttggcccatgatatgttggccattactgagcatgatctttgcaaggatcggtgcatcgcctatgccccataggtggttgagcatgtagtgcattaccatgggaggtggattgccttggttcttgcagagtggtaccaattgatagatcggggtaccttataggtgacagtggtgctcaaattagagaaggtttctctctcctttcttctccacccatgtcattattctcacgattaggcattagaggaacaactttgatctcatggactttatgaccaccttcagtaatggtacatgggtttcttgtgcgtgtcttgcatgaattctaacatttggtaaaggttggtggtccccccttgttggattattcataggggcaagttctctccttgggcgctcccttcttctcctagggggagaaggatctcttggtacaggaggttggtctccatgcctttgggct

SEQ ID NO: 170066 - DNA, 971 bp, Cannabis sativa
ttaataatttttaaagatacttaccaatatattttaaaataaaaatgtcaaaaatattttaaaaaaactataaaaaatgaaatattacatttttaacgaagtgttaccattagagataatcttatatataatttatatatataaccaattaatggaagatatcagtattaaaggtgttaaaacttttcatatcatctaaaaatataatattttattttatttttctttcatattatttgttttaatcataaattgaataatattattttatttttatttaatatattttttttattttttttttaagaaaaaaaaatcatcaattgtatagcatgatcaatataaatttctaagatagcatttattttaatccaatggtataatacacttatattttgccaattataaactatcgacttaaataagtattctttaaaatttaacaattagagatgcgggtaaagataagccgagacagagaattgaatacgtaattaattctataattggcccgggcgcggatgttattggatttttcttatatactgtatacatggtacatgagtacttactttggctttgaggaattcatttggtgctttcattttctctttccatcgtgcttattttctcataaaatattattaattacagaataaaactagtggtagagatgggagtgcaaatggaggctgcgccagcttcaagttaaagaatacatattttattgtttagaaaaattagcatatggcgtataaattaaaaatgtgcatgtcaataattacgttaattaatctaatttagcggataatatatataaagagaagatacgtaccgtgaaaaagaaaagaaaaaaaaaacactgataatattaagcatgtaaaggtacacgtacgatgacgcaatttgaaagttgcggctcctgtcaatggatcgatcttctcctttattaagattctatatatatggaa

SEQ ID NO: 170067 - DNA, 540 bp, Cannabis sativa
  modified_base (493)..(504): a, c, t, g, unknown or other
tatatttttgagtttaaatttttttgtttctttggaatattgaatttcaaaatgtattccaatacactcggagatatatcacaacaaaaaataatacttttcataataccaaaaaatattataaaaacattattaagttgtgttattaaaagtagtgacactttttatatattaattaaatattattgaaatttttttataatagtatttttataatattttaataagtttaaataaatattatctttgttaattttcacaatatattttcttactaattgaatactctataattatacattttatgtaatattcatcactaagtttaaagtatagttattaatgttttaatttttaaaaatacatttttcaatactgctcttctaacacacaaatgtcatctgaacccaacaaacccactcctaatttaaatgcacatttcaataggaatgggaatgggaataagaataagaatggaatggaataaaatttnnnnnnnnnnnnaaaaattgataaaaaaataattaatttttttttctt

SEQ ID NO: 170068 - DNA, 663 bp, Cannabis sativa
agagttgtgaaaacagttcacactaccaacaaagaacagatagcagacatatgtaccaaagctgttcttcctaaccaattccaagttctcaaagcaagatgggaatttgctatgtatacactccaccttaaaggggggagggggagagtatcaagattagtcagttgtaaggtgttgtgtaatgttgagttagttaggaagttagttagtgttagttattttctattattgttggtctggactgtatataagaacaaactgtattgagctgcattgatgaatgagaattcatttttcattcattttcgtactctttttctctcccttttacaactaaaataatctaattctaactttacagttgtcaaaatccacaattaaattctgattaatcaaattcaggtctggctattccaccaatgactccaaacataagattactcttcaattatcctaagaaaaataaagtcacattaatcttacagttcaaagaattaatttgagactaataacacatagagaaccatatctatcgacctgataagtacatcagtatccttgggagaaagtactttacatatatatatactaggtgaatgtacgtgccgagccacgtattgctagtttcatttaagattttggtctttttaagattttgaatat

SEQ ID NO: 170069 - DNA, 803 bp, Cannabis sativa
aaaaaatcattactaactacgtggccaaaattaagaaggttccatgtgtttttcttatttactccccacctaacattatttttaaatgatatattattaatttattcagtatataaaacttatataattagttaaaataatctattgataagtactaagaaaattttagtttaatttaaattattatgagctatactgatgtatcaataatatttttagtgaaaaacagctcaactttgtggcaagtattataatgaaagagatgctaacattaatttaattattttgctatataattaattaagcatgcccatgtgattagagtcaacttattgcttataattataacttgagtttatgataaatattatctattaattaataatgaataatttttttttttttaattatcatgtgaatgggggaatgtttctattcgattctcattgtttgttttttttttttttttggtcttattaattgatttttattcatttatatataaagaagaagaatcaattgtttttaattttgcacaatgattaattgagtcaattctaattgaaactcaatgtatttagaacaaaaacttccacacataaatcttaagttatattatatatatatatatatgtcttatatattcagattaaaatgaatatatgtttatcaaattaaattatctaattctaaaaaaaaaatcttacttttaatcaaaacaaatattataaataaaagtagaaaagctataactaattataaatataaatcaatattcgtatgttgtgactaaaaagttcgtg

SEQ ID NO: 170070 - DNA, 512 bp, Cannabis sativa
  modified_base (466)..(486): a, c, t, g, unknown or other
ctcaatgacaaatactaaaaggacaatgatgccttcaatggtggtgatttagacagtaggagtcaagaattggttttggctggaatagtggttgatttgactagaatgtttattaattcatttgaggcatcaaacatggtgaaaaaggagaagataacaactttctattcactagtgggatttgagcggtccgagagggaccaccacaactcctctcttcttaatacacacaaaaagaaaaaaaaaattctctaacaattcatttcgatattgattgaaaattttcgttcgaacaagttgaaaatgggtatataagattacaagaatcgacataaaaggaaacaaatcaaagaataaagaagaaataatctctttccttactacaaaagcataaccacatcaagtgaaacaagggatatgatttcagttagatggattgttgtgagtaggggtgttcatccgatcnnnnnnnnnnnnnnnnnnnnnaacaacatccaatccgcactaagtgc

SEQ ID NO: 170071 - DNA, 522 bp, Cannabis sativa
aaaaatataaatttaggcataatatggtaagatgttacaaattgatataataacatgatacgaacaatatgaatttgacaacaaaatggcacaaaaaagtataagcttaagcacaatacactcaaaaagcataacatatgcacacataatctaccctataagtgcaacatgttaaatatcttataataataataataataataataataattcaaatatttattcaagtttaaataattctaataagaatttgagcctcctatattttatagcatgacacaacattttgtattttttttggcatgacaatgctacgatacaattagtatatttctatataatgacacgacacaacctgtatttttttatgaaactacaagtatttacaacactagtttaatttagaagagaaattgaactatacccatttttttatatattaactaaattttcctctaaaaaaaattaattcaaataactttttttatgaatattgtacctaaattatcctcacacactcac

SEQ ID NO: 170072 - DNA, 1000 bp, Cannabis sativa
  modified_base (952)..(954): a, c, t, g, unknown or other
atcattattttaccaaactttactaaaataacatgcaaataatgtttttttaatagaaaataaaatagataaaaaatttgtaaaaaaaaaaaataaaaacagtaaaaatgtaaagaaaaaaactataaaaaaatctagatttaagtatattagcaaatttaagatataaaggccttattgcttttatactttgagggtaaggttcaacccgacccatgagtccaaaatatcaatataatatatatatatggtatttttttatttattaatttgtttattaaaattaaattaataaattaaaaattttataaaaattaaaaaaaaaaaaagaaaactttttaataatgtgttgttcaaaattaaaaaagaaacttttttatttgtttgaatttttaagtttagataaatatcaacacagatacgaagagtagtccttctccgttacctttactaatctacaataaaaaggtgaacacattttacaaaacaaaaaacgaagatttaattcaaatgatgattaaaatttcctcatatattattagcattaaactagaataaactaaacaagagactgaaaataataatgggttcaactacagaagattttcaaagtgattttaatacttcatcaccttagaaaagctaagttaattaatgttcaaaactaagcgaaaaaacataaatccaaataatgcatatcagaattctctctcttttggagcgtcttcggttttgagattcttaaaaacggtaaaagttgatgtgaaaaaatcgaagatcaccatttgatgaattgctccgcaatcatcttcaatccctcaaatttttttaccattatcggatcagcttcagcttcatgatcttcattgatcatcactaaatgatgatcatgattatgatcgtgttgttgttgttgttgttgttgttcatgttgttgttgttgttgttgttnnngttgttgttgtttttgttgtttttgttcatgttgttgtttttttat

SEQ ID NO: 170073 - DNA, 741 bp, Cannabis sativa
atataattagtagtataatagtagctaatttaattacacttttttcaacaaaagagaaacgctaaaaggtaactattatgtcaagcaacttcaccaggtgacatatttttattggtagagttgtatatcaggtcgatctattttactttaataataattataaggctatttaaaatttttgcctcttaaactatgacatgtgcattattgtattcttggactttctagcctattacatatggaccctgaactattatgtaaattagtcattttgttaagttttgattatatgtggcaaataaaataatgacatagttgtttatccaattgacacattagcgctatgtgtataatttaacattaaaatataaaattatgcatttaaaaaaatcattaaactaaaaattaattattgattaacaaaaatacgtaaaactaataaaaaaaattaaattatttttttaaaattaattacacacgtagtgttgacatgacattaacatgacaactgattaagccgccacatcatcatcacaaaaatattaagtaccgctaatacttaataacaatattacagtcaacaaaaagagtagtggctttattgtaggggccactttaacccaaagcaaaggttgttcaaatagtgagatatggtccaatcaaagaaaacccaactcaactcacaacatgtctttctgatctttctaattaacccttgatcagtggagatcatgttgctat

SEQ ID NO: 170074 - DNA, 802 bp, Cannabis sativa
tgtggctagggagaagcgaaacccaaaaaaatgttttttaattttgccaaaatcgaattttgttgaatatgcattattcggtcaaatgaccaaattaccccttagacacacttataagcatattcacatcaaaggaccatttttccatttccactcacacacataaatcatatatttctattaaacatataaaagccataataaaatcccaaaaatatattgtgggccctaaacccagttcggcccaaaatactctgttgtgactataccgtatcgacttgtcagaaaacacatgtagaaaaacaaaataaatatactatataataatatagtctataagcacaatataccataacattataattttacccatcctgtgtcaaaattataaaaataccttgacacaccaacaatggtcttaaaatgaaataaccactactacaaaaatagattttcccgacgcttttaaacagtcatttaaagtattttcgacagtttctataactgtcgcctattcagccgtcgtaaattgagcaaaataggcgacggtttaaaactgtcgctaaattgggattcccgacggtttaaacttgtcgcctgtaactgggtataggcgacggtttagaaccgtgcctaatactattcggccgtcgtaagttgggcaaaataggcgacgtttcaatactgtcgctaaattgggattccccatggttttagctgtgccttatatgctggttacgtttttgaattttttttagcgacggtttttttcggtcggtacatttgaaaaataggaaaaaaa

SEQ ID NO: 170075 - DNA, 564 bp, Cannabis sativa
gaaacttgttaaagcaacctcgtccaataatccatgatgagaacaaacaagagcggagacataggatctccttgacgaagattcttttcccctttaaaagcaccttaaattctctcattcatcataagaaaataagtagtacccttttagataaactattatccaatctataagctgagaggggaaacgcaaccccttaagtaattcatgaacaaagttccaatccattatgtcatacgctttgctaagatcaattttcatcaaatatctagctgaaatatttttcctagtgtatcccttaagaagatcttgaaatataaggatagcatgcgtcgttaatctatttttaataaaagcaccctggttaggatgaattaagtaagggagcacttcttaaagcctcacacataacattttcactgcaaagacagactatcattcttaggaattaaagaaagggaatttcaattaatatacttactaatacctataattttttttcctaaatgcaaagttattaaaattggccatgtatgaccacttttccaattttcctaaactacc

SEQ ID NO: 170076 - DNA, 628 bp, Cannabis sativa
aggtggaggagagtgcattgcctagacttggctatttgcgtatttgcgattgctggggattgaggagagttccagatggagtaaggaacattgttacactcaatgagataatgatagaaagaatgcctaagaaattcaaagaaaggatggagcaaggaggagatgatttctacaaagtcaaccacgtgccatcacttgtatttatcaaatgtgataaatggtacatacatatctaatcatctatcttgtgtttctattacattccctttttctatttatgacttgtttactcatacattttctttattggcattactatgaatgaatgcagattctgaggatgactaaatctatacaatcaaatcaacatttggaggacacaatgcagattgagagtgaatgttgattgaataataaatgttgtggcttttttgtttgtacaattgaatcatatttggattgtgttgttgtgtgtcttaaatacttttgtgacacttttcaatataaaataaacatatcgaaactatcgatatgctaattattattctctttctcaatgtgaatgacagattataaaaataaacataactcttttcagatcttttaggtcctaaatcacatgttatct

SEQ ID NO: 170077 - DNA, 593 bp, Cannabis sativa
aagtaagtattgatcttaatttctctcacaacctaaagaatgtaccatttggagtatgctgactttatttcaaatttgttagcctccacggcaggtggtcttatacatgactgtaccccgtcaatgttagaagaacatagtcccttaaactacggtcaggtggattacggccgtttgcctggtcttctacgacacccccattattactattgttgttgtcattggctttgttagccatgactacttcttgttcaactctcactacactcctttcttgcctctcgtttcttctatttcttctacaagtcttctcaatttcaggatcaacaggtactattacattttgtccttgaagtcaaataaaccccaaatgcctgaaatagagtaagaaaaattgaaaagaaataggttagcaataagcagaaagaattaaccaaagtagaatttaatctaattattgtaatatcaatacttaattaattccccaacaatagcgccaaaaactaggggtgtacgtcggtcggattggtcggatcatagcatatttttaccaacccaatataaatattgagttacaaatatctaattgtaac

SEQ ID NO: 170078 - DNA, 574 bp, Cannabis sativa
tagaaaagtgagaattggcatttatttatttggagagaatagagatcagacattttagctgatatttggagtgaatgttgtttgataattgaaggtgccaatagagcagcagatggatgcgattgattggctccatgcccaagaccagcttcttccttgctgttttttctctggtcgaagcccaaacgaaagttacaatctttttattgaaaatagcaaaaacaatcaaaatagttgtaactctaacttggtgagtgttgccggagtgggttccgctgtctttttcagacatcttcatcctttttcatataacgactggaaatccataaagaggtatgttcctcattagtatatattatcacattatattataaggacgagattataataaatgactttgaaattatagtattatataaggaaatattgtcatttcaaaataaaaaaaaaaatgattttttatactatttaatatttatattattttttgtcatataaaaaaatttataatttatttttatttttttaaataaaaaataaattattaaagattataatatatctatattagttt

SEQ ID NO: 170079 - DNA, 544 bp, Cannabis sativa
ttatatagataatctcgttaacttacatagatgaaactgatactgattctgagatttatatgtactgtcatcctgaatgtacactgaattgtttataccattagttgtttttaaattgatttataccattacaactatcaatatatttgaagctgatagttataataaataaaccatggctgtctcaccaattttttgcttgcatatgaaaattgaaacatattcaaatgagtgacttttgtgtgaaattttatatttgaatggaatgttattaattagaaaaaaggaagtgattgcaatttgaacggttgaatctttggtagtaattagcattatagttgtaagaaaatattcagtgcatgtgcatatgtattttttgtcagtttttaagctgcaatttttgtcagtttatccttctaactatatgctacgagatatatatatttataaactagtaaaaagttacgtgcgagacacgtatactaaattttatgctaggtattttctattatattaaaacgtaatacacttaaaaatatttatc

SEQ ID NO: 170080 - DNA, 628 bp, Cannabis sativa
ttttttcacatctttttatttatttattttgccctgtttactcattagcttctataagctctctttcagtttttaggattgaaaaagaccttcaagtgttcgggtaaaaaataaaagaaattatttctaattcaaaagacctctttagagaagctagaaatgatttacataatttctaatttactcctaaatatccttttttattgatatctgagcacatagaaaaataacttttcattaaaaaaaaggctcttatgtaataattatccaacacaatttttacttatcttagtatgcttttaactataaacaaaggtacaagtttagccaaacagttcatatagaagcttttgatactcttttgttggtttcctattacgtgttatcggtaaatctattgaagtcgaaatgtgttttatcattcctcatcttcaagagtgcttgttattatgtacttcaaatagtcatgttgaaaattttgcagcttgaaccagactttgtggcggattttgctcaaggtgaactgagagttgacatgcttggagggaaagctattgccaaaaccaagtcaagcgaagatggagctagcacccataccactcatcactctgcaaattatgcagtttct

SEQ ID NO: 170081 - DNA, 533 bp, Cannabis sativa
gagagagagagagagagagtagctctctatttatagccaaagttataataagaaaaaaagaaacccttagcatttacctacaaataatgaaataaataaataaaggaaataaaagagccaaacttagtttccaagttccctcatggtcgaaccacattgtggtattgggctagggttgtgctcttcattagaaaactcaatagatttaaataatattttttttgtttatgtcataattaatttaattcttataattaaaaaaaattaattaaataattatgtcaagataattattttaataaaaatattatctaacaaaatatctaatcaataattaaacttctattatctctttcatttatgacaaaaatttgagttgtttcaatagctctttatttatagccaaggttctagtaagaaaaaatgaaaccagcaacattttcctacaaataaataaataaataaaggaaataaaagagcaaaacttagagcatgtttggtattgttttctgtttttttgttttcaaaaaatt

SEQ ID NO: 170082 - DNA, 911 bp, Cannabis sativa
tgtgcataagatgattcaatctaattacaaacgattgatcctatgacgaccgaccactaaatattagaaatgaaattatgatccgatcagatcggatgttattttcaattataaaattggaacgggtcggatgttggatgaggtgtaaaaaaatctaatacaatcaaatatctaattgaactaattaattagtatttttattatatttggatgagtaattagattttaggttgtcatgtcatacttaaagtacatatgttgttgacatgggtttttgtcaactgatttaagatcgtaaaaaatcagaggactacaatgaaaaattttaacaaattaaaactgcaaaaaataaaggtgacactaagatttatagtagttcaccctcatgtcgcgatggtaatgaggctacgtctactttgtcttttattaataattcaattcaacacactaaagttatgttctcaagagtgtggaaaacaatacaattgggaacagcgaaccaaaggctcatgggtgaccaaatactcataaacatgataataagggtggtggtgatcaatgtttgaagaataaagggtggtaatttattcttggtagaatagtgtttgaagagtcaatggtgactggattatgaagatggtgtcgtccaagtatgaagaacccaaaatgtaagaaagggataaagaatagagatctcaagaggtcaaaaggtgattaggaagcgatctcaaaagccctctagtaagtggtccccaaaccctagcctatcattatatatataggcctagaggttggtagtaactccccacaagttggggtttctcactcaacttccgtagggtaaatattattttggactctgtgttttgcaaaagttacaaattagaccctatgttttgttaaatgacaaa

SEQ ID NO: 170083 - DNA, 506 bp, Cannabis sativa
acaaggcctttttcaacttaagaactttatcttctagtcctttccccacgaggccatgtataaagaatgatgtagtggaatatgtttcatggtgtccgacatgtcaacaagtaaaagtagagcaacagaggtttgtaagattgttacaaccattacatcttttggaatggaaatgggaaaatattactatggactttgtggttagattacctacgaatacatggcattatgattctatgtgggtaatagtcgataggtatacgaagtcaactctcttcttgcttgttcgaacgaacttctccattaatcagtatgctgagtaatatgttagagaaatagtttatcttcatggtgctccaatgtctattgtatctaacagagattcaaagttcacgtaaagattataggagaatctacatcgagcaatggatacacagtctgagtttagtataatatttcatctcagacagatggacagtccgaaatgtctacaaagatttagaaga

SEQ ID NO: 170084 - DNA, 1541 bp, Cannabis sativa
attagttagtaagtagaggtgttcgttattattttgctcatatttccattaattacggattttatattttatatttaatttaatttacgcaataaagttcaatctaatctaattcgtaaagatactttattagatcagctattttaaattatttactttttaatattaaattatttaatatttattaaaaaaaatcttttttatgtataattaataataaaatacaataaattattattgttatatgtcttcaataatatattaaaataaataaaataacaaatgataaattcaaatgaagaaaaaaattgtattaaaaaagaaatgtttaattttatttttaatcatatttttcttatatataagaatagaatatatattttgttgacattgcttttagtccactacaatgagtcaaatttaattgattaaaaataattaataacaataatgataaaaataaagagaagagaatatcaaagtttttatagaggttcagtctcgtgatggtggtaatagtctactctctttttacttgtattaacttgtgagaagagaagcaaggagttcttgatctctcttaaaagctcttataatgatttttcagtatttctcttatgacatgtttactaataagtaatgtgaatcaatagtaaggtaatcattcttttacatttgtttacttacattattgaaattaggaaagggaaaacttgattaaataagagaaaaaaaatggagaactgtccccacatattttgtaaggaatgtcattaagggtaatggattttaattattttaattttattttttaatatcaaatatataatgataatgttgtccttaaaatatatcttacaaaataactactatataatatagtttaactcaaaaggataatctagtcaatttaagcattctgattacgtttcctaataaagtaaacaagataaatcacaactattctatttccaaaaaaatttagtaaacaacatattacaaatattgattgcgattatttttcattaattccgttatatttcttcattaatttattccgattttgaatactgtatagtaaacgtgccattaaatctatgattcttttctctctgatttttctcgtgtccctaaatagtcaaacgactccactttttatagggaagaattacatcaaattggtttcccaaaaataataagaattaaaataagaaatttatttacttgaaataaataaagcaaaataggaaactaggtggctttcctcttatatttttgtcaatgtgaatctatcccatgaaattagggatatgatcgtgacttccaagcttgtggattcatgagatatatccctaaagatatttaactcacaatctatggtcggtgcgtgcaaattaactgcacactagatgttgatcagatggtgtggcatactctgtccggacattcttggctccttctatagattgattaatttcaagtgataaattaccatggacgacatatcacaggatgaactatctgtccaggtcaccgtgtct

SEQ ID NO: 170085 - DNA, 1101 bp, Cannabis sativa
tacttctacaaaagatatatatattgctgctctcctcattgttgccttccatcgtttcaaaattttaatttgtgtttaatgtttatttttccttgatttaatttatcaattcctttattatttatgtgtttgtgttgtcagctgtttgtctcacaacttaattactatttattttataaattattattacacctctgtttgtttattttttaataattttagttactctttattaatttttatatatatactaaataaatgctaaatactactatgttttttctattatatgttgtaaatgatattatgaataatataaataataatattatactaagagtatgtttggaagtaactgtgtaattactagtagttacgcagtatagtaattattacactgcatattaaaatacaatatatgtttggattatacgatatagtaattacttatgaattcttaatttcttatttgacaaaatagttagtaattactacacaaaaaaatattaatttttcagtacataatatttaaaatgaaaagtttttagtaattatataatataattatacccaactctcatgggatgtgagatcttaaagtgtaattgaagtctctcaattaccccaaattatacagtacagtgtaattacatgattaaacaaaaacataaaattgtgtaattaccttccattacactcaattctaacttcctcctagatttccaaatgcatcctaagaatgtttaatatcaaatttcaaataaatatgtaaaagtaaatttttcattaaaaaattattgtctgcagttttaaatataaaattgttaattgtaatttctattggcaatgaaaccacaaaataaaaggaaagatatatatattttaaattatttttactatgtttctaaaaggttgtcaacaagatatgttgtatttccaaagaaagtattagcactaagtgaaaatatataactacttcaatatataaaatcttgtttgcaagttgaaaccaaaaaagttcatctctgacattcttggtccaagaagtgattcttcaatgaaagaaatctttaaaaaatcattttcataaaggatgaaaca

SEQ ID NO: 170086 - DNA, 677 bp, Cannabis sativa
agttacttccaaacgcaccataaataaaaaactattgaaactaatggatttcaaaacacttatgtttaaaatttatggttttgtccgttttctgtttcgattagaaactcttaaatattattataaattttcaattttggattaatgtcttaaagatgttttactatactccaacaaaacttggttttttaagaataaaaaatatttaatgattcctttaaaattttattttttattaaaaagttataaaaaattgatgcttaacgatagtttacgataaaattttaactaaaaaaactatatataataagtcataccctttcacacaattgtccatttgagattttgttttgttttaaattttgatatatcttaaagtaattgtgtgatatttaataagactattttacacttgcaaacagtggcggaactacatacatctatggagtggccatggccccccctaactttttagaaaaagaaaaaaataaacataataatgtataaattaaattaggataattagatttgacttattagaaaaatgtgatttttctcttattattaagcctaataaaaaattgtgaagttgaaattgaaaaataagcccaaacccaataacccatttacattagttatctattttatcgtaaaaagtaataaaaaaatgattaata

SEQ ID NO: 170087 - DNA, 503 bp, Cannabis sativa
ggggggggggggagggataacgtggtgggtggtcattgggttcgatggttcgtgatgggtgctcaaaatcgccaaagaggatagagcacggatgacagaaattaaatatgaaatctgaaatgagaaatgagaaattgggctttcatattattataaccccactatactggacatttcaaaatcgtcggtaattctcattaaatgactatttaaaattgtcaaaaatattaaaccacactatttaaaattgtcaaaaatatagtatattacagtcgtcggttttaaacagtcatttattttttattaacagacttaaataaaatgaatgataagaatagtaagtgcttagatattaaggcatatagtagtgttaattaatattttatgtggatataaaatataatcaatatatatatataaaggaaagcatcaaaagatttaggtggcattctctatcttttttattctattttttctaatttttgagggcttaacattttctc

SEQ ID NO: 170088 - DNA, 511 bp, Cannabis sativa
acattattaataccctttaccatttcactttatttatcaatacaagtaaaagtctactaagtcttggtcttatttattttctttcaacatcaattggtttgaagtcacgcgctctataaatgctcattttttttttctttttgtgtaataatttcaattttcttttttttccaattggaccatcatgtatttaattggaccatcatttattaatttatttacatttggggttgtaagactaaggagaaataaattggttggtcacggagttgtagttgcgacacaaagacggttgctgagataaaggtcttaaattctgccccagattcaatggcaattcttcacccaccccaaaaagtggaagtcattatccgtggaagtctttataatggaattatttcacaaaaatataaaaacaaccaaaaaaaaattacaaaaatacaatttaatagaattttaaatatttttacgatttcttttattttacttacagaaaatacagtctttttat

SEQ ID NO: 170089 - DNA, 1186 bp, Cannabis sativa
agttgtcagagttgctactggtgctgaaaaagttgtcgaaattggtcttgtcgtcggaaaaatcaccaagaaattggtttcttcatcaagaaattggtttcttggtgatttttttcagcgactatcccaatttcgttgacttttccgaagtttgctgtcggtgccagaaaagtcgccggagtagctgctatggtgttggaaaagtcatcgaaattgtcattgtcaccaattttttagtgatttttttggcgacaatgccaattttgacgactttttcggtaccggtagcaactctgagtactttttcggtgctggtatctactcgatgatttttccataccgaaagcaaactccggggactttttcggcatcagtgacaaataaaattgcctaaacaaataaaaacattaaatatatatggaatttgaaaacctaatttacatatatggcatatcaaataccatgaaaatacttaaaaataaaaaaatactacataaattggtcatacttaaaagtaacatatttaattaaacaacttttaaaatcccatagtgagtgtaatttcttcaaaatgactctacataaagtcgttttttatacttctattgaagcatattatcctaatttataatatataaaaaaatttatttttagttacaacaaaatttgtaactaaaaataaaaaaaaaaaaattataactgaacatataaatcattatttttatgttatcactaaaaatgttcgtgattaaatttattaatcgtaaaaagtataacaatttataatcagtaaatgtgtttataatcacaacacttgagtgactaaaacgaaattagtaataacataaatgttaatattattttttagtgtcgaatttaagtcagaagatcgagagatataggacttgacactaataaaaaatcgaaataatacaaaatgtgtgtctcaatccgtattttcatttcattaatttctcacactatacgatattatacttataactattttttcatgatcatgctaagtagaagatatgatttttttttaaaaatatatatgcccatcttaatacgttatatatattgtattaatatattaatggaataattatataagatactatttttttttttaaaaaaaaaattatatctttacgtttaatgaattttttttttatatttttac

SEQ ID NO: 170090 - DNA, 663 bp, Cannabis sativa
ctgcaagcagtattatctcaattactaaagacaccataagtttatatatatatataaccgagtttccaataagttttaaaacaaccaatatttaaacaatatttaaacaagctaaaagaaagagaagcttgatatattactaatttaggaggatggcattattcttataaagaatagaatataatatatagtaagtcttaaagtattattaaaataggttttacttcaataataaggacatcatcagttaaactctattgacagaagggaaaccactatatggatcagtcaatggcggactcaggatttaagttgagggagggcgatatttttttttataagtgaggggatgcatttttttttttttttttgtacattacataacatgttaaaaattaatacaaatttatattttaatattaaatatagtataaagtaaaaaaaaagtaacaataaaatgtatttagttcaataattaagacattaaatataagtattattggtagaagttcaaaaagtaaagtaaccatacttttattgggattagaactcatgacatcttttaaatgcatgaaatgactttaccattatattaaaacttatttatgtttatagatattacttttatttataaatatatgttgtaactatctaaaatgcata

SEQ ID NO: 170091 - DNA, 599 bp, Cannabis sativa
tgttatgattggtagtatataattgtaagaaatcttggggaaataagtgtacatatgtacgtgtatatatcaaagcaagctatatatattatatactagctagctactatctctatgtaaatatatataatagctatatatggtgctttcataacaatgaggtaaattttgacaatagatatattttgcctttgatcaattccacgcatcccaaagaattatttaataacacacaatacccactaccattatatatatatgtataaaattaaagttccaatttttcagcgtcataattcacatcattgacaattttgacattatatatatatgtatatgtattgaatcattgaaaatttgtatgagcaaaggaaaaaaagacaaaaaaatgaagagagatcaatcaaaggatgtgttagtagatatgggctaaatcaatgaactcatcctattactatgttgaaagaaagagatgaagaagaagaaccctagctagtgctaaacaactaattagacaaattaatatatattttttattttcacacaaaaaaaaaaacattaatagataaagaaagataattaattaaagagataatcta

SEQ ID NO: 170092 - DNA, 514 bp, Cannabis sativa
acaatttacattaaaaaattgtttccttttttattatataaaatttaacaccattgtaatgtcgtgtcttataagtgatagtgagacttaatattaaataacgccaataaaaatattatacctcacaaatgtgttaaacaccataaataccttttagcatttctcaaaaatttatatttcattctcatgaatatccttacaaaaaaaaaatatctcatgaatatgagtatgtagacttgtaaaataattatataatactaattaatctcaccagcttaaacggccgatcaatttataattttatagttcccttgaaaataaaccacactcatcatctaataattaattaattcaacaaagaatagactctaaagtatcaattgacagaaaaagaatctcaacaatattgttaattggccaacttataacttatgttttgggttagaaaatttgtaattatcttttgccctacattatgtgtggtatagaatagaagtcattcattgaaggatta

SEQ ID NO: 170093 - DNA, 965 bp, Cannabis sativa
  modified_base (666)..(670): a, c, t, g, unknown or other
tttttcttgcattgttttggctagcctagtctagtctgggtgtatcagtactgttgtatttatatattttttggtttgtagtgtttcttaatttaaggatgattttgggcattgcgaaagagttgtccagaaatgggaacaagaagttgaagaagacaaaaatgaacaagttcataattaaatttgttatggagtttataagttgtacttgggtaacaagaacaactaaatgatttgttgtgtgataaacatctgagaattaagagtaaaaggaaatagaatgagtgagttaatatatgattcatcattgtaaataaacttacccatctttcagttcaatcgattcatcatgactcacaattcatacaattaacaaaccaataatttaatacattacacaaacgataacaataatagacagaaagaagaaatttacacaaagacagaggttcaataaacacaactaagtttgagccaattcattttttctaagaaaaaccaaataattattaacaaaatgtcctcaaaaataatattacaagaaagttgatacattaaattttaatgtaaagtgtaaaccaacaatttgaaatcattttactttctcatactttggaaatcaagagataatacttgcacggttttttttaaaattattatattaannnnnataaaatttaatatttaattgtattagatacacactctaaacaaaatattaagcaactaaataaaaatacaacaaaaatactttcatttaagtcaatctcagtcctccacgtgtcattttaggcatattcttccaaagtaaaactttaaaatttagaaagtcaagttagtcaactgacaaaacaaatccatctaatattcctctccaaagtcaaacaaaactccaataatatgacagtttattttataattgtaaaaatttaaggggtaaaaaaaaattaactagccataaattt

SEQ ID NO: 170094 - DNA, 953 bp, Cannabis sativa
atggaccttcaagactaatagtaaattttttgggagtcttcgaattaataataagctatttgggagagacattctatacgcagtacaagcttatgtagaagtaccttctcgagtttacaagaccttctgcacagaactttccaaattcacactaaacttcctgtatctgctctctatattaacagctttcatcacgaaagacaaaacttgtaaccataacaacacatattaatttattttgtgtaatatatagttatttcatcgtgtttattttttgataaaagtgcatctaacatcatttttttacttttggtcatgtagatttactagttagaacacgtgtagttttttttgtttttttaataataacatgtagttaacaaattttaaataaattattttacacgtgtaataaaaagtaaaaataaagcatgcgtgaaatagtatattttttttaatgtaatgtggtgatattacaatatacttgtaatttagaggtgttggattcaaatccacgtgccttctttttttctccatgacttaaatactatgtttcacagttttaggaatagtaaattatttgaatttttttaatattatgtatatgcaacaccactttatataatatgtatatattattattgtataataatttagtcttgtattatatattctaatttaaaataaaatataggaattgaagcttatatatttaggttacttagattcttccctctaaaattttgatatatatatgtatcaatgttctttaaacttttaatgttgttaaaaatctccctaaattattgagattattgaatttaagaatttttgtctaattttagtaactaaagtttaacgtggatgaaaatgtagtgacataatttagtacatgtcaaagtttgagatatataatttggtagatatcaaaatctgggaagcatgatttagta

SEQ ID NO: 170095 - DNA, 581 bp, Cannabis sativa
tattacactactataatattgggcattccattcccggccgactgtcaaaacgtccattaatttcaagaactgaaatggactgactactacaaatggattaatttcgaggactcgtaatataacgtcggtttaaaacaaacagtaggctttactagcttttggtataagggttcaaaataatttcattaaagaaaatattatgaaggagagaatatgattttcttaaatttgttactgtgtttggttatatatgattatttttatttagattatttgtttggtcgagcacaaaaattttatatacggttttaaaatagtaaaataaaataaaataattattattattatatatcttttaagttaattataaataaaataaaattattatttgtaaaaaaatatatttattagttaataaatttaattttattgtatttgtgattaactaaaatgaataactgttcacatctatatttttctatacaatattatatttttatatttatttatgtaaaattattatagtgtgaataagcataaagaattgtcatataatttttttttataaacgtcatattttt

SEQ ID NO: 170096 - DNA, 878 bp, Cannabis sativa
agatatatttgaattctaggtaagctttaaccctagtttttctttaattttagtatgttttagttggcttagacatgcatatttgtgttttagttgttgtttaggttagatatgttttgctgtaaatttctgaggttattttgaggttgtttaagcttattgggttgtatttaggtgtttttttgtggagttcaccaaatttgagctcatgaactcaaacttgattcaacaatggtgattttagaattttttgagcgttctgaggttctattgcttcgaatgctttattatggcatgtataggtgttctggacctttatagaagttttagggaagttttaggtcgatttggagaattttagtgaaaaaccacacgctgtttctatagaaatggcctaccatttttactagtgtagaacctagaaaaatggcctgcttttttttttttcagaaaggttccccattttgttatttttctcgtgtttcgtcgatacttaggactttgtcttactagatatcgataggaaaacctttagtttcaagttaaagtccccaaaaaagtgatttagtgtatcacttataggttttgcatatattgtgacctaggggtctgtaaaccatcgagcagcaattccactcaggttgatcgccatacctgaattcagaattaggtaagaatagtataatgataaacatatgtcattacatgcttagtgtgcacgtttacggttacatattagattacattgaaaaagcaatattagtatacattaagttatattagatatcgatgaatgtatgtttggcttaagtactgattgatgttatcacatcggtacgactagagtatcgagttgttgagttttgtgccataaataa

SEQ ID NO: 170097 - DNA, 608 bp, Cannabis sativa
  modified_base (554)..(563): a, c, t, g, unknown or other
taatatatgatgtgtatctatgtatttggtactagactagtagttaagttatggtcattgttgattaataccccaatatgtgttaattggtagatttggcttttcctaaagtgaaagatcgcataacaaatgacaaaggtcggattaaaaaacactatacactaaaccttatcaatcggagtggtaattcattactgcttgctttttggatgactaccacaccaaagtttcaccaagctaaatactatagcctcctactcagcatctgccataattaaggataacatgttcaattagcatccgaaaaactagtagtttactacaaaaaaaatttatttttaattacaacaaaatttgtaacaaaaaatgaaaaaattatgaataattattaatcaccattcttatattgtggctaaaaggttcgtgattataaaagatgtatgttgttactaacaaattatcactaaaaataacttaatttatgtaaacactcttttaaaacaactccaatgaacatggttgtgacatgctaaatgttggaatttattttaccnnnnnnnnnnatctactcacaagtatgttgtttcaacaccctaaatatgaacttt

SEQ ID NO: 170098 - DNA, 554 bp, Cannabis sativa
ttcataaagagtgtatatatgtttatatacattgtgaagctttaaatattattacgtaggtatatcataatttttttgaaatattatttttttttagtttttttttttaaaagaaaaacaatagtaaaagtgagcattaattaaaatgctttaaatgtattcctaatcaattaggaattgactaacattgctgggtagatatataaattaaagacaacatatacaaaatatataatattaattaatgcatcattaattaattttatatataataattaaatacttatttttttttatatataaaagtaattaattattgaagaacaaataaaaaaaaataaaaaaatttctctcggtggacaaaagaaatataaaagctcagagcatcatatatttaatttataacttagggtgattttacaatacacccccgagatgtattgatgcaccttttaacttatttcggcattcagaaaaaaaatttagtctaattttttttcatattcacgtacgttatagctatttaagatatcctacaaatttttggaaaattc

SEQ ID NO: 170099 - DNA, 710 bp, Cannabis sativa
  modified_base (271)..(271): a, c, t, g, unknown or other
ccgtacggaggcaccaccgcggcagtaaagtgccttgccgcggcgcttgtgcaaaagcgagaaactaggttatcatagtccctcgccgcaaccaccattagcctggccgcggcgacaatttgtcgcaacaataacacatttttctgctttgacctctctcagtaaaatgtgcataactttcaggatgcgttagaatgataaaaaaagagatttaaaacttgtatgttttgactttcgaaacctgattagaacatagtcgaatttaggcttnaagtttcagctttatttttttacaaattttctctattttataaatcaccgtattattgatatttgagcaatttatacattccaagtgtcaaaacttgaaaccaaaggaaacaagtgtaattctattcccaaaagtgacgatgaagaagaaaattaactctaaaaatgacccgagcaataggcaaaaaatagcctaatagttagcaaacacctagaaaactagctccgtatgacaattattaattaatagatcccacaatatcgggactcaactcccaagatcttgtctgaggatcatatcttcccaatatggaaagatagtaattgacaatgaaacatttaatgtgtctttattatccacttgtgtaaatcattgttagcccaagatatgtttccaagagtgggggtgaattggaaatttaaactaatttcggtaaatt

SEQ ID NO: 170100 - DNA, 661 bp, Cannabis sativa
actactctcaaattaattgaaattatgtatcatttaaaaaataatttgagaatgaactattttgtaagtaatatatcatctacaaataaaataattattactcccactaacattctggtatataattaattccataatgttcttctcaaatcaaaaagaaaatatgacataatgaaaaatactatttgtgagaggcttgttttagtttgcagataaacttcttaagcatcttgcatatgtttaccatcatttagaggaaaatctttatggttattttagtataccttctcctctagttcgttatttggaattgataaataaatttaaaggagcaacaaaagtcaagattactataaaaatcttttataaagattagtgagaatgtaaatctcattgtaattcattctttcttctaaatgaatcttttagcattgactcttattttacatctttataatctctatgttggctaatgagtgtttattggtaaaaatctgtgtttaatttcctccacgccttaggaaatttaattgaagatatacttcattgctctttaggatatttatttcttcattcatagcatattatactataattttaatcctttgcaatccacaatttaatatgtgtctaaaattaatattgtagttgaactcttatt

SEQ ID NO: 170101 - DNA, 600 bp, Cannabis sativa
tagtgttgcatgttggagttaattaagtgttaatggtcaatggtaagacatcattattgaatagcggccctccgaaggaagaaagagtcaacatgtcttcgcattactctttaatttttagatttaatactaattatttataatatatatttgcctaaactaattattttatttatatatgtttacagctactccttcttattcaagtcatctttagttctcaaaagtcattttacttgtatatatattgtatagttgtatttgcaagctaattaagtactgttccatatttttttagttttttattattaatatgaagaagctataaatatttatatatgagtaatttgtaataaaaatagttgagtttaatttttaattatagataaatatttaagcttaatttttaaccgtaataatactttagttatatttttagaacttcggtaagtacctgaacgttaagtgtaccacgcaaaagttcccgattggtcaatatcgttaaattttaatttttaatttaaaaattaatttaaatataccaataagaaaatgacatatgtataataacttgataccaggcccgaccctgggtatagg

SEQ ID NO: 170102 - DNA, 1525 bp, Cannabis sativa
  modified_base (276)..(286): a, c, t, g, unknown or other
ataagatcacatgctcgcaagggatataactttaataacatgttaaaaataataaagttctattttaaaactaattagcgataagtaaaatagtccatgtttttagttcaatattttacatttattttatgtggtacaatattcacaataaataccaatgctatcttttaacaattccctagcttatctctcaaaattcgaaggcaccataagtaagtattaacttaaaaatgtaatatattagaaactactaatttgataataataataataatnnnnnnnnnnntaataataataataataaatgatttatcaattatatattaattgaaatgatagtaaatattaaaattttaataattttaattattttttgaaatttttttaaaagtattttttttatgttttatttataatttcacggcttaaaatttttaattataaaaatacacctaactttaaaattatatatatacactttcctcagtaaaaaataaaaaaaaaataattaaaaaataacgagaaattaatctcactacaattataaataaactataaaataactaaaaaataatcacataacaactataatacaattataaataaactataaaacaaccagaaaaatagtttattatttttactgaaaagatatttttataaataaaaaagttcaaagtgaaaatgaatattttttcttattaacgtattcttgtaatttttttttcaaatttttagtatattatgtaatttttgtaatttttttttacataattatgtatagttattgttaaaaaaatatttaaaatatatatatagtttaataattagcccattaattataataaaaacatgaaaatatgaagctaacattgaatccgtataagaaagtgagttggtgatctaattaagtaaaacaggttggcttgagtaaaatatgatacaaatttgaacgcggtacaaaaatattgaatctattaatcatgttgagcttactataccaaattattaacataacaatttatattttgttatagtccggcacgatacaacttatatttttgcaaaccttttcaaaatacaaatcagatcaactcgacacacaccaacttacaattctagttcaaactaacatccctcatattgcaaagcataactaccacatatataggcatggatggttatgatgaggaatgggcatggagtgttccgaattacctttctatggaaaatcaaagaagttttggtttggtcttttttgtgactggtggtgggccactcgtgagggacaaattaactcaacactctaaagtattgtatatataatataaaaatatatatttttagaaatttatgtagtagaccgtttatgggtgatttttttagtagatttttatttgtttcggtatttagaaaaaaatttaattttttttagggaaattactatatatactattttttaattttttttcttcaaatttacagtttgggtttgtaaaggggttacatcgctagttgcaataag

SEQ ID NO: 170103 - DNA, 537 bp, Cannabis sativa
aagggtgaaaactgatgagaatatgtgtcaaggccattgttattgttgatagtggtggttaacacttttagatatatcaatttgtgattggttagattaacttaaatgaaatttgatatttaattagattaataatattaacaaaaaaaaaatactagacattataataccttttaatatttttcatctgtcaattagcaaaaatataagttaaatattattcttaaccattttaaaaataaataaataaatacattatccacaacatagttttatattattaagagtaatttgcagtatttttttttatgttttaatttatatatactgaattctattatttatttttttttgtggtagaactctttaatttattttttttttttataaatttaacacgtcaattaaatattaccgttaaatatcaactgaataaccattatatttagggataattgcggcaaaagtccccaaaaacttgaggttgatgccgattagtcctcaacctcaaaaattggcggtgaaaatacctaaggt

SEQ ID NO: 170104 - DNA, 540 bp, Cannabis sativa
agtaaaatgaaaacaataaagaaaaagaaactagttaaggagagcgaactattgacatcattaaacttatatagtttccaataacataaataacaaatgtagttgtcctttgaagcaacaaacaataaacaacctggaaaggaacgagaataatatactctgctactattacataatctagcaaacaataattaagtagcaaagtatttatatattacatcttttgattgtaataaaacagcaaaggaggccagttatgcttgtgagtctttattccacgacacacattttatcatacagtttgtatgcattataaatctaaacatttttagcatataattcaatcaaaatcattccctcatcacttacacctacttcccaaaacagaaacaaattatatacaaagtaataaactatcaaacaattaaatatgatgtatatattcaagtaggttatttacctttggaagcttgggaagtcttctagtttcattgctttccacaatctccttcactttgatcaacaagctatcaaactcaa

SEQ ID NO: 170105 - DNA, 790 bp, Cannabis sativa
tttaaattgattgcttaggttaaattcttccccacacactcgagggaaatacttgtcttgttggtcgtcggggcgcgagcaaagtactagcataactcacccctgtcatcttgaaagtgcttctaagtgtgacgtggctcattagatcttactctttaaattttataacctccaatttagaagtatagtcccagtctttctccctcagtgtcagtcgcaggtcccttcccttttacaaggtcataaaggcctagtattacttgaccgatgaggagaacttctctcaatatcacgtggtcactcaacattatgggaagaaccattggttggcgcgcttgagcttgagtccttgtgaacccttgctcaaagtttgcttccctttgaggagcctcagtcctattttacgttgagtgtttgcacgactaccgagcatggtagaagtgcttcgtgcattgagagtttccccctgagtgctagttcccacgtggccaattggctgatggggtatgtaatgaccgcatttatagtatggattagtaaaggaaattagcattgattattgatatatttataattatttgtgaatttatttaattgtgggtcccattaccaaaagtgggcattaaagttataatttttcaattctagagattttattaaactctaggagtattatttgtattatgtattaattatgttatttttacaatttttgctcggcgacaacgaaaaatgcgatggatgactattttaatcacatgggtaagtctagaatcttatttcttagtgg

SEQ ID NO: 170106 - DNA, 794 bp, Cannabis sativa
atttgtaagggtgggagggaattggaattgtgactaattgaaagtaattttatagttatactcacaattactaaaaactttcaattttaatcaataacttcaaaatgagaattgtttagacattattagtactaaaacttttttattagcactaaattgctaggagttctacctataaaaagtgctaaacaattcaatgataatacttattgaaaatgcaaatgagatatgtttgttgtgcgaactattcttatattaacgccaatcttaatgagaaaatggaaatttacaataatttatttgtaattattaactattttaagatattagaaatttataagtaattgtttgtacaatcaaacacagttgtgcaaaaattttagttgagtttgattcgtttattggaagtttcatttgctaggttagagcaaaagattgaaggtctttacttgttgaattcatagtcttcaaaaaacaaaatctagcaaaataggatgaatgaattcagtggagaactattactgacacgtgtaattggcccaagtgttcgaccaacttgagaaactttcctaaaaaagcctaatcagtttgacaacagctgaggcccaataacaaatatctgaggcccaattaatacaccataaccattaaccaggtgttgataatatgagggatactagataataatagatagggtaattagcatttttaacccctgaactttgacatgtactaaattatgccccttaaacttttaaggccattgaaaatgccccttgaactattgagattgt

SEQ ID NO: 170107 - DNA, 526 bp, Cannabis sativa
tatgaggttttattatccaacttaagtgtaattaattatgtaatgtttatgtctgaccgattatgtaaggtgaaagattatttgctttctatataaaagattgatttaacctaaataagactaatcacaatctctcttctaaaaagagaataagccgaccaagctttgactgaaacactataatctatttttacgttcttgttgtttatattctagtaatcattgttttcatattgagtgttcgctactctaagcgaatactagcaattctgtacgtagatgtttttgcgtagcttgaatacttgtatatttggtgttgtctattttcctctaacaacacaaatatgtcataaaattatttttgtgccaatataacaattattacattaaataatgttttaggtatattatgagaaatatagggtatatttggtaaccattttaaaaatggttttttgtttttaaaattaaaattatgaaaacaccaataaaaattgtgttcggtaacttagttttactttttatt

SEQ ID NO: 170108 - DNA, 670 bp, Cannabis sativa
gttacttttacttacacagtaataaatttataacacatttttattattttgtaatcttaattaatatgttaaaatttgtttgagtttttgttttaataaatcatacaaaacataacactttatctaattattaataaattttgtttaattcaaaaaaaaaaaaattcgactaattaaatacaaaagaaattaaaaaattatatttaatatattttttttcttaagttatttttttaaaaaaaataaaagaacttataaataataaaatactttttaataacctcttaaaatcgattgccatatccaattttattgatttaaaatttagtgattaagtaaaaaaaggaaaaaaattatcttttatcatgaatatttttttccatgaaaaagtatatgccacgtaataaaatgatcatcttatttatataatttttaaaaaataaaaatgagatataatctcatttcattaaaacaaaaaaagacaaagataaacttgtctttgaaaaagaaaaaatagacaaaaagaaaaaagataaataaataaacaactattatagagagtttgtgattctcggtggctagaaataaaaaggattaattttcggtacacatttatctatttattaaaagaataattatcttttttacccctgtacttatgacactatac

SEQ ID NO: 170109 - DNA, 514 bp, Cannabis sativa
atagaatttaggcttttggggttgtagaaagcattaggttctgtgaaactctgctattttagtgattttctgtcaggaaaccaaacttagcaaaatattattgtgaatggctgaattctaatcttctggttgggacccttatggttctagatgaaacactttgagaaattccttacaaattcatgcgttctggattttgcttctgaatggcaggttcggaggggatctctctatgcatttttaggagaggactctcccataccccttctatctttttagtgtggttattaactacttagtttttttctttttcagttactgtaatggcagacgtcgtccatcttaaggaggaagaactgatcaaggggcaggccagaaatgctgctacggaagagatttacaattcatctccatgggacatggatcaaattaccaatatatattataactatcatgtgatagtcagtagtcccgtgatccgtaaggagaaataccgggtaagctgtgcaatccc

SEQ ID NO: 170110 - DNA, 737 bp, Cannabis sativa
tattatcttgggccggaacaacaatataatgtgttccttatttcaacataagtaaaatgaaccatttttattaaaaaaaaaaaaaaaagtaataaatcataaaggcagtctctaatagtttttttaataaattgtagaatctttataatagattaaaataaaatgaatatatatgccttatataaaaataagcaattttatgaaagtcggatacattacaacatatgtattaatagtctttatctcaaggagttcaattgtttttgttaagtcaaatagcaatagatattagaactttatacacataattattgaaggaataatctacattattacttgtataaaatcaaaatgataaacaggttgatcatgaaggcatcaatctcagcatctggtttaattccagttgctttttcccgtactctagacaactctaccagcaagttgtatcttgttccaattccaaagcactgccccaaaaagccaatatttaacgtactgtcactacaaaagtttttacttttaatcacaacaaaatttgtgattaaaaataaaaaaattgtgacttattataaatcatgattcttatgttatgactaaaaagtccgtgactaaaagtattggtcacaaaatttacaatttattgtgattaaatgtgtttttagtcataatacttgttgtgactaaaaccgaattaacattttgttgtgactaaaagttatatttagttacaaaaa

SEQ ID NO: 170111 - DNA, 1292 bp, Cannabis sativa
tacacattactatttcacaaagtattatttctagctttttaaatattatatacaaggctattcacaattgaaagataaaccactctctgaaactttgaatgcttgctcctcttgatattcttaatgcacattgaaacctgcccaagaaaaaaccagcaaaatcacagaagagctatactgacaactgaaaaaaagatgtagataggtctccaaatgatctccacagaaaagacaattagcttcagcaatgtgaccaatttttgatttgttctaatcttacataggctaaaaacacttcaaaagataaacacaaaaataaactcaaaagttcatatctaactagagagttctgcatcatttagaaataatataccaacaaaaataagggaaagaaaatatcatatcgactatatatatgtaattacaaattaattaatgacttttggtttgttactctctatatatatggaattttgtgtgtttcatcagaactagatcataattaggaccaattaaataaaacaaagaaaagaacgataatgaaaggaacattatacatgtatagatatgtcccttttaagcttcatgctcttgatgatttctgcaatcagatgccaaggacaccttttccaagtaatgaattcatactgtgacaactagtattaaaaaatcgaaaagactcaaaataaccaactacaccatacattgtccgaaaaaaaggatagagttttcatgatatcaaattattcaaagtaattaactgcttattgtaacaactacacaaatgacataactaactaactctctgtatcaaaatctatttggtctgtattctatgctaattatatttactacatacaagaattatccaaaagtaaattacatgtcaataacactactctaataaagttaaaaagaatgatataatagagagatcatgcatattgcacactacaaaaatttcttaatacttcagaggggaaagtaatgctaaaattttactctttggctcttaggaaatttatagaagcaacgttgcaatgtgtcattctcaaatttgacaacaaacacaactaatcttaaacacctgaatgatccttgtgagttgtccaattcaattaaagtcacatgcttaaacatatgtaaatatatacatatacgcatgtatatacatatatacatgtatatgtttgggtagacactactacaaaaaccctctaagcggtttttaagccctttcagtgtcggttttcgcgaaattcgctaccgacgctgattagggcgacgctaaa

SEQ ID NO: 170112 - DNA, 704 bp, Cannabis sativa
agggcataaaatcccaacaggttctacatctttattggagattgcctcatttcatggaagacaaagaagcaactaataatttccaaaagttctactgaagtagggattgtgccttagctgccacaactagtgaaattacttagatccaatatctattacaggatcttgacatgaagcaactagctcatgccttcatctattgcaacaaccagtccgcactacatatcgctaacaagatattattctttatccacgattttaggagagcattctttattttgtgtggagtagtaaatgagaaactaaaattggcttctgggtacacgctgggaatcccttcccacgggattgacaattgtctgtatgctgactaggcttgacagaaactcatctggcgaggtgtgcgattgttctcccggaaggctagataacaattgggctctacctgatttatgttactttgggtctactgatggcctttaaacttctatttggaattcacgcgtcctttgctggaaatacgaatttaaaaaaaaaaaattatctaattaaattttgaaagtaattttttttttattttcaaaatctataaaattttgatttagaaggaaaaatgaaatttgtttcacaaaacatgttttttgaaaaaaaaaaaaaaaaaaacacttttctaactgaaaaataattaaaaaaaaaacggttta

SEQ ID NO: 170113 - DNA, 622 bp, Cannabis sativa
taggaaaactagggggaggagagtttgttgggggtgacagtagtgtttggggcaaggatgggtgtaatcgttggtgtgggagtttaagtagcattagagtgttgaataacttgtggatgaggagtgtcaatgggattatggggaatgtaaggaaggggtaaatagtgaggaggtgtggagtgtgactgtggtgactcaggtgatggggaaaacaactttgagtaagggaagtcattttcatcaaatgacacactccgagctatatagactcggccagagggatggagacacttgtagcctttgtgggaggggctgtaacccaaaaagatacaagtgctggttttaaaattaaatttttgtttatgatatggtctaagtagggggaaacaggcacatccaaaaactttaagaaagctataatcaggtttcttaaagaacaacagttcaaatggggtgacatagttagccttttggacaggcaatcaatttattaggtaagtggcagcagtgaaggcatcccaccagtaaacaaggggtagctgagcttgtgcgagtaaagtaaggcccattttagttacatgcctgtgctttcgctcagcccgtccttgttgttgatgagtat

SEQ ID NO: 170114 - DNA, 648 bp, Cannabis sativa
aaatctactttttatttaattagagaattgtagttcttttacaaaatagtctaggtaggttcaattgattttggatggacaaactaataaaatataattttgtattgattatagatatattctctaaatttaacataaaaaaaaaatataacctatttagtaggataaaatgcaacataagaatatgtttttattgatgacaatagtttagagatttctgctaaaagaaaatggcaagactacaataattataaagtgaaatgcagaaatggtaaattattattgttacattctaatattaagttagacacattttaatttaataaataatacgagaaaaagtataaattattaccctattgtctatatagagcaaaacaaatacaatcaatatagaagaaaaagggcctcaaaatttaacaaactaaagaaaccatatagctgaagttaactgctttctattgtactttattgtatacataacaactaagcaattttctttttggtacatataactaggctggaattgtcttaggccaaggcgtcgcagcacaattcatagaaaagtattacaactcaatatttcgactcaacaaccaagacatattgggcacaatctcactttttgcatacacaatgttcattttc

SEQ ID NO: 170115 - DNA, 508 bp, Cannabis sativa
ttgagtttgggccagcacattcatgggcagggagttaatcctctcaaatctgatggtagctcgggatgggaggttatttcaaggagtgggccggcttttgtcactcagcttggggggcttcgttatcttcgcaggggcccgttcaacattattctggacagaaaaaatgatgattatcaaagttatctaaagaagaggcaggccttaacgaatctcaatgggaatagaaaagagttgaatgctctgtacagaaagaaaaatccagagcaaatattgagtgattttttccaaggcagacttcgttcaatccaccctaaagctcgagagaagttcaaaagggcgattagttcattctggaaagagtttgtaatggaaaaaagagatgctcgtgacttagtactacaagttgaagagaaattggaacctgaaaagaactttaggccagaaataaagaaggtgtataacagaaaaagaaaagcagatgttaatgaaggcatatgtcattaca

SEQ ID NO: 170116 - DNA, 977 bp, Cannabis sativa
catttctcaaatattaaggtatatctataagtgtatatatatgtttatatatatatatttctaaatatagtttttttttaattacagtactaggaaaagttaatttttcctctttcatttggccttttgatatctttttttcttttaatctttttccacttataagaagcaaatttccctaatgtcatatctgtagatttcgaaagtatatgaatgattgtgtatttatgtatgtatatatatatgtgtgtttcgaataggtatgtgtgcatgtgagtttttgtattttttctaaattttatggatgaacaccaactgtttgataaaagtactttgtgagtttattgttccagtatgttttatatagagtttgttttgtgtaataattcttgaatctttgtttttcttctttttatttgtcggttggtttgcttagaaagtggttgacttaagaaattagagtttctttaggagaaactttgtttagtgaaaaataattgtaaattattagtgtacttttctttttgtagtgttaaatttttattattggtttataatgtctttttaataatataataaaactttcatgatgataaagtttattttgtgtgcaggtgatatagaagaaatttcattagatttgaagagaaaatattttttatttgtacacttttatgtaatttttgtaagagtatatatttatatatttataaagaatttgagagataacccggttgtaagaaattaagatttcatgattttttgtatggaagatctcatgattatttatttagttatgtgaatgttaaaatgtatatattacttatttaatttgtataagtatgtaatgtttaaatattaatacaagtaaatattgaatgataaatatttttatatagcatttatgttgttaatattacttaatgaataatattttaattttaaatatattcaatattaattaatttatattgtta

SEQ ID NO: 170117 - DNA, 1176 bp, Cannabis sativa
ttccaaagcctaatggaacttggaagatgtgtattgacttcacaaatttgaacaaagcttgttcgaaagattgcttctcccttcctctaattgatcagatggttgacgtcacatttagatgtcaacttttgagcttcatgaatgcatacttcaagattaagaaaatatcagcttctagactaacaagggcctatactattacatggtcataccttttggattgaagaatgctggagccacatatcagcatctgattaacaagatgttcaaggatgtcttgggaaagaacttggaggtctatgttgatgacatgcttgttaagtcaaaaacttccatggaacataatgaagatctagaagaagatttttctatcatccaaaagttgaatccaaagaagtgcacctttagagtttcctcagggaaattccttggtctcattatcagctccagaggaatggaagataatccagagaagattcaagcccttctagatatatcttctctctaaaagcataaagatgtccaaagcttacctggaagaattgtagcactcaacatgtttgtttctaagtcgattaataagtgcatcctattctttaatgtcttccgtggaaacaaaaaaaaatgaatggacactcgagtgcaaagatgccttccaaaaattgaaggaacacttaactaaagctcaaattttgtccaaaccggttgagtccttgagggagcaccattgtatttgtacttggaagtgtccaatcattctataagtgtcaccctagtccaggaagaaggaatgatacaacttctagtatattatgtgagcaagagattactgggcgtagagtctagatatccaatgattgaaaagctatcctattacttactaattgcttcacgaaaaatgagaccgtactttcaggcccatgccatcagggtactaacaaatcatcctctttgccaagtcctgctaaagctagagtcatccaaaagactcttgaatgggtaatggagctcagtcagtttgacattcactatcaaccaacagtctcaatcaaaggtcaagccttggaagacttcattatagaatgtaaaggaataactgacaatcctgaagaacccatcccggaataggaagtctagaagatttacgtagacggagcatcgaatgagaaaggttcc

SEQ ID NO: 170118 - DNA, 567 bp, Cannabis sativa
tcgcttggggccacttcaagcagtgtgtgaagagacagtgcaatggacataaccagtacagtcttcccaacaacccaagcaaccaggaattacaacctcttcctgttgaacgagaggacatcctggttattttgggagggccgcacattgcaggagagagcaacaatgccgaaaagagatatgtgaaaaaaaaataaaaaatgagtagtcagtatttgctccagagccttctaagaaggtaaaaactgaagaacctccaatcatattctcggaggaagatgaaaagaacgtgaggtatcctcacgttgatccattggtgattactatccagctcgcaaataaaaggataaagagggtgcatatagataacgggagtttagtgaacatcatttacaaggaaacgctgaagaagatggggcagccaaattgaggccttgcttggtaaatctgtgcggcttcactggtgacagtatcgccagtcaggacataatcgagctcgcattgaccttgggagaggtgttgtataccaaaatggtacgttttacatttatcaactcgcaagcgcac

SEQ ID NO: 170119 - DNA, 1091 bp, Cannabis sativa
aaaaattaaatataaatatttattagcaatcgaaatttaaacttaagtatttacgccataaattacactaaaatatatattttaagattttttttgtgatttttacaccacatactaaaacttagtcaaactttacaattatattataacaaagaaatttttacatttatactttctcattttttcttttataccttttcaagttttaaaaattacaaaaaatattgatgcgcactttttttttttttttgagctttcaaccccagccccttttccattttatatatataaaaactcaatcctcctttgtcgaagcttccttgtcgtcgtcagcatccctccatcgagcatagatcatcgactccaaccattgccatcgcacacctccaatctgagccaagtatctaccctcttgttcaaccatccctctccccttttaagcttttttttactaccatttttgtttgagtaatataaaatttcaaatgattcttcttttttgttcttctttagtttatattacattagtataagcttgcatctgaatatttttacacaattcactactatagaaaaggatttttacgtcggtcaatgtgtctggtcaaacttattgactgatgcaaaagtcaacctacacttttttgcttcaattatccactgatgtaaataattattaattagcgtcggttatctatccgacgctaaaacaaaaaccgaagcaaaatatgaaatattaaaattatgtatagactattagcgtcggtgtacaactgatgcaaaaagccattatataaactattagcgtcggtacacaaccgatgcaaaaagacattaaaaaaatcagttatgggcttcgacccatctttaaaaaccctacttatatatatatatatcctaacttaactcaactgccccatttcttttcacacacacacactctctctctctctatgatggacctccgacgatagaggctagacgacgaaggtcgccgctcgcaccactggctcgaaaggaccccgcacagccaccctatcacggtcatatcactctctcttgcccccttctcatctctctctatttatttt

SEQ ID NO: 170120 - DNA, 757 bp, Cannabis sativa
  modified_base (707)..(712): a, c, t, g, unknown or other
taatgttttgaataggtaaggtaaccactcttttgatatgttactctttatcttgactgagctatttcttgaggaggcaaaattaccaaagtcgcactatgagttaaagatgtgattgcgtagtctaggtttaggttacgacttaatagattcgcgcaagtataattatgtcatcatctggagggagaatgagaagaaagattttttcccgtatgtggcaaatcacgatgagtgaaaaaaagggtaaaggaaaagaagtgcctcacaaagttatgatgtacttcccactcacattgagactaaaataactttataccttaagacacaccgctgaggacatgcagtggcattactcacagagactgaaagaagacaatgtgcttaggcatcttgcggatgctgaagaatggaagcagtttgaccggcttcatccatctttctccatcgaacctagaaacgttagagtgagattgactactgacggttttaatccatttgggaacatgagcaactcttatagcctatgaccagttatttgtgtcccatataattttctacctttgaagtacatgagctcagaatcgttgttgttgaccttgttgattctaggtccattatctcatggaaaagatatagatgtgttcatgagactgttaattgatgagctcaaacagttgggagagatgggtgtgttgggttttatgccnnnnnnaaaactctatttcaatgtaatccggattattcaatatcaataaag

SEQ ID NO: 170121 - DNA, 1558 bp, Cannabis sativa
aaaaaaaatgaaaaatataataattttatttatccttaaacctatccaatgataatctatatgtgtaaatttatggtaattttataaacttttaaattattcttataatcatgtatattatagttaattatcactgtttgtaatttttttttttttaaattttagaataatttatagtactgaaattagatctttaaatatattttgttatatgcgtgattatttttcttatatatactgcttgaattttatttttaacactataaatttattgaaattttcaaaaaaaaaatatataagtgagattttaaataagtaaaacgtatacgattatgaaataaaatttattagaaaactcttctcgtgatgcagattcattccccactcatttaatatatagccttgataatcccaccatgtgtcagctataatggtcttatacctcatcctgccttaattaggtcatcggtatgcacctcgagagttctcgccctaataagaataacactgccacaacaagctagcatcaaactctacaaatcaagttaataatataaatctgtatattattttctctgagaaaaaagggatttctttctcacagaatgaagtaacgggaagaaagtcatttttctgatcgtagggatcgtgtgaacgatcatgtgaacgttgctgaaaatacaaagtactgagaaagcgtctctgcttactaattgattaaacacgtttaaaaattattttacttaattaattaaaaataataatttaataaataaattttctccaaaaagataagtgacataacactcgccaggcaattcggctcgacacggttggcgcgcatggtggttcgatgtgtgaatcctcacccatgcgcacaaaactagatttcccttgagccccaacccatgttccaaatttgcacattatatacacttctaataaagtgtttctatcccatgtgagactatacactcacacactttacttctcattttgtaaaatttcactaagttccagcaacttctttatcaaaataaataaataaataaaaatattttctctccttttctttagattttctttccctcaaatattttctatctctcctattttctttcctctctaccaaacatacctaggtaagatacaattccaccatgtcgtaaatctcacaacacacacaacaatgcacacaaacaaaaaatcaaaccagaacttaaaataaacaagatatgaacatgatcatcaaacacgaaacagagaaaatgtaaagagatgagataaataatttatcttagttcggatctcaatgtgagtcctacttcagctctcccctaaaaaaattctccactatgtaggtttattaacaaacaccaattaagagtacgtaatacaaaattagaatcgcagagagagaaaataactctcaaaccactatggttgagctgctcgagataccacgaatgccatgtttcttcatcttcaaaagtgttcttctttggctctctttctcaccagtgacggactcacttgtattagtgtgggggctatagcc

SEQ ID NO: 170122 - DNA, 700 bp, Cannabis sativa
caaattggttctattcaattgaattggattggacgttacttacccctaatactccccgtaacaaactggtgaatatataaatgccaccaattaccccttgttctacaataatacctaacaatattcatgaattcctaatttttttattttgattaatgaattcataaaatgttaatatagtgtgaaaatggtattggcatattatagcataaggtaaggtaataaagacatgcagtccacaccaactaggctttttagaaagctgtgttggcgcatcgagcagcaaggatcagcacagctcacacgtgcacgattgccgagatgtttgactattgacctgaccacccttcccctctcttctcctctcctcatcttgtatttttagatatgttggcccatgtgaaaaccctcatacactacatattataatttatatatatctatatgcttcttcaatttctaatttccccatttttaatactactactaccctttacagaaaaagtttgattcaaatccaatctaacggtgtatctttgcatgtgagaaagtggtgagttctttaaaattacttgaaaatgtgtatattttgagattaggtaaagaaaagaaaatctaaaagggacacacacactactggtactgggacacagccagcattatggaccgaatgccactgctcataattatgagaatcaaa

SEQ ID NO: 170123 - DNA, 806 bp, Cannabis sativa
gatttttttcactctattctacttttgggttgttatttttaggtagctgaaaaaggtttttctttgtaactcaggttgtctattgctagaaaagttagatttggtttatatttgtttttttttaattctaattttctattgtatcacaagttttccctaaacactcttatttaataattatcatctttgagttcaattggtaaattggagtttcttttaaatttaaggtcctatgttatggatttaccaccgttaattggttagtttttaggtgtgacttagtttcggcaaaatatattatattaaattatttggtaacatcaaatggttacatttactttgcagttgcaattaaagataagaaaacgtaactaatttttggaagttatcatttaaaatttatgtgccattcagtagttccgtgatccgtaaaggaaaataccgggtaaggtgtacaatcccacatcgcttgagaaaggtcaagtatgatgattttgagattgtgtaggtatgagactacacagtcggagagagtttaaatgggttgattggtactacctatttcaacaaggtgcatcttattttttggtagtacatcacgaaagaattctacagtcaagcatgcttgacttaggataattttaggatgagtgacctcctgagaagtttttctaggaaactgtgcgagtgagaacaaagcatgctagaaatactcgtattggtttgtagggtcagtcgtcagtctaagaagcaatcagagtggcatgctcgtgtataagagccattagtccgtgggggaaggccca

SEQ ID NO: 170124 - DNA, 822 bp, Cannabis sativa
taataactttttagcctcttaaaaattcataaaattaaacggaaatttgatagaaatttttaaattcaataattttggaaaatataatttaatgcatgttaaaattacggaattaaaatcttaattagtttatgtataattattagacattacatagaagtagagatattcgcgatgcgggtagtgcgaatttagactattttttcaaattaaaccgcatatgttgtttttgcaatttcttaaactgcaattgcaccgtaagactttaaaattgcaaaaaccacactccaacaatatccatataaacttctcgacggtttaaaattgtcgcctatgtttaggtataggtgccggttataaaccgtgccatatagtacaggtgacgattctcaattttaaaatgtatttttcagcaatgattttttaccgtcgttacattagaaaaataggagaaacatacagatttttttccatttttcccttggcattaatttttaaaatttttattaatctatattaaactaatgctgattatctaaatttatttacaaatttatattctaacaataaataaattaacgctaataatcatttaaatttatttgcaaatctatatagcaacaataaattgaaatatatacactaatcaacatggtagtcgttgtcgctccgctccagctttcatatttttaatccaccgatcacgcataatatttatctggtcatttgtgtacgatatggggaacttaccctgtaaaataaaagtatatattaattagcaaaggcctattattatacactatttaataaaaaataatattt

SEQ ID NO: 170125 - DNA, 671 bp, Cannabis sativa
catccctgtattcctgtaaataactgctgacagaaacttccaaactgaaatcaagatcatgggcagggttgaaaatggctttattcctgctattccatattgcccatagcaaacctagaaaacaagcaaacttatccttgtcaaaatgttcaaaaccacgaagcatgaattccttaatgtcaaaatttttgttggtaaaataaaactgagaaaaagaatagtttttccaaaacttacctgctctggaacacgtaactagggaatgagtgttagtgtaatgatgagaaagacaaatagaacaaaagggagaagacattgatttgtgatggaaaaggttaaggtttgaagggaggatataattaaaaggtagttgtgccatttaaggtagttgtgttgtgtcatgaatggtgaatagttgggctcatgggcttggaaattgataggttgcataattatgaatgatggtgaatttctttactattgtaggggtgaaagtgaagtaacaaattgtgtgtaatttactgtatttttactagattgaatactacatggagatttaagattttaatatgctagtttggataaaaattaattatatgaaatttttgttgggttttatgccctaaataaaactcaattcaatataatcatatttacttattaatatagat

SEQ ID NO: 170126 - DNA, 681 bp, Cannabis sativa
tggctggaaactaagtcaagtgggagacaatctggctggtcatctccgaggagaagggagctaaggtgggcccgaccaagcggttgaaccaatccgtcaaagggtccatgttaaggtcccaaggattttggaaggcatcctcgtgcaaagtgttctgctgctcctcccgcagaatcttcttaaaggcctccacctcagcatgcccccgacagtactcgtccagggcgtagttgtgcttgccgactcagagatttttcttctcctcatctgcaggaatcggagtcagcacaatgccatgcgacatagtgtatacctccgcttcagaaggaatctcggagtcgttgctcaccgccggagtgtcccccctcccagtctgcttgggagactcagtctcaaccatcttgccatgccgcttgcgctcaagggcgaccgcaacctctacctcaccttcctcaacttccccctcctcgtctatcaagatgatcgtgcctaaaggggcactcgatgaggacctcccgggggttaccggctgggatggaggcggaggcagagaggcctcagggctgtatgcctctgcgagagtagccaagagatcttccatatgcctggctgctgcaacaaagaaataagctaagtgttagaataatcgtgagaaaggcatgcgcccaacaagaaagcaat

SEQ ID NO: 170127 - DNA, 848 bp, Cannabis sativa
ctggacgacatcgattctgggtttgaggagtgaaatcacttaatgctctaggaaaatatgtcagagataatgaaggcatacaattttcgggagcaaattaggttgagattttttcaaattttgaaggctttgtgaataaaaatggcgaaatagaaggaactttgattatataaaacaaatattactcccactaaccttctcttatataattttttttttctcttgtataattaattcatacctcttttcaaaactaaaagaagagatgacaagattaaatgccaattgtgagaagattgtttaatttataggtagactctttaaacttacatatgtagagaaaaatctttataatagttggtataccttctcctctagttcactgtttagaattgattaataaattgaaacgagcaataaaagtcaatgttactataatagaatcttttataaagacaagtgagaatgtaaatctcttttgttattgactcttagttcaaaatgaactttttagcaatgattcttgttttatatcctcatctttatccatgttgtctaataattatttattgtgaaaaaacctatgcttaattaatgttctccaccccattaggtaactttactaaagatacactccattactctttaggacatttatttattcatttatgacatattgtaccacaatttcaattctttgcattctacagtttaatttgtatctaaaattaatattgtaactaaacttttattgtacaaaatgtaatgaaagaaaacattgatcttattgttctaataagtcattttaaggatgaaccaacaaactctctcaaagggtgaatggttca

SEQ ID NO: 170128 - DNA, 1626 bp, Cannabis sativa
ctatctacataaattataatctatgtaatatatacattcgcttttctagtcgaatatttagacctcatctgttagttgacctaacactacccaattcggtcaacaactaataagaaaaagaataataataaattaactatacaataacatgcatccaaaatacaatttttacaataattaattgaatttatgtttttctttgttcataattaattataggaaaattctatgatgcacctgtaacatttttatctgttttagtattcgaaataattttttagtcaaatttttttctcagagtcatataaattataattatttaagacatcctgtaaaattttaaaaaattcggaaaagtttaacacgccgaaaattacattcaaataatgtgttgcacacatgagtattttattttatgcgcgtataaaatagaccgtttgaacattattatctctattgtaaattattccgaatttcccaaaataatgtaagatattttaaataattataacacacatgaatatgtaaaataattagactaattttttttttttttccaggatgccaaaacaaggagaaagtgcatcaatacatctattttaagggagtgcatggtagaatcattttttatttttgtaccaatgaataacttcattgaaaaaagaaattataatgtcatacaaactttaaatcttaagaaaccccaataaaataaggaatctcaaaaaaccatactagatctctatccacccgaagagtataacgagctaatccatgtgcaacctcattgactgtccgacgaacatggattagggatactccaagaaaattggacataaaactagctaaatcctctaaaaaggaactaagttcattgaagaaagaagagcgtttagaaaaagcatttacaatcgctaaacaatcagattcatcaaaatgtaaagaaagtcccatagtaagagtcaaatccaatgctacaagtaaagtcaaacattctgccctgaacaactgaaaaataacctgcaaaaaaaataccagcaaaaataatatcaattcttaaaaaaactacgaaaagataaattaacaatattcattctatataaaaagagaaaacttatcttatcaaatgcagatgatgaccccattagatcttggatactacatactactgaaaaacaatttaataatttaataactcaataactttacaactctactaataaccaaaaaatcaataccgctaataattataataaaatctacctcatatataattaataattaatacaatttagtatgagaatttaaaaactaatattaatacaacaaaaactaacacctttaataataataataaataataataagaataaaaatattttatttttgaataaaactcataaaaatagcaacataactttcattattctaattaatacgataataatactttaaaataataataattaataatagaaattaaatactaaaaaaataatagaattaaaataactgcttaaaaaacaagggaaaaaaacggaaaaatacaaaaaggggaaaaaaattacaaaattactatgggccagcccattcaacatttatacagcccacatacaaatatttaca

SEQ ID NO: 170129 - DNA, 1142 bp, Cannabis sativa
  modified_base (1112)..(1115): a, c, t, g, unknown or other
cattacatataaaaaatattgagccatatatgtgaatatgaactacttcactcatcataataaattttaagatagaacctcataattcttgaaatcgtatcaatgtcatatcctctagcgggctttaatccatattaccatctatgtacgatccacaactgtccaccctacatcctttacgttcttgacggcccatttttgtcaaagtagagtttttatgtggtatattttggttctctttgaaaggagatcgactgatcaaattatatataatgcttgttactttgtacattagcaaaacaatcaaaattatacttattctttctattcacccaagagattttttcaatatttaagtgacagaattatatgttatttaataaatttattgaaaaaagaattgtaataattttatttatataattaagaaaagtaatcttttagtttgaccaaattatccttcataaaaatgattacttttaatttatttattgcaaaattcattaaaaaattatatactatgactgatttttatttcacaataatgatatgccactttcaaacgttgcatatagctaaatatgtatatattttttacaaaagaaaaaaattataaacatattattcaaataggcaaattaaatcctaaataaaatcttaaaataacaatgttctaatatattaaaacaaaaacaaacgtctaacaattatataattatgcattattttcataatgtattatatttttatctcatcatatattgaaacacttgcatgaatgaaggtttttcaataatatattggtggcttgaatactatgcattacagaaagaccattgatcttaattctgcatataagttgtcagttactttcttattagataatgcatcgaccaaactttgaaacttcaggacaattttaaatacagattctccaaataaatcaatatttgtagaaatactattcataactttagatttttttattttgtcctcattattggttattgtgcgcactcttagtggatctacgatcgaagtcattaagatatcattaaatttatctatatctttagagaaatgctaaagggcaccactggtgcctagcaccnnnntacgtgtcaatatcgctattggtgcaa

SEQ ID NO: 170130 - DNA, 603 bp, Cannabis sativa
tattatttcaatgtacttatcattttgtatatattttcatcgcttacatgagtagttaaatccttttactcacgtgttttgctttaagtattttttcaagatactttgatgtctcgtttaatactttcccttaacgggagccattagtattcagctttatgcgctattcataacttttgattttcctttctcgtcagataggttataaatcaaaaattacaatttcttgatccgtttctcgccagagaggtttgaacaaggcgttacaacgttccgacccctttttcgtcaaaaaagtttggttagggagttatcacagttcgaccccttttccgtcaaaaaggtttggtcgaggcccttaaaaaatttttaaattcaaaaaatttattttttaaaatgatgggtttgcattgatattatgtatttctagattagttctggttaatcatatatatatgcctctcaagttattttaaagggtttacgctttataattacttgtttgaaggaaatgattattttactcacaattgaagttcaaaatatttcatcagcaatgtgatttacaatcattaatctcataagaacttctccagttcaatc

SEQ ID NO: 170131 - DNA, 823 bp, Cannabis sativa
catcaaatttctatacaaatttgaaagccaaaactaatttttcactcctattttgttgtggtaagtctcttttaatctacttacaataagatgcttagcaaacaaaacaaccaattaatagttttcatgtcatgagaccaaagggctctattcgtttcagctaaaatgagatacacacaaaagttaaagacaagaatgtatgtttcccttttcattttactcaccttgctcctaatataattcaagagaccttgatagttgtaaattgtaatcatgagtgcttatattgcaatccaattcaacatctcttttgtgaaaagcctcttgaattcacattgaaagaataatcgcccatgagttttcaactcaactccacacgaggggtgaatctcatctatctctaaaccaaagaccttaattctattttttgttttcagccttttccaagcaacaacccatgtaataaatcgatcttttggaatgctaaatcgagagcaaatctgagaagcatactaaatagatgaagaagggaaaagagttttgcaaatctaattaatggagaaatgaagcgctgcaaactgatcttttgtgtaagtttttcatcaaattgtgcacttgcataatcgatttttcaataccagctattgttttgggtagacttatagttccaccaatcttcatgtttaaataatctattcgactcaaaagttgttcttagtagccaaagcccacacatcacacatgcttagtaatagcccatttgaaacatatttttcattttcattaagggaaatttgattttctatacttataaaatcaaaaa

SEQ ID NO: 170132 - DNA, 771 bp, Cannabis sativa
tcaacctcaactaatagtcatatattcaatcaacctcaaactcaaagtcaaaatcaaaatcattttgactcatcagatactactctcaaactcgggtacgtaattatttttcaactcgtgcatttttataatttttaaagtataaatttgtaaaaaaaaaatatatgatttttttcttgagaattttttttaaaaaaacagcataaagtaactggttaccttttatggtaattagttatccctcagcttaccataagggtacttaattacccttatccaattttcccatacaataacctttttaaaagaaaaaaaaaatcatatttatttataaaaaatataaaaacctataaaaattataatttcctcaatatatttttataattaaaagactactccaactctaagcataatcaatctctctgaaattttctcaaatttagtctaacactttcaaccgtttaaggcacctaataaatattctttttagatatatataaataaaatagtatgagcattttttattagaataatcatatatatatttaaaatatttttccaaatattacacactaaaatgttttcatattttgaattcacatataactgtttttttattaatctaaagttacacataatatccactagaatctctccaccattggcaaaacctaacattttaaattctcctaagaaatataaaatagggataattacataaggcacaattttttataaaaaaattatatttttacgtttatagattttttt

SEQ ID NO: 170133 - DNA, 652 bp, Cannabis sativa
ctccatatgatccgcgacctccatcccagaaagcgccggcgccatctaataacaccataaacaatgctacagaaggtaacagacctccatccctttcattattttaatgtttgtgttacacagtaaacagagcaaattttattgttttgcaggacaaaagagtagtcacaagtctagaaatattatcattgctgttgtggccacggttgccggtgtggtactaatcatcttcttccttgtgtgtttgagattaaggaagtcaaagaaaaatgtacaaggtaggtggagacaaaatcaattactcttctagttcgggaaaggcttcacctatatattgtgctctgttttggaacatgtcttaattttatgataactctatagtaatgtaagcctattaacaatagaaatctatcagatttcgttacacctattgtgaaggcaaaatagaataacatggctaatttcttaaatgtttcacaaacagattatgatatattctcatgatctcatgaagcatataacttattatttgtttctgatgcatgaagctatagaaacatacgaaccagttgatgaaatagatagtgcggagtccttacagtacaatttcgaaaccattaaagttgcaacggatcagttttctgaggataat

SEQ ID NO: 170134 - DNA, 590 bp, Cannabis sativa
aagtaggtgtggctgccttttataggttgcagcagcttttccaaactggtgaagctccaaccgaattaactgcctgcttgccacttaggataggtatttgctgatgtggcagggagcaaatgagtcaaatccaccacacgtatgatttgagtagagggactatcaatatgtaaatgcttcttttaatggtagaaattggaaaacaaactcgacatcaaaagttgcatgtatcatttgtgtttggaaactaattcaatcattaatatatgcaatgtgcatgtattaaaaattatgtaaatatacataatatattatatgtaatgtgtagtatagttcctttaaattaaaagatctcgaaaagttatttgagttatagaaagtttgatgtcatccgaaaagatgattctggaagttgaacttgtcaattcagaagaagtctcgtggaatgatagatgtcatctggaagggcgttcttggaagtctatcatgtccattccgggtggagtcttcagaaaagttagtcttccttcagaaaagagttctggatggctagttgttccctcctagaaaggagtcttggatagtcgact

SEQ ID NO: 170135 - DNA, 723 bp, Cannabis sativa
aactaattctaaaatgtatacttaaataacatgattctttttccttctctgaatctattaggataaagcataattttttttctcaaagtttacatagataaaacagaattatcatatatactaacatttatatataaataattttgaatatatcaacactacttgaatgtaacataatagtctccaccaacgaatggttgagattcatacttattttggttaaaattgaaaatttatcaaccttcaaagtatgagtgtgcatttaattgggtctttgatcatcgataaacactctctgctgattgtgatctttatctcaaaaacctctgccccaaaagtataaatatcattgagatggaatcaattagagccatcattaaatgtcttcagctcaaatatacttggttatatataattaaattaatcaacattaagtaccacacagttttgaatctaagtagctaacaacgagaaattcataatcgaatttcaatagatctaattcattcaatcaatagtaagaaattatctttcaaatcagagaaaaaaacaacaactatagcaacatcaaaaaaagaaatacactatgtttttagatttagtaaagaaaaactaaaactaattacaaatacggcaagtaaaaatcaagacctctagttttgaatgagaatataggaaatggatctcaaatcacccacaattagtaataactgctttgaactc

SEQ ID NO: 170136 - DNA, 765 bp, Cannabis sativa
ttttctccattcctggtttgaagttcccaggtccagatggatttgtgagtgcttttttccaggataattggaatctagtgggttctgaagtggaagatgttgtcctaagtggaagatgttgtcctttcttttctgaactcaggaaaaatcttaaaagagatcaataccaccactgtcactcttatcccaagtcgacttgtccaaaaactgttgctgatttcagaccaatatcttgttgtaatgtgatgtacaagattgccaccaaggtgatttgcaatagattgagaactatatttcctgatctgattgcagataaccaaggtggctttgttcatgggagattcattgcacataatgtcttaatttgtcaggacttggtaagattatatggaagaaagaattgcaagccaagttgtatgatcaaaatcgaccttcggaaggcatatgatacaatcgaatgggattttattgaggaaatgatggtagctttcgggttcccacatcagttcattattctcataatgaactgcataagaaccccaaagttttctttgctcctcaatggatccttgtgtggattttttagtgctaaaagaggactaaggcaaggagatattatgtctcctttgctctttgtcttaggcatggaatctttgtctagaatccttaagaaggttggcgaatggccaggtttcaagttccatgatgttggatattaatttaccaggatctatttactatcaagtatgtcggattaacaaccta

SEQ ID NO: 170137 - DNA, 924 bp, Cannabis sativa
tcatatctcattcacacggctacttacttaatgaataggactccctccaatctccttcatggcagtacctcatatgagatacttcacaataaacctctcctctatgatcatcttcgattatttggatgcctagcatatacttctaccctaccttcaagtagacacaagttctcccctagaagtcgtgcctcaatttttattggatatcctcagggtatgaaagcctatacattacttgatattgaaaccaagcaaatatttcaatcctgagatgtcattttttatgagaacatctttcccttaactagtagcattcaaacaataccataaaccagtttttttcttctctcataacaccttccttccagcccttcaatcgggctcacactcccacacaaaaatctggtgtctttcctacaccagttgtctctcttgacactaaccgaacaggtcacagtacctcaggtactcctctccaacctatggccaaaccaggttccctcacctataaaccagtaaaaattacctgatcctggtaataatataacagaaacaataacttctgatgtgcacaaattcaaccataacagcaacaataattgtctcacatcagagaccactaccaaacacaacatcacccctgctggaatctcacgggatattcaacatgtacctccaaattcagctaacaaatctcctattcaaacacgggttggtagacaaatcacacaacccaaacatttagcagactatgtttgtcacacaacatctacatcatttcctattgaaaaattcatatcctatgccaaactaagtcctcaatttaaagctgctgttttggctgcttattctcaagttgaacctcgctcttattctgaagcttcacaattcacacattggcttaaagccatggattgtgaaact

SEQ ID NO: 170138 - DNA, 1117 bp, Cannabis sativa
aaaaaaaaaaaaaaaacacactctatacataagctctctctagctaatctcatcaatgaaaaaattagctcaaactaaacattatgttcactcaaaatcaaaaagataaagaaaaataagagagagttatacaaaattagtgtataattttggtaagctaaattgtgatcctttacacttttccaatgctcctatttatagaataaatttacttccaaaacacatgatttagtggagaagtggctaaaaatgctcatgggaaatgggaacatgggacacgtgctggctcaagagaaactcgacagaaggtgggaatgttggattccaaccaatctttactcacctagcgtatgtttcaccaaacaaaaatagtgggcttttaataacagagttaatcttgggcctcagttttactgaagggaattaaagcccatgttgattgaggtgtcatgagcttggagtcattcaggtgtcgtgtataattttgcaaggaaacttacaaaaatactggaatttgggttaatttttataaaaatactgtcacacggaaatattttcaaaaatactatatttttataaaataccagtaaaacacaaagcagaacaactcaaaacaacagtagaacaccagtaaaacactagtagaatactagtaaaaacttaacacaatatactgcagtatgaaacttataaaaaaacacagtttaaaagtaaaaaatactgcctgacagtatttttgtaagaaaatagcaaaagttagtatacaatgtaaatttcccttttgcaattggagagaagaaacttggattgatgacgtaatgtttaaaggcccaaattatgaagaatgacatggaccatatctgttggggggtgtttgactgtttggaatgggttaatgctaacaagggaatggtaatgtttcagtaatgtgaaacattactttgtttattttgagtctttagttttggaatgttattcccttagggcccgtttggtacgcaggactggattggattatttatcccaccctgctggatgggataaataatcccagatagatgaggttagatagattagttatctagacttctaacatgcccaaacactggattggaca

SEQ ID NO: 170139 - DNA, 758 bp, Cannabis sativa
aaaaaaaaaaaaaaaaattgggacgaagcttaccttcgacatcttgggtctcacggtggtgaggcggtctgtgtggcggcggtgaggtgaggtcgatggtgtaggtggcagtgagggtagaaaagttttttagtgagggtgatgttgagagagaactgagagagatagaggaagagagagagttgaggtttgaaaatgagaggggtatttttggatttatcataaagtggttttatacttcaaattttgaaatgtattagtttaggcataaaatattagaattttttatgcataacttttcaaatttccttatacttataggtgttggtgagactctatttaagtaggtgacaaaaccaattgttataactaataactttttatgttttacttgacaaaataactgttataactaacaataactcctctattttagttatttaattacaatataatgtttaatttaagttgctatatgattatttattccttcatgataatattaattttaaataataattgtattattataattgttagtaactaaattagtaagtagtttagaatataagtaaattaataactattatatttatccatagattactaaaaataactattaagaactagaaatgcaagaaatagaaagagagatgaataaaaacaagaggaattacattgtatatccactttacttaatttgttttaatttttacctccatttttatatttttttagatatacccacttttatggat

SEQ ID NO: 170140 - DNA, 982 bp, Cannabis sativa
ctatctaaaggctttcccaaaaattggaagtgaacttcagatctctatccaaaataatggatttgagtgctccatgaaggtgaactatctcctcttttacatataactctgcaaaccaattcattgtgtaagttatctttaccggaaaaaagtgtactaattatgtgaaatgatctactatgacccagatcaaatcatacattcatgtggttctaggtagaccaaccacaaagtcctttgtgatgtcttccacttctactcgggaagtgttaaaggtttgtagtaatcctggcagtttttgatgatttgctttgatctgctgacatgttagacatttggacacatagtaaactacatctttcttcattttgtaccaccagtagtaaagtttcaaatattgatatatttttgtggaacctaggtacaatgaataaggtgtagtatgagattcatcaagtattttttcctaagctcatcacttctcggaacacaaactcgagcctcaaaaagtaacaaccctttattcaagattgagaagtccgtagcctgaccagctaatacctcctctcgaatgttgattagctcaaaatctttcagttgtggacatttgattctctcaagtaaatatgattgaagcattaaataatgaagtttactgaccatggattcaataccagtcttgaccatgtatgtcgctagctgagaagagatcattatggtactaaaaatctattcgggaccttttctactcaaagcgtctgtcaccatattagctttcccaggatgatacaaatcttaaagtcataacccttgacaaactccaactactgctttgtctcatattcaaatatttctaagtgatgaagtacttgagactcttgtgattggtataaatatctcacttttttctctgtacaagtaatgtcgccaaatctttagagcaaacacaacaacaagaagttccaaatcatgtgttgagtaa

SEQ ID NO: 170141 - DNA, 853 bp, Cannabis sativa
aaagaaaggcgcttcagccaaacagctgcagtcccttctagcgtcttctccggaatcagctcaggaaaagatgactcttttgtttgaggcaatctttgacggtgttgaaagagggttcacgaaggtagtggccaaatataaaaattacatcgctgtggctgctgctgaggaggagggatgtcagctgctattacttaaagctatggaggcatttttcagaaggttgacatccaactctatgaaagaagttgcgctggttctgaaagcattgtacgacgctgacatccttgaggaagaggtcataattcagtggtttgaaggaggatcaaaaggaggcagcaaagactctcagatttggaagaatactcaacccttcattgattggcttcagagtgctgagtcggagactgaggatgaatgattactatgatgtgctttatttggtttttctttctgggactgaattatttcgtgtgttgtttaattttgtctgcgtgggtatttacagacgcctcgtactattattattgttttaatgtttgtaaccgtttcctaaagctcttgttggttctcctttctgtgttttgttgtgggagttgttgagtgatctacatatggtgatgtcgttatacttcgaatgacatttttattggggcttttaagctaaatataaactagataaccgtcatttttttttaaagaataatagtattttcgctacaaaactttttacactaaattttgtccggaagcttgttaaataaattcttgaaatataacttttatattaacttgtatccgactaatagaataaaatatattttttttttcacttttataacaatttatattt

SEQ ID NO: 170142 - DNA, 825 bp, Cannabis sativa
cttaaaaattaccaatttcatgttgtggaaggacatctagtatgccctgttgtgggcattgtcatcaacatgaaatatggactcaagattatgatttccaaaagatcatgatcatgcatgaaaatgatatttttttagagaattacttgaattatttgttgacttttgatgtaatataatatttttaaggaatataatgtttgtttggttgattaaataaagtagcacaagtcttataaatatttggacacaacattatttaatatagtgtgggaatattagaccatcttgcgtaaaattatgttaaattttgttcaaaaaatgaacaaatattatatttagtttaaattttaaaattattttttttatgaaaaaatacaaaacagtcaacaaaagtattaatttttttattaaaaatatataaaaaccctatcaaatattataaataaataaaatataaaaatctattaattacattaatgacaaaagattaaataaaaaaataatattatagtgtaaaatttagctcatgctatgtattatagtgtaaaataatatatccaatccaatatttaataataaaaaataatatatcttatacatgtatattgtaaaaaaaaaaacaaaccaaataaacttataaaaaaaattaataataaatataattaattatcgacaatattaataagattaaaaaaataaaaaaaattaaacttacaaaattatatataatgccgaaaataaaatttatatattttgttgcacacacgactatttttcttacacgtgtggtaagtaactgtttaaatcttattatttctgaca

SEQ ID NO: 170143 - DNA, 614 bp, Cannabis sativa
aatgcttcaatgtggctggccagccggtctgtaccctagctagcctgatcaaccaatagtcttctcataaatgactaaaaggtaaaaccacaacttgttagtaggatcccttgacaaaagggaaaaaagaagaaccaagcgaactcaaaagtagcatgtccgcccacagagagttaccatgccattcaacaaatcgattgaggaagaaattctttgcaagagatttactcctagaagaatattccttgatagcatagatcctccagcaagaatgttcagaccgaactaaaaaggtcctcaccacgttacaagatactgataatggtgcatacaagtttggcaagtacaacgagaacttggagttggtacttctacccaaacactaaaatagagaacatttgggtaagtactcttactagccaacttgtcaattagtttctctaacatttcatcatgtaaggacctataaaaaaagctagtatccatttcttttcagcatggcctcccatcactcatcagtgatggccattgcatggtaagccgcgtaggggtagccactacgtgatttcaaaagtagacactaagttgtaagcttttgttacacgtaagaccaa

SEQ ID NO: 170144 - DNA, 870 bp, Cannabis sativa
tataattatattaatcatttgaggtaattttgtgaattctttggatgaatttagaatccggggtgaatttggttgattgatttgcttacttacttcaactaagtcatagtttttaggatattttgacgaataagtaaaaaactttgggtaaatctatagtacactcttagaggatgttttggaccatttgaaatttttagaaaattctaagtagtttacaataccgaaaataaaatttgaatatttcgttacatgtgttgacgttaaaaaataaccaattttgtatcacatattaagcaaacagaaaaaataagaactaaagagagaatatcaccgaattatagtagttcatgttaagagtcattatcaaatctagaatatgttagaatgttttacaatgttctaagaaatttataagagaaactaagaatactcctataaagttttagaaaaaacttagaatcacttgaattaagattagatagttctagcgttatttagaaaatagtaaattgtaattaattagttagtaaattaaaaaaaattagaaatatttagatacattctttgtagcctataaatagaagtgagatgtgtgcttaggatgcaagtttgagcaagagagttcaagtgtgagaaaaatagtctaaagtgagtaaaagtgtaagagtgtcttgaagtcattgtggccaaagtgttctaagtttgtactagtaatcttcaataataatagagtgttgtaattttcttactcaacagttcatccctatatcgcgatgataatggagttacgtttatttcgaacttttattatcgtaaaagcaaattatcttacaagagaactagagaaaaaatgactaagtctagctt

SEQ ID NO: 170145 - DNA, 561 bp, Cannabis sativa
ggattgttaccacaaagagggcagatagtgtccatacctaacataaatttgacaatgtgctcacgagttggaatggtcttcgagaggaggctccactaaagcaaatgatgtctttcatggatctttgccttccaaattttcttccactcagttgggctctggcagattgatggatccctgtcagttgttgttctctcctcaacaatagttgtgaacttcccattacagtcgggcctcttgattcatttatcttccatttcactgctactacacaatatttaaaaagagggactaatgaactcacaaaaaatgtgaccttggggactaacggactggtggttcttgacagttcgtgttcgatgggggctagagatctgggaatggatgactgcgatggagctccattttcaagtatatctctttttctaattatttatttgtccttttttcaagtgtaatggagaacctggtggtggtccaattagatctaactggttccctctctcatttattcttatatgtgtatatgtatacatatatatttatatatatatagggtaa

SEQ ID NO: 170146 - DNA, 514 bp, Cannabis sativa
agaataggagcgggtcgaattttagaaatgggagaatgtatgagtttaaatgtttatatttgagttgggttcggattggggtgagatatttcactttttaagaaaatacttacaaacttgcagtaatgtatattaataatcacacttaattattttaagaaaaaataacacttaaccacttgttttcgattgtcaattttgtatttacttaattcagttattatacatactattccccttatgtttgtttttctaatgagtttttatgatttttttttaattctatttgaaacatcatatgtgtaatgggtactagatgagaattcttccatgttgagtgattcccgccccacccctgttttaatttaaattagtattggggcaggtatgagagtgaatttagaaagcgggtatgaagttaaagagtcccgtttatcattattatacgagtaatttgcagtgtaaatacttaagtttaactctcagttaaagataaataattaagtttaatttt

SEQ ID NO: 170147 - DNA, 1065 bp, Cannabis sativa
tttttttttttttttgagggaaacgaatagagttatttaacctatacgaaagttcatattcaaacaaaaaaatatatattttctatcgtatctaatatatttttatttttaaaaaattcagaataaatttttttaaaaaaatttcaaaaataagttaatacattttttcttttttacttttactcttttaatacaatttttatagtttatttatagttgtcatgttattttttattattttataatttatttatagttatggtgaggttgatttttcgttgttatttagttttttttcttactttttgctaaataaaatttatttttgtaattttaaaattttacaaacgtacttttgttaataataattttatgccataaaattataaataaaacataaaaaatatatatttttgaaaattgccctaaacaaacacttttttgaaaatggagttcaaaaacctaaaattcagaaaacaacaaaatgttattttttattttcaattttttttttgtattaacatatttttttatatatattttctcacatactcgggtctaggtctaggatcgaggccgagtttgaggtttgagtttgggtccaggtcgcaaggctgacatccagagtttgtgtcgacgtaagggtggggctgggtgtcgtgttgtggtgtggtgtggaatattcactactacaaaattggcatttctcgtcggtttaaaactgtttgaaaaactctttctattagttcataaaactgtcggctatgtggacgccataaaaatagaccccttaagtagcggtttataatcgacgggaaaagtaactttaagtgacgatttataactgacggaaaaagtcaccttaaatgacggttataaacagatggaaaaattatccatcagactgtaatcgacgggaaaagtccccttatgcgacaggaaaggtttccgtctgactgtagtcgatagcaaaaacaatatttccgttgattctagtccgacgaacattttgaggcaaggaagaaattaaaaatgttattgcaattcctgttggaaattatttta

SEQ ID NO: 170148 - DNA, 561 bp, Cannabis sativa
aaagtttgtatgcgcaattaattctaataggatcaacacatttcatcatttaaatatatgaaaaattgtttagtagtgatttttttaaaattactacccatagttaaaatatacttaagaataaaatgatctatcattatagataattgttttttttaaaaaaaagagtggccgggaatcaaaattaatttattagaataatttttaaaattttaacaatgacttaaattttcaaagtattactataataatagactacaatataatatcctatgatgtgtgttattccacctgtcaaaaaattttaatccatgttctcacatatacttttctataatcttccctattattcatattaactatttattattagatacataattttattattattttctttttcttcttcaatttttactatttggaaaggatattcttttgaattattcaaatgaatattttgaagggcttttttcataattgtacaacaaaaataacataattataaaaaatgtgcaaaaaaaaaaatattttaaaacttatatattttgaaaacttatt

SEQ ID NO: 170149 - DNA, 1033 bp, Cannabis sativa
gacatgaccagagattagacctttctgcataaattttatccaacatttcaatatttcatggaaaggacatgaccagagattagaccttttagtaaaatatatttatttggtgagatatttggtgtgaattattagagttgttgcaccaaaaataaaagattctatatcaaattagtttaataattagaaatggtcttacaacatctccagtggtgaaccatttcaccaatttggtgtagaatcttcacatcatttcactctaagagcatctccaatggtacaccacttcaccaaatttgtgtagaatcttcacactatttcatttcgatggtacactaagttatgcaccaaattagtgtattcaaaatccaacactattagtgtacaacttttttttttggcattataactcttattttattttattttaaaatataatcttatattatagtcctcaaattaaaattttcacaaaaatgataattaatttaaaacattaacatatttaaaaatacaaaataacaataaaaaaaaaatactaatactaataaaataaagataacataacactaaggtggcgtttggtaatacttttttaatcagttttctgtttttaaaattagaaaagtgaaaatattttttaaaaacatattctatcaaactattttcactttttaattttttaattgagaatcaaaattttaaaaaagaaaaatcactttcaatatttttttaaacaatttttttcttaatcaatatttagactccaacgagacccgaacccaaattctccccccacggccctgcgctgaactcggcctctgacccgaacccgaactcgaccccaaacctatacccggcttaaataaaataaaaaaataaaaaagaaaaataaattttacagaacacacttttgttttctgattttaaaattaaaagataaaagtagctacataacgaatttttgtttttcaaaaacaaaatttttaaaaacaaaaattttactttcattttgtgattaataaattaaaaa

SEQ ID NO: 170150 - DNA, 889 bp, Cannabis sativa
tttccatttccaccccttgatggcattccaagacattttcagagagccctgtatggtggccttaccaagtcgataacgacttatgattttccccagcaggactttgttctcctcctgtggttcatcaatctccccagggtttaaggcgaatgtgatatcatcttgtgtgatctgtaccgagtcttggaacaggtcacaaacttttgaaggatccattgtgtggttgtcgatggtagtaagcaagcaaggaaatgtgaaggtggtaatgttagaaactatgattcaacagtagtgagcgtttgagcagacactctagagcagaactctaaaaaacttccaagaagtgagctcctatagagctatatcggaacagacatcttattggtcttttttatctatctattgattagttgtctcttttttttttttttttggtgtgtcctgcttcattgcaaacatagctcgatctacagattttttgtttcatataatagtttcatattaaatcaattagtgtttgttttatttttaaattttagtattatttagattatgatacttttaaatttgaaatatatatctcttcttaaaaaaaattaatactgaacactaaaaattaactacaataatatatatatatggataaatatatcttagaacatctttaatactaatagagtgccaaagaagtactatatatattgctatatattaataatttttgtaaacaaaatcaaatgatgtgctaaaatttataatatactattttaattacaatattgcctatatatttaatttatcaactattattaatgataattactttttatgttaatttgtatcttaatttattattatatattagagcataaggaagaggtttcaatgg

SEQ ID NO: 170151 - DNA, 1219 bp, Cannabis sativa
gtctttaatcctcactttaacttcttttgctagacatgcagttgtctgggaagctttgtctaatatgaagtatgccattcacacttacttaactttcaatttttcgcttaataaagccttaaaatttgcttaagtttagttgtgcttgtttgatgctatacggtgtgggtgcccccaagtgattgagcagacttatagtctcttggtcacttgcaattcaccaagtactatagaccttttcctatgtattttcttagagggacatgtttgtacgcatgtggaactaaaaataaagattaacgttaagaagttatcttgttagcaagttgtttgacacaatatcgaactgaaacactattttaattcattaattgttcttaaatatgtgttgctgattggcaacgtacattttttgtgtaacaaaagcttacaaatcaaagtcttcttttgaaaccacattttggctacctctgcacgacataccgtgcaaaggccatcactaaagagtgatggagacttagctttaaactaaattcctgcacggtaaagcattgcaagaaccactactaaagagtagtgttttgtacaagttggttactagtagtacttaccgagatgttctctattctagtgtcttagtacgagagctaactccatgttctcattttactcaccaaacgtttacgcagctttacttgttatcttgtaacttggtgcaaaacttctcagttttgtccatacttgttgtaggatctttggtattaagaaatatatttcggaggactaagcatcttgtgaagaatttcctctccttgacttgtttgttgaagtacctggaaaccttcttttgataggcaagcagtttgaggttggcttggtctcttctttcttctattttttcaagggattctactagcaatgtggggtttatctcctggtcttaacagactaaaagtacccttatctgggtgtctttttgacaaagacttactcaaatggctttgccccagacatgattgttgtagagccttcatgaacttctttcaatagttgttcaacttctttcttggtaacaaatcttagaggtggcattgagataccacatttgtacattaccccatccaggactagatacttgccaactttccttttcattattcttggttcattcttgtcttctagaaagatttctacctagaagttgttgggttttatgccc

SEQ ID NO: 170152 - DNA, 566 bp, Cannabis sativa
gaaggcggtatgattttttgaatttcatttctctttaactctgtatcttgtaaatggctgttttctatcaaagtaaccaattttgttaaacaaatttttcatactgtgaataattctcttgtttgacaataatgataaactattttttgaatctctactattagctattgtcatttgatgttgaatatggtctataagatggataacaaggttgagtcaaattaagggtataatacttaaagtaagggtatgatacttaataattttttttttttattccttaattactttattcaataagtaatacccctaatactttgagcttttaatcttcccaagtgctcattaagccgcttcacatataacaatgagtggtcatctcatcttcaaatcaaatcccatctaacaatttcccatatttgaatttcttttacttttttgtttgaccgaaatctctgctctctattttctttggtcaatggattgtctaatatgctgcaagaacaaccagccacaacaatggtagcttttcatcttttagcatttgtgagaaatagatttctttc

SEQ ID NO: 170153 - DNA, 622 bp, Cannabis sativa
tatatatatattattagactgcaacatataaaaagttaaaattttaaaaaataaaggaaaaattctatcaaaatcctaaattagcattacattactttttatgagtgattaaaaaatttagccttacacaatatatttaatacatatattttttaaaaaaaaaacaatgcaatatatatagttttttttttttcattaatacatcatgctaagaagtattttacaattttttttttctttttctttttttttcacatttattttattaatattattaaattttttgatatgattattctgaataaaatatatatatcatatgatttaaaagtagttacactgtaaactatatccatatatgttctatatatttatgcaaagaaaaacataaatcaaatgatgagagattctattattattgtaccgtttatctattttattggagttttaattagtttttattttcttttataattatgtatttgttaaattatggtcacttttttatggtataagtctcacattgattacagtgagagatatttattatgaaaaactgtgtttttgcaaatgtcaattatatataagaaaatataaaactgtatgcgtctgcagaagcaga

SEQ ID NO: 170154 - DNA, 666 bp, Cannabis sativa
aaaattataaaatttcaaaataatttatatcatatgcatataaaatagtcagatgcttaacacattgttttaatcatattttcaacatgttaaattttttcaaatttcttaaaattttacagtatgttttaaataattacaacgaccataaaaaaaaatagattaattttttttttctaaatattaaaacagataagagtacatcaataaacatatatgggatattttttttatacttttggttttgctaattagtattattattatagctctaataatatttatttttaggacttaaatttaattacttttctaatgtgaattttcattgtacatatagaaatattagacttttggaggttaaatttatctacttctctaatgtgaatttttacagttgtattatattactattagttaagtattaaattttatatgttataaatcgcacaagaagctcaaatataattataaatctacaaaaatagcgagatattatcatacaaattaaacttcaatcacatccaaaaattaaggaaaacggttgagatagctccgcgctggtcgtgtctcttgaagcgagaagcatcgactatttttcttatataaagggtcatccaggacctgggaagtgaatccacaattttgagcacttagaaaaaaaaa

SEQ ID NO: 170155 - DNA, 569 bp, Cannabis sativa
attaacaatagtcaaaaacctatagttgaagtgcttaatttatttatttattaattctgaaatgttagtgcttaaattatttacatgctacaaatgtattaacttgcatactaaatttcagataataataataataataaataaataatagagataaattgatattgatctagtgaatttgcacatttctcattgtccttcaccatccgtgtcagctcctttaaaagagcataatctgtaaaaaaaaaaataaagattgagctacaaagtggcttcgctgtagcaaaatagcattcttattaacggtataaataatcaaaattttaagtttgtgaataggataaattcaatatttatttttaaagtaatttgtggtataaatatttaatttagctctcggttctaaataaatacttaagtttaatttttcatatcaataatacttaaattatatttttaaaactttataagtacttgaccattaaatgttaagtaattatccacgtgtcattatttattgatatatttaaatttatttttttttaacaaaaataaaaatttaataactt

SEQ ID NO: 170156 - DNA, 561 bp, Cannabis sativa
cccatccaatatattcaaaaattcaagaaatctttgacttcctattgctattcctccgccgttgccagaccaaattctatcaccggtcgacatcaacttctcacctatcaccattgtgtaagtctttgtgcacattttttctattttctctacatgttagggaaaagtaagaacggtgaccttctcattttagtcgcgtttgatttttgtggcacgattgttatggcggaggtcattgtatgttgatgtattagcatgcttactatcatttttctttggggatagaaaaggatttccttgtttgggtgctgtcaagtgtccaagtgactttcatactgctatccttcttcttacccttttatttttgtttttttttatttttgtttttttggatgtttgcacccgatgtttgcctaggaggatctctagataccctatctttggcaggtatccggagggagcctctttccagcagttaggggacccccattctcctttttgtcttaggatttggtttgggggctaactgctggatttctttttcagatgagtgggattctt

SEQ ID NO: 170157 - DNA, 563 bp, Cannabis sativa
cagttcagctttatccaatcctggagggaggagaccagtcctccttcaggtaagaagcaggggtagggaaaatagaagcatgtagatctgcaaaagaagtacaaatggaatcaatacacttcttcacatcaacagtagcattattatgtaccttttcattgcacagtcgccaaaattgtgtctataacaatcgaagcataaaagaaaacctcatccgaaggaatgcccttatgtttaaagtcccaaatgaatttaacctagtcccacatgcgaattctgaaatcacaaacagggtaaatggcccaaggagaagacctccagacatgaaagtaataaacttctttttttgttcttattttttttttttagttagccaaaaagataagcaataaaattgatatttcatttgtgaagcaaaaaatccataacaaagaggcccaattgacagctaatacgagagccctctaattgtaatgggccccaaatgggcttttcacgtgtggaaatacaggaatttgggttaacttttacaaaaatactgtcacacagaaattttttcaaaa

SEQ ID NO: 170158 - DNA, 545 bp, Cannabis sativa
agaagtatatagcaaattatttgtcggtccaatgaacccctttattatggtcccccatttaaatgagaacgtgcaccagaaaaataaaaataaaaataaaaattggtgtgatacattgtatagtttcatttatatatttatggtttagatttgcattattagtattatacgtacgattcattttcttgccgtgaaaattattactttttttatcttataattgaaataataagtttctcgtacatattgatcgataaggatggatagggcacatgcatatatattataaagggatgatcaatctgtttcttaattttccataactggtctgccttatatgggttagatttgagtttagagtactcacaataattttttttaaaatagagaagctttaaaatttattaaaaaaattgaactaaaaatatgctatatagtagatactctaaacttattttttattttaaagttgttttaaaatttaccattcgtgctctactattatttattgctttaaatatattatttgagttttaataattatt

SEQ ID NO: 170159 - DNA, 564 bp, Cannabis sativa
ctgactaagattatgtggtttatggtgcatgttgcagtgcaggaatccaaagcaacataaatgataaggtttattaatactaccatctcagtaagtgatctaaaatttaggcaagtttttctcttgtaagatattaactttattaattacttaaaaaaaaaacttcattactttacaaataaatattttttgctggtttttgaagtacgggagttacttctatcactatcactcattcactatgtaatttattttctcaattaaaagaaaaagtaattttttttattaaatttaccatgtttcttgattggtgtaattgtttaaagaatattctcttttgaaataggatatgccaaaagttgttctttccttctgattggattcccacttgggttataccatcattgtaaattaggtctttcttttttggtaccaacattagccacataggttcccatcaaaaaacattagccacatagatgaaaataagtgaaggatttataaatacatatacttttaaaaataactacaaacatatactgaatttattcactgtatcagttg

SEQ ID NO: 170160 - DNA, 667 bp, Cannabis sativa
aaaatgagagttttctttttcttttttccttaattgtccaacttcttatcagcactctaattttaactcatgttgagattgaatataataataagtgataactcatgttgtttaacgttaatgttgaaattaaggataatagaggctgaaaaaaaagatatatatatatatatatatgtacaaattgctttgcaaaagttgatgccgacataaaaaaaattgtggtatatgtaagagtttctctgtccattttggcaaaaaaccaaaaggaaagaaaaggtcttccccactaaacattgttgggtttagtactttaatttattgagttgactaagtgttatataaaaatcttaagtctaaattaaaattaaaaacttgtagtgtagttcaatcaaattagacatgtgtttccaaagttttaagtcccctcatgaaaaaaccaaaaactattgcattcatttttatgaactttttttaaactaaaaaaaaattgacaaagcatttattttttaggctaattaggatttttgcctctgaatattgatatgtatcaaatcatgcattctgaacttttgaggtcgttaaaaatgctctttgaattattgagattgttggatttatggatttttttttttctaatttaagtaaaaaggtctaacatggatga

SEQ ID NO: 170161 - DNA, 1023 bp, Cannabis sativa
  modified_base (975)..(991): a, c, t, g, unknown or other
atatggccgactaggggtggccaaccagcttctttgggaaagctggtttgtcacttgatgtcctatttgagcgggtcctcgtttgctaaggtgttgacttggcctcttgttggtgagttgtattgtcacatcgcactaattttgcccacgtaagcaatgtcacatcaactggacaaatattgggatagcatttgcccctaagtctttgtgctaatgtttatacggatagggacttactagttcaatcaattggaactatagtagcctattttgaatagaagttgttgcattttaagccttttgaaatatttgtctagagtctctgatctcattttctatagtaaactaactgctttatttgtttctttgttgtgtatgtagagcaagtgaaggaggggtcccacatgtactatataagggattatggggggaacccttttcactttttactttttacttctctcactataaattgaaatttgaagaagctcttccttctccatagaggaccaaacccacacaagcatcattctcctaggatttttgcgccgtttcgatgatctaagcttcccacattcttcctcaacaatttcttgtagtgggtaagctttctattcccgttagttcacttaatttggttgattttgccatgaatgcatgaacattattctttgctttgaatatctcttgattcctacgttagattgttgtccttttggtattttgatcggcatgatagccttaggatatgtaatgtgtgatttctagacaaaaagatctgaatttgaccttcattgtgatttttggctctttgagtcacgaagaacgtgtttgagttcttgaaaaaacacatgttcaaatatctgtacaggtcttggccggccaaggaggtcttatttgagactttgtcggccaaggatggttattagggggtttggccagccaagggggtatactgttggaaattattttacnnnnnnnnnnnnnnnnnaacaagtatgttggattaacaacccaatatga

SEQ ID NO: 170162 - DNA, 614 bp, Cannabis sativa
tttaagtaggtttttttttttttttgataagtaagacttttattaaaaccaaaactcaaagagcagccacaaggggcactgcctcccttacaacagatctttcacaaacaaggttaactctagcgaggtaggcgagcctatccgcaattgggtttttcgcacgagggataaacataaaagaaggtgaataaccattattttgcttaggtaggtcaatttgtgtatatgatcttatcagaatatatatgggtaaaattattgtaggatctagcaaaattcactatgatagaactatgtatgtaaaaaaattggtggtgaaaatacttaagtaatcaattttattatggttaattatttgtataaaaaaaattaatagcaaaattcgtaagtaaaattattttttgaaaataaatacctatatataaaaataatttaaattaactttataaaaaaataataataactcaaaataaaaattaataaattttttttagttaataaatatcattaaatattattaatatatgtataaaataaataaatttttaattattaatatatttaaaaaaatatatatcattaaatattattataatatgtataaaattttaatt

SEQ ID NO: 170163 - DNA, 853 bp, Cannabis sativa
tttattttattctaattgattttgtcatatataccaaatcaatagattaaaggaaataatattttatttaaaaaagatatatattaaataaaataagtaaaaagatagataacattataagttataatagatataatttaaactgtttcaaaaaaaaaaatagatataatttaaataatacggtaatgtattactttgtagagtataaacatatcataatttatatctattcttatttatattttattatcatcacaaataatttttcataaatattcaaatttatatttattttctttacctttcatttaaatcaaaagtatttttcacaccaaatattaaatttataatgatagattaataagagaatgaaatacatgtacaccgagtatttataaacttaatcttgacaattcaagtatataattcagtaaatacaagatttttttagtttttcgcaagtttctcagatgatactggtcgtattaaaatctttactgtagatgatagttttgcctttgataaagctacatataattggccatgtgagaatactggctgaggcaaataaataccaacataatctaatatttgtccttgtgacttattaatcgtcattgcgaaacttaatctaattgggaattgagttcttttgaatggaaaccaagtattttcatcaacattaggtaaaaacagaatccttagaatgaatactcttttcccaatataatgtcccactgtaatttctgtgtttatgatatttcgatcaaaacctctacaaattaggcgtattccgttgcatagttcttctgaagcattggtgtttctaagtagcattattggacaattcttc

SEQ ID NO: 170164 - DNA, 720 bp, Cannabis sativa
aattatgttggtatatgagcctttgcaatctccacctttctaaccaagtttttattagccaagcaagttggtcgcctttacaactttcccaactctcttgctgctcgtgtcattaaaggattctatcatcgccacaaagattttggggatgtaatctcaacaaaaaaaaaatgatcttatgtttggaaaaatattctttgggggtaaggagctcatgactttggtgttattttgcgtgtggataatgaaaattctatctcagtttataaagataaatggattcctttgaatttgggcctcattgtgactcaaccgggtttgcttgatgaaaatgccttggtctcagctctttgtaattctaatagtagttgggataactctcttgttcatcgcctcttttcacttgaagaatgttcggcgttttgaggagcatggttttcattttgttaaaagtggttattgacttgaaagttagcaggactcaggtactaagataacaccacgacattgttggcctaaggtgaaagtcagcaagactaaggtactgaggctacatagaaaggtcaaggggcaaagagtcagaatgaccgagacattttttttaacatcttcatcaaagtgactgtaatattctagaattaagaaatggattagcaaaactctaattagataattattaatacttgaggaactatattattatatagttcaatatatgag

SEQ ID NO: 170165 - DNA, 652 bp, Cannabis sativa
tgattacattaatataatataaaaattaaagattgattataagaagtagaagaagaacaagaaagggaatactaactcacgtagaataatgataatcattatgacttaaataatgtatttgtctaaaaatttatttatctatatctctaactctctagaaaataatttgagaattattaagctagccttaaagttttttagcaaaatgtttattttatagaaaactaggtcactaagttgaatactttagactcctatagtgttttgcatatcactatttgaaattctaacacatgatattccatggatattatgttttcaattaaatgagtataaaactcatactctaacaactataattcctataacttttaagaatttcaatttaagatgtgtaatatttatacccttaatattggtaataattataaaggttactcatagcaataaataactttacatatgttacaaaataatacaactaatttatctaacatgtaattgtacagacagatgactttcttgcaactccaatctgtcgtaaatgccctaagctatctctatatcgagttttgtggccaagatgcacaagtaactgaaagacttagagcagagtttttcaagctcaagtgttgttcaatggacaaaagag

SEQ ID NO: 170166 - DNA, 853 bp, Cannabis sativa
ttttgttctttatcaaataattatcacccctattaatcgaatatgcatcataacttgcccgacatcaatttgatgcaaccaccggacaataccacaccatcgcccactgctaatgttaatgcgacgtcgtttgacgtccctccaaccaagaagacccgaaaaccctatactattaccaagtccagggagagctggtcggagcaggatcatcagaagttcgttgaagctgtgcagttgtaagtatgccttgtcaataatgtttatttatttaattatttgtttctttattaatggttgaattgaattatgggcagccaattcaattgtgtgtttcttgatttgaaaattcaagaaaagattttttttttttcttgatagagataattaggtgttcgtttaatttggatttttagtttattattaaagaaagtagatgttttgggtattttagtttataattaggtgttaatcccctccgaaaacgtaccaactccaagcgaccaaaatagaggtgcgctgatcttttgaaataagttcctaaaatttttgtacgagtttcgttgtgactattaaaaaaaatagaaaagaatattcaaataataaaaaatagttacaatatatatttatatataaaaaaaatccaaataggtagaaagtggacctgtgtactattctaaatttattaagataatttgaggaatatcttttttttattattattaattacccaaatataattgcatattaaaattcattcaaatttacccgcttttataagtttactctccaatttattcttacatatgctaccttaattaatagctagtgggtattaggggtgttcattggatca

SEQ ID NO: 170167 - DNA, 725 bp, Cannabis sativa
gtgttaagtaaattgccacgtggtgatccatgattggtgctggtcatgaatttgtatttatttttaattaatttaaatatatcaatcagtaaatgatacgtagataatgactttacatttaacgactaagaacctatagagttcaaaaaatataacttaagtattattaacgccaaaaattaaatttaggtatttatttacagtcgagagttaaacttaaatatttatgaagcaaattacaatttatctgattatccttaaaaaatgggatttttacaaaaatactagattttgggcaaaagtttacaattttactatcacacgaattttttttataaaaatactgtctttttataaaataaccgtaaaataataaaatagaataattaaataaaaataaccctagaacaaccgtaaaaacttaacatagtatacaatataaaacttacacagtatttttgaaaaaaattctgccacatagtaaaaaagtgagaaatttgtgtaaaaaaaaatatatattatgacgctaatggaataaattgagggataccttttttttttattcattaatcaaatgtacctttatattttattttattaaaatttacgtacttacaaataaaataaagtggatatagaatgtaattttctcgagggtcagaattataaaagacccattctgacgtaaggtgggcgggaatgtacacaaagcccattatagaatg

SEQ ID NO: 170168 - DNA, 554 bp, Cannabis sativa
aacaatggtgtgctccgtatcacgctgtggtgctaatcccgagggtatgtgaaaaatgggatcataattctttaagagagcctcattgactggtggaatgttctcttgtaactcaatttcaattacagttagatgatcgaattcaactgaaaatccctcatcttcgtgatggactgtgtgaatcatcgcttttgagggaaatttgagacttacaaaagctcaaatctccttcctaagtgacccaagttctacctgcttcaaacttcataaccttggtatgctagttcaattgaatgttacccaaagtctcgagcaattttactcccagaatcacatctgctcctccaagatccaatggtaagaaattagccaccactctaatttctcccaaatccaattcaacttgaccacactgttcgcaccttttcctctatgcccaacatgataccataaggtgtagttgttgttgttaggctatttttagcctacattttctgtcactttttatagttgttttccttctttgttattctttttggaatagaattacgctt

SEQ ID NO: 170169 - DNA, 662 bp, Cannabis sativa
ttttatataaaaatattatatatattaagtgttcatcaaattaattaattatacaacatataattttatataaaaatattacataccatataatttaatataatattataaaatataatccagtatttaccaaaaggaacccaaaaaatatatttatatataagtaggcaaaacccattttttttccaatactgaaacaaaacttttaagaataattagcatttttatgttttaattttatgaccacctcaaatgaaaaatcatgtcatttaaaatatatacgaattaataattaaaaattcctcaaatattaaaaatccaaatatgaaatcttatccaccaaatattcagtatagttagacaaagtagtccacatggactttagttttggcatatctcatataaatcataatatggtcgagaaaaaaataagagaattaaaaagtctctactaatactattacttactactactcattaattctttttctggacaaacttgttaatcatattaaatgtatatagaaaggtcttatttggttaacaattaataataatgaggaattgtcgtgactttgtttggcttttgaatttgccctagtcaaactaatgaccgttgaccatgttaaatatattcaactaaccaaaccaaccactctaat

SEQ ID NO: 170170 - DNA, 948 bp, Cannabis sativa
aataattaatatgtagattttatacgttgtcgtaaatatagttagtgattttatatgtacttgtcgtaaatatagttagttttcttttatatatatatataaatatattgaagggtcacaataaaaatgtaactacgatagttatacttttttataacctactataacagaggtcacttacaaataaactttctatttttatacttaaataaattatttttttaattaaaatatttaataaaatctttttagaaattaagattttttttattttaaaaaataaatcaaatcaggttagtattaagttacaggtaatttattaattatttttagtaaatttttaaattaatcataatcatttaataatgatccaacgactaaatgtaaatgcaactatcatgattacatatttaatgtaaccattaaaacctcttccgtatatatacaatattggtattgttagctatatgtttcctgtttaatattgtattgatgtgacgtgttgtaagtaataataatttttaattttttttatattatttatattaaattaaaatacgtgagatataatattgaattgtattcattgatagatccacataaagactgccccttaaaaattggaaaaaaaaaatatgtgtattatatgtttgtaattaaaagtaataaataaatataatattaactttgatatatgatgattgaattattttacattataaaggtgaagagtttaaatccaaagcatatatatttgataccctgtgatagtcagtagtcccgtgatctgtaaggggaaatactgggtaagttgtgcaatcccacactgcctggaaaggtcaagtgagataattctgagactgtgtaggtatacacagttgaagagggtataaatggattgattggcactacctatatcaacaaggtgcatcttatttttcggtagcc

SEQ ID NO: 170171 - DNA, 733 bp, Cannabis sativa
cacatactcttaaaaaaactacaaacacaatgcaaactaaaaaagacatattaaagtgatctatatctcaattcaagcttaaagaaaaaaaccaccctcaaacggtcgtagtcggtgaggcccaatacccacaaaatcctagagtaaaaatagttcgtttactctcaaaacataaaataattcattttttatagtatatttgtatttttttagataaaaagtatatattaatgaaaaaaaaaatatactggtgtaaggaggaaatggttgtgagataattcaatggttaggagaacttcgattgagaaatttgataacaagagagagaaagcaaaatgtttattcattttcttttgtaaaaaaaaaaagaaatagacccttggttatttagaattggtaagagcaagtcgaagaacacagcaaaatcttatatatgtcgtgattttgttctaaggagatagcaattgtgccaccattttaaactaaagtttcaccattttagagttttgtctacggtgcacgtttactgtagatcagtgcattttttttaatttaattaatatttatatatagttatattattataattataaaattaagaataattttttggagaattttagaatacacatttttaaaagtgatgtacgaatctactcctatttgtttcgatatctgataaatttttttagtctattttttatatagtagtgtatattatagttatttaaga

SEQ ID NO: 170172 - DNA, 525 bp, Cannabis sativa
taaaattaatcaatgcatttataatattcacatattattatttctgtataattatcaaattaggcctactacttacccaaattatgccaatgccaagccatcaaactgccttaaatcatttttattattattattattatttttaaatatatataaatatataaaaagaagggggtacagtgaggcatagggcgcacgttagcattgaagcataacgaaaatgtatggggcgtgcgcacctctgacaattgtgcttacttaccagtaccactactaagcttgcgatgaatttcagtactactgcgactcttcaacaacgccgtattcttctcttcagaccactttgctccgccattaatggaccttccctccaaagctttaaaaaaaaaggatcagaatcagaaattattaattaccacaaaaatataaataataataaaagaaggatctgaaagaaaagtaaaatggtttggtacaattattaccaggtagaaacgtgaagagtaatagtaatagggtggagat

SEQ ID NO: 170173 - DNA, 530 bp, Cannabis sativa
gcgccgacattagttgacatttgccgacgcaagtcaaaaaagtcgccagcaaaggaagtcaacatttttttcccacctcaaccttttgtcggcgactatttttgccggcaatagaatgtaccaattgcgtcggcaaacgttggagccaaaccgccgaaaggtgggaattgttggttgtacgattcccacttttgccggcgcaatgaactgccccggcaaaactattaagttaatttttttaatattatttacttttgctagcgccaaactacgctggcaaaagtagggaaaaagttggcggtcaattttcccttacagttaaaaaatgtgcgcacaaaaataggtggggcttttaccgggggatattagtgcaccgacaaaagtaggaggacattgaggctacactcttcagactatatggaatagaatagcgataatattttaatttttttaataatacatcaaacgaaatccttatataaaaaatacaatatatatttggtatgtttttttttcagaccaagtttgag

SEQ ID NO: 170174 - DNA, 1177 bp, Cannabis sativa
aacttcattgaaacaaaaattaaatactacaaccagttcatataccagtataagaaaacttaaagaaacaacataaagcagagaaaaaatagtaaatggattaagattttaattgtacaggcctagtcattgtttgatggccactaaacatagtcatccaacacactgtggtctagagggatttgcgagactaatccaattatgtcggtggtattttcccattttgcaatattatgcactataaaattatacctacgggagatatgaattacttcccagtccctcagttggctgcataacctaatcaaacaccttctagctgtggagatagtataggctaccccgtggtccatgttgataacaaatgcctttgtgaccactatgttttcgtattgaaacatcacatacctacagccaaactccactgatagttccgctacaaggcagagggcatgcacttcgctaagttttggattagttgttatgctctttgtggttttgatggcttgaatatctccccattcatttctaatgaccattgctacactacttcaaatatcagaattcgcgacggtcctaaaaacgatttttttcggggaccgtcgctaaaaaaattaagtaactatttaaaaccttcgagaaaaatttagtatttctgacggtttaaaattgtagtaaacgaaataggcgaagttttttaataaaatgcaattttttaatggacctttataggcgactgtttaaaatcgtcgcctataaaggtccattgaaaaattatcacctacttcttgccacatttccctcgtgcccacctactttttttctatttcccacatgcccacctatatcttcgcatctagttcttcgccatttcccacaccataaaacgaaaatcttaactctccaaaaccccacacacgcctccgcaccatcgccctcctctctcgccgtcttcctccctctctcgatctccttttcttcttgtctctctcgtccatcgatctccacccacccctcctcccgtcggtctctctttactcttcgtcgcatacgttagaccaccaccacctcccatcggtgtccctctcatcttcgtctcatacgtcggaccaccaccacctgccgtccgtctccctctcaatctttctctctctccaagctcggtataaatacattt

SEQ ID NO: 170175 - DNA, 658 bp, Cannabis sativa
tatgtaataaaattcttggtttaaacggtatttttggtttaactttgaattaaaataaaaagaaaaattatgtaaatataatatattacctaattaaaaaatttaacatacatgtattgcacttaacatcactaaattaaaaagaaaattaatttaaaataattgaattagtgtctactaaggccatcgagaggcaccaccaccaatagctagtaagtttaccttatgggatgaaggttgtagactttcttttgctcgagccaaatttaaaaaattgtagtttactcataaagaccaatctaccatggataattttggaaaatattcaacatagaatttagtgcgcatcccccaaaagaagatgagcaggatagcgttgcccaagctgcatatatcagaaacacaataactcaagaagtcgctaagacacctaaaggggctctccgaggtaatgaccattatttttatagatggtcacctaccgtccttagggcaaaaccaacttgttttgtcaggtttaaagaaaatcaatataatttttatatctgaaattgtgtcgatctcatcgctcatagatttgacagttgatatcttaaagagaaacttacaaaaatactgtattttgacctaattcttacaaaaatactgccacacggta

SEQ ID NO: 170176 - DNA, 1041 bp, Cannabis sativa
gttgttagctatgtggattgctgagtggttgtcacaatagataaaggccggtgtgggttgtgcaatatgaagatctgtgaggagatattgaatccaagtcatttcacttgtggtggaggcaagtgcacgatattcggcctcagcagaactcttggacacagtggcttgcttttttgttttccaagatataaggcagtcaccgatgaagatgcagaagccggtgatggatcgacgagttgtaggacaagtagcccagtctgaatcagagaagccacgaaggtgtagagaagaggtagtggagtagaaaatgccttggcctggggatccttttaagtatcgaagtaagtgatgaagagcttgcaaatgtgtggtccgaggacaagacataaattggctgagggtgttgactgcaaatgtaatatcgggccgtgagagagtgaggtatagaagacgaccaattagttgtcgataatgagaagggttgtcaagaaggtctccttcaacatcatcaaatcgttgccgtggatccattggagctttagccggtttgctgctcgtgtacccagtatcatggagaagttggagggtatacttgcgttgagataaaaagaggcccattttggctcgagctatttcaaagccgaggaaatacttaaggggacccaaagttttgaggcgaaatctggactgtagtgagtcttgcaaggcacgaagtatgtgaatgttggggccggctatgatgatgtcgtctacgtaaacaagaagagcaacaaaggtatcattggatccttttgtgaaaagtgtgtagtccgcttgtgattgagtgaatccttcatgcaagagggcgtcagtgagttttttataccattgtcgtgacgattgacgaagcccataaatggatttgtggagcttgcaaacaaggtttgtgcctgtaacagtggagggaatttggaggcccggtgggatttgcatataaacttcctcctctaaatctccattcaaaaaggcgttattgacgtcaagttgtaatgtgtgccattg

SEQ ID NO: 170177 - DNA, 520 bp, Cannabis sativa
aaaaagtgaataaaagaagtggttactgttcaaaggtggaagaggtgagaatggagcaattgcgagactcgacctcccaaccatggatacggatgccatgacgtccttcagtcagaagctcggctccagccgccttgagctcgctatggtcaacctccacttccatttccacagtcgcgttcgatcgattcttcggtcgcgcctcaaaggtacctttgccttgccttattattcactgttggaatttgggcccaagccgaacttttgagttttgaattttgatcaacctcaatataaatgggcaatcaaaataatttgtccaatttattttcaataggttaattagaatttttgtctgtcattcatgttaaatttttttattaaaattagacaaaagtctttaaatctaataatctcaataattcaggagatatttttaacgaccaaagtttacagggtaaataccattttggaccctgtgttttacaaaagttattgattgaaccctgtgttttgttaa

SEQ ID NO: 170178 - DNA, 693 bp, Cannabis sativa
  modified_base (335)..(338): a, c, t, g, unknown or other
gtaattccttttagtgctcttaaacaactcatagtataatatgatataatgcttactttgaaattaattctacaacaaattgattacacatgtttgaattaccatgcaatatgtaattgatgcaataaaaataatattttattgaaatttattactatgataaatataggtttttgtttgtaatattctacaaaagatctcactataaataatatggtcccctatcattagggccggccctaagcataggcgggctaggcgcgcacctagggcccattcattttagacgcccaaataaaaaaaatatcttctaaaaatatacatatttttttaannnnttttaaaaataccatttatttttgtagtaagggtctaaaaaaatttttttgcctataactcatttcaactcagggccggccttgcctatcatccatcaatgtatgatgttctttgactcgtcgttattcacgatgatgaagttattatatgttaaaaattacttatagatcgatcttattactttcatattatttgtaaattaaagtttcataacatataaaaccctaaaatatatatatgttaattctaaatgtggttctcttaagtaagtgatcaagaatcttaaaattagaaaattagaaaaattatttgtcatttttgtgaaataactttgcacaatttagtgagccgaac

SEQ ID NO: 170179 - DNA, 691 bp, Cannabis sativa
aatcaaaattctaacaaataatcgattatccatatatcttttcaaattttatttttaagtttaggtttaacctgcttccaattttcatagcccaattgtcatatagcatctaactcctaaaatcgatacaagcttggcatagtttctgccatgatactatcctttatcattgacaaggcggagaaatatttttccttcatccatcaacttaataatttcatttatctcagttctacctcatttaagtatccccctataggacactttaggacactttaggacactttctgctgggtccaaatttaaatctgagcttgaacctaagtttaccatatctatattattaacaaatataaaataaaattagctataacaaagcaactacataacgaaacatgattaattaagctataacaaatagtaactacataaataaatattatcacaagtaagttaccaattagatacgttttcttctctttttttgggtttatctttgcctgaatcacaattgacccatatcattaaagaaatcatattaaatttccattccatcactaaccgtggaagaagattgtacataacaatggagacacgccatgaactatgacgactacttagagatctatgtggatttactccatccgcagacagaccgagacgaatgtgtcttggttcagatttgaattca

SEQ ID NO: 170180 - DNA, 686 bp, Cannabis sativa
ttgggagagctctttctgtacaccacaggtaaatcaccttgattattttcagtcagaccatcgagcaatttctgcaactttccatctcctcactgccgagccaagttgttctagaaagaaaagtcggtttcgcttcgaaaaattatggctggctgatcctgagtgcacagaaattatagaagcaaattggtccaatacgctcccacttgatcctattactgctgtggtacaaaatctaacttcttgtgctgaaagactacaagcttggcatgattacaagtatggtggcatgaaaaaaaaatcaaacaaggccaagcaaaggtggaaaagcttaataactctatggtacatactaacagccattttgatgacctaaaacaagctgaaacaattttggatgagttgttggaacaagaagaaacatattggcagcagcgttcccgggttgattggctagctagtggtgatcggaatactaaattttttcatgcaaaagctagcgccaggaaatcaaacaaccacatcaaattcctccttaatgattcgggtgataaggtgcggtccaatgctgggatttctctaattattcaagattattatgctgcactttttcaagctgggaacatagacaacactgcccttgccactacacttgagtgcattcccaaattggtttctgatgctca

SEQ ID NO: 170181 - DNA, 878 bp, Cannabis sativa
  modified_base (835)..(841): a, c, t, g, unknown or other
atgtgatgaggtagaaataaagggacctagagacagtgacgtgacggtctaaaaatactttaaagtattcattcttttttctctattttttctacttttttattaataactcattttttattttttctatttttctactttttttattaatttttttaatattgattattatagagttaaaatcgtctcaaatacttctatctattttctccttaattctctcatttttttttattttttattataattatatatcaatctggagcatatctttctatttcatttattttttaattatatattaactaattgtatatattaactccattcaaaaaaaaaaaattgtatatattaactaactaatataaattcaatcacgctaatatatattaattaattgtatacattaactaactaataaaattactctatatatgtatctcaaatcaagatatacggttgtttaatttaagattagtttaatagtttttaatttttaatctatatatttatatatatattataaatatatatcacattccttttattcttctcgtattctcctctctctctatctattgttagatgaccaaagtatgcatcacacaatataccatattagatttttagattttctttcaacaattcccattcctaatgaacaaaaattgatctatacctctccatattatgcgattcttcaaaccctaagaaaaaaagattcttatcaagtattatgtgttttagtctttaattataagaccacattgttgaagagtaatcataatcaaggtattatattttttttagttgtatacaatatatatatatatannnnnnnggcaagactatggtaggacctagcaaaagttccctac

SEQ ID NO: 170182 - DNA, 846 bp, Cannabis sativa
atttgttaaaaaataaagtttgagcatcattttgccaaaatttatatagtttggtgattaatttgtcaaaaagtaaaatttgagaaccaacctgctaaaacctatataacttagggacttgtagtataaataagccataaatgtattgcttacaaaaagaaaaaaaaaatcaccatgaatggtaggtatagccatagtcaatagtcataggttacctttttcttttattcgaattctatcaatattaataaatttgtcatattatttttaactataatcaataatcatgtgaacacaatttggtgacttttggatcgtgtcattaatctaattaatgtataaaatttaataatacatatgacttagttaagaaaagattattatggaatattgactttcctattttgattacaaaaaatattcattgtctaattattatggaagatagaaattttttattctattttctctattattgtaaattactgttaatttataataatataaaaaaatttcaaaaaaaaattgaagtggcaaaaaaattaaaagagaaaaaaaaaacagctaactttataaaaagaaaattaataaaaaaagttttttttgcaataataaaaaagtacgtatttgcatgcatgagcgagaataatgagattattgctattaaggccttataattactttcttttgcaaatttgaccttttccaagtctttatttaattagagtctttattaataaagccagttattatttttcctaaattatataattaatccaaatatctccaaaacaaaaccccaacaatctcttctcttcttccatattttctcaaaaaaaaaaaaaa

SEQ ID NO: 170183 - DNA, 510 bp, Cannabis sativa
agccttggacaaacaaaagaactctgaggttgatttctcaaccaaacttaaagaagctaagaaagctttggacgaatttcaaaagtaggccaacaaagaggttgaagaggccaaggatattgctataaaggatgagaaagaatttgaaatggccaaggctgcagttgcgaaggctgaatcttatgttgaggagctcaaagagaagaatgtccttctagagaaagaacaagttgattctgaggtgaagcatcaggaagttttgaagaatgtcggctgtcaccttgtttcatcttcagaggatgaacaaggggcttactggaaataatggaagagagagacaaggtcagtttgttggaatatatttttctaagatctaaatttactatgaagtatgtttgattatattccataatctaacaccctaaatatgaattcctaaaataatgaaaataaagacatataaagtttagaaaaacttacattggtggtagcagaatgttatggctcctt

SEQ ID NO: 170184 - DNA, 558 bp, Cannabis sativa
aaaagtgtatttatgtaattttgaaactttattagcatatttttgtaaataaaaattttaatgaaatataaaaaatggtatttttaaaaatttcctttcccaattaataaactcaaatttaggattgttatttgttagcgagctttttggggccacttggtagctccacacgctccatgttttttgtttttgtttattagctttgaatttttctggggaaattaattatcgatttctttaaaatattatcacaaataccacatattagtttttcaatgaattttaccacaaatttagtagttttactttgtttgattaataacacacgaatctctttagcactcctcttgatataatcaatggagataagaataagttattgcaaaatgttttattttgttgatttatttattttacgttcagtatagcaattatgtttctagcttagggcaatataacaattaagccactaaggctagcttagtggtgagggactaagacctttaagctacaagctattaattgattgtaaaaatatcattacgctacactaaaaaa

SEQ ID NO: 170185 - DNA, 676 bp, Cannabis sativa
  modified_base (616)..(645): a, c, t, g, unknown or other
taccaatcgtctttcctgaactctggtcttgaaaaagacaatgagattcataaaaaatcacacaacaattaaaatctctagataatttgctgacaaataagagattacaggtacgtttaggaacatagagaacatatttaaaatctattatctcataaagtttaattaaacctttgccagtaatagatgagaaattaccatcagctattctaacttttttgtctcctgaacaaggtatataagagtcaaaaaggctataagaatatgtcatatagtctgaaactttgaaatctattatccacggagtatctgatatttgaaaacaatttaaagcatttatctcattacatgtatgtgcaatagagtaattaggaatacgagatgagttcaaattagcttcaacagtgcacgattgatctgctcctcatcttgttttatctcaccacgtttgaaattcaactcaaatatatgggattggctctctaaatcaaagtacatttgagttactttttctcaaagttcatttgttgtaaaataacacatatagtaagaactaatctcctcctccaaggaattcacaagccacactatcactatttgttggaaattattttannnnnnnnnnnnnnnnnnnnnnnnnnnnnnttattaacatcctaaataagaactttctaaa

SEQ ID NO: 170186 - DNA, 538 bp, Cannabis sativa
tttgtgccgctactcaatgcccaccgccaccactgctattgaaaatactgtgcttgacaccaacacctacactactattttctcttgattttaattattttatcaatattcctatcatatatatttttttcattattaatattatgaacgctttcggtattggttttttttcttttttttttttttgaaaaaaaacactttttgtattgattgatataatgctattttaatgagctttcaattaataagaaaaactttaatatcttattttgatgtatatttattttgttttgtaatgataaattagaacagtacatgagttaagttggtcgaattgagagtatttaaaatcgacttagatatatctaattctttctaaattttttaaacacactgaaagaaaattaaaaaagtacaaataaaagattaaaaaatgaaaaaattaaagaaagtacaaataatagattgattttttatattttttttgacaaagtgattaaaatcactcatgaatttacgacgctcacgtccgccaccg

SEQ ID NO: 170187 - DNA, 664 bp, Cannabis sativa
acaaagatcaaagaagccttatttattaccttatgttggtgaagatttcagatatgaaaattagataggtgaaattacaattatttgcagatctcagttctcagaattaatagctaacaagaattggagagaggaaagaggagatcaagttacttacatgcaatattgagcatagaataagaaaatggagaagatttccataccatgcactagcattcatttgtatcattcttggaaacatttccttttggccatcctaaccaattttgtttacattgattgtattggcattcaacttagaataatatggatcaatgagtgtgttatgcaagaaacacaaagaaatctaagagaaatgctaaggagcccaattatgtttatataaaatcaatgtacttggtggtgggatattatttagaatatatatatattatatatatatataaatatattcctttattcaaatgaacagttctaccaaagagctaagtagttggatggggtctagtaagaagcatagttcctcagcaatcacatggatgataagctagttcattatatatgtttcataatggtttatctttgttgcaaatcttatagcacaagtgggctctattacagctaaactttcatatatgagttggaagacaaagccatgtgaact

SEQ ID NO: 170188 - DNA, 979 bp, Cannabis sativa
  modified_base (861)..(864): a, c, t, g, unknown or other
aatgctagaatatttttgaacaaaagccatctatttaattaaataacaaattagatcatttataatttaaaatggtataaaatagtactatgaacttaatttttataatatataaccaacctcaagcgagatttcagtataaaggcaaaaaaaatataactaatctagtcataaaagtttcaagatcgtattattattaaattttattttaactaaaaatcaattcaaggtattattttgtaccattttgaaaaataaaggattcaaaatctcatttaacaaaataaaaaaatttaatttataatttttacaaaatatagtctaaaatgtcatttacccatcttttttctcctaacattgttgagcaagttagaatatgacatgttatttttataatttagtggcaaataccacatagtccatattaaggcacttcaggaggtattctttaaccatattcttaactaccaagtttcataaaactatatacaaacttttcttaaaagataataacaattgtaatttatcataataataataataataatttttttctttttcagacttttacaaaaggtacctaaaataatttttttagttacatttttacagaaaacaacttaaaaataattatccgtattttataaaagaaaattttaattcataaaaaatattgaaaaaattttaaaattgtatttttataatttctttttaatttttagcatttatggaaatatccatttgtttgtgacaaacccatgaaaaatgttaagaacaggagtaattcccacaagaaaaattgagctaactgttgctatatttggaaaaagttgaggaatatctcttctttttttttttttnnnntttatctattaatcaaaaatattcgtatattatattttattaaaatatatctatttttttgagtggattgcaatataccttcactctccacttaagtctagcatattatttacat

SEQ ID NO: 170189 - DNA, 1002 bp, Cannabis sativa
tttgtgtatgtttatttgttcattagatttaaatttgtttgaatttggtttaagtttcgttttagttttgtttaatttttttgtgtgatatagatttgaaataggttgtagtggtagtttcgttagtgagtggtggtgtttacggtagttatggatggtggtgtttcggtagtggtgagtggttgtgtttacggtggctacggatgatgtttgtttcagttatggtggtagtggtgtttacagtgactatgaatggtgatggtggtggtgacagtgtatagactaaagaagaagaataaaagaaaaatattagagaaaaaaatatttttttttcaaaaaattatgttatggttaaaaagaatatatttttttattttttatttttttaatataattatttacgtgtcaataaaattgtgccacgtgtattgtgtccatgtggacaatctaacttgacagttaacaattaaatttgaatgaaaattatgatttgttaacggtattataattttggggactttaccgctaaaatttaaattttgaaggttaattgcaagtaaaaattaaccctttatttctttattttaaaccacgtaatgtgagtattcttagctatttacatcttagctatatttttgcaatgaaggagatgttggtagtgtagtgctcctagctaatttttgtttttttgttttttgtttcctgagaggtatgaggtgtttacctcttccactgtgagtgctatgtagtcacacaccatgatatatatatatatatatatatatttatatatattaggagaaaattacatgcaaaacacgtatattgaattttatgttagttgttataatataattaagaatgatttaataaatggtgatataatttaatttatcattataatttaattaaatttttttaataaaataattaattcaagaaaaatttattttaattattgcgtgaagtaatttttatgtatatttaaataatttaaatgat

SEQ ID NO: 170190 - DNA, 517 bp, Cannabis sativa
tgatgaagccaggggttactggaactgcctggaaaagttttgctcttggtcaggacaacatattaataaactcaaaataacaatttttttaagtaagaacacaagtaatggtatgaaaagatggattaaggacttgttgggagtcaacgagtcagagaaaaatatcaactacttaaggctccccatgttcaaatctagataaaatgatgctgatttttcatcttggataatctcacttctaaactttaaggatggaaaattaaaactctctctaaagctgggcgtgccaccttaatcaaatgtgttatattatctatgtcagtgtactccatgcaatctatgaagctgtctaacaagatggtatctagtatagatggcatggtgcgagacttctggtggggctttaagaaaggcaacaaaggggtttatcttcagtcttgagataagttgtgtctccctaaatcccgtgggggtcttgggtttcgtaaaactaaagaaatgaatctagcctttctca

SEQ ID NO: 170191 - DNA, 515 bp, Cannabis sativa
ctctctaccccaatcacacttaatgcttttattttagtttcaaattggttttctacaaaggctttaaaatctatgaatgcacactataacaaatataatttctaggggtgaccaattttgaggcaacgtaaagtcgcctcaaatgaatgtcgcccctaaagaaacttgattttttttaatctgtcaaacattatgtcgcctctaaaactattagaagtgattaatagtgaaaaataaacatttaataagcttaaagtttaatataaattaaaaataaattaatattttcatgaaattaataaattatatttttatgttgaaaatatttgatttagttttaatttattatttttttttttttagaaattaaaattatttggtgttttgaagagtaaggaagaattgaagaaaaaaaggagtaattgtttaaaacggaatcagatttttctggagccagcaaagcccactcgcacgcaaccatccccatcatcccagccgtccgtgtgctaatccta

SEQ ID NO: 170192 - DNA, 508 bp, Cannabis sativa
actaactctatacaaaaagaaacttcttaattttggacatttgctaataaactgttgactgtgtaattttagacactaaccattttatacaagcccatgtattttttttttttttttttaattctctatctatgccacttttgaatctgacagtagtaccgtatcattttttgtcttattaatataataatgataatttattgttaattttttattaatatatttaaattaatttttaaataaaaaatttaatgatatgtattaattaaaaattgcatgaaattaattaacttgacacttaaagttagacatttattaaaattataaaaatataaattatacaatcaatagtacacttaggtatttatgatgcaaattactaaagaaaaaaatatttacaaagaaactttcttaacatttataattgctatacatgtaactctaagggcgcgtttggaaagccacctgtgaattgaaattggatgtaattggaggtaattacacagtt

SEQ ID NO: 170193 - DNA, 562 bp, Cannabis sativa
tcttcttcaacctcatctacatctccaacctcctcccttttagtcttctcgcagaatgtgagcatctcttcatctcctttgcccagaaagctgaaatccatctccgaatcggctaaccacgcttgatagagagaccgcttggcaattttgttggccttatttttggtgtcaactttggcctcctcaagctttctatcaaccttagcttggctggtcttgttagcatcctcaagctcttttattttcttctagtcagcctctgtttcttctcggcttcctcctttacccgagagagttcaaactctgaatcattcaactttttagccatgacatcacaatatactctggtctgacgaagttcgatctcaagcatctccactcgctgaagtcccctgtgttgagtagcaaagcaaaaaagagatgcatacgaggaatgaaaacaggcaataagaaaaaagtaaaaagaggatgggggaaaaacgaaaaagagcagggaaaagactaacttgctggataagatcataacttctctgtcttaggaatatattaccaggatctagat

SEQ ID NO: 170194 - DNA, 600 bp, Cannabis sativa
ccatatttttgtaaatatttttcttttttgttttattaaaaagaaagtctcattatgtttacaaatttttgtattgatttcagtatatatttggttacttggtaacatacatagataccgtatatatatatacaaatatatatatatataatatatttattgatatttacaaccaattaaaattcatactattaaaaattcatgccatacttattattattgggaaaaaaatcataacaaaaagtataagagttaggccaatttagtacagctgtgctgtagaaaaaaatagttataactgtgttgtaaaaaaaaaaaaaaacagctgcaacagaattatgcaaaaaaaattgagcagtgttaagtaaattataaattttaaagtgctgtgagttgttaaggttctcagagtatttaataaattataaattttaaagtattgtgtgttgttaagattttattataatgataatgataatgttataatctagttcattgtaaccacaaatatacaaaaacttatgttatataattttcttttatatatttttaattattttcttctaaaagtataaatttatatgtttttgataaaaataa

SEQ ID NO: 170195 - DNA, 851 bp, Cannabis sativa
gggcataaaacccaacagaaggcaaccacctccacctaaacagaatgacctcgcgcagtttctatgttacaattgtaacaagtcgggtcatatgacacaaaattgtaagaacaagcctagcactaattcgcaggttaacttgattgaagaagctcttacagttatgaaatctgagattaacttgattgatggatcagaaaggtggtggttagacattgacgcctctcatcatgtctgctatgatcatgctatgtttaagagttagaaggttgttgatgacaagatagttgttgggagattcccacaccactattgttgttggaactggaaatgtagagttaaattttacctcggaaaagacgttattgctgaaagatgtaatgcatactcccgagatgaggaagaatatgatttctgggtatctgcttaacaaagctgggtttactcaaataattggggctaatttgtacactatcactaagaatgttacctttgtgggaaaaaattatgcttatgatggaatgattaaattaaatgttgaatttaataaaatatcttattcttcttgcatgttgtgtgcttttaatgtttgacattctagactttgtcatgttaataaacgtatcattaagaacatgagtaatattgacttaattctgaaaatatcagaaattaattttaaaaaatatatttttagtagtcaagcaaaaataactaagacaccacataaatcagttactagaaaaattgaaccttttagacttcatacattctgatatatgtgaacttgatggtgttgggttttatgccctaaataaaactctttacaatctcattagttatcaatataa

SEQ ID NO: 170196 - DNA, 555 bp, Cannabis sativa
cgtctttcagggatttcatcaccaatttgcttgaaacccccttaagtatttcttcttcccaagcatggaatctctgtcgcatttgtcctctgggaaccctggggttctttcccaggtcactgagttgtttccctaggttgattgtcatcattttaaggggtatcctcaaacatggttggagaaatataaaagtttgaatattattcgagggaggtgtattctgagtgttttttcctacaagactctcaatgaaaataccaaactattgatactgttttttgttaactaataaataagccttaatttaagaaataaactttcataataataaatattaattataataaaaaatatgaacaagaagctgttttacgtggttttgaagttaattcttcacagtccatgagtccatcttattatcaagattcaaatgtttacataatataaagggatattggcggttaaaccacttgaactttactgtttgtaacacttaaccacaaaaaccacatttttggcggctaaactacctaaaccctggttccgttttgctct

SEQ ID NO: 170197 - DNA, 694 bp, Cannabis sativa
ttagccagactgagagatcagaggagagattccttgcggcactagatttccaagagagagagagcaatgcacttgaaatgttcttaactaagaactccacatatgatatgtttttactcgctcaatcaatttttaactgatacctcaaatttataaacaaaagtaaaattttaaaacatattgccaccatttatcaaagtccaagaagttaaattatattaaaattaaaatataaaaaaaaaattgaaaaaaatatttcagcatatattttttaaagtaaattgagtcataaatacttaatgttttagattttatacatttaaatactttatctttatttttggagacaaaaatactcaatgttacaatgctatttgtttcaaaaacaaaataagagatatgtaataccaaattattatagttgagtgaactagtgcagtatatgaaatatagttattgaattgaagtactaataccatgtgaaaattgttacgagaacttagttttttttttttttttaaacaagttacatttagtttttgatactaagaatattaagttttaataaaaagaataaatgtaagggaaaaaaacaggaatattctaaaaagggaaaaatattacaacaatactgtgggccggcccaatgaacatttgtacagcccaaaaggaaaatattacaaaaataccactt

SEQ ID NO: 170198 - DNA, 1337 bp, Cannabis sativa
aatctttgtggtactggatatgactactagtgcctagggatgcacatttctcccatgaggatggggccttgcaaggacccgccccaggtttctccgtctaaatggagaatgtggggaacgaggattactttttgtctctaaatgttaaatgagacgggaacggggttacttttttgtttccgaatattaaatggagcgaggatgggatcacactccccgtcctcacagtgactcgcttcgtgttttattttatatttctaataataatttacaatttatgtttgtatttttttagtatattagtattctttttatgaattttaagttgtattttagataattattaatttattgaataataactaatgtataatattttaatttttaggtagtttaatatttttatatatttaaatttttattataaactttattattttacaggagattttctgccccgttcccgcccccaattgggattccccactccatccttgatagggaataaacagggatagggattaaaattcttaacagggataagaataggaggagcactccccgctaattttctgtcatgtgtgtattcctactagtgtcttttaatatttgttattattgaattgtgtcattcaatagcattaatggacaatctttttaatgcgagagagctatatatgcgtcagtcttaaagtaaaataaaaaagagaaatttacacaaaatattatttttgataaaatttcaacatttacattgtaaagtttttatatatatttttatatttttttagtttagaatttttttatttttttattacaatattacgatgttttataaaaataacatgaaaataacaaaaaaaaaaatacaacaaaaaaaaaaatacataaaaaaaaaatacataaaaataattaaaaaaaagaacatataaataataaaataaaacaacaaaaaaataacaaaaaaacaacgtcaaaattcaaaacaccacaatggaatgaagttgtactagggaagtatgtatgggctgtagccaccaaacaagacaacttgtgggtaaaaatgggtgcatcatgtatacatcaaaagttcaaattggtgggactatcaaactaatgatggcagctagtattggagacaagtagtaaagcttaaagaaaaacataaaaatctctctcacttggagccaagcatggtaagaagttatagtattgataactctatgaaaatagagttatttatatctttttgagcattaaattagctttgttctcaagtatttttagtttattttagtgacttttatttggttttatttagttttgcataaatatta

SEQ ID NO: 170199 - DNA, 632 bp, Cannabis sativa
tatatataatatagtattatataatctataaatacgtaggtgactacattaatgtgactctgtatggaatgcattaattttcagaccataaacgatgttgccttgggaatcactcaggctgctttatcaaagtatctcaacagaaaatacggtacacgtggttttaacattaattgctatttagtttgttctcgactttattcactgaaattcagagtagagtaggtgtaggtcccatcattgctatttagaactctttaaacatttgtgattattttctttcatctctcacctgaattgtattgtttttaatcataaaacttgtcatcgtgtcgtgttcgtgtcatattttgtgtaacccgtttttataattcgtgtcaagcgtgtcgactattttttaactcgtgtctaattatctcaaccctaacccaacccataaaaaatcgtgtcgtgttcgtgttgactcactataacccattttactattattgaagctagaattgtaaagaaaaataataaatttaaaatattcttaatttcatgttaaaaaaaaataaatttaaaattttttaatttaatattaaatcactaaatatatatttttatataattatattattattattaatttt

SEQ ID NO: 170200 - DNA, 515 bp, Cannabis sativa
caattctctttttttacaattttttcccacttcacttctaataatattattactattgctacaatatttagggttattttttactggctaaactttattaattatcattttacttgcacttgcttttttagtttggtaaaaccctcaaaattattcaattgttagtaaacttaagatactatctatttttcacagttaactgctaacgtggattgcttatgtgtacattcttatacacgtgacacgtttatattagtacacataatattattatttaaaaattataaaaaattatttcaaaatttataatgttttttattttttatttttataattttctttaattttaaaatgagttttgaaataataatattaagtgtactaatataaccgtgttacgtctacaaaagtgtatatataaacatcttatatttgcagttaatcgaatggcgcattaaatttgttaacagtttaatagtttaaaaggttttaccgctaaaatttaaacttaaaaa

SEQ ID NO: 170201 - DNA, 704 bp, Cannabis sativa
cttagcgcaccaggccttttatcaacatgggcgctcggtacttactcctaagctctcatgatatcattttggtactttcaaggtttctgaacttgaggatgaggtctcctacatcatttttgataattccaaatttaatggtcgcatcagatttggtatttgagcaattgaacgtagcgtcccagattaatcgtcaacctaggcgctaggctaggccctgtttccaggggcttgggtttgtgattttctccccaaatttacttgagtccttattatttctgatgacgaaagaaatgcccataatacttttgacccaaaaatttcaaaaaaatatttctgatgagattcatgaagtttttaaacataaaaaacatgtgaaaattgactttgattttaaataaagttttctggtccaaacgtgttcttaagatttttttttttttcaaatttcaatggtttttcatattcttttattcataaaattgatataaattatattaatgttgtaatgcatatgggattcgaaatgaatactaaaaaataaaaacataaaaattttgtatacaacgaagaaaaaattcatgcatatatatactcgtatataatctttattgttgtgattggccactaatagagtaatagacaacattggctaatacattccaactgcccctaacggctttacctaactgtcagttatgaca

SEQ ID NO: 170202 - DNA, 868 bp, Cannabis sativa
gccttctgctgaaaaatttctgtctcgtgttcatattggtattttggctataactaattcaatacaactcagaatttggcgattcaagatgatccaaaaatctaagaaagagatctacaactttcatgtttagctcaaagtccacttctgcttctaaggtcatcgaaatttacaattaagttctgccttataaatctgaattctctaaaattgatatttttcatcaaaatatgttaaaattattctaaaatactctaaacacgtgattagtcttttaaaatttaaattaaaatcacactaattaaatgtttgaagaattaatttagtaataataatgaaagaaaatgacatagcttaatagataaatatgcacttatcaaacatggactttttttttgctaatgatcggtgtattactccaattttatagaatgtccttaaaggagggaccttaacaaacttagatttaagcaacactgtattactccaattttatagaatgtccttaaaggagggaccttatcaaacttagatttaagcaacacatcctcctcctcaagtgagtcacccttgtctatattatatatataatctattttgaattatgctaccaattgtaatatttcaaaaacaaaaaaagtaatgtattaattgacgattgttttgctggctccacagtgtaaattcttatttgtacttttgaaggatcattaccgaactaataacaatgatattcctttgctttgtagtaagataaatgatagtaaatggctccaaattataagattatgttagtttatgtcctcatttaaaaaaaaatatagcaaatgaccctaaatcataagattatgttagtaaatgtccttat

SEQ ID NO: 170203 - DNA, 929 bp, Cannabis sativa
tagggcataaaacccaacaacacgcctatatatatgttcatatatacataatataatatataaagaacgttgactctctttgtcagagattaagagcttatattattctatagtattatatttttttatagtcttctttatctttttcgagtgtcattagtgttgagtatattaccacacatatcaaggaaatacttaggtgaatgtgaaagactgtgtagtctttaacatcctgaaggagattcgagattccgttcttgattactttatgcaacagaaaggaataggtttgagagaacaaaactgaaagagacattaatttctgatgtgatcgttgtacggatttcataaactccttatatgtttaatttaattgctttagaatccatgttaggttgttaatttcaacatacttgaatagtaaaataagatcctggttaaataagctttctaacaactggtatcagagtcgtagtaaccttttattgttcatgtaaagtggatttaaaataattttttatgtatttttatgtgagatttagatgttacatattaagtgatatatgcattgatgattgattgtgtttttgtaacttttctatataagataatatgaattttattacctaattattatatattaaaagattaggaaaaattatgtaagttttctatttacgaagtcaattttgatgaaaattgacaacacacgcgtgagctagcacatatttgcatacctaaattcatatttagtatatcttgagttttaagtaacatttttgagtgattaaaaataggggtattcatcaaatcgcctaaatcgttcaaatcgcccgcaccgcaaaaaaaatgcggtttgaaattttttacagtgcgatcgtagtttgaatttttcctaaaccgcacggtgcggtgcggtttgcgatttt

SEQ ID NO: 170204 - DNA, 698 bp, Cannabis sativa
gataattagataatatgaaactcaaagccaaggcaaaaaattaccacctccaaacaagcccaattacacccttactgtaacaattgagtaataaatctttgctcttctatactcttcttttttctttgtaaaaactatgcaattgatacactgttcctattaattcaaatgttatacactctagcttccaaagtaacaaacaagatagtcaccaaatgtcccattctcttctctgagctccaaatcagccaactctcgaaatttaaaggccaaaacccgaaccacttgaaatcttcattcaccacttttcttgagaagagactgccaaataaaatgtgctcgtgactttcattctccatgctacaaactggacataataaggaatctataggaacatgaaatcgaagaagaacgtccttcgtaagaagttgaacattaacagcctgcaacatgataaagtgatgtttgaaaatgttacctctacaccacactgtgaacaagtgcttgttgaagcaaaatattataaagcacaacaaatctaaacttgccttgccttccaatagcttgaataatttgctgaattttaatcccaacaaccacaattttttcagtaccaactcgtgtttttcctgagattgtaatcccaaaactcaatgccttttgtggcgtgctgccccatggcacacccacactagggc

SEQ ID NO: 170205 - DNA, 864 bp, Cannabis sativa
ggcgcctgtggatggtcctcccttgcaggcaggggccgatttttcagattcacaaggatgtatataacatcgtgcgcagctatactctccaggtttgtgttgcttgccgaaatggcagactggcgatatctgcagtgttcatgggaattctagttgtggttgaaacatggacaccaagatctataatctgtgggtctttaggaaggtctaaagatgcagatgttgcaactagagttcttcttgtgttagccatggaatttgatcagatattatattaactcactctcaatgaaagcaccaaactgttaatctcgaaaattggccaaccaacagcggagtcgtatgaatctgatgcttgccacgtgttacacaacaagaacaaaaatctaaataagtcaaggaattttatagaggtttggcaccctttacttagcggataatgacttgatgggaatattttaccaggatcaagatttactaacaagtatgttgaaataaccactacaagaatgtatacttttgttggttctattgttaactgtgtcggcaaaagtataccattgtcggcaaaagtcaataaattcgccagcaaaagtgggcaaaaatttttgtccaggtcccacttttaccggcaatctattttgcaggtaataggagcttttgccgaaaaagtaccataaattcgctagcaaatatttgcaaaccaactgccaaaaggtgggaattaatagaagaatcacgtctagatatggtgacaccagaggtgtgggcagaggttatcgcaattggaaagacccgaaacaacatgtattaattgaaagttgtaatattttttatttctatttacttaatatttttttctca

SEQ ID NO: 170206 - DNA, 657 bp, Cannabis sativa
  modified_base (623)..(623): a, c, t, g, unknown or other
aaaaaaacatgattgttagttttacaaaaaaaaaaaagaattgattgttaaaaaaagacgcgatgatatttgatatttgtgtttaaagttaatttaaatttaaagttaaatgtatttgagtttttttaaatatcttaatttaaaagaaaaaaatcgtaattgacagtttaaaaaaaaatgattgatagtttaagaaaaaaaatggttgatagttaaagaaaaaacgtgattgtgtgatatttaatacttgaaatattacttgaactttttttttgtttttaatattacttgagttttttttcagattaatttagaatatcaatttctgaacaaaaggagaataggtgaaaaataagaaaagtttttaatgataaaattaaagattaataataaagtgtaagaaaacaaataatgaaagaaaaacaaaagtgtcataatattatactcagacttagtgatcatcaatactacactgactataataattaataaaaatcgtcagtcacttttatttttctcgttagcaaatatgtaattatatatatatatgggtgtattcttaatggatattgcccatgagtaaaattagaaaattttgagtttttatacttaatttttctatntaattaaaaaaatctctcatttatatatcatatg

SEQ ID NO: 170207 - DNA, 633 bp, Cannabis sativa
aaaaaaatctttaaaggtacaaatatacaaaattttaaaaaaatagttttgtatataattatctctgttaaagactattaaactccatcttaagggagttgggagctagaagttaagttagtttagattgatataacacgtggacatttaacggttagttgagaatattgcatttattatttctcatcattgttacaatataatataatacaactcacaagctataagtgtaatgtagatacttatttctctcaaattaaattttcatcaaatgaaagattttacttattttgcatatgcatttgaaaatgcatcagttttggtcagtttacattacatcttatttaatctgatgtaaggatcgggttacaaaaatctaagtgcaacccgcccaattaagaaaaaaaaaagtttctaagaaaaaaaaaagtttcaaccaaaaaaaaagtttcaacccgctcaaaaaattggtcgatttatagtcgggttaacccatccaaaccgagcaataatatttattttgttttttaaattcaattattatattttagttattgtgataatgagataaatataaaaattaaatttaaagttcaaatcattcgcaataaaaaaatatagcaggttgaactt

SEQ ID NO: 170208 - DNA, 1263 bp, Cannabis sativa
gagagagagagagagagaataaactgagaagaagatcggtttatataccttggagttccatttatgaggatttcagatcttcaatcacttgggcaaggcatagagaagacgaagctgagacggtgaggtttcgagtcccttcagcgtcgtcttggttcggattcgacgagaggaagaaaacgatgggaaagagaggtgagccttcgtcgtatgggttgggaagtcggtggcgccggctgggtcggaagtcgacgtgctgtcgagaaaggagaagggagaaagaaagaggggttgtgttttttgtttttttgctgaacgaaggaggctatttgtttggtcaaaagaaagtgtgaaggttttaattttggaaccctattcttttttttaactttattattttttaaattgattttattgcctttttttttaatcagacttttaaacttctgaaatcaatccctgtaaaaaaaatgaaaagaaaaataaaagaagtaaagaattaatatcattacataaaataatggagccagctgtatttaaaaaaataaaaaataaaaaataattaagtttacccattcacgccaagagtgtcactataggttaatattttctataaaaaataaaataaaaaaaaataaaaaaaaaattatggaaaaaataactctttagtgacactttgtatttttagtgactctgattctaagacactaacactccatttttagagtctttttgtgagtgtcactaaagctcatctctaattctttagtgacccacaaaaaaatgcgtcactaaagtgtgtcactaaaaggtaagtttgtagtagtgaaaccgaaaatagaaggcatagagaccgaactaagaatagcttgaacaactaaaatgcaatccgtctctaaaatgacatgtgacttgttattcctctttatccaactaagtgcctctttgacacttagaatttctgcaatttcgggacggcaactgacataagaaatagttgaaaatgcctcaattactttaccatcacagtcgcgtgctacaaaacccgtaccgatctcatttgtatcttcaaaaaccgccccatccacattaattttgaactgaccagccgccggtttggaccagtattctcttgtgtcagtgcgattggaagacagggaaatcgagcccgaccgcttagactgagcacacgtccattgtcgaagattggtacgagccagccaaacaacatcagcagcactacagcttctaccattccaaagc

SEQ ID NO: 170209 - DNA, 1033 bp, Cannabis sativa
gtaactcaggttcaataccattattaatcttttccatccagatcatgcatttctggaacgggtgtccaagtcttccacactccatacaccattctgacagtctttcttagcaaaaatcaacctagaattgatcccttgtttgttttagttgtatgtttcgacctcttagcaatggtttggtaacattgagtgtgactctgaactgaagaaaaggaccccatccttcttccaaagaatcatcgtgaacctccaaaaattcaccaataatgtttcccaatgctttagctaatgttctagacttccttaggaaaggcagtctataacattggacccaaaaaggagaaaagataagatcatcagaagtgaccttttgcagaacacttgatgtatacaacactatgtggtggttttgaaagtgatagggctccttcagaagaaccctttgtttgtctccttcacatccgaatgaaagcacaaacaaatcaggtggtttttcagtaattgtggtgtggaatctaccattccaatggtctttcatttgcttttggaaagttgataaaaagacagatttggtagtaagaactcttgcaactaacactgtatccaaattgtcattttgaacttctacatcatcaaggattagaggaggttcttcttcttcaacaatagtcatcttgcctttcattttgtcagtgagaggattcatggttcaggtgaaaattttgatagtttttggattgaagggagcggttactgagatacgagaaacaagaaaaaaggaaaaaaccataaaggacttcttaactgcctcagagcacaactaacgacagactgctctttttgtcgtcctctttttgtagtttgtatacttaatagattgttttcccactttttaggattttttttttgtaatttgttcaaatgtaattttgatactatataatttatggtttatttttcatttttttagaattttattggtgtatgtacaaatgtatttatgatattatataccgtaggttttttttttttt

SEQ ID NO: 170210 - DNA, 623 bp, Cannabis sativa
ataagattacattgaatagagtttcatttaagacgtaaaatcccaacagaatacttatacttaatgtgttttaattcaattctagtatgcatgttctaggttgtctaatatttaggttaaatattataaatcgtgataagaacaagagttattggcagctaaatactcctaactttcattttacttgcacttaaccttccaaactcaaattttgctgggaaaatccgccaaactataattctgtttgtatttttaaggtgtcgtcgaacaaattctattaatttgtcattttgattatgtggctagtgacagatcactattagagtccaatgtggctgccaacataaattatacatgtgtacaaatatacatgtgtcacattttggtctaattaattgatattatcaaaaattaaaaaataaattataattaaaaaacaaaagtttaaaatataaaattatttcagattcttactccttaaaaaaaatctaattcttataacaaaaaaaattaaaacaaaaacaattaattaacaattaaaaaaactaagaaaaaacttaagttgtctctctttctctatcactctcgtgtcttcttcaacaagcagccatgctcaaagacag

SEQ ID NO: 170211 - DNA, 616 bp, Cannabis sativa
tgaattttccttcccatatgaacttaaatacagtcaagatactactactaaaaccacagaaatctcttctcttgtttctgcactcatacctgtttgctctcactcgaaacctgtctatactagtgctgatttgcttcaatcaggtttaaacacaaatgctcacaactcaagttttcctactaatattgaccatactgctgtagttgacaacactgcacctgatcctattattcgtgcaaatgctgctaacaattgtttcccaagtgatattgcagatgcatcattgagttctagtggtgctgcaactggtaataatgcagcagaggtttctgcaactgtatttgctacaccagatgcagtaaaaatttctgcaacacatgaagtacctcctcatggacctggttttgccacaccagatacaaccacatcacagctctctccacctcaaagagcatctgttttaccagatacaagaactgctcctgcattttcttcaccaacagttttacctctactgtctggttgtttgaatgcacctggtaaaaacaatgctcacaggatgataacacgatctaagttgggagttttcaaacccaaagcactcatggctttgaga

SEQ ID NO: 170212 - DNA, 595 bp, Cannabis sativa
  modified_base (559)..(559): a, c, t, g, unknown or other
cctaacttgaggggatatgaagttaattgtatgtgagttgtttattagtacatgttaattatgggcttagaccctaatcttatgacagtacattgtatatattatcctatgggtgagtaaataaaattaaagaaacacattatcccaatccaaggctgtctcaaacttttgaattacatagggcaaaattttaaattggggcctttttttagaaaaaaaaaaaaagaaataaatatttacacattattggcccgttagtcctttttatcaactttttgtaaaaggtgttagcttaggtctctaggaagtgagaacttgaatttccataaattcatttaattttttttttccttgggcttgtttaatcgacacacttcttaaacaaaaaaaggtccacttttgtaggctttcacatatatataataagtggaaattacactctataccctttttatattgtccttttttatttttaccttcttttttaaagtctatcatatttacttcctttttttaaaaattgtacctattttacccatgtcacttcaagatactctcnatgtgactctcttatgtcagggtattttgggtacaa

SEQ ID NO: 170213 - DNA, 566 bp, Cannabis sativa
ctaactgtcatgagccttaacagagaagctcttgtaggtcttgtggtttttgctttttgttggaattggaagttcgagtgtacttatatgagagtagttgatgttgtagtggttgttattttcttttaagttttaattttatttttgtttattacaatattgtcccttgtgtaggaagtgtgtatcacttctgtgggtgatgttgtgttctttctattttagatagtatggtgtttcgttcgttttactttattacaatattgatcttgctactctttttcatgatacacactataaaaaattttctttcactcacaataaatacattacattaaattattttattttaaaatttaatattcttaatattagaaactaaatacttcaaaaaaaaaaaataataaaagagatacaatattaaattactatagttgagcgaaccagtacagtatataaaacatagttatcgaattgaagtgtcaatatcatgtgaaaattattatgagaactagttttttttaacaagtaacatttagtttttgatattaagaatattacattttaaa

SEQ ID NO: 170214 - DNA, 603 bp, Cannabis sativa
gtggtggggtggctggcttgggtgggggagcaggggtgtatggcttgtggggaggagggtgagctgggacaggggaggaagaaggaggaggagggtggtggtggtggtggtggtggtgtggtgggtgagcgggtgcggcggccggagggtggtggtggtggtggtaggaaggagggtgggctggggcttctgtggggattgggaggtggagtggtggttgagacactggtaatgcttctattgtgaagcaactcactacgagtagagctgcaaccaatgctcctctattagccatgatcatttctttaatttatgttgttgtgtatacaatacaaggatgatatgagggttatatagaggagggttttcttttgtaatagggctgtgaatgtgatcatctactatatttggtggggtctcgagtaaggaatggtagggtaagtaagtaagtaagtagtgtagatggagatgggtaagttgttttttttaccaatttataaaattattcatttagaataattgtatatagtattgttgatattatagagaagggtcacatgcattggttatagataaattgataggattggagtaggggttaat

SEQ ID NO: 170215 - DNA, 581 bp, Cannabis sativa
ggccaatatcggtgttatggcaatggtacggatcagggacaattttttaattaccattcccgtagggacactatgattattaaccatcaaatatatattcttaattaaatgaaaggtaaatactaagtggcaatttaagtgtcatattgttttggtgcattttaatattagattcggtatattataatttaataaataatataaataactattaatcaagatgctacatcagtttaatgttaggtaccttaaagtatgaaataacaatactccaagtaaagtaattattaatataaaatgtaattaaattgtgtgccttacgtcgaccccatactttgacatttaattatatcaataatcatataacacatgaccgaggtaagcccactaaggtgtgtgcccctgaacgctcagggctctaaaattgtaaaagaattatcattatatagataaaatattgaataatactaaaatataacaaaatagtatatttagtgtagtaatagaaagtgtaattttaaacaaagttcaattttcaatctctacttttataatttttttttttagaaatatttaatatg

SEQ ID NO: 170216 - DNA, 516 bp, Cannabis sativa
gttggaagatggtgattttatcaacaaaatttatgccacatccgacccttatcagcttcgtcgcgtaggcatatttctcgatgaaaatagatccattatcactggtcgtgggcctcgtggtgataatgaaacagaacacacgtttaacgtccccgatggttgtttcattctgggatttacgggcttctataccggtgcaatcactgagatccagatcatctatgcggcattccagccggccaaatggtcccaacttatttgaaaaccaaacacacagaattaataaaacctgccattaattgtctgtgatcatctgatttggacacacaatcaagttttaattagtttttctttctaatttaattatatatatgtttgagtatgatgagaattataagtacgagagtcatgcatgcatggtcgtattcttatgcatgcatttaaataattacgtacgtgagtgaataaatagttgtataatatgcatgcatatatgtatgtatgtatgtattcatg

SEQ ID NO: 170217 - DNA, 641 bp, Cannabis sativa
tgcttttctcatttccgcaacacaaagcaagtataaaatagcggaaggatacaggtattgctttgtccgctgccaggtcgggttaattggagtaaaaaagtgtggagaagattaaatactctgaagcatagctttatattttggcttacaattcaagatagattgaagactaaggaaagattgtttcgattttcaacattatctctacacttgctgtcagttttgcaatatgggatgaaacaattgatcatttattttttaagtgctccttctccaatgacagtctatagcaggtaaaacagtgcctgcaacgagaacatcctctagtcaccttgctgatctggtttgacagattggaaggaaaaaaataacagactttaggaagaaagtatttttaacagtatttactgcattggtgtatcagctatggagggctagaaatgaaagtaattttctccattctcatgataattcacagaatattgtacagaaagttaagattgcatgtaaggattaatgaactcatttcttaaaaaaaaataaaaaaaaaatgaagtggtatatctaaagttactaaaattactctaagggtgcgtttggaaagccacaatgtaattggatttgtgtgtaattggaggtaa

SEQ ID NO: 170218 - DNA, 589 bp, Cannabis sativa
atcccctgtaaatggtgatctgagccggatcattatatttattatgataatttttttactccactgacctctttttctttgtctccataggaatagacatagatcttgtgagcgatcttagaggtcctctttaggctgacagggaatcccggaagaaaattggcatggttttttatggaccccggacagaagttggcgtggtttctatcagagaatctagccaaccacagatccaaacccatcccaaaagacccttgcgccaacctctttctggtatcgaggaatttcttgaggctgggaaagaggtctcggcttcaaaaaatgggatctgatgatgagaatggggtctgttcaaaggctctctatatgcagacggtatttcttgagctacatgtagccaatatttctcgagtttatcgacttcccctctcatcctttgtttaggaggatcacttaatggtttgtccctagtggcattttcgtaaagactagtttgtaacccagctttggtttttttttttatcttaaatgccttatactattttcattcgaacttaagacaattgtgtttgcttgcatttttattcac

SEQ ID NO: 170219 - DNA, 697 bp, Cannabis sativa
tccttgaccgaattttgtcccactagattttctttgcgagatttttaatgagggggttattatggacatttaagggaaaatgttataaatattaataaatatatggatgtccaaattttttatttattatcattaattgtaatcaatattctctttttcttaatttcctaatatttggctcatatgtgtataaataggagattaccattagaataaaaacactaagaaaattctcatctcttctctattttctttctttaaattataatattttataataattaattttttttagatatttgtagcaatttttaatagtgctccaacatacaattgcaaaacatcatacaaaaattaatatttttattaaaatacaacaataataataactttacattaattttatcattatattatttggtaaatcaataaaaaaatgtaaaagggttatatttaatactacaattaaatataatacgtttatggtgatttgtatcataagaaatatttattgtgtgttaatttctaggtgagttatattttagttttatattatttatttgcatgtttattggagctgctaagagtgaacttgatattaaacaagaaaaatggtaaagggcaccagtggtacctagcaccctcctatgtgtcaatatcgctattggtccaactaagtatcgagtcccatataatt

SEQ ID NO: 170220 - DNA, 669 bp, Cannabis sativa
tctaacttaatgcatcacacaatgaaaaaactactaattcattacacatctttactcgtactgtaaagaaaacaagctcattaataaacacactatgaaagtacccctaatttaatgaaagccaatacttgtataacttgtgttcttaaataaagtcaatggcaccttcttcaatttcccatcatatcaccgaaaggtaaaataaatagcatacgcaattgaacactacaaacacgcctatagactactggtacctattatgagaaatcattttctaatcaaactgtgaaagtattaggaagaaagtcgtatttgaccacatatagttttttttacagtggaagtcataattccatttttgtcagtaattaattggacatattattccacaaatccaaaccacatgccaccgaacagttcaagaactagaatgacaggaaattaagccatcaatatatcagttcttcatgaaaaaattacacagaaaacactcaatctaaacagaaaaccaagtaatggaaaaagatacattaggccaatttttaagagctacatttttgggggaaaagataaaaaagatgagaagagctctctgggtgaaaaatagtaaaagagatcaagagagctacaacgatcaaaatccatcggcaaaaatgtcatcgatgttga

SEQ ID NO: 170221 - DNA, 641 bp, Cannabis sativa
taccagcctttgataggagccgagatttccacccttcaattcttgccatcactttcttaactaggacgttcatgtcctttgagcgatttgcggaattaaaaagagaggtgccaagatagatggtatcttttttcatttttgacataccaagaaggttggcgatggcattcgctctgttagaagggactcctttggagaagaaaactgtcgatttttggaagttgacagcttgtcctgaccaagagcaatagagatttaaacactccaggaatgcctctgcctccttcaccgttgcttggccaaatagcattacgtcgtccgcaaacattaggtgagtgatgggactggcggatcttgcaaatttgaaaccccttatcttcccctcccttgagtagtctatcagtagtcttgacaggatatccgctgctagaataaagagggcagcggatatagggtctccttggcgcaaaccacaggaaggggtcaaggtcccatgcttaaccccattgataaggagattcagctttgaagtttgaatacagctccttatccatccaagaaacggatcctttgcgccatggaaactcaaggcttcacagacaaactcccaatccatcttatcgtaagctttttccatgtcc

SEQ ID NO: 170222 - DNA, 692 bp, Cannabis sativa
ttaattatttttgtgaaaaaaaaaaaaacaactcttttaatagtgctcgagactactaaaatttaattcttacaaaaggtttaatgtttcactcaaggtgattttttttatctactcctttaagatgtgtagaaaaacatttgagacatttaattcttaaaacatactaaaatttaaaatataagggttattcctgttttcggattagtgacgtgtgcattttttaaagtccaatatcaaccaaacatgccctttccagagcccaatcagattaataagccaacccaattacggagtcaagttgcatctccgaatccaaatgtaaattcaacttaccgacacgataagatcaaaccactttgatccaaaaaatgttatttggcctagaaggagaaaggtccatcatgatctatctggatgctttcatggggtaatctggataagggcaattgaagagacatctggaggcctccatatatcatcctacgtggcatcctccaaacacgggaccccactatgtcatgatgtgccagacacagggagtgtgtgaatcaccaaaaggcaaccacttttttgtccaatgtcatattatctaacattcttagtactaacacagcagctcacgacatatggcatcataatcggtccctggttaacacccaaaatgtgacttccactagcggtggttgtag

SEQ ID NO: 170223 - DNA, 770 bp, Cannabis sativa
gaacccccaaagctccattcctctttcattcttcccttctctctgacacgattctccatcaacaaatgaatggagcaccacgacttccccaaggtcctgtgctttgcagtcctccggaatcctccgccatcacctacacgagaagagttggagacggagtgaggaagaaagagatagtgagaaagaagaaagtataggatttagatttaaagattaattattttagatttagtttgtttgtttttttttttttaatttctttatttatttgtttaaaaaaaactgtttagttaaaaataaaagaaaaatattattagtttatttatttttaatttttatattattatattagttagaccaatacaaacatggcacgtgtatacatgtgtacacaatgatagtcttagttggcacttaacatctaaatttaacaaatgtatcaaacttgtaacagaattgaagataaagaggtattaccaccaaaaaaaaattaaaagattaagagtataataattaaaacatacgagggtttaactgcaaatttctcaacaaaaaaaaaatcaaaattgctaatttaatactaacaaaagtaatatatataaaatacatttccaatattttgacacataaaatgaaagcttgttatattaaacaaataccaaaacattgtacattataaaatatcatcaatcaatatataatataaaggaaagcacaaaacatcttaagtggcattctaatcttcttctattctctattctctatttttt

SEQ ID NO: 170224 - DNA, 655 bp, Cannabis sativa
actagcaataaacttgccataaatctagaagtatattaagtttctgattctcttttctactttataattctattgactatatgaattgttttataaaaaatatgtatgtataatatattaaggatataaaaattctcttagaaaaaaatatgtgtttataactatagtttaataatttcacgagcaaagtttgaatcccctcctcaaaagtcaaatatatatatatatatgaattatatttattaatatataaaacccgaccacacctatttctaaagcaataataaaaaaaattataacaaaaccaatatataaaaaaagttttaatgattgtatcacatttgtaactatgataattacatagttgtaattaatataaaaataaataataaataatttgtaacattctttattttttttataaaattttaattaagattaattttattttacaaataaattaataataattattaattaagtttttgcagtttgttactaaataaagtttttttagcaattaatttttttagcacttaaattataggtaaataacattttggatcctgtgttttataaaaattaccaattagactctctgttttgttaaatgataaaatggaccctgtactttttaaaattgtacaaataggac

SEQ ID NO: 170225 - DNA, 839 bp, Cannabis sativa
  modified_base (795)..(802): a, c, t, g, unknown or other
atcacaactcaacacaacaaatcatatacatacaacagcaataatataaaaggagagcaacctgtctattttagagtgtattttcggtccagcccttaagagttgcagcagccattttatgaagaaataaacctcaaaaataagagagaaaaacagagagagagttacagttataagtgatgtaatatcaaagcctaaaacagagagaaaagagagaaaaacttgagattacctgctgacttctgtggttaggattctcaaagaaccttgtaaccggttttgacatggatagtgaagaatcaagcctctttgaaggaagcttgacggagacgtacctctgattttagagggaactccgaaatcaatcactgtgtttccttgctcttagttttctgtttgattttttgggttactcttctctcataaccaacaaaatcatttcagatctttgttgctactatttggattgttcattttgtgtgcatgtacgattggttgaaagctctcacagagtttgaagaggaagccattgaagaaattaaaagaaggagagaaggaataggctgtcatagatttaaactggagaacaaaggagaagaacagtagctaggtttgcaagaagaagaagagaaggagaagaggaaatcggctgctagggtttgaagagggatttgttgctagggtttgcagcagcaaacaatgggttttatatactgcctaaaatggcagtttttgatgtgcattctcttaatctgcacaagagaaggaaagataattgattaattaaaattaatnnnnnnnntctgcaagcagtattatcttaactagtgaggggacca

SEQ ID NO: 170226 - DNA, 571 bp, Cannabis sativa
tggaccaaaaaaaagtatctataattctaaatttcttatataataatgtttaattatttagaatatgaaaaattaaaataatttttttaaataacttactatactgatgaaaatatatatagtttaaaagacaatctgaatacatgcagtacatgcatgcatgtgttgcctttctaaggaatgaactataattgtccagaatatatataattgcattttttttttcttgacaatattaaagaggatttatacatagagagaccttgaaaacaaaggtttgaattcgttatatataaaagtagggtaaatacaattttggactatttgttttgcaaaattattaattggactctctattttgttaaatgacaaagtagactacgtattttcaaaattgcactcaattatttttttgtcaaaataaaacttaacaattatctaatttagaaattttatgacaaaactggtcatattaatagtatctattcatattagaaattatcttaaaattggttatattaaaaaataaaattgttgaaaattaagctcgaggtcttatttgtacaatttt

SEQ ID NO: 170227 - DNA, 537 bp, Cannabis sativa
tcgaaatgtgaaatgatcaggtgtgttgctgcccagggaacttaatttggtctgaggtggatttaattgacacgtgcaataattaggaccatggtatataatcgcacagatgattttgcggaaagcaatttgagaacactcattttggtacattgactcactttaatgaggaccacacacgcgctttgctttcttctctagcgtatgaaattaaggcccgccgtcgcttaacgggctaagacccacactttagccctgccagattatgaactagagccctgcctattcttgggctttaatgactaatgagcctaatcctttgaatacagtactataaatatggaataagtacatgcactattttttttgtagaaaaaaatacattttgatgtttaaagaattttttaaattttacttttcatagaaataacatgaaaactatataaaataatatgaaaataatatctaaataacatcaaagtaacaacaaaaaataacatataaataacaaaaaatcaacaacaaattaacaagagt

SEQ ID NO: 170228 - DNA, 540 bp, Cannabis sativa
aaaaaaagaaaaaaaaaaaagatgaaaacaacactcgcttgtgtagctatgattattttgtttacaaaaatttgttgtacaattttggaagaccactatttgctttggtattttgaggagttttttactttaatttttatactttcggtaggtcatagttatttagtgctataggtaaattttaaaaaaaaattaaataatttacaataccgaaaatacaatttaaataattatttatcatgcgtatacaaaaaacagtcacgtgtagactaaaatatttaaacttcattttcagcattgtaaattatttaaatttttttaaaaatttacatataatcctaaacaactacaacatatatgatcaagaaaaataattgaactaaacaactcttccttctaaaggtgtgtactgaagactttccttatatatatcataataattataaaaagcaacataatactaattttggaaaaaaaaaattaagagcatgtttggtattgttttctgttttttgttttaaaaaattgtttttagaaatg

SEQ ID NO: 170229 - DNA, 809 bp, Cannabis sativa
ttactgaattggtaataaatttaaggtgtcatcgggttaagtgtcactatggtctgcttatgtatacactcttgtacacatgatacgttatattggtacacctaatattattctttaaaaattattttcaaaatttattttgaaattaaagaatattataaaaataaaaaataaaaaaatattataaattatgaaattcatatttttaaaataataatattaagtgtaccattaaatgtgacacatgtacaaaagtgtacacataagcagtctatatcggcagttaactgtagaaaatagacggcaccttaaatttactatcagttcagtaatttccggacttttaccgtcaaaatttgaatttaaagagtcaagtgcaagtagagtaataattgagtagatttagtcgcaaaaaattctttatcaattatattttatacataaataattgaggtatataaagcagtaacatgcgagtttaaaattatttgacatatatattgctatctattctctttttaattttctcattttcttaattttgttattttactttaaattttcttcttaatacctatctcaatataaattggttctttaaaatctgcgtgagtagaggtgatggcatcgaatttcagcaatgtaactttaaaatgtaatctataactatataaaaaaggagaatgtggctttgggcttcccaaagtaaattataacattatcttttttttttgttaattactattaaatcctcacattattttgggcttcctaaagtaaattacaaaattgtctttcctttttttttt

SEQ ID NO: 170230 - DNA, 1482 bp, Cannabis sativa
cctgggataaatggacaagttccatctcactccgcttcagctgcaagcctagcaggtccttcttaaggctctcggagcaaaaggtcctcaaaaggtagcaaccggacggaggacaaacgacaaaaaagggggtacactccctaatatacccggtacaaagaattgacggactcccaggaacgtgtgtacttcgccaccaggaaaaatacgcactaccggagaccacctcctttgtacagagatagctcccggagggatcccaacaaaaagtgcgagtaccacaacgacattggacacataaccaatgaatgcaaaaaccttaaagatgagatcgaaaacctgatttgattgggtcatctttatgagtggattaagagcctattgcctcatcttaattcggttccggcaataggaccgtttccccaaacggaaccaggggtgcatccggtgcattggcaccagtcgctcccccgggggaacctcaacaaattcttggcctgccaccaagacccaatgggagagtagctatgatctctggaggaccccgtattggggggactactcgaaaggaattgaaacgttatgccggagctgttaaacacagtgagatttgggaggttactcagctcccagatcaaaggccccgactcatggatcaacccatcacattcacagaagaagatgcaaagacagtgtgttttcctcatcatgaccctctggtcatagagactcccatcgccaacaaaattgtggcaagaattctaattgacaatgggagttctgtgaatttattattcaaagaagccttcacagcaatcggcctcacggaccgggacctctcgccgattggttcccaactcatggggttcaataggacaacacttatcccaatgggaaaagtgaggctcccagtcaccttgtgcccagacacacccgaaagcacatttaagtactgcacatttgtgcctaaagttccctactcaagaggctgggatagggaccgtgaggggcaatcaaggagaggccaggcagtgttataacgttgctgcccacctacccattttgatggtccgcaaagttattgagccaggaatggtggaagaagatgagttggatccccgcgtggggtccaaaaatattgtagaacctatggaggacgtcaaggaagtatcgatatgtgacctcgaccccgccaaggtcctccggctaggaaaatgtctagagccggaggaaaaggaaaaaataattaagacactaagggcagccacggatgtttttgcatggtgccaagaggacatgaccggcataagcccccacatcataacccacgtccttaatgtcaactgagacatgccaccggttcatcagaaacgacgcccactcgactcaataaaggcagaagccctagagaaggagttggacaaattactgaccagtggcatgatccgagatgtgtattatccagaatggttggccaatccg

SEQ ID NO: 170231 - DNA, 569 bp, Cannabis sativa
gataagatatgtcattttctgttgatcaacttaagtttgtagtatctagcactttgttaatttttttctttattatagttttcccttgtcctctacgaatttcttctttcttatccgttgctaaatttttgtacaattctctttttcgcatttctatacccttatcttctaaataattctaaaaaaaatgctactaacaaatacaaattcagtaaataaacttaaatatacttcatatttatataataattaatttcttctatccttattgatagttgtgtggaaaattcacaaatattactcatgacattaatagttttcttagttcccattatattattatgagcttcataacattcatttttaatatttgatattgattagaagttgcattacttgttgtaacttttttttcggcatatctttctctttttgttctataaattttgttgaaagtaaatccccacattcactgcaaaaccagaacaattacaataagattacaagcagtaaaaacttatgtaatatcccagaaaataaataatatttaaataggcatattttattaa

SEQ ID NO: 170232 - DNA, 1069 bp, Cannabis sativa
tgtttgaagatacaagtctctatcttaagcttttgttattttaaatttaaattctatgtatgattatctacaaacaaacgaaacaatcgacagaaaggaaagacactgacttaacgggataaataacaaaagctgagtgctttaaaaaaaaaaaaaaaaagataataaaaaaaaataacaaaagctgagtgaaattaatggaattatggaaggaaagaatttgagccaaagataaaaattaagattaaaaacaaaattgattttcgaaaattttgctttttattatggaaactaagctccggtctgaccatggaactcgttttaagaactgtttattttttgataatgtttttaaagtgccaatgagaagtttagaggaggccttttgttattttggaacaatattattgatgttcatgttttaactttctctcttaatcatatttactgtactttaagtattatcgatgaatgaaatggcatttaacttattattatgggtctccttattcttcttccaaatctattacttgaactttcatagatagaatttatgacactactcccctcatgccctggtttattataggtaattttaatgattatttatctatcagtgataggaactcggctacccttcccccttcccattcaatgcttgattttcactctttctagcacaagtatgatttattgccactctcacactctggtaatagatttacttggaagcatggaaatctccttaaacgctttgactggtgcattgtgaatagccactaaaattctctctttccttttgcatccctctcccatcttggtttttatggctatgaccatagggcccttcaagtcatccaggaggaccatttaagggactgagagaaaaggaatagctttgttttcgagaaccactggctcacgaataaagactttttcttcattcttgattcctctgggtctgactctactcctgctccaaatctcccttcactcaatttctttatctttaaacaaacttcatatatcaatgcaattcacagatggagtttgtcacaagaccccctat

SEQ ID NO: 170233 - DNA, 867 bp, Cannabis sativa
ggagccattttataaggtgccttaaaatctagctttgctctaggtgctaagtcaatcacaaagtttatttcttggtgtggtgataaacctagaagttcttcaagaaacacgtctaaaaactcttgaaccactttgatatcctcaagccgaattgacttaggtctagtggtatccaataccactgctaaaaaccttgtgcatcctttctttagcaaatctctggcttttaatacagagatcactagaatatatgaaccctaacttatcccaaatacacgatcgattcatcacccgctagttggaagattaccatcttccattgacaatgaatattagcaggatatttggacaaaaagtccgttcccaatataatatcaaaatctgctaaacccaattccactatctcagtgctcaactctctattctcaatcttaatcggcatagacctaactcaccttttggagataactaattctctgccagacagtaggaatccaaaccctttatcatatttatcacatggcctagccagtttattatatactttggctgccacataggaatgagtggctctagagtcaaaaaaaatagtgtaataagaattgttgactaaaagttgacgtgtaacaactgaaggaatagctttagcaacaacttaagtaagagaaaacacccttgttggagcgggttttgcctctgtcttctgctcttctttctttaactgtgggcaatctcttttataatgtccagttacactatactggaatcctcgacctctgcactcgcctaggtgatgctttttatggttagagcattctaggtaagtgtatcggcccttagatccaccctgttggttaccacaacctt

SEQ ID NO: 170234 - DNA, 566 bp, Cannabis sativa
  modified_base (323)..(325): a, c, t, g, unknown or other
tttagattttatgctcagccctagattggacctcttagatgacaccaattttactaagtggcaagagaaggtcaagttcctcctaagcacactcaatattgcttatattcttgtaaaattttgagaattttagaaaaaattaataaggcgaaaagaggattcaaagagtttgttgcacgcatgatttttttattttataaacatgtgaaatagacagtttgaacaataattttcaaattgtaaattattctgaatttttcacacaatttgaacattgattttcaaattgtaaattattctgtattttttaaaattttataaannntcttaaataattataatatatatgactataaatgcttaaacaattaaaaattacattagtggacctattttaatagggtgtcgtgtaaaagtatgatatgtcctgttcaaacaagattcatacgcagttctaatcaactattatgtgtgacaagaataatcaaaagattaaaaaagatctataacactatatcaaatgattaacttttttttttttttcaaaataatatacacaaatatat

SEQ ID NO: 170235 - DNA, 650 bp, Cannabis sativa
  modified_base (459)..(460): a, c, t, g, unknown or other
tataagactaaatattaaattatggtaatttggcacttattataatatttgtcactttaaaatatctcttaatatttgttatcatcatgtaaatcgttgctttttataaataatattttttaggcaacaaaataataattgtagtgttttagaatcacgggaaattattgcttgtacaatataattttattatttggtagatttactttttaatatttacataatataatattgattgaaaatctatcaaaataatatttatactgtagaaagaatacaagcattgtttttttagtccaaaatactacaactagatcaaagctgtccttgttagttgtgctcaggaccagccctaaaaatataataggatttgagtccattatcttagacattatgacatccacctcaaccaactaagctatgaatatttgttatttataatacacttaaattttactnnaataaaagcctaataaatttttttatatttttattttaggctcccgaaaagtgtgggacctaggcatgagcggatgtacacatggggttaaagtggccgtggcccccttattttttacaaatcatacatagtaattgatatacaattacaactaatatacatatacatatacatagctacaaacaataaa

SEQ ID NO: 170236 - DNA, 528 bp, Cannabis sativa
aacattgcaaacactaaaattaatttatagcatctgattaatagttgattataatcatatggagtaaaaaaatcacttatcctgaacggattttttggcatacgccacttctctctttatttttaatgtatttgttcaagaatttagccaatctgatcaacattgtttgatgaaaataaaagaagaaaaaaagctgatttattttccattaaatgtgattatatttgtttttagttaagtatataatttttctaaaaaaaaattgtatgtatgtgaagatagattaactaaaagtcatcaaaaaaagaagatagatcaactaaaaacattgatttaaattggagagttttattggctgtccaccatctctctcattcaagaattcatacacacacaatctaaattggagagtttttcagcaagcctgaggcagtggtatagacaataaacttgaggacaagatattaccgaaggagaaaactattgtattgatcttcttgattgatgccaaagtttttctcattccca

SEQ ID NO: 170237 - DNA, 831 bp, Cannabis sativa
  modified_base (753)..(754): a, c, t, g, unknown or other
gagaccaacaaggtcgagatgcattggagtggctaagagaacaacggagatagcgtgagaggggttcacagcatggagaaagagagagaagggagccagcgatgaagctcccagtctccgtttgggtccacgaccggcgtatctcacctccgtcggaagagaaaccaacacgaagggaggagactgtgatttttaaggttggcgacgagattcgtggttttcgtttcgagcttgctctagtccgatctatcattatgagatagtttttttttttaacctgtgaagagattgttttttagaggagcgactggttatgaagaatattagggtttgtagcttttaaatgagagagaatatttagcaaaaagaaaataaataaatagaaattaagatgtgtagctgtaatgtgcaaattctaaggactcaattttatttatttatttaaaaatgggttaagtctagtcaaattggacattatatattttttctagtccaataatattggactagaaaactctttattaaaaaaattaaataaataatattaattaattatatatatatcacgtcctctctcatacatttctagtccaacaatgttggacatgatgtaattttattctagtccaacaatgttagactagaaaactctccaaatttttttttatgtccaacactaattttgttggacttaaaaaatagacattaaaaggggtttttgtagtagtacccaaaaacctcttttcttcacanntaagcccttgcttagtgaaaatttataaataagacatagtataattttagaattattattgattaattaaaatcaat

SEQ ID NO: 170238 - DNA, 601 bp, Cannabis sativa
tgataatagttgtcgaaatcttaccggagccaaaggaaatgataccgtgaaacttcaaataatagataccgtagcttgttcgtcattgaatggacacgtttgcaaataaaattacctttaaacgtataaatgaagacaaacaattaactttttatttgtgaataaattttcacttacagttatccaattgcccaacaaaaaaaaaaaaacattgaaaagaatgatagaaatgatagcgttaattgcaaatgagatgagagaaagaaaatggaaatattagcaatagaaaagagtaaaatatatgaaaagaaaaaaaaaatagtcataaaaaaacttgttgactaaaggcatatagactatgctagattactcatggactcttttgcatagagagacaagacatctatataaaataactaaaaaataataaaacaaatacaaaacggtttccaggataatttcaaaccatttaatcgtgtatttaaattttaaaatataaaataccaacacgatagagttttagtttttgaataaatactattagaaaattctacaatgcacacccttaaaatggatatattgatgcacccctatctgtttt

SEQ ID NO: 170239 - DNA, 775 bp, Cannabis sativa
gttcttgatgagagagagagagaggtagactaaaaacatagaaaggttttgaaaacccagctcgacgaatctgatgtacataacaacattaatcccaccttatatctcatacttaatttttatttatttaaaaatttactttttttattaatatatatatatatattagaagaaagttacgtgctagacacgtataattagttttatgttagatgctttctactttatttaaaaataataataattgaagaaaaaatattattagttattgttgaaattatttttaatgtatattcaattaatgtaaataatggtgttgcaatattatacagtgtatatcacactatttgtaaaatctgtatcaattaagacttaccttttgaaaaaattaacaaaattgcattaaaatattaagatgacatggtaagaaagacaacagtgcaggctctcacacatagaccatgttccataatgggataaaataggaaaggactcaaggagagttcttccattctccatccatatgtataacaaaaattggcagaaggaaacaaaatccttgattccttgtttactctttctcaatcacttttagttaccattattttcattacaattaataaatattaaacatacccatatacaagggatataataataattttgaacaagataagttagagaaccataaaatgactaaaattaagccacgtctcaaaaacccaattttaatactacaatcacattaaaatccacctgcaattgaaaaaaaaaa

SEQ ID NO: 170240 - DNA, 1249 bp, Cannabis sativa
  modified_base (1093)..(1113): a, c, t, g, unknown or other
  modified_base (1213)..(1216): a, c, t, g, unknown or other
tggttgatctgatattagtcggtaacatattatttgctcatagtggaacctcttagatgaattgattgattaggccaaaccattataaactggcggttgtctgcctgcgttttgatttaattgattacgaaaatctggaccatttcaattcaaatgcttgcacagatctagttgtctataatttaaatgctcgcgtaaatcgggatcgcaacacatttcgtttttttggtcataattgcttactgaccttgttcttgaatagctttcagattgataacttcaagagttgatgatgctcttttggtcatttctataataatgttgtgaatcttcctcatctcatgctctcctgtcatgtacatgagttctactcgatctactttgcccacgggtccttgacaatgacccactaggatctgtactcgaccctgtctcttgtggttcctctcgcactagccttcatcttgaaaagagatttgacacacgccctttacttaggtaagtgtatgtgctgtctctatcgttgtgattaagcctttgcggatgtttaggtggtcgacctattccaggctgatttcttatatttcttgcatcatgatgagaaaatccttggttccatgttgtgccagcctggtatttgcattcatgcgagaagattctagattctcaggttatacattcccatggctttcatatccacgggaagttcctggattattaggtcgagtttcttgatttttggtgtttctagggttctagagattttctttgttcattgagatgtctcttgtatcctcaggttgttcctcctaagtgtttgagggattttaaggttgttccctttaggaatgtccccatgtctcctagttttagagccctgtggtcttcctcgagatcatctagtaaatatattaggttaatttggaggggcatcacctcgcgcagcccttgctgctgctacctcccgctccagttttgcatttcttcgatttgatttagccaggcactaccggagttgcctatttcccagttctactaatggaacatattgttggattaagttttacaagaatctagatttactaccatgtannnnnnnnnnnnnnnnnnnnntgaatttctaaaacaatgtaattaaacatatataaagtttgagaaaccttacattaggtgctgcagaattaaaatgactctttccgctcagatctctaannnntgtatcctgtctgtagcaaagtatcaccaagat

SEQ ID NO: 170241 - DNA, 806 bp, Cannabis sativa
gacgaagtggagagccacggcccatacagaggaaacgggataccactttcgctggtgaccatgatcggagaagagagcttgcaccccctcctttgatgtcccaaacaaccacaatagtagcagaatatgccaatttgttcatatttgaattggagccacttcctaccgcccgtgtccaagtcgaagaagcatcccgagcatagaggctttttaatatcaacttcaatcaatattttgaggaatttaccccatgaggatgggttatcctcttgtaaatgtacataaacaacacttccagcttttcctcctaacagatgaccattagccttagaaaaatactcatgaggcaaattgtgaacctgcacccatgtacgcatcaaatcgtttttaacaggggacatattggttggggaccaaacttgcagaaaaaatgaatagccacggatacaccaggggccgtgatccagagcccaccatcgatcttcctcacgggcaaaactaagctcaaaacagttggtgaagttagggccctcagtcaacgccactacagtcacagggaacttccacgccttggccacaaactcagcaacattggcctcacacatagccatgggggccactacttttcctagcagacaaaaggtggataacactttttgggaagattcactagggaccaacttaaccaaagcctcattaacagaaaggcatttacctctaagaggagaagtagttgaggaagcattaacaagctccataaatgccgacagcaaacgacaacccacctactaccaaagataaaaaaa

SEQ ID NO: 170242 - DNA, 539 bp, Cannabis sativa
ttttgctaccaattttactaccaacccagaagatgccaacgtggaaagtgtacgtggacagggcatcaaataaaaaaggatctggtgccgggatagcgatgatatcaccagatggactctgcctccaggctgccctacacttttcatttccggcctccaacaacgaagtcgaatatgaagctttgattgcgggggctaaggctggccaaagatgtagaggctgcgagggtagaagtcttctgttattctgaattaatggtcaattaggtatcgggagagtaccaaacacgtggagaaaaaatggccacctatgtagcatttgtcagagagcttctccacgagtttacagaaaacaaagtgaaaagaatcccacgagaaaaaaatgctcaggtagactgtttggctaagctagcctcggacagcgaaatagagaggctgggggtagtacctgtcgaacacctcgcagagccaagcatcaaaaccaaagaaacagtagctactaatgagcaagagccgagttggatggaccccatcatcaa

SEQ ID NO: 170243 - DNA, 632 bp, Cannabis sativa
actgccgttactaactttataattggttgagctgtaaccacctccacagtttaaaatctcaatcaagatagtataatgttcgttaactctactataaaattacaatcttgagtattcatttatcttgtaataattttttttttttttgaataaaaatcttgtgaattacaaagaccaaaccccaaacacaagactaaatggaaagcaaagagccattccaaatgaactcactatcaagcccaagaccccattttgcaacactatgcgccaaggtattatactccctattaacatgaaccactctgaggtttgggcaaggagataacaagttcttgatacaaacaattaaatcatccagaatactacaaccctgagtacaagaatataatttatctacaatagacttgcaatccgttcttaaaatgtccacaagcaggtgaatagaagaagcccactgtaaagcaagcacaacagctttagcctcagccaccattggagaaacacagcctgtaaaaggcttagccaaaccagcaacaacctggtgagaatgattcaaaacaacagccccaatactatatttctttctctgcacatcaatggctgcatcagtgaaaatctgaaaagctccctcc

SEQ ID NO: 170244 - DNA, 690 bp, Cannabis sativa
aaagcattattaattcatttatatttgttttgacatttaaaatcaacgttataactatttaagacatttttaaaaattttgagaaatttaatatgtctaaaataggattcatacagtttatttcacccacataaaataaaagagtactctcgagtgcaagaaactgtttgaatcccattttcaacgtgttaaatttttctaaatctctcaaaattttataaattgtcttaaataactacaacgtagacgattaaaaaaaaaattgaactaaaattctcccatatgctgaatgcattaatgaacctttcttcaaagagaaatgttaaaagcacccatgatatctagcatttttataaggtgtaatattattgttggcgcattttaatatttgatctcacttattttaattgaataaagattatgtaaaactgttaactaattataagacgtcacgttatagaagtactaagcaccttaatgttccataacatgcaatactctttttaagaggtgtattgtagaagtatcaagcatttatttatgggataattttttttaaaaaaaaaaatacacaaaaacaacaaaaataaattataaaagtacaaatatgtatggaattttcaatatttttacggttttttagatttcatttacataaaatacgatttttttagtatattttatgttgta

SEQ ID NO: 170245 - DNA, 593 bp, Cannabis sativa
tgcaaaaactaccgcactgcaccattttttgcagtcgatttctgtggttttttagtttcgcggtacgggtgcactttgtaaaattagaaaaactgcatgtgcaaaatggtttgaaaaaataatcaaaaaccgtaccacccgcattacgaatacccataataataatatcattatgagatgagttgtaaatgacaaaaataattaataattatggtaatgagagaataattaattacatgtgataaaaaatatgaaagtaaaacaaaataaaaagcactatatcaaaaaataagaacgaaagtatagaacataatctacactataactaacacttgcataataataaattatttttttataaaaataaaagaaataagtggaagaaataaataaggttcataagggtaaatctaactaagtaaataagagttgaccgatgatcatattgaagggaagatataagagtataaatataaataagtaagtgatagcatataaaacttatcaaaaaaaaaaaaaagtgatagcatataaaatataagaatattattgtcattaaaattatcacacaaacaccacacttttataatagt

SEQ ID NO: 170246 - DNA, 741 bp, Cannabis sativa
gaagacatttggtgtgtattataaattgtacgaacaactacttgataattaatttcaataattacttaaaaaaaaattgatgtttaatccactaagaactttcttgacatccactgcttttgccatagggtgagatacaaaatgacattaagtttagaaacaaagttagtaaatgtctatttttttaaaaaaaataattaaccaaatatggccaaatatagtgaattaactgataaaaattataaaaatacatttactacacattaattttttttaaaaaatgtatatataataattaaattaaattatataaattttttagtattgcatattgatatattgtaacaaaaacgaattaatatatattagatcatacatatatatagcagtatttgtatcactgaaaattgatatatcgttgtaataaaattatataccacaaaaaaattataacaatgctaaacttagtatattaatattcaaaaaatatatcttatgttaacaaaattatatatatcattattaaaatatgtatatcataccaatttgtaatagtagagagcgactccaaggttgtggtcaatacactcagcagaaaggagtcttgttgtaggcttgtgaactatgccttattttgtaaaagttcttttctttttttggtgagttgtatgttatctgatattagtagaacttgtaattgcggcctataatcactactacaaaaacctcctttagaggcgg

SEQ ID NO: 170247 - DNA, 588 bp, Cannabis sativa
  modified_base (555)..(557): a, c, t, g, unknown or other
gccaacataggtcggccaacctctagtaaagggtaggtcagctagcttctcctctggcagacacttttagtgcctctgtagctttcaacctggacaacattttcagctatgaattggcctcaaacaacccacaaaaaataagtgtttaacttcaattatttattatttaactcggctagtcggtcttctcattttgggtgtgtgattcaggagtgcaaagccatgtcggctagtttaaataatgtctatttttgttttgttaagcggtcagctaatagagtcgctcatgagtttgttagagcgtctttattttatcatgattgtactttcagtatggaaaatattccaactgagttgttgcctactttggtgactgatttcgaaggttaataaagattgattttacctttcaaaaaataatttcttatttatttaatgtataaaaaatatgtgatatttcctaattataagggatatcaacctctatctttggtaagctcttcctatataaagagtactaggctagacctaaaagtgttggattttatgccctannnaaaactctatttcaatgtaatccagattatt

SEQ ID NO: 170248 - DNA, 889 bp, Cannabis sativa
ttctccccagactattgatagtacgtgcgaaggtgtttaatgttccatgcacatgaaatttttgtgccatcgatgtattttaaatggtaggtcccagggaatactgttccgtcaatctcataaaaatattttcagtttggacctaacactcccactctaggatcttgtttgactggaaagacccatctcaagactaagtctccaagacccaatttgtgatctttcactttgcaattaaagtaggaaaatttacatggtgtactaacttttgccatttttttacaaaaatactgccaggcggtattttttatttttttactgtgtttttttataagtttcatgctgcagtatactgtgttaagttttcactggtgttctactgttgttttgagctgttccgctttgtgttttactagtgttttataaaacacagtatttttgtaaagatttccgtgtgacagtatttttgtaaaaattaacctaaattttaatatttttgtaactttcccttaaagtatcaaacgccattctgttgatatacttccaactgcacttgagatgagttccagagcccttcgattagatcaagagattcctagagaaatgtataatttgtagttggatcataagtgttatgccgatgcgaagagactaggatctcaaccaagattatggattcacacccatatgtcattgaaaaaggtgaatgctcggtcgtgaattggaatattgttttgtaagcacaaagtatttgtagtaactcttcagaccaattgtttttgcaagcatggagcttcttttttagggttaccttgagatcttattaactgcctccacttgtctgttggcctggggcctagtgacgacaaaaagagttttgatcactctt

SEQ ID NO: 170249 - DNA, 873 bp, Cannabis sativa
tatatatatatatgtattagtcaattacttgtggtttcttaacttcttaaataagcaatgaaactctaaatcaaacaacttatttttatattataataaatatatattttcttctaaattatatttttaatattaatctagtctctcctaattattttaagagttatatgtcatcaatgtattaaaataattgaacaaaaattaggtaaatgattgagattgtattacatattatttaagtacatatacccaaatatattaatgtcataattattttgaaataatatggctcattaatttttttttataaatagtttttgtattccttcaaaacttttctttacatcctaccagcaccaaaaagaaatgttcaaaacatcttctttgttttcctaagcaatgttaccaacaatctattcttaacacttgctttaatcctctttagatttatgtctacattatttattattatataatatataattatttggaaacgacttttagataaataatgaagctattttttttttcaagaattatgtgatttaatttttttttttgaataattacatagaatactaatttttgtaaaaattttatattcaaattttttttatatatatatatttttacagtattctataaatacaagaaaataacgaaaaaatcacattcacaaaataagaaaacaaaaccaaaatgacaaaatataacaccaaaataacataaaaaataatatataaataacaaaataacaagaatgcaacataaaatgatagaattttatataaatgaaatctaaaaacttgtaaaaaaatattaaaaattcggtacaaaccatatttttgtaattttttttttttttgtgtgtgt

SEQ ID NO: 170250 - DNA, 862 bp, Cannabis sativa
  modified_base (830)..(836): a, c, t, g, unknown or other
tgcatggaggtgaatggcagcattgatcgagtggtaccggatttagctaatatggaatttgccaagccagtcacggaggaagaagtgcggttagcagtcttccaaatgcatcctgataaaagtccaggaccagacggaatgactccggacttctatcaaaggtgttggaatattgtgaaacatgatgtggtgatggtggttcagaggttcttttctacgggggtcttcgatgagaattgtagtgaagctaatgtggttttgattccaaagaagaaaggtcccgagactatgaaagatttgcggcctatagccctgtgtaatgtgctttacaagattgttacgaaggttatgacaaatcgaatgaagcctttcatggattctattgccgctgactctcaaagtgcctttattccgggccgccttatctcagacaacataatggtctcctttgaggttctgcactacttaaaacgaaagcggcaaggaaagaccggttgtatggccttaaaacttgacatgagcaaggcatacgatcgcattgaatggagattcttggaagctgtcctgaggaaactgggttttgttgaaagttgggtgcgccttattatgcaatgtgtttcaacggctcactacaagattctacatgggtggcatgagatgggccctattgttccaaccaggggaattcgacaaggtgatccgctctctccctatttgtttattctctgtgctgaaggcctctctgccttgttgagaaagtatgaatgactggggtggattcatggatgtaaggtggccaatggtgcacctgttggaatttattttaccannnnnnnagatttactcacaagtatgttgttta

SEQ ID NO: 170251 - DNA, 1546 bp, Cannabis sativa
ttttaaaaaataaaatttattcgtaataacttttgtaggtgctattattgcgcctgcaaaggtttttctctttttgtacgcgctccaaattgcgtccacacagttttttccagacgcgcaattgtggacgccaaaggacgctcaaaaatttgtccccaatacttttgcaggcgctaaattgtgcctacaaaagtgctaatccttgtagtgtgttaacaattatctctaatatatgacaattgtatttgatgctaatttcacgttcaactggagagtagacatagagcgatcaattaggagaacttatatatatgaattagtagccaaacaagatccatagctagatgtacgtgaataatcgggtcacacatcatggaatgcctttgtacaatattggcaagaaaatgatcgccacatatgattatgagatatgaacaatggacgtgaagactgctttcctaaacaacgatcttgatgaagtcacttatatggaacaaccagaagtgtatgtgtgtcagggaaagatcgaaaggtatgcaagctgctttaaatctatttatgaattgaagtaagcctctaaatcttggaatatcacctttaataagagtattattacagggtatgacttcgaacaaaatgaagaagaagtctatgtatacaaatacattaagggtaatgtaatggtattccttgttctttacattgatgacattctacttattagaaataatgtagaaatattatcagatataaagaagaggttagccgagaaattctaaatgaaggatttgggataagcaagctatgttctcaggatcaaaatctatagagatagaaagaaaagaacattagcacattctcaagcaacatatatagttaacatgctagaaagattctcaatggagaattccaagaaaggacaactaccgtctaaacatggaattagtactctatataaggatcaatgttcgaagactcttcaagaggaagaggacatgagaaagtacccttatgcatcaacaattgggagcttcatgtatgcaatggtgtgtactaggctcgacatatgctacattgtagggattgttagtcattatcaatctaatcccgctgttgaacattagattgttgtaaaacacattctcaagtatcttcagagaatgagtgatctcatgcttgtataatttggtggagagttgaatcctacaagatatactgattttgattttcaatcagataaagatagtcgaaagtcgacatctgggtccgtatttacttttggtggaggagttgtagtctggagaagcattaagtaaactggtatagcaaattcatcaaccatggaaggcgaataatatataataacttgtgaagcagctaaggaagcggtttgattgaagaaattctacactatttggcaagtagttctagttgtagaaaaacactggtgctctactatgacaatagtggagcggtggccaactctaaggaaccaaggagccacaagagaggcgagcacattgagagaaagtgtaacaccctaact

SEQ ID NO: 170252 - DNA, 730 bp, Cannabis sativa
tttttctcttaaaaatacatgttctaatataatatttatgcgttttttttttctgacgctaatggttcatctagtagtttttcacatgctcctctcaaagttgcggtacttgggagtatacaccttccaccgctgcccgaacatgtggcccccccagccactactcctgctgacatacaaccaccacccgtagctattccagcccctccaagtggccccaacatcactaaaaagtttggacgggcgatcatccgtccacctcatctccaagactacatttgtgagttttctacctcacatctcatttcaaatttcatctcttatgacaaattttctcctaagttttgtgctgtcattttaagtgcctatttggtttctgaactaacttcttattcccaagcttctaaattttccgtatggataaaagttatggatacagaaactgttgcccttatagccaataaaacttggataattgtctatcttcttgctggccaccattttgttggctgcaaataggtatataaaataaaatataatgcccaaggtgaaattgaaaagtttaaaactcgcttagtagctaaagggtactcccaataatttgggatagattatcttgaaacttttgctcccgtagcaaagtttaatactctcaaagtcctccttgctcttgctgtcattaataattggtaactatatcaaatggacattaacaatgctttcctccatg

SEQ ID NO: 170253 - DNA, 700 bp, Cannabis sativa
ggaggaggaggaggagttgcggtgggccgccatagagcggttaccgacttatgataggatgaggagagggatgttgactcaggtgatgagtaatgggaagatggtggttgaagaggttgatgttactaagcttggtagtcaagataagaagttgttgatggagagtattttgaaggttgttgaggatgataatgagaagtttttggagagacttagagctagaaatgacaggtaattgagtttgaatgtttgtttggttgatcagaaaatgacagaaaatttaaagataggaagttggttttctttttgtgtgttggataagtgtttgtgttaatgtgttagttaattgtgaatcccagatcttcaaaattcataatttgatgtatttatttgtagagactcagagctggaaatgataattgattgtgttttgactgttttgttttgtttggtttatgagaaaatgaaagaaaatttattgaaaagggaaagttgtttttttgtgtttaataagtgtttgtggtaatgttagttatgtaaaatatgattaattgtgaatcccagatcttcaaaattcataacttcatgtatttatttgtagagactcagggctggaaatgataattgattgtgtttttgactgttttgttttgtttggtttatgagaaaataaaagaaaatttattaaaaaaggaaagtt

SEQ ID NO: 170254 - DNA, 519 bp, Cannabis sativa
gtatcctgattttacagaataaattcttgtatctgaatgttgccatatcaacttatcctctctaggaaaaggactcaaaggaatggaaagaatgcgctggatatcaatgtcaccaaaatgggtctgaagaatccttaaatcccaagtccaatgtatagagatatagtgctcaaccgtaaaagaaggatctcccgtataagtgaatggtgtcatagttgtattcccaggtaaccaaggatccgaggcacaatggacatttctcccagatccaatcttccatctcaaaccttttaacaacaagtctctaccatcacatatactttgccatgttaaagatggtaagacaccttttttagccgatagaaaatcaccatttttgaagtaacgagcttgaagaaccgtagctagtaaagagtttggattatccagaattttccatgcttgcttagctaaaagagcttggttgaaatgcataaaagagcggaaacccataccaccatcagctttagaagaacacat

SEQ ID NO: 170255 - DNA, 1053 bp, Cannabis sativa
ctcgccaatattcatgtcaccgccgctacctaatcaggatcatcgacaagtaaaaaacttaacaacaatttcagtttagtcattacatttcccgattgtcccatgtggatcaacccaaataacactaccagtattcatgtcattgtcgttatctatggagataaccggcaagtagagaacctaacaacaattccaattgatagtcattacttttcctagttgtcccatgtggatcaacccaaataccaccctaggtattcatgtcactgtcgttatctatggagataaccgataagtagggaacctaacaactaatatagtttatagtcatgacttttatttcatggtgatcatggccgctttctcactttcataacggtaataatcgtcaccttgcttttataacagtaatgaccgtcaccttgctctcattatggtaattattgtaaccttactatcatagcggtagtgactatcaccttgctctcataacggtaatgactgttaccttgctttcataacggtaatgactgtcaccttgctctcataatagtaatgatcatcaccttgctttcataatggtaatgatcgtcaccttgctttcataatagtaataattgtcaccttgctctcataacagtaatgactgtcaccttactttcataacagtaatgaccatgaccttgttctcattatcaactaactcataaacaatcttaatcgtatctggcatgctatgtggtatagatatatttttttttaatccagattcatgcatgccgactaatccaagttgagaaaaaaatgcccaatgatctcgaccctatttctcaacaatagtaaatcgatacgtgtctattccaaaacatagcctaatactcgcataaaacaatctaaggtttataggaatccttctagggttaggtttgaattatatgaaattaaaaaatgataaataaatggctaaatttctccttaagtggctgaccatgagatgtgggccccactagttacaattttaccattttattcaacaatttatcttttctttca

SEQ ID NO: 170256 - DNA, 597 bp, Cannabis sativa
ctttattagtaagtaaatctgattatattgaaatgagttttatttagggcacaaaacccaacatgtcaatcacacaagcacccttaaccaactcaagttttgtgatgcctgcaagttaggcaaaagtcacgaattaccatatcatgtgtcatccaatagagcttcctttcccttagaattggttcacactaatctttgggaaccttcatatgtcccatccaaggaaggatataggtactacattcactttctagatgatttcagtatgtttacatggatattcccccttactctaaaatcccaagcctatcccaccttcctactgttcaaagtcttagttgaaaaacaattctctcttcccttcaaaaaggttcaatctgcctattgttgacttaccttgtatgggcttgtcagacgacttcctccagcttgataaagttatcttgttggtcgagatcctccaaatatctttcaagaagtcactcaacggaaggatgccccccaatatggccatatatcggtcttcttctgtttaggtctttgaccttggtggcctcaaccatgaacctttggatataatccttcaaaggttcgcct

SEQ ID NO: 170257 - DNA, 797 bp, Cannabis sativa
  modified_base (765)..(772): a, c, t, g, unknown or other
gtattaaaatgacatcccaaaagctccaaaatatgcacccagcacccaggtttgacaaatggccaggtgcgatacttctacttatccgatttgaattctgcctcgaccgttggttgttttttcatcataattgagagtcattaattctgaagagtgaaattcaaaacttcatattttcatttttctaacaacgtgatttactcgaaaactgggtagttttgagtctctagtttttgcaaaataacaacatctccgagtattggtgaccagcttcgttagaacacaaaaatggactaagtggtgtcaaaatatcatctaggcatcagaaaatacatcagacatgttttctcactcatccaaggtccaagttaacatcacatgtaaacctgggtgctagatgtcaacttgggcaccaagatgtcaacctgggtactaggcccaaaataaccttcaataaaatggtcataactcactcaatattgatttgatcgacacgattcaacttgtatttcaaagctattctaatgctctataaagtcatgtctcatactttaataacagttctgaatttatcgacctaaaatttcaacccaagagagttacaaatttaagttgcaacttaccctgagtgggtcttgccagcgcaactcaaactccaaaaattgacaatcaatctccaaagttaatttttacagttagatcatcatttatgataaaaagatagcctaaatttatttttctatattgtaaagtccttttttggcnnnnnnnntgacaaaataatttttccatttatg

SEQ ID NO: 170258 - DNA, 613 bp, Cannabis sativa
gacaattcaaatgatgtctaagttctaaaaatattgaaaaaagattcacgagcttatgtgtatggtgattgttttagacctgaggtgcaagtttatgttgctcaaatattattttcctgtaatctatggagatgagcaatatgtaactgaaattgcaaatgttcgtgagctttgttacgtgctactggaggaaaacgagtttaaatttcctcatttgagagaaagaagagttcgggtggaaaatgtatcaacatcttcttcaatacggcgattggataccctttctaactttgacaaatttatttgttagagcttcctatcaagtagagaatgtgaagtctgaaatggatttatatttagaggagaacttggtacctaggactgaagagttatttgatatatgtaattactggaaggtgacgggcctcaaataccctttgttgagtatgattgccaaggatgtatatgttgtgcctgtcagcattgttgcttcgaaatctactatcagcaccagtggtagacacgtgagttaacatcgatcgaggattcatccttctacattagaagcattagtatgcacacaaaatttgttgatgactgacaaaaaaggtag

SEQ ID NO: 170259 - DNA, 516 bp, Cannabis sativa
atatgatcggtgtatagttttggttcggcctcagtaatgattcatattacatcccataaagttttgtttattgatcaatggcttcagtagttgttgtcattgatgtttcgggagtgacatttgatgaatttgattaaaactttctgtttcccttaaatgtaaaggtctaacccattagttttttgtttattatatttaaaactttcttttattgatttatgtatacgatgatgagcttttactttggactattatttaaaatattataaatgatacatattaattatatatattgtttacaatgagataatagtatgaagcaataaaatttaaatttggtataggtttatgtctaatattttaagtaaattaattgaaacaatatgtcactaaagtgatcttttaaatattaggatggttgtgtgtttgtaattgatgcatatgttgactaacccaaaggtaagtgaatattttgctaaattttaaacatatcatgtggcaataaatgtgtgacaa

SEQ ID NO: 170260 - DNA, 719 bp, Cannabis sativa
acgctagaaaatgataacctgtttggatagaatatattctagatgtgtggtgatgccagataagagtatcatcattctggaaaaagctcagaggcattgttaaaatacgatcaatatcaagcagatagaatcattgattgagcagtgccatataccattgtctctcatttgttatgaggttagaaacaaccctatcttgaggtcttgaatagtagaaaggtaggaaagttgagtgtcccgggatccaagggtcaaaaccacatttaactcggcaaccttcattaattttccattgtaaaccagcagagaaaaaatctttaacaaaaaatattgaggcataaatataaaaagaaccgatttcataacaaagtaaataaatgcaaataataacacacaataactcaaatataatataaagaagctgattatatttatcaactagttaaaaattttgagataaaaaactagttccataaagcaactaagataaaaactcacacacaaaaaccagttaaataaaacaactcaaacaaaaatatcgattcaacatgctccaacctaccaaataattacactcataccatatctaccccgaaagcactcattcattatgttatgttggtaagatatgtgaacaaatcatgtattcccaaattaccccctcattcaaaacatctcacctctctctttccctctcgcatctctctctctctctctct

SEQ ID NO: 170261 - DNA, 755 bp, Cannabis sativa
ctttttattctgattgcacttttatattgttatctattttggtaacataatttgatggttaaataaagataatttattattaaaaacaatgagaattgctactagacaccagtagtgtctagcatcattatgaggtggtactttaagaatggttagcaatatttcgtaaaaattattatattaaatcatatagaacatgatacttaattagaaatagctataagacactttgagttagattaaattagcattctttttaaataaaaatataattttaacgaaattattaattaatagtatgttaattaacatcttatttttgtatataatttcaattaaaagctttggctctttagatgtggttgaatttggggttgtattgctttgcatgtgaaagttttttcgggctcgttgccactggttttagctttgattaattctacatgtactgtaatttggagttatattatttgaagtgttaatatctaaacttgcaggaacatctttctaattttagttgcaatttaatattgtgcctcataaatttgcttagcatgcctttttagcttgtgtaactctgttctagtacaattctaatacaatatacaaatattaaattattaagcttatatctatataatatatatttataaggtaaatacgtgttttgttaaatgacaaaatgaaccctgtattttctaaagtagtaaaaatagaattctgagcttaatttttgacatttttttttaatataa

SEQ ID NO: 170262 - DNA, 508 bp, Cannabis sativa
tttgtcaattacatagttataacattaaatgttatattttacattttattatttttaactatcaataataaaacttaaagatttttatatatatatttttaataaataaaaaatttacatttaagttttttttttttggaaagatgagttctcattaaccaagctcaaaatcctcatcaaaataaataatgggcaaccatatttttttggaacaaaatgacatgaataaatatgacaaaaatgtaaaatggtggttatccccggcaaggatatcatcttaggaaattacactatatatctttttatattgtctatttttatttttatcctttttttctaaaatctattatttttaactcgtttttttaaatattgtaccaattttacccttgtcacttcaagatactttccatgtgattctcgtcaaggtattttgggtacaaactacaatatatataaaaagaagtatgttttaattaaatataaaattaaaggtaaatttgattaa

SEQ ID NO: 170263 - DNA, 2127 bp, Cannabis sativa
  modified_base (2077)..(2078): a, c, t, g, unknown or other
ttatatcctccaaagtttggaggtctagcctccttttcctcctcaacctcggaagggctgccaagagggacgtcgtcctgtttctcaatttcctggacattaatgtccccctcatgatctccctcctgctagacgggtagatcctgtttggcactcgaaaatgtggcgagctacgccacgtgaggatcagatgcgttggccttttacatcgtttgttttgtctgagccatcatcctactgttggacagatactggtgtaagcatgcaaacgtaacagtaggaacaacaattgaaatgccaaagttccccgaacttggaaggccaacaggtaaaggtcaggaacacctggccggacaatgtatgtccagttggacgacagataacgcctccaaccattcttcaattccaaaatgaagaagtcgtacccctctccagcgatctgctcggagtaatagtggtgttgcacttcaggttctggagtagaagagcattcactactcacctcacaatcttcaaagctcgaattggaaagtcggtcactcgaagaggacagactggcacggagatgagggtgatcctcgtacagaatttaaagtaggtcgtaatcaattcggtgttcgcttcccaaaaactcaccagggttcatctagaaaaggcaacacatgagatgggtgtttggtcaggatatcaaacaataaacaggaaaatatgccgaccaagagtactcaaccgattaaaagaatgaaaatattgaaaaataattcaaaacccaaaagtttgaaattttttgggtttaaggttatatttctcgaaacttcgaatgagcgaggtgaaagacgaacaatgtgcgatcaaaggccaacatcatgtaagaaacccatgtatgaaacccaaaagttaaacatgcaaagtaaaaagaggaggaaattgtaaacttactcattgttcgatgtttgagttcagtccagatgaagctgctcggaggcttttggtagaaatctcacaacaaactcgaagtaaaaaccttttttgctctgagttttgtttaatggagaaaaatgtaaacttgtgaaggatattcagccttatttataggcaaagtggtgaaaaaaggcaatcatttaaaatgtcctagacgcatcggttccccccaaaaagcaaatattgggaaattaaatataattaagtgtaaccgtcaaacgtggtgagagaaaactgggtctcgaggcattaattgagtcagagcattaattagccaaaaactaaagagacgcctggccaacctcacatcgaatcgcgaacagacacgcctaacacgtgtcacacattcaaatgcaagggcagctcagatgaattctacatgcaacttcagaaattccgtacagacttgggggcaaatgttatcccaatttttgtactctgccgtagcatcacatgattgtgacacgtggaatcaactttatatggcttctcgcaagggatatgccaaacagagcaccacatatattcgctcggacgaagccttcttaaccgggcagtgagcaatccgaacaacacgctaacacttagcagttttagctttcgcatcgtcagtcacagaagaaattcctataattttgggatcagatcagagagatatggcaagctatctgaatcccttgattagtgtattctttatttaatatgcaatctttccaattatatcaattgtaatcaaaagggaaactcttccctcaaaccttatagccctataaatagtgatccatactcactgtgcagggggaaacttatctaagaattcatattcagagatatcattgtaagagctctaagaaaagggatcattacattccttgttcttaagtcaatacaaagcaagaggattagactattaccggattgctcggggctgaacctctataaaattcttgtatctttatttactttattatattacatataccttatactacttttcgcttacaatctagactcattgttgttggccaaaagcgaggtcaacacctttccagggcaaagtaagcttgggtgggatgtatggagtatgcatcagaanngaccgatattgaacttggactagacatgataaatttaccgtaatatcta

SEQ ID NO: 170264 - DNA, 774 bp, Cannabis sativa
  modified_base (180)..(190): a, c, t, g, unknown or other
atatccaggtgggattgggaccggtgtcagaatttagagtttgaagtccggtgttgggttaaggccggagtctgagtttaggtgatgttttggtttggtggaatataatagtaatagtaatgtaataaaataagaatagtaatagaaatggattaagatgtttggtttattattggaatnnnnnnnnnnnaataaatgataaattgacaaaattatcttgtactttaattttatatttatataaaaaaaaaggtattagagtcattttagctttactttatttaatcttttgtgatgtaattctcattaagtcatttttctaatgtaataggaattccatattatataatgtaattatcattacaatgtaatcctattaaatcatttttaaaaacaaagcaaatataataatgaataatttgatttcattacgattttcattacaacaaaccaaatatgtcattagagtaaagattaagaatcaaaattgagagagggtagagtgagagtttgtataaatatatcatacaattaaaatatatttttattcatttacaaaatataatgttacacaattaatataagttaatattaaacataatattatattacaataatactatacaatataatagcgtgaactaaatgcccccattaaatactgtctgagcatttataaaagaataattagcatatttggcccctgaattttcggcactacctagttttgtcccttaaaatatacggcttgttaaaaattctccctaaaatata

SEQ ID NO: 170265 - DNA, 929 bp, Cannabis sativa
tccccaaaatgactttagaccataagtcattgcaattggaggcaagtctccaccccaatttatccactagacaaaaattgatgtcttgaaatttacgaataccaaggccaccattcggtttgggttggcaaatagcaccccaactcaggagagcaagaaatcgaccctcctccaatccaccagtccaccaaaaccgtctaaccatagcatccagggaatccgttatcttcttagggaggagaaacacaaacacagtatatattggtagtgccgagatgacattcttgattaacactgatctggcagtctgagaaagaagttttgctttccaaccttccattcggacacgagctttctcaacaatgaagttaaaatctttcgaccggttcccgctcacaaacaacggatttcctaggtaagtttcagtcccatccattagattgaaaccatacaattctgcaatattgatgccgcaagccatatcacaattctttgacaacataaccttcgatttcttctcattgattctttggccagaccacatacagtatttatccagaatctccttgagaatggaagcctccctcaaggttgctttggtgaagaaaaaagcatcatctgcatacatgaggtgtgagatccccgggctgttaggcgaaacccgatacccggttaggtgaccatgctgttcctttttcagtaataatcgagataggacttctgaacagagaatgaagatgaagggggataaaggatccctttgtctcaggcctctatggggttggaaggattttgtgaggccaccatttatcaagacttgaaaactgaccgaagtaatacattccaaaattaacttacagaacttgttgcaaaagcataatgccttgagaacattaccaatgaaaccccattccaatctatcataagct

SEQ ID NO: 170266 - DNA, 710 bp, Cannabis sativa
cggccggagctacaacaaccacaaccaccccctctaagctcaatttaccctgaaaaaaaaaaacaaaagacgatcaaactctggggacatatttttaggtatgaaaaatacaatatttaaaaaagtgggtgagaatagatgaaaatggagaaataggggatgtgaggcggtgattgggcgagggttttgtgaagggcttactagttattttgtttggggtgaagacgaagtgacaaagacaaagggatgaatagggttatataaatcctatagtgtcggttattttgtaataaccgatgccataggggacacgcatcatccaatgcatgctcctgctatgacgtcggttattacaaaataaccaaccccatatgtggtgttattaaaaatttaacaccttatgatgtcagttattttataataatcgatgctataaagtgctttattaaaattttatttaaccacactctataatatcaattatttattaatcagttgaataaaaaaggcctctaaatatttgttttgtaacggtgagattatttttaaaatatttattgtcaaacttgatttacaaaataaaataagaaagtatcttaaattagtagaaataaaaaaatatatataaaataatttatttattgtttttctttatatatatatctttatatattaaaagtgcctatttaacggtatttcttggtttaaca

SEQ ID NO: 170267 - DNA, 1210 bp, Cannabis sativa
  modified_base (1159)..(1166): a, c, t, g, unknown or other
tgcagtataaataactatcatctgtaaaaagcatatgggatactctaagagcaccattagccactttacacccatgaagccatccttttattcatattttcgcagtaaagctttaaaaccttcaacacaaagaataaataagtatggtgatcggggatcaccctgccttatacctcttgtagagatgattggaccaacttcattattaccatgagtcacacagtatttggccgatttaacacacttcataacaagctgaatccaattttcaacaaagcctatctttcgaagcattgcctcaagaaaatcccattcaatttggtcgtacgctttactcgtgtctagttttaaagccataaaaccatccttacccttacgcttcctcctaagatagtgtaaaatctcaaaagtaacaagaatgttgtaaaatctcataatatttatttccaatttaatattattgttagattaaaatattttgttcaaatcacatatatttttttttcaataatttcttttatttaaattcgaatgttataattacctaaaaataatgtatacctatgttagaaatttaaatttattttggacctaaaattagaatatattacaatattatttttttaaaaaaaaaaatataatgttgtagttaattttgacttaaaatttgtatagtacatttaaactctttaaaattgtactaaataatgtgtagctaaattacaaactaaaatatattttagaatttttttttttatttaaatgagtgattgttagtttttcattgttctaatatattgatattaagaaagtcttagtaattatagtctactaattaattatgtaaatagttttatttgtgcttgtttatatttaattatagatctattataagtggctttgtgattactttattttgatttttaagagattcaagaatattattttaagtagtttatatatttatacatatcaacaatattattttaaatagttactagttactatttttaacttagttatattagtatatatgttgctatactagttatgtatgtattagttacttgttaatattctaacttaatttttatttgaactttttatatcacatttaatattgtaggttgtggattattatcaatcaatatatatatannnnnnnntatatataaaggaatgcacaaacaagtttatgtggcattctata

SEQ ID NO: 170268 - DNA, 711 bp, Cannabis sativa
cttataaactattgtcgttaatcgaaaatgttgtctttttttttattttcggtctattcaaattcaatttaattatatattgaatgataaattttactatcctattcaactaattttagtcatcaaatctatctaatatctattggatgttaaattaaataagttctatctattgaatatatttcatgtatatttattggtttaattcaagtttatctaataatttaaacttaatattttttgaattcgatcgtattcatccaatattttacatctagtatttaagggattggatttgatttatccaattcaaaaaaagtaataataataaataacatttggtgacacttttatttttttaaaaaaaattttataatcacaaaaatagataaaatttgtatttttttttaatttttatatatacatattttttttacttataataacataaaatttaattagtcatccgatgaaaatattgattagtttaaacaccctatccaacatccaatcaaatccaattgaatattcaaaaataaaattcaatttgatccaatctcaaaagaatatctaaagtttggcagtgggttgtaactgaattaatgagttatcattagatatgatccatttatacacactcctgataaaaattattttataccttgtgttttgtaaaaattatttattttttttattttgttaaatgacaaa

SEQ ID NO: 170269 - DNA, 651 bp, Cannabis sativa
actattagataaactcaccaattcttggtcaaaggttcaattcttggtccctttatttcttaatcttataaatatattatgtgtgtttacattaatatagtattgtttgtccagctttgtagtatggtctatctggtcccctttctgaatcttgcatggcaatactattttcgatagatgtgtatcaatggataagtgcaaagatcaatgtgttggggttgaaaaatattactattacaaaactagagttttaacaaataatatgttctgtacttattgatatgatatgagagtatgacctagctacaaaaatattaccatgatcactctcttcttttttgattggccactccccttaatttagacaattttaattaggtctaatatttcttaatttataaccattttttgttaaacaaaattaaactattacctatgattttgtattactataatttataacttaattttttgtaaaacaaaattaaaataattatttaattaaataaaaaaatgatttaaaattttacaacatctacacttaaattgtatacaataatataacttaaattttatgaatttataatattatgtgacagtcagtagtcccgtgatccgtaagggaaaataccgggtaagctgtgcaatccc

SEQ ID NO: 170270 - DNA, 685 bp, Cannabis sativa
atgagcgaaccatcacgattaaagtgtacggaggtaacaggcatagagtgagccttaatcgagtgaaggcacttaccagttttgacttcccatatcctaatcgtttcgtcgaaggagccagagacgatgaggttagactgggggttgaagttaacgcagaagactaggtcggagtggccacggagggtcttgacgcattcccctttggcagagcgtgcgtcccagatgcgaagagtgcggtcgtcggaagcggaacagatgtagtgagagtcggaggaccatgaaaggtcggagattccctcggagtggccgacgaggcggtggaggagagtgagggcggaggaggaccaaatagcaatggttttgtcaagggaggcggaggctaagagggtgccgtcgtttgagaatttgacacatgagatggagcgttcgtgggctcgaagcgtcttcaggtaccggtaaggcgtgtaaggtgccgcctcttgcccgctgctcgccattcttgtgcgtcttgttcaggatttacacctaatataactacgctaaaacgaaatcaattgggagaaaaattcatcaaaaaagattgtgtgtgagttttttttttttttttttggctggggggagtttttttttgtgagtttgatttttgattttgaatgtcccaattttaacaactgaaaaaaaa

SEQ ID NO: 170271 - DNA, 694 bp, Cannabis sativa
tatcaactccttaatatattttggtgttatgatttttttacttagttttgataatttgatttatctgtttgtactactacattattttttttttcataaaatttgttgttacaactccatactttcaacttttttttttctctttttctttttgagttagtagcaataaaatgataatttattttttaaaagttaaataaataattacattaataatcaaaatagtaaaaacttttgattttaaaatagagtatataatataacgggtaatatataattaatatgtcaatatctactactactgcatattgtgttaattaaaaaataataaaaagaaatcgtattattgtattttgataaaaatgtgtcaaaaaataaactaaatatagatatctaaactacaaaataacacccatacaatcaaaaaaattgtcaagatgaaactaaaaatatacaccttataaaatacacattaattaaaaaacaatttaaaaatatatgttgaacaaaaaatattctgaataccacttaaaaataacaatatgaatgtacatatatacaataaaaaaaaaatgtgttaaataaactaataaaaatatacaccataaaaaaatacacataaactaaacaacaactgtacaaaaaaataacataaaaataactataaaacatatctaaacaacaacataaaaat

SEQ ID NO: 170272 - DNA, 670 bp, Cannabis sativa
gtattaaaatttaattataatttattaaattatatatcatatttatcaattacatctataaacaacataattatttaaaaagagcttcataagtataaattatttagaaataaaatgttttcaaaaccttagaatgaatatgatacagttgatatcaatcaaggctgagatttcattatactacaaaatatcaacaagtaaaaaacttatttgtaattatttttcatgtaccactttcaatatgaatactgatatgtgttatttataatgtagttctatagtttatacttctcttaatatttacaaaatattttgttcataagtgagtttattacttgctaaaaaaaataaatattgatatatactaattaattaattttttttattaaaataaatatttataattttatattaagttgaaatataaaatttattttttttaaaaattaaattgattaaatattgtatttaaaaacaaattgaaaaataatgtgtgaagttattttgtttatcaaatatgtaaagtttatagtttttataatttttagttcaatggttcttttaaaaaaataatttaatataggtattattgaccgaggttttcggcaaccaatttaataatatataagagaaaactgtaggaagtttagtgcatgagatttttacgtgg

SEQ ID NO: 170273 - DNA, 759 bp, Cannabis sativa
taatttcaccattccaaattattatcattaaagtgtctagatcaatagaagccattttgttgctctcaattacttactctcgaaatatctcatattagcaaaatcattaaaatggtgctttatctaattatttctaaaattattgtgtttacagtttacttttaaaaggtattgacttttttgctcattgcacattatcattagcatcttcttgcatgatgagctaaagatttatgattttgcttaaaattgtaaaatattttattgacattattgataaaattgagaaaattaattatgtatatatactatttttgaaagttgcttcttgtttttggtgtgaaaatgtttctaaaatcataatatttgtaacgctccattttgccttactttacaaaaatacaatttttaatacataacttatgaaagactgaacaccattgaaaatcaaagtagactttattgataaatatgaaaataaatggctttcagtcttaaaaatgaaatatgatatttagtgcatctcttttaacaatataattacattcccactgcattagaatactataagggcccgtttggtatgcaagactggattgaattagacagactaatttgtccaatctagtgtttgggcatgttagaagtctggataactaatgcagttgacatcatctgtttgggagtatttatcccatctagcagggtgggataaataatcccatgcaagtgagattttttttttttatcgttttttta

SEQ ID NO: 170274 - DNA, 554 bp, Cannabis sativa
cggaggcatatggcaggtatcatcaataattattttaacaagcttttttccacttctaatccctgcattccctcggacttcgacgagatgttcggaatcaaaattgatgtgagggagaatgaacagattggtagagttccttctgataaagagatttttaaagtagtaaccaatatgcatcccctcaaggccccgggacccaatgggttttcgggatgtttcttcgtaagtactggaaggtagttggcagcgattttttctctatggtcaaggaatttttcaccacgggttctttgtgcagtaaattcaattattccttcatttgcttgatcccaaaagttgagaatcctgataaagttgagcagttccagcccattagcttgtgtaattttctgtataaggtcattgcgaagatcatatccaaccgtcttaggcctttaatggacaagttagtctctccagttcaatctgcgtttattccaggccgttggattgttgaatcctccatcttaacacaagaaattattcacaagattaaattgaagagaggagct

SEQ ID NO: 170275 - DNA, 930 bp, Cannabis sativa
  modified_base (289)..(291): a, c, t, g, unknown or other
gacagtggctttgattctccaagtggttcgtcttctttctttatttttgttgttgtttttgtatttaagattggtcgtaagtttgtgagagttatatgcatattataagggacaacaaggttctctgtcttcgcaatcttcgatacgagtttcgtatggatttcaaggttcgagtaagaagattgagattccaaatggtagggttggtgtaattataggtgggagatgcggctgaaagggagagggtgcaaaataggttagggaattagggttttttttttagtttttnnnatatatatattttatattttttttatttcaaatttatttattttcctaatttcaaattattttttaaatatttatttacgtggaccaataaaactgtgctacgtgtatactgtgaacacgagtttaggggactttaccaccaaaattttaaaattgggagttagttgcaataaactacatacttatagaagttatgccgcaaattactcaaatatatataaattaggttctaattttttgatgtaaactcgcctgtttggtttccaaagagatgccatctaggaatattcataaaatatccaaaacaatttaatcagcacgatctaatccaatccaatctgcaaagtgcggatatctgcacttgtgcggattagatgttaattgatatgtaaaagttctgatccaacttaatccacacatatttacatatatttaaaacaaattatatatgcaattagtattttaatgcaaaaaaaataattattaagaatctattacatgcgatataaatatatttcaaaacttaatagatttaatttatattccattattatatataaaaaatataatttaaaacaaacttaatcacttttttctacgtacaattttcttttcttcttttaaatttgttattttatt

SEQ ID NO: 170276 - DNA, 533 bp, Cannabis sativa
agtttcctaccctagggggagttgccacgctgaaggggggcaaagagaagcaagggagtgttacaatgtgtcgttgcgcctcgccaccaaagtcaaggaaccaatggcaatggcaatctcagaaggaccagttgaaggtagtggagtgaagtccgcggagaaatgatgaaacaacagccataaaaaatatatatcctttaggcatgattagtaagaatcaaggaaggaccattagggcgactccagtagcataacttcttttgtttttcctttttttaagcattgcgatctagtaaaaaataactatatgaatgaatgttgcattggagctaccatgtttgcatttccaagttgatattcctttcctatagaaataagcgaagaactcaagtatacaacccataaatggcgttgtacacttacggggcatggagatgagtaaaaaaaattctaagtcattgttaggttacatttagcctatgtttcgggtctttaaagttagcattatctcgtctattggtgtcttttggagc

SEQ ID NO: 170277 - DNA, 513 bp, Cannabis sativa
tggtgaatctaatctttatgtctcagcttaagatcagttttggagaaaaatatggcaattaaaaatcccagcaaagatgaaaaatctattgtggcgtgctacaaaaaggtgtctcccaaccatgcctcaactacatttgaaacgggtggaggttaatattctttgtcctgtttgtaattcagttgctgaaatcatttctcatgcgcttctcacatgccctactgcagttgctatttggaatcgcgtgggaataggcatggtaatgcagcaagacacctcgttcctggactgttgcatcgggcggttcttggtttgggacaaggatcattccaacttgatggtggctgtgtgttggacgatttggaacacaaggaatgatagagtacaccataataggacagtgggggttgagagcattgttacatcggcaacaaactattttaattaatggcgtattgctcaaaaatcaagcaatgatttgttgttcactgggtacatactgggggacggggt

SEQ ID NO: 170278 - DNA, 584 bp, Cannabis sativa
gaggtcattgttgatgggcttgcaattgcaaatgagttggcagccgagtttactgatcagaaacgcaagactgaccctccattagggttaaagaacttcttgctacctcaatagtgttctccagtgtctcacctatacgtgtccgcttgccgatttctgcctccgcaaatagcattcttctctctgtaagtttttttgtttgggtgccctagctagatttaattttaatttcttccattactgatgcttgaagtttgggtgccctgggttgagatggtatcgaatccaagctacaatccacaccatccgacgattcaaaaccctcgttgttctgaatccccaaaggcaaagaagaagaagaggctgtagagctcaattgattgggtttcttccatggtcgcggagtagtaaagcttgaagctttcaatggtttcttccgtgagagagagaattttttaattttggatcttagattgtatttagtgtttaggtttctttgattgtgtttgaattttaaaaaaaatgttgaggtggtagtggtgggcagttgtggttttgttaaggttgatggtggtgatgctaga

SEQ ID NO: 170279 - DNA, 666 bp, Cannabis sativa
ccgatctgacatttttattttgttcattaaattaaattatgtaggattcatattaaattacatcaataataatatattatattttgtagtatttgataccttaaggtgccacttaacattttttaatatgtaacggtgacaatttatgtttacaggttgtgtttgtattgtgtcgagacttagatactacaagcaaatattaaactcaaactcgatccatttattaattgtaaaaaattaaaactcgagcccaacccaattataaacaaattgacttgactctacccactaaacatgtttatataagaattacttttgttaacttattatccactcattaacttatttataacaaatttaatacttttacaatcgttttatgacacatttgtaaacaattaacatgtttatgttttttttaactaaaaaaaaatatatttacatgtaatgaaattaaatataagagtgtatacttttaaatataggtccttgtcctgtcaatctcgggttaagctagtcaatccaaaaataacttgtttataaacaggttagctatgtaaactaaaaatgattttattattatttttataataaatatgtactattttaccttataattaaaaaaaaaaaaaactaattaggatttttgttcttgaattttgacat

SEQ ID NO: 170280 - DNA, 591 bp, Cannabis sativa
aggtgggggagggtcatggctagggatggggtggagtgagggttggggtaggtttgggttactgtcaatattgtttgctttatgaaagaagacgaagaagaataaaaggaaaagaaaataaaataataattttatgatttaaaaatatttttttagtttttccttttaaattatttttaattaaaattatgatcaagactaataataaatggacatgtgtcattttattagtatctaacaggtctgttaataaaaggactaatatacaaacaaaaagcgtgaccttggagatcgttattactgctaattttggagattgaagacttatctccattaaatttaaatttttagagacttgtgtcgcaatttttttcataaaaaatactttatttattgatttatttaacatgcttattatataattagaagtcttgtgagtgcatattatatatatatatatatatataaagtatgagagctaaatttattatggaattggatcaatgagcaagacagcaacactatctttagtgacttttccaacttgtgtatagttatcaccatttttgtagagaagatccataaccctag

SEQ ID NO: 170281 - DNA, 770 bp, Cannabis sativa
aaatgatcaaccagaaccatctcacagaaatgagaatgggggccgaacataaaccagggaatatgaaattccccgagaaatgaggaaaatcctgggacacaacctggggaacgaaggaaccaccagcattcttcccagacccctagggaaggggctcgaacaaatcccaatgggggaaacacaacaaaccatgcccaagggggaagaacggggcatgaagaagtgagtgtgaccttggggcactcaaggagccacagtcgatcaacttgaggcggagaaagtacttgtcgctataatgattgagaaagtacgggaactagtaagactgcaagtcactaaaggaggaagtccatgagtaggacgaggtccgtaagtaggacgcagtctgtgagtagaacgaaatctgctagtaactataaccaaccggatctgcgagagcacttgaactagaaaaaacttggtattttccaacaacctggtccaaaagcaagaggatcctatccaattgtgaatagacgagttggaggataagttcagaaggtatcaagtggggaagttaggaaaacaatccggatacgactcaaatgaggaactcgagccgtaccatccagatatcatgaatactccttttccacaaggattgaaaaactctcacgtctcgttgtatgatgcgaccactgatccggtcttggatttgagtaatttcaacacaattattatagagtttcatagtaggcctagattaagaattacagtttcattaggccatt

SEQ ID NO: 170282 - DNA, 544 bp, Cannabis sativa
ttactctcttagatgaattttactgactgagactatatttataggtgcgatatatactccatcaatatttgtaccacattaattgtcataattttttgataattaattcgaaaaatcaaatcgagaaatgaattattcggtgaattgaaatctggtcatatagaatatttatttttgtcacacatgttagtttcaactcatcctactcacatgccacatgtccctagcttattggtttcaaggtacctcattcgattgcctacatggacaactttgattagttagttaaacctaaatcggacatatcatatcaatgtgtggtccgacattcaaaaaagcgatattagagctcaagttagaataatatcaatctcaagggtgtgatcaagattccaaatcatcaaaaagtgtagaatgaacaacggaaagcaagatcttggaaaatcaagaagatgacttctgtgaaggtggacattgagaaattcagtgggaagaatgacttttgtttatggagagagaagatatgagagctcatatttaaaat

SEQ ID NO: 170283 - DNA, 682 bp, Cannabis sativa
cctatgccattgttgttcaagaagaaaggcaaagaggcttaactaatgatgttatttccaatactgaggcagataaaagtaatccgaatgctgaataggtcaatttgctggaaatgttgctggaaatgttcagccatttcgaccaaagttttcttgcactaattgtggtatgtgtggtcataccatagaaagatgctttcggattattggtaatccaccagaccacaaattacatggaaaatttcctaataggaattctaaagtacctcctatgaaatcggcttcagcaaatttctcaggaggagatgagcagaaaccagaaggttctaatggagaaaaggatttggttgctggtttgtctagttcacagtgtcagaaattgatggcaatgctggctcaaaaggttgctggcaatgctgctacaccagaaccttcatcagatcaaccaattgtttctcacttttctggtttgaaatctattactccttcttctaattggattatagatactggagctacacatcatgtatgtttcaatctttctttttttcagaatgttcataccaattctaatctgaaaactgtccttttacctactggtgtgcatgctaaagtggacagcataggaacagttattttagggcctgacttagtccttaaaaatgttctttatgttcccact

SEQ ID NO: 170284 - DNA, 723 bp, Cannabis sativa
  modified_base (218)..(228): a, c, t, g, unknown or other
tgaggtcaatgttgcttaccagaattattcaaatcgaagcaccatactctcaaactataatcgtgctccttctcccctatccacatctcgtggcggaggtcgtggatactcaaatcgtggaactttcaccggtaacaattatgcattgtctacttttacaaatggttgtggtgtttctactgtcaacaaaggtggcaggttcccaacaccagcaaatnnnnnnnnnnntgccagctttgtcataagcttgggcacacggttattgattgcttctacatgtttgataagagcttcacaggggtttttccaggctcaaaacccccacaaatcaagctaatcttgcatagataactcagattgatgacaccagttggtattcagactcgggtgcaacacatcattgcactccaaatgtgcaaaatctgaccaccagcatagaatatgaaaggtaagatcaactctatgttggagatagtaaagtaattaaaattatatatacatatatatatatatttaaatttatagatttttttttcatagttttacaggatttatgatttttttagaggaaaaataatgttaatttcatgttgccgtaatgctatattatatttttgcaacgtgaaaacttgtaaataatagcttttcttagaacaacccaaaaataacaatttgtaaaaaaaaaaaaaaatccataaaaatgtaaaacagaaaaaattaaaa

SEQ ID NO: 170285 - DNA, 519 bp, Cannabis sativa
gtatataaaatgttaatttttaaataaagaaaaaagcaaaagtgaacctaggcacatgttaatttgatccatctatactcagagctggagatctgtctagggttccaacattaaaattatattgtatacctactttactttatttgttttaattgttacctttatttccatattttttaaaatatactcacttttataaatgatgtctccattatactccttaagttagtgtaaatcatgtactacacttaagtagagggctaaggtatataaggcgactcactcataaaagtaggtaaattttaatgaaatacaatacaaaagtatttttaattaatggataaaaaaaaatatttctcaacttatctcttagaattttttgttaaattatcatgttgaggccgacccctctataggatgggcctccaacaaaagggccgcaagtttgttaaggaaataacactattttatacatattaataccatctttctatatgcaaataaaaaaaaaaaaaaaaa

SEQ ID NO: 170286 - DNA, 1151 bp, Cannabis sativa
tcagcccctatatcggtggcaattgcacccgggatcagaaattcatatactcgatttagcccaccaatgtccaacagtcattctttcatgtacctgataaaaagtcataatttataactgttgctgtcaaaaaaatatgatcaagtttattattaagagttagaaatcatacttgcaccaaactcctatttgttgggctcctaagtatttcatgttgcacaattcctgaatgtcactcttagaaagccaagtagagtcatctacgacctcaaatagctcattatcaacttggaattggattatggatggcttgggacaccttctaatgaagttccaaaaggcaatgatggaggaagtttggcgtggttggacataacaaccatgaacttttgccttactcggcctctcagggtgttttagaggctgtgttgaaagaccgagtaaatcttcagaggcttttgtgcttctcttcacgagttgcttctgaagtttcttggtaggtggttgtgtttatatatatgaaaaaacagcaaagttagcaatgtcatgaaggaataaacacaataagttaagtaaacaaattgaaacatgtcaaatattttccaacaggtgtaagatagtctttcggccatcctacataacattttatagcttgacctactgtcgtcaatgaatcgtcgactatgggacacggtagcagtgcattctccacatgggcttcttcgatatatactcgacgataatccttgtgtaggtattcatccatgttaatggaaaactttccatctttcaaatatttctccttgaaaatgtggcccgaggcaacctccaacaccatcccactaggctccaacagatagtgcatccaacatggtaaagtctgtaaatcaaaaacaaacaagcaacaactcaatttataagttggccacatttataattttgcattagaataattcgtaaaataacattaagattacctcttctgaactatcaccagtaggtggcggtgctgctgctggagcaatttcctctcgaaaatgcagcagtgatggagagtaaacattgacggcacccgacagttctgctatgggatctggtgcagagtagacattgccagcacccaactgtttgtttgaaattattttaccagg

SEQ ID NO: 170287 - DNA, 589 bp, Cannabis sativa
taaaatcaactgaatctaactaatattcttgagtcaaagcatctaaaatgacacccaacaaattctatttcttttgttaaattttcaaccatatctaatcatttgttaagtattaacctttcattcccttacatgatttatgaccaaaaatatatagcatattataatttaataaaaactataccatttgcattacaaattaaagaaataagaaaaaaaaaaaaaaacttattatagcaaattgagagtatgagcattagttatatttaacactttctatttatggcgttaaatgaatgattagcgatattctccaaaaaattattattgtaaattatacgagactcgaagatgttagacagtagtgttttttagcattagttcaggtgggtttagttaggaccctaactttttcattctttcaaataggggtgttcattggatcacatccaaggtgtttaggcttatccagatccgatccaatcatatattggatgttagattttaccatccgatccgttcctattaatttcgtcatccaatcgatccaacatccaatggatgttggattgtatcggttctatccatt

SEQ ID NO: 170288 - DNA, 733 bp, Cannabis sativa
ctcacgctctacttcctcggcccagctttccttctctcccttgaattcatcttcatcgcagctcccattcgaagagaatgtttgagctactaactaagccttgtatctttcaattgaaccgttaggaagattttttttaccttttataaccatttccacaaaatgggttttacttgctttgactttgacaccagctcccaagtctaattcttctctagagtatttatctcttctttcatagcttcaagccacttagagttatgatatgcctcctcatataatctagctctctgaacttctcctcttcagctgcatcattatcaacatatttggaatttggcttccgtgctcttattgatctttgaagttttaggcttactacttctagttatctgtcttgatgtacacctgtttgccatggattttctgttgcctcatccttgaaaggtttactttgatccccatcatcattatctagactttgatgtacgtcaacaatttactcttccatcttcttttgtaaattttcttctatttccttggaatttggtaactcttccttttgaggtgaccacgataatgatccctcatcatataccacttttcttgatgtatagcactttctagttgtagggtcgcaatatttcaccctttcttttggttgtcatatcccacaaagatataacgtattatcaaattttctatgtaggtatctgttagaaattattttacc

SEQ ID NO: 170289 - DNA, 533 bp, Cannabis sativa
ggattcatatgtactttttttttttttaagtattatatgatattacaacgcctaattttagtacaaatttttgttaatttatcgtatatatatgcatgtaagtattattttgtgatatggtcaaaatttggtttggtatttgaccaattatatattatatattatatatatatggtggttgtagtgagggcggatccacatagaaagctgtatattaatgatatttattatagatataatattaatataattgagcaaatgagtctgcttatcaagtatcatcacttgtttagcgctacgtacagagtataatagtataaggacataattctttatatgcattttcagattgtttatatatgttgagttggcagaataatacatagatatattcatatatgggctcgttaaatttatattggactatttatagcataatttttaatttttttactttttttttttattatgggacagaatttttttaaaaatattgtgtaagttttatactcactactagagaaagggccttt

SEQ ID NO: 170290 - DNA, 597 bp, Cannabis sativa
  modified_base (567)..(568): a, c, t, g, unknown or other
ttagaatacattttcttacttagatcatctccaatgataatattctttaaagatattaaaaattttcatataatattttattttatttttctactcttacttctaaaaatactttaatgatataagagtcgctacaagaaattagaaagtttaccaacacaccatatatgtggaaaataattatctatatatgagaaatataatttacccacacataccgtgacagatttacaaggtgatatgtgagacatggtgagttgccaattattaaagtaatttttgtatgaaaatatgtcaaattttatgtgggtgagagataaaaaaaagtaatattttagaataatgtgtacttttggcgactataggcgttctcttctatttgagatactctaagttccacctcagcaagtatttttaaaatttttactattagagatgcttgatgacatagatacatttttagtatttttttaattgatgcttactagtagaataaaaagaataccatgccatagcatcttttacatctcctcttttttatttctttattattattttatcataaannaagaaaatttatttatttaatatatatta

SEQ ID NO: 170291 - DNA, 1705 bp, Cannabis sativa
  modified_base (906)..(907): a, c, t, g, unknown or other
aggtaaagcaaagctaagaaaatttaaaaaatttgtcttggttgttgcacttgcagctctggtctacaccatttggtgtaatcgaaacgctaaactttgggagaaaaatgatactaatagcattgcagtgtttaaacaggttcaaaatgttaccaaaagtcggataacttgtatatggccaaaaaaagtatctagtagtgacaaagcttggtttgattcattgtaaatattatagagtctaaggtcctctcttttatttgaggatgcttgtagatttgtacaaattgagtattggagtaatgaaacatcatcttattcatcaaaaaataaaaaaaaatagaagtaataagttatattgacaatttattaataattattaaaaactaataatatataaataatgattactgtaaaattttaaaaaattattaatatgaaaaattatttatgtatatcatctatatttatggatatataattttcttatatttttttatggatatatttatatatatattttttttttatgatctgagtgtatgtttttgattttttatgtttctagataaatgtatagataattattttatttaacttttttatgattactgataattaatttttaatttttttacaaaatccaaattacacacatttatttatatatatatgtatataaatgagagatatgagacagtgacatggcactctaggatctctctaaagctctttttctcttcttatcttaattattttatttttaatattttattaaagcataaatctacaaattaatattttactattatttaataaatttttcataaaaatatccagcaaaaattaactaataatttttttttaaaaaaaacacactatagatatacttattattattattattannattattattattgttattatttgtaacggttttgaatcatatattttttaaatttatcaattatcttttttttttttatatagatttttgttttgtgtgagaattaaatacaattcaatctatttataaaagtgactagttaattcattgtttaatttgttttatatataggtcaaatctagcaccatgttatataggtgagatatggcaataacaacacttttgaatgtaatgttgactgcaagtgagatacggtaataaaaaaagtttcgaaattatatgataagttttctataaatttatcaattcttataaaaattcgaggggtcaaacctaacatcatgttatacaggtcatatatgtcttccattatagtaacgagatttggtaaatacgagttggattagcctgtttgtaaacacctaatttttcatataaaattatatgaaaaattaaattaaaatttgatacaatttattacttaattgccattaaataaaaattatttattttttatatatataatttataattttttaaacatctctgcgaagtgcgaattatttactagtatatatataaaagagagatatcaagtggtcacactctaaaatctctctaaataactctttctattctctcctttattctttcaatttataattttttattaggtttataaaattatttcaaacttatttatctattttttttatttttttaaaataaatatataaatttttattatttcaaaatatatatatttatataaatatagatttttattatttttaaaaa

SEQ ID NO: 170292 - DNA, 516 bp, Cannabis sativa
  modified_base (451)..(488): a, c, t, g, unknown or other
ccgacattgtcccttgacttctccatttctaccaagccttgctatttttcttctctttcgaccttttctgtctttagcgagcaattcgctaacgataaaggttccaatattgtagccagcactttgtctcagaatccttctattttaccagtatagatttccactcttgggccaagagaatagagtaggtggtgaaacgaggttcatccactcgtatgggtctgcccacagttttagctttctttccaccagaggagtaaccttatttctcactgttgttagctcttttccctccgtttgagccttctttcttcccattacccccacactccagtgtcaggggttggcgagtctggcaacttcttctagttgccttttgagcccttggcttgggcgacaacttttctagcataataaagcttgttgggaatattttaccaggatctaaatnnnnnnnnnnnnnnnnnnnnnnnnnnnnnnnnnnnnnnattctctaaaacaatgaaataaacgcat

SEQ ID NO: 170293 - DNA, 580 bp, Cannabis sativa
tcacttggtttaaacataacttgtggcctaaaatgtaaagtggaaattcaaatgtaaactgtttttattttcatttcatgatgcccgagggccattcgcacaaaagttaattacatagatctttacataaaatagtctagataccgtcaaagccttgttttctctagcgattggtagtatccatgaagtgatctgcattccatgcatgagggacccttgatccatcaatcctttttcaactaaaaagtaccttgacccaccttcttgagtatctcataggggccttccaagtgtgggccgagtacccccactcccggttcctgcaaaggttggaatactcttctcaaaataggattgccaacatcaaatgtacaactcttcacttttgaattaaagtgtcaggtaattttacctgggtacattttaagttaaacttgcaactgttcccaaagctcttcaattaagtctaacgactcttggagcagggaatggttgctggaagggtcggacaggacaaacaaataggaagggtgttgggttttatgccctaaataaaactcatttcaagatcggaagagcg

SEQ ID NO: 170294 - DNA, 592 bp, Cannabis sativa
ccattacatctttaaatacacatatacatcatcaatggcaataagtaaaaacacagatagttgacaaacaagcaaacctagtgcatctaaaatattataataactagaactttaatttccactaaatgacacattttcatgtactaaaattcaagggatttaatctaatttacaaaagaattggatacttatggattattttttaatattgaattatttaatatttattaattcttttaaataactcacaataaaatagcaaaataataataatagtaaaaaatatagaagtccgacaaattagtcaattgcagaaaatagagaaagaacaatagtttttgataaaaaaacagaatgcctttcattaatacccatgatttcgagagtctggatctttcctaaaagttacaaactaaaaccaaattcttcacatcaattcttttactattctttcctatatatcataccactaccccattacaattacacttaacgacgttttatttaatatcctattattccaaggcctaacaaagtctaaagttcgaattctctttccctaatataaaaaaagaaaaaacaaaaaaaaaaa

SEQ ID NO: 170295 - DNA, 685 bp, Cannabis sativa
  modified_base (619)..(619): a, c, t, g, unknown or other
gagattttggcccccttggaccggaaacacaagggtaaaatggtggaggctgaatcttccaaaaagcccaggaaggttgatactccagctgccagctctgactcggggatcgcacttgaagcggaggaatacactgtgcctcccaacatcgtccttaccttggttcctgctgatgaggagaggcaaaacctccggatcgccaagcacaattatgctaggctgaatatacgaaggggaacgccgaggtggaagctttaaaataggttttaagggaggcccagccaaattccttgcgtaaagagtcctttaggaacgcttgggacctgaacatggaccccctgacggacttgttcaatcgctttgtcggacctaccctcgctccatttgcctcagagttgacgagccactttgtctgcaacctgacccaactcctgaccaagagatatgcagcctgcgctttcacgaactcgatctatcaaattcaggatatcaccgctgctatgaccgttgtaggcctctgttattgttttttggggtcttacctttatggcacctgatctcccgtaattacttctttttcttgtattgccagattgctgcagagactggtcgcctctcnaagactttaattgatcatgggtacgtcatgtccgaattcggtggcatggacgaggccatgaagagt

SEQ ID NO: 170296 - DNA, 1008 bp, Cannabis sativa
tcgaaagaattttcccccaaataaaacttaaggggtggttagttttccacaaaaatagtcatgtagaggagaaaaagaccaatagttcaaaaatgggaaaatgtgcagccataacacaaatccctataatggttggcaataaagtcatttttgtcataaagatgagtcatttgaagggtcaaatatctgagtaggcatagctacccagttaaggtttttatagtcactgctagagttgaaaagtctctatccgtacagacattcgcacagagacttgggggcaaattttatcactatttttgcccacttgacgtgtacataggcaaaaataaggtcacgtggaatacaacttgtcaatgggtgaacgaagtcaccttacacatcgtgccaattgttaaaggttccaagcaatcaagcaagattaagtaaggagaaaatgactagccaggggactctggctggaccacaccctggccaaccaatgaagttccatgtgccggccaggccctaagaatagggatgaccggctagcacgtgcaaagatcatcaaaaggagtttaaatgaatggtggggtccacgataagctttttaactgatccacaaagcttaatttcagttatgggacagatcaaacaacctacaaagataggtattcttcctcaaactatctgcgtattctttaggaatattacttatccttttttataatttaaatataagataaatgagttattttttctatttcggagggatatttacttatttgaatgatgatcttttgtaaattatataaaggcattagctaaggtaaaaagggacctaaattctaattctctcaagccctattgcttctctctctcacgccttctcactcactcactagacaatcaatctatttctttccataaagtctcataagttctgaatttgtaacactcaattctcactactgtaatattaaagagagtcataactagaaattataagatttttattcaaaaaaaaaa

SEQ ID NO: 170297 - DNA, 736 bp, Cannabis sativa
aaatatcaacatgttgtcgataggttatctataacatttatctttttgtcgtagtcattaagtttagttattatcgagaagttatcaatatgttcttgatagttgaagcattgcaaaagaattgtaaatttgtttttttagttattatcgcttgactatcgattgattatcgacgggttgtcgatagattatcaatacgagttagaattatttttttttgctatgtgggttatcattgttggattatcgacaaaaatctcgacttgttctcgacaggttatagtttttactagttttacaaaaaagatgggagtttagttattattgatagattattgacggagttgtcgatatgaataaatactcatcaactaatacaatttgtttttgatttttgtagttatactttgcttaacaaatgctcatcaaacttccttcacttttatacaccctattaaatctcttaacactccaagcaccatcatacaatacaaccagaaatacaagcgatcctacaattcaatacaaaccacaaacaactgaatcagaataacaaaaataataaaaaattacaataatgggaaagtgtagacaaataatcgagaaccaatcaagaacctacaaaaaaataatcaataattgttgaaaataataatcattcaatcatcgagaaacagtcgagaacacgtcgagaaatcatcgataacatggggctgctggaatttattttaccagg

SEQ ID NO: 170298 - DNA, 670 bp, Cannabis sativa
tgcttcttgaacttttttaaccgtcaaaattttttcctaaactatgaaaaatttaataatcttgtcatttcacatggttttcaaataaataaaagtgacaaatgcatttactataaatctaaatataacgtttgtactattatgtgtttatatgtggatgacttgttagtttttggatcaaatattcatgtcgtgaacaaagtgaaatctctgttatgtgaaaattttgatatgaaagatttaggtgaagcggatttaatccttagtatacaaatcactaggtctgaaaagggaatttctttggatcaatttcactacattgagaagattttaaaaaaatataattactttaactgcaaacttgcttgtacaccatatgattccagtgtaaaattatttaagaacactggtgatagtgtaagacaatttaaatatgcaagcatcattggcagtcttcagtatgctactgactgtactagacccgatattgcttatgtcgtgggattattatgtaagcttactagtagatcttctgcatagcattggaatgatgttgagagggtcatgagatacctcaaaaaaacattgatccttggattacattattagaagtttctaggggtgttcataaaatagccgatccaatctaatccgcacgatccaattcaat

SEQ ID NO: 170299 - DNA, 588 bp, Cannabis sativa
  modified_base (557)..(562): a, c, t, g, unknown or other
gacttcaagtgcagcatcttggttcattgcagcagctcttcaacgtacttcgactagtttaagtaaaagcctgactcatcccgatgcacctctattcccagaaagtaatgtaaaggcccaaggtcttttaaagcaaagatctcattcaattttgaagtgaatggcttcagtttttcagaatcattacctgtaacaattatatcatccacgtagattaatataagaatcacaagtgatgatgtttggtaaaagaacagtgacgaatctgcctttgagtttttaaaattccagctcactagagttcctttcaatcgatcgaaccaggctctcggtgcctgccttagtccatacaaagctttggacagtttgcacactaaatctggctgtgttttgtcttcaaagccacttggttgtgtcatgtaaacatcttcagttaaatgtccattcaagaaagcattgttaatgtcgagtttcctaacctccaacgacttcatcacagccaaggtcagtacaattcgcactgtcgaggccttgataatgttaggttttatgccctnnnnnnaactccatttcaatgtaatctatttt

SEQ ID NO: 170300 - DNA, 1632 bp, Cannabis sativa
  modified_base (1574)..(1574): a, c, t, g, unknown or other
aaaacgctaagtatagatatacttgtcctcgcagtgttcttcgtatatgtgggtcaatgagttgttagctcttactcccaagtatgtgggttaatgagctgcaagctccttgatgtctcgccttgtacattcttattatatactttgtttatcccgaggtggacatattgtctcgccaactatatctgttaatagttattattcttgtcccgtatatacttatatgagagcgagtttgaatatttttattaactttaattaattgaaacgagttattaaaactgtatttaataatacaatttaattattataatctttgaggtgatttatattccttttgtagtacatgtgtcagcagcgtctggtgaatagttgaatttcgagtataatagatattttttatatatatatatataagtagctaaaataagtgtagaatttaaaatttctcttttttatttttcattaaatcaaaatctaataatttaatatttttaaaattaatatttacaattaaattattttagtaactatcaatggtaatacccattaaaaaatgttccatatatttatactaaattaatattatgtataatgcacgtatacttaattatattcttaattttaattttagttatgtatatttttagttttataattaatttttttaatgttattcagtaatcaacatcattttaaactaaaaaatgtttaatttaaattctatttatagaaagaaaatataataatatttaaaactttttgctaattataattttagtttaagcataatacttttagttttttagaaatatcacttttttttaaaagaaaataataataaattgtttttagtaactgcaatagataataccaccataatagtcattatttaaaaaacataaataattttttattttattgtttaaaaaaataatataaaaatatttttttagttatgttgattggataacaaatgataataaaaatatattttttatatatatgcagtgagtttaaatttgaattttaattttttttaaaaaaaatataaccacatttaatataagataaaatataaaatagatatatgtagtgagtttaaatttaaattataatgtttcaaagataaaagagatatgtttagtgagtttaaatttgaattgtaatgttttaaagataaaagataaaaaaaaaatgtgtgtattgagttaaaatttaaattgtaaaattttaatgtaaaaagaaaaaaaaaatactttttattttatagctacaattaatataataatatatatattatatttataattcgagaattgttattgggcactaatggtgcttagcaccttgtacacgtgtcaccttgtaattggttagtgatactctctaaaagttattacattaaattatattagacttgatatttaattagaccaatagagatattgacatgtaagaagataggagtttttacaaaaatactagatttggggtaatactttttaattttactgccacacgacagaaattacatttatactaccctccccccttttttttttcttttatantgtaaacaccaaaaaaaaagtatgaggcctccatcttccacacccacagacagaacca

SEQ ID NO: 170301 - DNA, 1076 bp, Cannabis sativa
gggttttaccaacctgtgtcaatcttcaataagcttaagcaaagcttaaacttattgagggacacaaccttagtgcccatgtctgctggattcactttagtaggcactttatttatttcaatctgtccttgtgtaaccttgtccctgataaagtgatactttatctcaatgtgtttagttctgtcatggaacactgggttcctgcataggtagatactgctttgactttctaagtagattataggcaccttttcactagcttaagttcttccattagccctttcaaccagagggcttccttaattgcttctgtaatggctatatattcagattcactagtggataatgccactactagttgtgattgcactttccaactagtacaattacctttggttagaaggaaataagttgatgtagatcttctagtatctttgtcccctacataatctacatctataaacctttcaatattttgatgtgcctggtgtccttggtatatcaaacctatcttagatgtgccctttaggtatttcataagccacttcatggctttccaatgctcttttccagggctagacatgaacctacttagcacactgattacataagcaaggttaggtctaatactgaccattaaatacataatgtaccctactgcacttgagtagggtaaattagccatttcctcttgttttaacttggtcttagggcacatggatttagacatgtggtactggttggtaataggctgtgaaacagcctttgcatccttcatagaaaatttttctatgatcttagtgatgtagtattcttgatgtagcataagtttccctttacctctttcccttagcatgttaattcctgaaatcttagttgccacacctacatccttcatttcaaattctgatttgagcaattccttgaccttgttgacatttgacatttccttggtaattattagcatatcatccacatagagtagcaagtaaatgactttagttatttatgatcgtttaaagtacaaacagtgatcatagtagcttttattgaacccctgtttggtcataaaggtg

SEQ ID NO: 170302 - DNA, 669 bp, Cannabis sativa
gcagaaggtggaaaatctcagttgtagtatttgacatttaccagaaaggatgtggtgatccgcgtgctttcaatctgacgacccaaattaaatcctaggaaacacaaagaagatttaatggttcagaatacaaaagttttgaatttaatgttgtgtgcgggatcgaggccatttaatgatgacagttacctaaaaaatcccactaacataaaccaactgtcatctcgcatctccaggcttcatgtgcttttgcaaggtgcgtattgtgcacgggccaagagattcactacacgtgtaccctactccaggaagatgaaaagatcgcgagcctccgccactcatttctctggaattctaagagtttgcacctattcatagtttcgcatccaacaatgaatccagaagtaggcagcaagccttcgtgagtctcgagccccgaaggcttgggggtaaatgttatttgtatttctagattgatgacgtgtacacttccaaggcccaatatcagcccaagcaggcccaatcaagttaataaattaacccacaagcagagtcaagctacgactctagattgaaatgtattgttgggttttgtgacctaaataaaacccatttcaatataatcagatttgctagttaataaagatcagaaataacatcttatgttgc

SEQ ID NO: 170303 - DNA, 755 bp, Cannabis sativa
ctctctctctctctctcctatagtaatgttggtgcggtaatcttgaaatatgacagtatattttttagccattaatctctccatgtgcatatttttaaacagatataggatttggaagatctattacaaggttctgaaaattatagagggagtcaagccgccgttacagaagacaagatgtcaatccgccaaagtcaaccaaaggtattatttgtttatgctatttcttcttggaacacttgtagtgatttagttattagtcattttttcattgtttgaattttgatccatgcctagatcagattttgaagtaatagatttatgttgatctcatgagttgtaggcttaattaaattagttcaaggccaacaaaaattccatgtgtttacaatatatattgtagttatagtagaaattttgccaattttttaaaaaattcttaataatctatggtttcgaaaacaggttcaaacaactccaaatggggacttttttggcaccccagcatgaaaattgttatgtatgatgaatttaaaaacaagttgttcattctagaaaatcatctttcgtaattacattgagctattaatatttagcaatataaaaattttgatataagtagcattagtgttatcccaaaattgacactctcacatggcatcacgagaatggtgacacgtggactctacttagagcatctggtcagatcaacatgccgagcaggatgcctcgttggcatgtccataatggaatac

SEQ ID NO: 170304 - DNA, 816 bp, Cannabis sativa
tgcaagtttttgtgagggctcgcctaccttgcttttgcccttatccttgcgagaattcgaggtctcaacctctattttcttttgggcatgtttctcgaccaccatttccatcgaggtttcatcgtcaaattttacaaaatctctaaatttactctgtagatgctccatcatcttcttcatttttgcgatgagccttttctgttcagtcaactccgcctgagttgtctctaagtctttggtcaatcgcaacatgtttgggtcatggtcatagtgatatacgtctttgtaatacccatctctacatggccatcgtcttcaccttattcatctctccttcttcaagattttggccatcatcaaggccgtcaaacacgttttcagtatcttcccctcggttctcagcgtgggccatacattcttttctgacgccacttgtttggaggttagaggtgtgggagtgggcctcctctgtgactgtgtcgaacagagttatcttactggtgttctttcgtgtattcaccatagttgaagtgaagcaacaactaactaactttcctcaactctcaatgagagcgccaaaaaatttatcgatatttttagaaatcgattaataagagcttaaggaaatgcaaaatattaaataatagacaaatagattttttacatgggttatgcgttaataatcctttatccacgagtcagtagtattagcctctgtgggcaaatatttgagtattacaagtgtttacaaatggcattctcggtattccttttgtttctctctaagaagaaagctctctaggaattttagcagag

SEQ ID NO: 170305 - DNA, 564 bp, Cannabis sativa
aaggcaagagaaagaataagaccacggctttaaggactcagaaactgcattccgcctcaacatcctcatcatcagacgttcgagagattcctcttcccatcaagattggacttaccgcgttaggccattctgcttcaactagtggggagaagggacctagcacccccagaaagcctctgaggttcttgccgctccaggagagcagtcttcttaaattattccccctacaggagagataatccttgacaccacaccaaacgcggggggttctaattacaacctggacaaacttgtctttcccctaaaggggactccaactaagtctaaacacaagggatcaaagacttcccctagtctcagtgcaaagagagtcaagtcttcggtcccagacccaggggcatctgatgtaccgtccaccaacttgccattgcctcaacaacaacaacaacaactacaacaacaaccaccacaacaacaataataacaccaccaccaccaacaacaacagcaacaactacaacaacaacaatatcaacaaccataacaacagcaacaacaacaaca

SEQ ID NO: 170306 - DNA, 872 bp, Cannabis sativa
gataaatttagttaaataaagaggatattttcccacctgagcagaatagaagtagcatattcaaccgccttgcgttacacatatagtgtgatgatgattacctcacattgctaatattaatgaagggatataaccagatgagttatttttcaacacttaacgtttttcctatttaaatggacatgaaggagaactcatcatgttggatgagatgtaacttttaagtcaacaataaccgtctagaggataaaaatgaggagcggttaggtaattattagatattatcccatgtgtgaataaatgaaatgtggagaatgttcacgtttcattaaccgttgtaaatgaattaatcctaaaagaataactgccaacttatatttctataaataggagcagaatcaatagaaaaatggacgacaaattttagagaaaaatctttattcaaagactaatattgtattctttatctcagaaaatatccataataataaagacaaagtatataaattttaactataaaaccacgtaaaatatttgatgttattaattatatgtttatttctatagtatattgattaaaaaaaaaactattaatttggttaataaaaatctgtactaataataatatactctcctaaaggattgtttcactacatcttatatctttttcggtatcgagaggtacaataaatagtaatttaaatgtttaaaattatattgaaacagttattctaactaattaaagatcctttaccgattattaaaagttttaatttttgttatgatatttcaaagcaaaccaaaatggaatatattatatatttgaccacataattgagatctcaattccatccaagttgaagagaagacca

SEQ ID NO: 170307 - DNA, 830 bp, Cannabis sativa
  modified_base (78)..(81): a, c, t, g, unknown or other
tgaggtagatatggtacgagtgtataaatgtctacataatttttattaaaatgtctacataatttttatttttaaatnnnnataataatattataaaattattaacaaatattttgttaagtaatagtatattctagttaaaattaaagtagatatatgaatattaatagattaatttattaagaaaaatctaaataaacaatcatcacatatattatgtattttatgtatatattacatgtaatatatatatatatatattaatatatattacgtacataaaaaaattatttatttttaatttttaaaaccttattccaatatcacttatattttaaatttccagttagcaatattttttaataaaaatttcaagttagctatatttatctatctatatatctatataaagcggagttataaagaaatcatgtggcaatatggtgataatatcaactttaaatgcagtggtgattatgagtgagatatggtaatgacaattattttaaaattatatgatgagttttcaataaatttatgtttatttattttttttgttttatatctatatttttttgagtattgttcaatttttaatgttttttcaatataatgtacatttgaaaatatttttggtgtgttttattttgtatataaaaaattgtatgatgagtttttttttaaaaaaaaaaattattcttttgagttctacgtatagattcttttactaaatactagcaaaaaattacgtgcaaggcacgtatactaaattttatgttagttttttatatatattattagttattaggttcaacatcattaccctgtgt

SEQ ID NO: 170308 - DNA, 675 bp, Cannabis sativa
tttatttcctagtccaccttccccctaagggtagtcaccttgcttgagctaggggaaaagatgaccgtcagacttctcttccaacagttatgaccaacagtcagtagtcaccttgcttaagctagaggaaaggtgaccatcagagttctcttccaatagtcatgaccattggtcagtagtcaccttgcttaaactaggggaaaatatgaccgtcagatttctcttccaatggtcatgaccttgttatgattaacggtcactccaacagtcataattttacatattcttcatcaatccagcccgatatcttcgtgccacgtgtctttattcttagcacgtcactgtcgttaaaatttaggtaaacaagatgcaaaagaactctcccattattaagtacaccttaaatttttaaatacatttttattcttttttgaaatgactgaaatagaaaatttaaaattattttactttttagaattagttatttttaataaatacaattaactttaggtagttaaaattaggtattttcaaacctaaaaaagagaaatttttatcaatggaacaaaatagaaacgaaaattttaccatcattttcatattttatgtgtagaagagtgtgtacatgaatttatatatattaggttgatattacgtacaatgcatgtataatta

SEQ ID NO: 170309 - DNA, 842 bp, Cannabis sativa
aaaaaaaaaaaacataaaaaatttacactatcaaggaaataatcgagaaactattgaaaaattgtcgataagagtcttctccaaccttagtacgcttaccattgataaaatatcgacaaaccatcaatataacgtaaaaatttctagatctcaccggaaaaaccaaatcatgccatttaaaaaaaacaacatattcttcaaaatgtttataaaatattgtgtaaaatacttaaccattattgtgagcgtaacggatttcgtacggtcattgtgcgtggttcatagttttagtggaatctccaccagtcgtcgtggtcgttaatggatttttaaaaaaaaaaatagaaagagagagtagaaagatgagtaagttagagggagttggttttcttaagatacaattattaatatgagaagggtaaaaagggaaagcaagttgaaataggtattatttagtatagattaattgagaaatttaattttttatgcatatagtactctaaaattgatcccccaaacctatatgtattaatatttgctaaataggtaaacatttatcttttttctcaaaataccctccccattttcaaacagccactatctctctaccacccacgagattgcgactgatgaccgcatgactaacgacccaaccaccaccaattttccatccgaggatttacgcaacccaaccaccaccaccacccccgacccacgacccaaacaacacccttctccgccactcacgatgactgcgactaacgaccaccgtgactgacagaccaaagacccctttctccacgaccaccatgacccacggacccaatgtcaaaggttagtgt

SEQ ID NO: 170310 - DNA, 695 bp, Cannabis sativa
ttttcttttaataaattcaaagcgaagtttttgttaatgaaacttagagaaaaattggaattttaataccattagatataaaaaaatatagttcgtgctaatttttaaagggtaggcccgacacaacttgtaagcacggaattttcatgccgtattcggattcgtgctatacttattttcatatattttttttttacaattatgaaaatatatgcatattttataactttagttatatttatataacttaaaaaaattattagcatcattagaacttaaatatttatttataaatactcaaatttttatcacatcctataaataaattaatgtataactttaattttttatattttaattatattattattatattgaatattatatttaagttttattattattttaatttatttataattgataaatttatatcttattattattattattattaattttaataataataataaattataaggttttttaatatttgtatttttcgggcttatcatgtgtcgtgcctttcaggttagtctattcgtgtttctcaggaccggcccaagtattttgggggtcttgtgcaaaattttaaaattgggttctttaaaaaaaatcgtgtacattaaaactacaattctattactagtttttttttaagattcgttcataaattttcaattataaatttt

SEQ ID NO: 170311 - DNA, 508 bp, Cannabis sativa
gagacaaagccagcaacaataaaagggattctcaaggaaacaaatcccttccttccaaaagacatatacttttttgcactcattgcagcatactcggtcacaccattgagaagtgctacaaaattcatagctacccaccaggttacaacaaaaacaacaattccaaagatgcaacaaccaatcaagttcagacaagtaatgacactaataaatttatttgtaacgtcccaacaataagaacgccatgaatagtgactaaacatatgctgacgccgctaaactgggattaatacagctaagaacaaaaatttaaactttaaaacaaatataacttgtaattatttaactttacaaacattcaaaatgtcacaatttgtttcgggatcccgtaaaaacttttcaaaatattacaggttatcattacatgtcgacctaagcagaaaaagctgagattacaaaatatttcttctagtagattcaaccctcatggtctagtatggcctgaaca

SEQ ID NO: 170312 - DNA, 833 bp, Cannabis sativa
ttaatttaataattattaaattattaaatttatattacacaattaaattttaataacaattcttttaaatattacatagctaaatgaaaatgcattaggataagtgaacaaataaattatacataaattttttaggtaatatttgttttgatttaatatccgtaatgagagtggattatagtagtattaccacaccgattcctattagaattttacagttatacgtgcttaggtaaaaatagtaatatgataggtaactttttaggaaatcctcatattgcacctttaaaattttatgcacaaaaaatgtacctaatgaaaatagtaatataatagtaatataagtggtaatataaaggaataagaaatataatgagaataatattacgacatttgatttaattctcttgtgaacattgtaatcaaataaagtatttgatatattgataaaaagatttttaatatttaaaatttaaataaaaataaaaaagaaaggtaaaagaggtattttctaacaatgcaatcatcttttcattggttttataagaacatttcgaaagtgttggaaaaaagcctttatatagtaaaaaaaagataaaaaacttaatttttcatagtttaaaataggcgggccgcgacaagctcacactttagctaaagtcgctcttacaacgtcttctagcactgtttggtggctgagttatccaaattgtatttaaaacttattagagcatctccaatggatatgtaaataaatgatgcaactacaatatatagctcactttgttaaaagtctactctaatggtgtgctaaattatgatgcaaaaatttc

SEQ ID NO: 170313 - DNA, 782 bp, Cannabis sativa
attctccattcttgatcaacgtgattttttttggagacaatggtcgaagcaactttggcttactgcgggtgatcaaaatagtaattttttttcatgccaacgccattgcttgtaagcgtaaaaaccatattcataaacttaaagatcatcgaggtaagtagatagattgggataatggtttgtctgatcttataatagtttattttaagagctttttagcacttctcattctgattggtctgaagtgatcagttgcattccttgttctatcacacatgaggacaatatggaacttcttaaacctgtgacggaggacgaggtgaaaaaggcagtatttcagatgcatctggataagtcccttgggccggatggtatgacccctgtgttttttttttcagaaaagttgggcggttgttggtggggatgtggtaactttggttcaacattttgttacggatgaggtgttacaagatgggctgaatagaaccaacattgtgctaattccaaaaaagaagagtccagttttacttggtgatttgcgtcctatatctctttgtaatgttttgatgaaaattgttacaaaagtattggccaataggatgaaagtttttttgaaaacggtggtggcggatactcaaagtgcttttgtgacaggacgtcttatttctgacaacattatggcctcttatgaagttatgcattacttgaaaagaagaggcgaggcaacaatggctatatggctcttaagctcaacatgagcaaggcatatgatagaattgagt

SEQ ID NO: 170314 - DNA, 696 bp, Cannabis sativa
tagctacatttatttatttatttagtagtttatattcacataaatatttttataggtggtgtaaagaatggggacttagtgaaatgggattcggtagagagaaaagtacatattgttatttcgcagtagcttcagtttgttgctctttggactataattctccaattcgaatgatgattgcaaagagtgcaattttaattacaataacagatgatttttttgatatgaaaggctctataatcactgagttaaacacctttactaaggcagttcaaaggtatattattattattattatttaattattattagatatttaattttataataatataataatataatttctaattaatgtggctaggtgggatggtgaagggttgtgtggtgttagtaagaaaatatttgatgccctagataatcatgtaaaggaaatggcaatcactatgtaccttgatcaacaagaaaaaaatcatgatgacataaccaattggctaaaagaaattgtaagttatatttcaattaaataaatattgtatttattaatttatattttatgttcaataatgtacgtgtgcagtggtatgaaacaatttgttcatggcttactgaatctgagtggagtaaaagtgggattgtaccaaccatggatgaatatcttaaagttggaatgacttccatagcaactcacacctt

SEQ ID NO: 170315 - DNA, 507 bp, Cannabis sativa
tttcgttgaagatgcttttaagttctttaatactattaaatacgagcattactattaagtaccagtgttatttagtactttttcaacatgtcgagttacaattagctagcgatattcacgaaaaactattatattaaattatatgagacctgatatttagttggaccaatagcgatattgacacataggagagtactaggcaccactagtgccctttagcatttctctataattacttaataattttttacatcattcattaaaagaatattatgggccaccgatgtccctagcataactataaagtgacattctatgattgattaacggttttctataattattattaaagtaaaataaatatgatatgatatcaaattatactcaataacgatattaagtattagatactataggtgccctttaatatttctctttattatattaaagagtatttttattgggcactagtggtacccaacatcttctacaggtgacgcttcacga

SEQ ID NO: 170316 - DNA, 515 bp, Cannabis sativa
gagccctacgcaaagtctctttgtgcttgccattagtatgaggtgagtaggagacccacacaactctcacttccccaattaaccaccgatcactacctgtatggaagaaataaggggaggtgagcaacctgacaaagctacaaatatattcaagtcaacacaactttcaacgacatcttccagaaaaaacaaagggtacaaggttgaccaacgaccaagcataatcttaggtacaattaccaggacacacagtaagtcctaaattgcacaattaactataatggactcattatctagccttatacagagtttccaatagaaaccacacattatgccatagttgtatatgcctccaaggccgccataagactctaaccgtggtccaaagagggaaaagaactggctgcccgcttggagccttggccatggccgaccagtgttccatgtcctagaggtcgaacagaccccaagacccagcttagaggccggccaggaaccctagttctaggcatagg

SEQ ID NO: 170317 - DNA, 559 bp, Cannabis sativa
catcatacacttacccttgccacaatcgggtaaagcatgcagcaaagaacactcaccaaccgcacctcggttagctatttcatcacccaatggctcaatcgtcacatccgtttcactcgttggcaccaacttccccaaatcaataccattcatatgggccacacccgactgtgtgccatccgtcggagacggtacaccaggagccacagaaacattttgaccggtcgcatgcccagccttcacctctttatcacgctcacggccctctaacacagacgtgggagccaactcctcctgtgtaggacctgaataacgaacccgacctctctccacaacaaataaaattctcgaggccgctcccatagacatgatcagcctattagacggagaattatcacgctttttctgataccaaaatcgatcatgcggtggcgaactcggagcacacatccaagatccatacctcccacgatcgggcctgggattatccccaacaaagtccctcaaaggacagtccaaggccttatgcccaattataccacaatcaaaacaaaagtca

SEQ ID NO: 170318 - DNA, 1671 bp, Cannabis sativa
cagtatcgagaatatttaacatcactaatagtttagagaatcttttttttttttaatcaggaaaaaaaaataattactaatttatttttaataatttaaattgtacaagctgtaaaattaatcatgaatttcaatcataaaatatataaatttcactataaaatataaattattttaatatacgtaattttcaattattattaaaactgcgtgaagcgcggtaccattccctaatttggtatataatatgtgcagccgcaccatcttgatacattaaatctgaaaaatagttaaaaaaattattttaaaaaataacaaaaattaaataattgagaatacaaagaaaaaaaaaaaagagtagttcatataatttatctatggtataataatattttatacaaaaatgatgtaaagagtttatataaatacaaatataatagaagtctacttaagactacactttttttaaaaaaaaaaaaaataagctaaaaaaactatcattgtatacaaatataagtttaaaagtcaataatttatggtgaaataattgtgtaaagaaactatcaatattaagaataattcctaacaattatatttatattaagagtatggtgtaattattgaaatattaaaattattaggtattattataagaaagtgaatagttaacatattattaaatattctaaaataaatgggtaacaaattattaaatgctacattattatagttggagttttattttaaaaattacattattactaaataataaaaaaaattaaataatagaaaaaatttaagaaaacaaaagaaaataagaagaagtttatatagttcctcacaataataagatgttagaaaaataaagtactatcatacatctttatatatattatcattattttttcactcctgagagtattcgttttcttttaacaatccttttagagagaaattatgattgttttaattaattcttttacaactaaggtgaatatcgtgatcacaaaatcaataaaaaagtgttaaaattttttttaactataaatataaaattcttagtatttatttacacaaattatattttaaataaataataatatataataaaataatattttaaatgttttcgttgacgtttcctccattctttaggtattatcatcattattttacattatttataccattgagagtgggataatattctctaaatattaatgaatcatgccaatatatggtgagaaaaaaagtatgtagtaagaccatggtgtacatagatattatgaaagaagaaaaatgggaaatatctaatattacactactatatagatacatacataacacaaataaaaataaatttattttaattagtatgtttaattgataatacatctattctgtataaaatgtggctatataacagaattctttgtttatgagaaattattggatgactttatttaataaaattaaaataaaccaagacccataaaatccttcctaaaaaaactctaacgaccagtccaccctaaactctctttatggaaaccaactccaccaatatttattgaaatccttctagattttatcgtccaaacaagtatcttatcggccgaggtcaaattcatggccgagtccgtcccgcctcatgatcaatacatcgacgga

SEQ ID NO: 170319 - DNA, 864 bp, Cannabis sativa
  modified_base (693)..(695): a, c, t, g, unknown or other
atcaaaattgaagagcactgccatgtccatatggcagtggtcagctagggttagtcataagggggaaatggtttctctcacttgtatgcactccttggtgttgaggaagcacatttgaataattttcccttcatggtttgtaaggagcgaccattgccatttccttgtggcagtgcccatcaaaattgaagagcactgccatttctttgtgatcgtgcccatcaaaattgatgagcactgccattttcaaatggcagtgggtgcgtatgccttttttcttgatggtttgatgccatattgactttatccacaaacctaagccattttcatgcccaaataagccaagtccttgttggtttccttggtggattgaggtttctagggtaaaaacgcttgcgcgggcccatgaaccctagtttgggcacacttgggtgtgtgagtcccggcacaaaatggttggttaatattttcgagtcctctagaaatgtcatagggccctcaagaaggatgtcttaactcatttcacatttaggtcttggtcaaaatcacaaggttgacttttttaatttttcaaaaatcgaatataaaagtatttatttttaaatacatagaatttttaactaattaaatatatttatagaaattaaatttgagttaaagattaatacataattaattttagaccaacttaannnaagtaattttcataatatttatttgaaagatatatactaagatgaaaaataaattttaatttatttttagttttgttgacgcggtttttcgtcaacagatctaagaagatcgtaaaacgagcaagatgaacacaagcaatagttaatcaaagtaaaccggtttgcaaaa

SEQ ID NO: 170320 - DNA, 847 bp, Cannabis sativa
ttttgtttttttttttaaattttaatgtaattagaatttttgcttctaatttccacataataccaaatcataccccttacaagtcattgaaaattgagattgttgaatttcaacatttttattcaattttaataaaaaaaaatctaacattaatagcaaaaaaaaatttaagaaacatgatttgatacatgtgatcaaaaattctaattaaccaaaataaaaagaataataaaataaattatatattttttaaaatgatacaaataaatcctaaacttatttattgtgaaaataaaatttaataataatttaatattatgacaaaattagttacattttttaaatctgttcgtgttgaaaattatcatcaacatgaattgagttcagatttatattttattattttaaaaaatacaaagtctaatttatctttttacaaaataaataattcaattgataatttcaacaaaatacaaaatctaaaatgatatttactaaaataaaaaaaataaataaaaaattattgagtacttttccaatgcacatcttaacacgatgcactgattcattcttatctatttcgacatttaaaaaataatagtctaatttttttcatagttagtcatgtatgttaaagtagtttacaaatacaccttaaaattttccaaaatcattttagctacaacaaagtttattatacttatggtctttttttccttttaaaaaacaccaagttcattaaccaactagtaagaaggatagatgggattgggaatcacagaggtaatttagagcatgtttggtattgttttctgttttttgttttaaaaaattgtttttagaaatg

SEQ ID NO: 170321 - DNA, 599 bp, Cannabis sativa
gaatttgttatttcaattggagccgaaatagatgagtatacaattatgttcaaaagaatatataattggaggtttgtgtggtttttgttctattagttattcttatttgttgattccctatgaaaattcaaattcattttccaccacttactcttaataaaaggacaatcaaacctcctccacaaaaataaaaatttcatttcatccatttactcttctttcattttgattactgcacttgagttgagtttcagccatttttctttcttttttaattccattttctttctgttaaaagaaaaaaaaaatctagtgtagtagtgtttgcttctgcaatttctaatctctaatctctatctatctataatataccaaaggtacctacttttattatctcttattcatttatttttgtctctatttctagtttacatatatgctgttatttatttttaacaagagaatatttgtttaataatttgcaattttgttacctcttgcttgcagatatatccatcattttcaaacaaaaaaaaaaaaaaagaattcagattaaaataataataaaaaaagaatttgtcaaatatagtacaattttt

SEQ ID NO: 170322 - DNA, 762 bp, Cannabis sativa
tttggttcaaattaaaaatagtttatgtactaggaaaaataaactgtatattataaattatagtgacgaatttaaatgtcacaaaaatatatgtttaataatttttatttttttttaaaaaaatgttataaaacctatttctggtgatattttaaaaatttttattaaattcaaatggtagaaattgtaagacatttaaaatatgatttgtgtacatcttcttagcaaatgtcacttatttgcaattttggactgaaaaagttaattattgggcccttatttctttggatatgtggtaattttaaaaattaccaaaaacattaatatgtttcttgggtgggccctaattcaaaattcataaagaaaggattaaactaaattgaataaaggctgaatatttaggtcatgttgtgcaaaattagcccacataatttatctcaattatcacaaaatttatcttagatgataattcaaaattccattaaattgtacattttgaaaatgttaatgatatatttagttacatttggtctcatttttataaatttttagaccaaatacacgtaaaaaagtgtaaccatatcacaattttggtaaagtaaggaagaaaaggaaaatgaaaacttacacacaaaaacaaattctcacataatacacactcactatagaattccaaggaaaatgaaaacttacagaaaaataaatttttttatgctttatttttaaaataattaatttttattttttaaaatatttatttac

SEQ ID NO: 170323 - DNA, 694 bp, Cannabis sativa
acctgataagccttatatttgatgagttcttttaatctgtcgacaatgtaaagatacccttcagaatcaaacatacaaagatcaccagtcttaagccatccttctgagtctaaagtctcagctgttgccttttcattaccaacataacctacatcaatgccaagttattgtttaaaatttctatatctaatttgataacaaaagctacattatgatatataatacgttacctttcataatgaagggacctctaatccaaagctcgcctctttgattaggaggcaatgggttagaagtatgaggatcaacaatcatggcttccatgttctctgctaaacgacccaccgaagcatacctctttgtctcttcatcacctatcattctcgtcactgaccctgcactctccgtcaaaccatacccctgtcataatattaccaaattatcattcaattattccaccaccaattttcagagataattttttacaatagtgttaattatcatttataatagtttagaaaattgataatatatatctatatactccagttaaaatttatgggttaatcctatattttattttcatcaattatatttaaagttagttatattaaaaaaaaattgtttaattatttttcattttagtgatattaaatgagactattttcggcctgctctcatcttcttctcagca

SEQ ID NO: 170324 - DNA, 604 bp, Cannabis sativa
caataagattctaatatattagaacattgctatgaggtactcatagtgtctaacactacgataaagtgttgttttataataattagttgatgattttatataatatttattaaagtaaacaaattacaacacccgatattgagttgtaccactagcgatagtacagttcgcaagggtgctaggcaagacaccatgggtgccctttagcatttcatccaattcaatctgcacaattttgctcatagtgtatcgatccgatccgcactaataaggtagtgtttggttgggaagaatgggaatgagaatgagaattataatgtaatagaataaaatttaaaatgcataaaaaaattgatcaaaaaaatattattaaatttttttcaaattttacattggaatggtctttccttctattttaaaatagaatagtcattctaccaaaatagtggaaaggacatcctattagaatgatattccaatattttaaaatgcaaccaaacaaaagaatagaatgaaaattatttcatttctatttccattccatttcattaattacctccaaccaaacgccacctaagtgcgaatttcatattttagatcaaat

SEQ ID NO: 170325 - DNA, 575 bp, Cannabis sativa
tattaggttccattggggtggaagtggatttggcaccaatataacctgtatcatttaaaagttgtaaaataaatagtatttgagagaccgaaataccattggtggatcccccaacttctagcccaagaaagaacctcaaaggaccaagatctttgagtttaaatttggaatcaagctatctttcaaacaactcagcttcactacagttattgataacgattaaaatgtcattcacataaactaaaatagcaagaaaagtgttgttagaagatctaataaaaagagagtgatccgaagaggattgtttgaacccttcacttattaaagtggagctaagtttggcataccattatcgataggcttgtttgagaccatagatactcttatgtaatttacatacatcattaggaggaaggtctccttagtgtttgtaatcggggggaagcgccatatagactttgtcatttagatcaccacggaggaaagcattgttattgtccatttgatataatttccaattattagtggcagcaagagcaaggaggacttttagagtattaaactttgctacggga

SEQ ID NO: 170326 - DNA, 580 bp, Cannabis sativa
ctttagctagatcgattatcaatggctgggagatactaacatcacgcccttattgaaggtatgaggatatgccacgaactattttattacttggaaaatccagcaagttcctcatcgccactttcaaaaagtgccaagctttaaacgttccatccccaccctccagatgcaggatagagctaatcatattttgtccctcctgattgataggaggaatatattgaggccagcctgtatagctaacttccggagatatggtctatatcccccaaagtatagcgttgtgggggttgagggcccatcaagaggtccagacggatccccagcagctgaagaggcttgcctaagaggtggacgtactcttgacatggatgacgatatccccctctctagaattgcaaagaacttggagagaagagaaaaggccttctaccaacacttgcctcacggaggcactgttggtgatgccactttttttattaagcctggaggccatggttctgctaggtctgctcaccccttgcctacatttagaggtaagggcaaggcggctgctagtagttcagatgactcctcttcc

SEQ ID NO: 170327 - DNA, 1360 bp, Cannabis sativa
  modified_base (134)..(150): a, c, t, g, unknown or other
  modified_base (1309)..(1320): a, c, t, g, unknown or other
aaaaaaaaaaaaaaaaaccacgaataagttgaatattgaaaaatttatatctatttgttcaccaattgatattgtttttactgtaaaactacacaatatctacagaaaaaataattgttattttcatgttattnnnnnnnnnnnnnnnnnttatttttgcaacatcttatttcaacatgaaaataatatcaaattgttttcatcttgttgtaaagtttgtcatgaattttttatacactacattggttattcaacatttaaaacaatagagtattacgtgttaaaataaaaacttattttatctcttactttcagacatagaaaataaaaagtgaacatacattatgttgatttttaatcaagtgggggcattgatagaaagagattgtaaatatgaataaaaatgacttatatttagtaataataatgtttgctattttacagttgttttaaagttgtaaacacattgtttaattttgttactttttaaacatgttgattttgttggaatataatttaccaggatctagatttactaactagtatgttcattaacaccctaaaaataaattctctaaaataatggaattaaacacatataaaattgagaaaccttaacttgatggcagcaaaataatatgtctcctcccactcagatctctaaatcttattcctttctgttacagagtataatcaagatatcagctcgattctccttcaagtgttgaattcttcatagtcttacatactatgattgagtacttgacttgctatgggtgagcatgtactctttcactataggctcaaaatttatgaagagggagagagaggatttcgaagtagaaaaggaatggaagctcttaaaaactctagttgtttgacagaataaaaactaggttattaaggtttggatgagaataagagcaccgtattccttttatactatttcacttagggttaggatttaaattatatggaataaaaaatgataaaataattgcaaaaattaagccatagtagtcggccatatagatgggccccactaggtataactttgccattttttaactatttatcttttatttcactactgtcatattttccaattttaatcctataaatgtcaaaactatttgtttaatagttataattaattatcaaataaaattttcctttatcttatttattaattagactttacaaagtctcttgattaataaataattcctaaaacctcatttcttcaaaattaagccattgtttagtgaacatttataaataagacaaagtctaattttagaattataannnnnnnnnnnnaaccaattaactgagtcttacaagtagtattatctcaact

SEQ ID NO: 170328 - DNA, 583 bp, Cannabis sativa
attatgtacaaattagattacaccaacaaatcatttacgtgcgtactaatgaaaggtaagatatgctgattaaagatgttatttccaaattaaatttataagtgcattgctagtggtgactagagtagtagtatattttatataagattcaaaactgtactaataaatcatatacctactaataataataggtaagatagtgattaaaaatcacattttgaaattaaatttataagagcattgttataagacattaatggtacctaatacaatgtagaagtgatatttcataaaatcttaatatattaaattatacgatatcacacattattaaaaggtgctaggcaccattaattatatcttttaacattttttaatttataaatatggtaaaattatattgtataataaattaatatataattgtcttacttagatgtaaggtctctaacattaactagtaattaattagtatataataataaggagcattaaatacttaagtttaactctcagttgtaaataaatacttcagtttaatttttggcggtaataatagagtatatttgaactaattttttta

SEQ ID NO: 170329 - DNA, 515 bp, Cannabis sativa
aaaataatttccaacaagaacccccttgtatgcatggaaacaactctcaaagagtggagagagaagagaggatagagagaaaaagaaaaaagttgaaaatcactataattcaagagagcatagagtgatgattttgcagctaatatttacataaggagtagttgtacggggtatgtttttacagttctaggagggcatctcgtttggaaatccaacttacagccatagccgaacccccctctctctcttatctccatattttttcaatttgttaagttttgaaaaattgatcttgaagcttggattcatggtgggtttttgagcttagcttggtgttgtgattgaggtagttcttaacccctttttcatgttgaatttgtagctgaaatagaagtttaaatttgtgttttgagttttgaaattcttgaattgcatgtttgtggaaattgggttgattttgatgttatgaacttgtggtgtcttaaactcttgatctttgctttgggtaagctttg

SEQ ID NO: 170330 - DNA, 539 bp, Cannabis sativa
gaaatgacccgagctaatattgagtttgttatggggcagctagctaacattacccttcaatctactcttctagaataagttaaagaagcacaattccaagatccggacttaatgaaatcctgagatagggtttcggttgggaagactagtaactttacagttaataatactgggatgttacggtttatgaaccgtgtctatgtgcctatgaatgatgatattaagaaggaaattttgaatgagtctcacacgactccttattctgttcatctggggacaacaaagatgtatcaagatcttaagaccatgtttaggtggcctggaatgaagaacgatatagcaaagtacgttgccaactgtttaacctgttagcaagtgaaagctgaacaccaaaggtctgcaggtttactgcagtcgctaaccttctagaatggaaatgggaagacatcgccatggacttcgtggttggattgcctaagactacatgacagtacaactttatgtgtgtcatagttgacaggtttacaaagtcagcgcac

SEQ ID NO: 170331 - DNA, 595 bp, Cannabis sativa
caatttcagtgcaaatatctttcccttaatcgaggttgtatttaatagtaggatattttacttactctttttatatatatatagcggtaatttatggtataataaatagttaagtttaacttttaacagtaacaatacttaaattatatttctagaatttaaactaattatttttaaaaaaaaagtttaaactaattctcttattagtatatttaaactatttttttaaaaaaaaataaaaatttaatgagtcgaactaattaataattattacgtgtggcaatttatttaacacaacagttagttacttacaaaagttactgctaaaaattgaacttaagtatttatttacaactgagaatttttatactgctaattactcatatatatatatatatctatttctattcaaagagcactcacaatattttttttaaaatagaaaagctttaaaaaatttaaagaactgtaataaaaatatgctacaacagatacttaaaactctttttttcatttgtaagtttctttaaaatacactattcatgctctatatttagagagtagtatttattgttctaaatatattttattaatt

SEQ ID NO: 170332 - DNA, 581 bp, Cannabis sativa
tggtggccactcgaactaaaaccatcgtgcgacgagaggtaatgttctctctcaggatctctttttatctctctcattctttcgagatctctctcataaatttgatgttttcctatttcttttgcaggacctgatgtcaacggcgggagctccatggtgtttgcacaattttttcgtttgttttttgatttattatattgtaaaaactatttataatttctatctttacggttttttatgtgtggagggatttgaatggagctagatttgatttttttaactatttagtatgtgtcggtacaaaactgaaggtaatatagttaaaaatttgatttttcttctatttatgtcgattccaaaatgacgtgattttttaataccgacagataaaaaatgacgcaaaataatatttatttgtgtgaacgacatatgcgtcgattataaaccgaacgaaaaagtttaaatgtcagttagaaacagacgaaaaaagacatatatgtagtagtgaaaaaaattattaattttttatgtggcaaaagacaactgttaacgcagattttcgttaaccaaattcgagcctc

SEQ ID NO: 170333 - DNA, 1395 bp, Cannabis sativa
tgatacttcaaactggaagcgaatggaactttgtagctagtgaccttggggtgaaattaggatgatctttaactctgggttcatttttattcgatgcaccatatatgaaaatcttccaaacatgcaatttcagatatatctcattcgactcctgattgatcctaccacattccatattgaaatcggccaatgcttggccctttatgaatattttgttaaggtttatatcttgaaaagcctgtaaatgtatttttgcactactacaaaaatctcgttttaagttcatcaaatttagactagataaatttttcgagtccattttgtgttggaaacgatagcttgggacataaaagaggtatttttctagtccaaaaatattttagtccaacaatgttggactagaaaaacattttttagtccaacattgttggacttaaaaagcagtctcacaacgtgaaacttaattgctgcactagaaaattatttctagtccaacaatattgaacttgcaaaatagtcccacgcttggaatccctttctagtccaactaagttggacttggaacttgatttttttttttttctaaattaaatgttgtaaaattaatttcattttcatatttatattaaattataaataattatttataatatataatttatttttttaagaaaaatttatttataattaatttaactcaattaataaacataagaagaatacaaattttaaactatcatagataaattaaagtttacaatatttgttaaacatatatgtatactaaattaaagttacgtacaatgtacatgtatttagttatattttaattaactttaattattatactatacattattattatttattataatttaattaaataaataatctcgttttaaagtaattatttaacataaagtaaaaaacataatgatatattggaaaaaaacaatgtgtaaaattttaaaactaaactcttatttcttgtttataatttaagataattatagactgatctttgcctcacgaattaaataataaggtattaatgtattaattttgataaataaatcaacaaccactaagagcatcaatcatagagatgcaaataagtggtaaaaaattaaattgtaatttatttaacaaaaagtatgctctaatgatgtgctaaaaagtaatgtaaatttaacacataaaactatcttccattgataataaagttattagtttttattttttttttaataaaaacattcattagataataaattttatatttttataattgtgcatctatatatatttataaaggagaaatatgaagcggtgatgtggcactctacaatctttccaaatctatttttctcctctttccttaattctctcattttt

SEQ ID NO: 170334 - DNA, 885 bp, Cannabis sativa
agaaacttcaagatcatcatcacatggagtatattatgtctttcttgatggggctttcggattcttactctcaagttcgaggaagcatattgcttatggatcctttacccgaagtaaacagggtgtttcatctagtgacccaggaggaaaatcaaagaggcactacaccgaattctaacaacaacaattctgccatggcatttgcctttcaaggtgataaaaagggaaaccagagagatgacaatcagtccaacaaatctcatcctcccaaaagaaaccgacccttttgcactcactgcaatattctaggacatacgatcgaaaaatgttacaaaatccacggttaccctcctggattcaacagacaaaacaagaacaaggaagcctcagcaaatcaagttcaaactcaggaagaaaacaataccactgccactgaaaatcatgccattctccctcagctgtcaacagctcaataccagcagttgctaaacttactcgcaggacaacagaatggtacgaataatgataaccccagtacttctacgggaaacacaggtatcatactatcccatagttctagttctcctctgcataattcttggattgtggatacgggagctactagacatgtttgttcgaacatgaaactatttcaatatatatgtaagataccttctatcaaactaattcttcctaatcatgattgtttaatagtgaatcaaagtgcatctgttaaattggacagtgaaattgtcttgactgatgtgttatacgctcccactttcaaatacaatattatatcaattagggctgaacattttgaacgggtttgacccgaacccgagcaacccgcccgaacccgaactagtgaacccgcaaaaaaaa

SEQ ID NO: 170335 - DNA, 529 bp, Cannabis sativa
gctgctgtgaaggacctgggacagtagatgtggctgctgtagcaacagatttgtgttgagccgccggaaattctgcaaaaaaactgatgcaaacacagccaagtcactcgcacgtcttgcattcttaccatgaaccactttgttcctctcactccagattgcccacattatacaaaataattgttccatttcagctttgttgtaaattgaggaaagatacatcaagtaattcccatttttcattgaaatagccgctgaccaattaaaactgaaattgaaagatcgccaaacaaccttagcatatttgcaaccgaaaagggcatgtcctgtggattcccatgcttgtttgcaaatggagcaagtggaatcagtggtgattttccttcgaacgagcgatgtagcaataggtaaaacatcatgaatgacacgccaagtgtcacgggctcaccatttcaggcagcggaacacccgtgcggcaccttgacttctctaagccaaggtcagccttccaaccatccgagtaacaatg

SEQ ID NO: 170336 - DNA, 794 bp, Cannabis sativa
ctaaccagaacatgtatatttatctatgctttaacttatgcttcatctttaacatgttaatatttactcaagatggaacacttgtatcaaataaacacatataaatacatacatataatacaataacaaaacatttgtgacaatatagattccaatataagttacatgaaattagagaagaaagagggaatacttatgaaaaattatagtaaatgaaccaaaaatataagattgtatagctaaatgtcattattttaaaatttgtagagaaatgactcatttatagtatttattatctaaattgtcttttgtcatataaaattttcatagttcttacatttttatgttcaatttatattttttctttttctttttccattattttataatttagaagcatatcacttatatatcatggtatatttatttaattttgttgaagctactattatttttaagttatgtcatttttttttttaatttatatgagttattgtgggttgttagtatatatattttgattgtacaatatattttttttttgtactataatatattattattcttaaatgatattaactttttattttgttatgtattgttgacctcacaaagtgatcaaccgacagcgaggttgtatgttttgatgctcgccacatgtcaaataaacaaaaatgaaaacttaaagaaccgttggaaaaatctattgcaattaatcacaatattttccctctttgtatgtcaaaaatagaatacttatcaaacaccacaataaacaatcaaatatcaaccaa

SEQ ID NO: 170337 - DNA, 1077 bp, Cannabis sativa
ggatcggctacgggccagctttctagtgtatgaatcgccctcatcacacctagggggaaacacctacacggaccaatcaaatttgggttcaaagcctccaacaatgaagcagaatatgaaacattcatagttgagctaaagctggctcaggaggtatccacagaatacatttaggtctgtaatgattcacaattggtagtaaatcatgctttaggggagtacatggatcgtggagaaaagatgatggcctatctaagaaagatacaaggcctgcttgcacaatttaagggttaaaccctcaggaaaattccaagagtagagaatacaactgctgatgccttggcacgactcgcgagcagcacagtgacaaataacgccaacttagtctaaatcatattcttagaagagcctagcataaactgtgcagaagaaatcaaaatgatagacacaacaccaaattggaggacacccatagcagcttacctcaataacggagaacttccaaatgaccgaaacaaagctcgaaaaatgatgagaaaagttgcacggtatatcatagttgaaggtgtaatgtataaaagaggtttctcgatgccattacttagatgtctaacaaaataagaggctgcacagctcctgtccgaggtacatgatggattctgtggcaatcatgcagcgggatagagcctatcaaagaaaatactaaggtaaggatatttttagccaaccatgatggaagattaaaaggcctatgtaaagaaatgtgataaatgccagaaattttcaaagatcccccatccactgcccaatgagctaatacagatgcaaagtccttggtctttttctacatcgggaataaacctgatcgaacagttgcccaaaggtaagggcggggtacaatatgcagttgtcgtagtagattatttcacaaagtggacagaagctgagccattagcaacgatcacatctaaaaaagtgttggaattcgtggtgaaaaacatcatatgtcaatttggacttccgtacaagattgtttcggacaatggcaaacagttttgatagccagatgtttacaga

SEQ ID NO: 170338 - DNA, 787 bp, Cannabis sativa
agggcataaaacccaacagctgaggccccgtaagaaccgtaaaactagagaagaaccagacagagttcttatgaaaccacgtactgggctcaggcaaggcggagttcttggcaagtatcaagccaaaaggtagagttccttgcaggttccaagccatagacaaaactctgggcaaccttacccaagggtacttgccaaacaatgtacaattgccaaacaatgtcattgtacaaggttagttattagcgaagtgcaagtcttaggtgtaacaacttgagcaaatgttgagtcttaagttgagtattcgactataatagactcaccattaagtttcatatagagtttctaagggaaccacgtaagagactaaggttgtatatgcatacaaggcatgacaagattcttgtcgaagacgaaagaggatagaaaactggccctcacttggaaccaaggcctaggccagccaggtttcccaagccttgagaggggagcccagagtcccatgactcagtcaagaactggccagggtcactaaactcaggcatgaaccggctagtttcctagggtgaaaacctaaagctggccaactctcatgattaaatcctaggttcggctaggtctcaagtaagacctcctagggccagtcagggttagtgaattgaaatgtgtgttttttttcaaactcgaatatgtgcctcgtgttctttatgactcaaagagtcaagaatcacaaagaaggccaaaattgaatcttttccatcaggaaatcacacattgtacattctaa

SEQ ID NO: 170339 - DNA, 618 bp, Cannabis sativa
  modified_base (577)..(580): a, c, t, g, unknown or other
tttgggtccaagtctgatatctgggtccaagtctgagtgcggttcagggtctaggtctgaggtctggctccgagttcggggtcagggtttgagtttgggttcgggcccgagtctaggttcgggctagggtctgagtttgggttcgggcgggggtccgaggttaaggttcgggtctgggtccggagtccaatcctgagtaagatgggttcatgtaacgatatggtgtagaatattaattttttttagtaaaaaaaaattctaaaaatagtttgaaagaatgtgagtcaaacaccaataacaaaaaactgttttctattctcaattttaaaaattgaaaactaaaaacacaactaaacaacctcttagtttcttacataatgtagtctatatactatgtgagaccaattctagcttgctactaggaagaaccaagaggcttctttagaagtagtttgtatattatgagtaatgattataataataaactagagttgagtagatattagtaaaaatatatatggaacattttttaatgggtattatctatgaatgattactaaacaaatttaactataannnntaattttaaaaatattaaactatcgaattttgatctaa

SEQ ID NO: 170340 - DNA, 648 bp, Cannabis sativa
aatcaattcatttgtaaattcgtgcagctacattatggtatacatatacaatgtagtagatggaaattatatttttttaaagttgtatttttataatttaaactttcaaaattatattttttgcaaataaaattttaaattttaaaatcataaataaaatatcaagaaaaattgtatttgttaaaaaaaccctttgtaaatttactcttatgatccaatataacaattttgagcatattataattggatcttagacaaattgattgtggaaataacttgaagaatatctgctttttgtgtagttaaccaaaatcactaacaacctatattcatttaaattatatttacttaatgagattgcctaatattcacctataacattaaagactgaaaattaagtcctgggttgaagaaataatattatagggatattaactataaaaatagataaaaaagatgaaatattaaaaagagtgtaaaaattaaaatggctaacttaatgtgggtagctgtaatttccttttgattgtgcttatatattgtacaaagtatatgctataatttttttttttttgtatgtataactatatgtatattattgtataaatcattttcaatatttagaatataatgcaattcaaagtcata

SEQ ID NO: 170341 - DNA, 1200 bp, Cannabis sativa
ccaatttgcaggtagcttactgtctttgttttaggctatacatagagtcttgaaaagttaatcctagatacccataggcctagaaaggaggtctaaccagccatgcacttcaggatatggtctggccgaccatgctcttgtttggacctagcaagtcatgtgtctgctaggatcctgtaggtcactatagctttaccaagaggaggccagtcattagatgtggaggccaacctttttcaactggaggatagctttgtacactattgtcttgtagagggcaagttgccttggccgaatggaagctcccttaatttggaagtcactttttagccggccagcttgtgcccagattctggccggcctatatgctaaccctggctggcctataggcttccttgggcggccagggatgttagtacaactccttaagggctcgcttcactccatttggttgctacttgatagttatgctatattttcgatggagatcctgttctgctactagtagggttgtgctacacctatactctatctttggcttacgtggacatgtcacgtcaggtggacaaaatttaggataatagttcacatgattattttcatgattatatgtttattatataaattctattaaatttcgaccatatagttattcataattttaatgatgtcatcatagttgaaaatgattgtgattatatgtttcaaagtacttagtcccatgattaattagtgcactggatatacaataacgtaataatcagtgataaattttacttacagagtgttatgtgaaatttcttttccaggacattagtaaaatatactagtatcggatgtattgggtgtacatcgaactggaccaatattaatagtggaaaagatgtcataaacttactgttatatctttctaagtcaatattacttagttaatcttaggttaatagatctcaatcctaagatggttaggttttggcttaaatgaattatttgtgttctatgaattgttcgttaaagctgacgaaatggattggcccaatacttatatctggagaacatggtagtgcaattgagttagagcactaatcatagatatagaagctataacttcaataaatattagaatcgaaatgatgatttccattgagctttgcttaacgcgataaatgattgagctatcatttcagtaattatattagt

SEQ ID NO: 170342 - DNA, 998 bp, Cannabis sativa
  modified_base (933)..(937): a, c, t, g, unknown or other
aaagccttgtcgtcatgattggagatcggattattgatttggatccatttttggtatcaaagtacaaagcttcatagttttgaatttctgggtttatatatcaccttataaataaattatcaaaaagaaatttgtaaataccatttgaaaaaaaagctaatttgaaaattcttccatttaaaaatttttatctaatttttatttatttttactaatacaaacaattgtttacgtactaaatagtgtttcttaaattttaatatctattttttttttaataaaactttaatatctattaaaatctctcatcttcattttttatttaagttagactttcattaataaaattaaacgaaaatacttcaattcaataatttcaataatttaaaaaatttttgaaaaactaaaaatttcaaaacatataatttagtacttgttaatattaggttaaaaatcctaattaactttcaaagtaattattttaaatttagtaaattattaaaaatataataaaattaataaaatatttcttataattacagtatttactatctaataataaaaataaagggaattaccttatatacgattttttaattaattttttttcaaaaaaaaaaattactgtttgagttgctctgatagtttctataggttgttatacaaattctctattttgaagtataaaattgaaaaaactcctaaaaattatatataatttttccacatgaaattctctataaggtaggggtgagcataaaatttacaaaattgaaaaaatcgttcaaatcgacctaccgaacactgttggaatcgaaactgtcgaaaccgaaaaccaaaaaaactgctaacggttaaaaccgccattgaatggtcagtttttttaagtaataaaccgactaaaaaaaccgaaaccgaccgttatacatatannnnntaatttattaagttttttttttttatgtattatagttactaataatatataaaaataatat

SEQ ID NO: 170343 - DNA, 1075 bp, Cannabis sativa
gagaactcgtcaactaatttgttggctagaaaatcaaacaatgctttaagctcagatctaagacgaaaagaaagatgaaatataaattcaaattgttatctaaaaatagagagaaaataataaactttctattgctctcaaagtcaagttacaagaataattttccaaccccttctcacatctaagaaatgggtatttataggatctaatggcctgagttacatggtgatcccaaggggacaaagtgtcatttttaggatgcacgtcgcatgtgcaggaggtggtcttgcaactcatacctttgtcaagtgttaggtggtccccagttgcaggagtgtgctccctggttacaggagtgtcattcctggtagcaggagtgtggtccctggttgcaggtgtgtggtccctggttgcaagactgtggctgcagtgtaccctcagttgggtcctcagaccttgcaggtatgttgcctctactactcgtacctccttacttttagaatttgtagaaggtgtggttctacatttctccattgcacaccttctcctttgattcccctataatggtatccttttttatgtgcattcaaattccacatttacttcttttcacacaaacaacatactcagcacttcgtaacgctttcacgctgacagacttacatgcacacacgtaaacgcatgctttcatgcatgctcacaaacacacattcacgcacatgcatgctcgcatgtgagctcttgtcttgcagcccctcacagcaacattgcactcgcacacgtgcacacactcgcatgcaagcccccgtctcactgtctcataacctcgcatcaatgcacccacacacacatgcacgctcacatgtgagcccctgtctcactatcttacagcctcacagcctcttacagcagcattgcactcacacacgtgcacatgctcacatgcgagcccccgtctcgcagcctcgcatcattgtacccgcacacacatgcacgctcgcatgcaagccccacattggctcgcatgcgagcccccatctcactgtcttgcagcctcgcagcctcgcatgcaagc

SEQ ID NO: 170344 - DNA, 573 bp, Cannabis sativa
caagacgttcctgagtgtgagtatgttgttgttgcttgtttgtccaagtgtaaaggttacccttagcagaaagagcatgaagaataaaagtatcaaggaaactcctaaattgagttgaagggctcctagatgtatctcccccaattttattttccaagttaagaaaatcattaaaatcacccattatgagccaaggggagttttgaatatttgagctgattctatgaagaacttgccatgaatgaggtttgttaactgagttaggtgctccataaaatccagtaaaataaaaggaaggcaaattagtagacttgatataacaaaagaagtggcttatattaaaagaaagtaagtttacatcaatatcatgagtccagagcaacaaaagaccgccactaagcccgactcgaggaacttctaaacaattaggcaatttaagattcattttaaacctacttaaagagccaacttggagcttagtctccgagataaacaaaagtgttggcggaaacttcctagggagagggaacggaatgctcgtttactccttaatccacgagcattccagctgat

SEQ ID NO: 170345 - DNA, 540 bp, Cannabis sativa
taataaattaatttgtatatatatcacacaccaaccaaaccataatttcttcaaattaattaacagaaattaatattgttaattatgtataaaaattatataagctgtttttgatagacaagaagaaaactccctatcaacatgtaacaagtttaacctaatcaatattcgattgtattaacctatagcttcccatacaaattgtaaaataataaacttattatttcattagaaagcaaaattaataatgtgtgacaagttaatggtctgggcaacccattccagccatcatatttttgtggtagtaaaaagtttgatattgtgctggtaaaatagaatttacttttgatgtgttggcaaaaaggattggcaaatcaacattagtattagaacttttatcagcacaaaatgaaaagtgctgtcaaaaataatttttcccagcgcgtaaatgcactggtaaaagctagattttagccactgcaaatgtgcgttggtaaaactttgaccattttgcctacacagtttgcgaaatgcgctggt

SEQ ID NO: 170346 - DNA, 751 bp, Cannabis sativa
ttatgagtattgttaagacatcattcctaatggttacattggtcaagagaaatgctaaaggacacatcctagtaattttcttctatgaatatcgtaattggtctaactaattatcgggtgtcatataatttaatataatagtttttagggaatatcgctagtcaatcgtaacacgacatgtcgagaaagtgctacacactctggtgcctaatagcaatgctcattcggtaatagtgttttctaataatttttataggtaacgccttatgattggttaaaaatattttttaaaagtttttttttaagttatacgagagtcgaaactaaattagactaataactgtataatattaaagatggtgttaggcaccaagtccactaagtacaaaaatatagtcagttttatcataataagtctagattgaactattattaatttttattttaataaaaaatcaattcaaagtactattttatacaattttaaaagagttcaattgcacatttaataaaataaagagtaaagtaatttgtggtataaatacttaagtttaattctcagttgtaaataaatatctaagtttaattttttgtggtaataatacataagttataattttggaacttcagtacgtagatggttgttatgtgaattaacttgtcacgtgacaatttctgattgattcaagtcattaaatttttatattttgtaaagaaatagtctaaatatactaataagaaaataatatgt

SEQ ID NO: 170347 - DNA, 552 bp, Cannabis sativa
  modified_base (478)..(505): a, c, t, g, unknown or other
gtaaaataatttccaacagattccgttaagagtgtagaaattttggcaaacccttcaagaaccttctgtactatcctgctaatcctagaaaacttctaacttcggttgcagacttgggtcgaggctaatcccaaactgtctcaatcttcaccgggtccaccaagatgccatctttgtttacaacatgccctaagaagcttacttgtggcagccagaactcgcatttcttgaatttggcaaagagcttatgctcccagaaatgttgcaacaccatctgaagatgtaattcatgtgcctcttctgaatcagagaagatcataatgtaatcaatgaagataattacaaaatcatctagaaaaatctttgaatactcggttcatcaggtccataaatgtcgccaaagcattagttaatctgaaggacatcactaggaattcatagtgtccctactgttggaatatgttttaccaagatctannnnnnnnnnnnnnnnnnnnnnnnnnnntcctaaatatgaatctctaaaacaatgtaagtaaacacatataaagt

SEQ ID NO: 170348 - DNA, 618 bp, Cannabis sativa
atacggactagccttggcagaaacacatttgagcgcgaagtgtaattgccttcccggaaggacaagctggtgttgggttcgaccaaatcaaaacttggatgtaagacccaggacaaagataaagatctagagatataccaacttagagaagaaatgtagaataactatggtgaaagatagaagtgtatatttctctaggtcaagtgctacagtgattttcctgttgggcttttatgccataaataaaacccaatttcattataatcttattttctttcaataaagatcagaaatcataccatgacctagtcatatgctttgttcacatgttttatacatgatgatatgtttaatatataagttctattaaatcctgaacatataattattcacaattacagtgatgtcatcactgtggaaagtaattgtgattatatgcttcaaattgtttagtctcacgatttatcagtgcactagatttatactgacataataatcagtgaggtggtttacttacactaatatgtggaacttcctttatatggcattagcaaagtatactagtatcggatgtatcggctatacatcagacttgaccgatattgataatggaaaaga

SEQ ID NO: 170349 - DNA, 577 bp, Cannabis sativa
aacacaaatatctactaaaatattccaaaaatattaaatctcataattattactgttgtaacatctttggctaatccatcaggtttccacatttgtcgcaccctaaaatatttattttataaatggcacatataatactaatatattctaataaaatctctggaatttacaaattacacatacttatttattcttttaataatctccaattaatacataattagctttgtaagattagaatcttacccattatgccctaaatactcatataatttcatattaaataaaataagcttaagtaaacataatttcttttgggtttttttctattttgggttaatattactttaaataaatatttatactactacaagaaaaaataaatatttatatagtttattaatttcaaatataatatttttaaagtttgttatttagaaaaaatacggtagaaaaactcccctaaatatgcaaggagaagtgtgatacgcatgtggctatgtgggcgagtgagggacaaagccttagagtttcctgacgctcagaaactgtagcgtcagaacacagcagtagttgc

SEQ ID NO: 170350 - DNA, 717 bp, Cannabis sativa
  modified_base (518)..(522): a, c, t, g, unknown or other
tatattttttttagattttttttttgagacattatgtggatttgcccggactacatatgagttacatatatataaggtgttggttttttaaaactatttagcttcgccctgatcagcgttggtagagaatttcgccaaaaccgaaattgaaaggcctaaaaaaccgtctctaaaagatgattttgtagtaatgattatttataaatgtttaaatcaccaaattaattattaccattaatgtttagttgtattttcctttattacattaatttagtttttcattcttttagtcatattttttgtataaattggggttcaccccattgaaatgaataactgagaaattctcattcagtgtctttttctctcttcatcttcttcttcttttcttcttatatattttatattattttataatacgttatcagcacgagtctctgcccaagcttcaaggtaaatattttgttaaaattcttgagttgtttttaggtcccgatacactaaatatatatttatannnnnactcatctgactgaaacaatttcacgaactcttttttctatttctttttatttaatatctttatattatatgtgtatgtatatgttctttttcttataggtttattattgatttcatatgtatatatatatattatgttcttatcatttataatatttattacaatatatgtgtgtctatgatatgatagagaaa

SEQ ID NO: 170351 - DNA, 1014 bp, Cannabis sativa
aaccattgggaaactcacattagcgatggttttgaatcatcgcctatttttcccgatttacgacggttgaataagtgacggttatagaaactgacgggaatactttaaacgactatttaaaaatgtcaggaaaacccatttttgtagtagtttgtggaactatgtttatcaacagtaacagtagagctggtctcaagaggagtcataacaataagtttataatcaaaataccatggctagcaaataagaactcatctgcgatcaccaaaacaactaaattctagtgtgaaaaaattttcttatttcaccaggacattaatggagtaaccttggccacattttgtggggatgcttcttaatggaatcttgattaaagtgacgatgattggtgagaagcttgatcgtaaggaaggcagagggctcttcctctgagtcttctttaggctcatccaggacctcagataaggaatgaatctttgtttctgtttcagtcaggttaatagcacagtttaatgtttggaagagatcatccattgtaaggcgtaacaggaagatttcagtagagataagcaaaattatattagagtgaaagggatataagagcacacgggttgcaaaggatatgggaatggtttgggctaagaaggaaattattaactgagagggatatttatagtatgtcataatagggtatgatgagagaaaatcaatgataataaggaaagaaaatatgtgcatagtagagaaaggatatcgaaatcaaacaaaaggagtaaatcaaattctactgaagtgaaaccaccaaaaattgcagaacatttaatagaaagctcctcacactacaaaaaaagataacatttcgtgacaaccttttagtcacaatataaaaaaattgtgactattatatgtgacttttagctacaataagaaagttacttgtgactaaacatagtattcagatgcaagttgtcactaatttaatacttattgtgactaaaaatacattttgtcaca

SEQ ID NO: 170352 - DNA, 1229 bp, Cannabis sativa
  modified_base (1159)..(1185): a, c, t, g, unknown or other
taaaagataatagacttaatttagtttaagttattttaactaataaaataattaaactagattaatcatggacctttatttgtcaccctacacgtgtgggtcttattttaagatccagaattattttttttattttgccataaataagatttattatttattcactaataaataacaattgattaattctcatgaatctcatatttcacaaagattaaaataaatattattttttctaaactaatatatttatctctttaatattatttaaaaataatattatatttaactaattaatatatgttgacctcagaaagtgataaaccgacaatggggttgtatagatctaatgtttgccacgtgtttgcacaaataagaaggaaaagaaataaacaacaaaatttgttattgttatatagaggttcggcccccccttgtgataacgggtaatgatctactccccttttagttgtatttataccaagggaaatactattcagatcactatagatgggatctgcaatagcacccttagggttacaaggtatgaatcagtaatggcaaaacttaagtgttgagataatgctagggtaggcgtgtgagagaggaaatgaggaagagaaagagagtttatcaaacactcagagcttaggcaagttttggacttagaggcaacttaggtttctaaactaaggttaaggcctttatattggaggcctaaagccctaagtttacagttcaaatccctcgatacttgcatagtttgttagatatttacaaaagaccaaagtgtcctagtttctagatattattaagccattttgttaggctttaagggcccaattcgtagcccacaacctgttgtccacggtagaaatgtccaggaaagcctacagtgcacctcttggttggtcaagtccctgaggaggccaagcaacccggccatagagccagccaggggtggccggtcagtccctgagagagagctggtctatcacttgttgcccgtttgagtgccagggtcttcatttattcaagtgctgacttggccttcctctttgtgagatatactaccacgtggcactgattttgtccacgtaagcatgccacatcacgaggactaaaattgggacaacattttgttgggttttgtgccctnnnnnnnnnnnnnnnnnnnnnnnnnnnatttacttattaataaagatcagagataacattttatgttgcat

SEQ ID NO: 170353 - DNA, 571 bp, Cannabis sativa
gttgttgtgatttcataaatggcatgcaatccaaaattgatgaaaaagtaaaaacacacactaacaaaaatcttacttttagtcataacaaaatttataactaaatgtgaaaaagttgtgactagttaaaaattatcgttcatatgttataactaaacttagggaaaccatctaaccctacaatatttagggaccaggaaactataacaattgttatgtaggtaactaagagagacttgaacctcaaacctcgattggttctttgctaaaataaatattagaatgattggccataatatatagattagtttatataatattttgtcaacttgtgagacaatgatcacttctcattagactctcaaaaaggtccgaattcactagtgtttttggttaatgtaatcatgtaattgactcttgcatatgtgtttttggtatatgtgtgaagattagaaaatttggaaaatctaagaggcacatgtataattctaggtgtctccttttgattctagtttcttttgataaactgctggtttaaatttgttccatatataaacatagatgacatttt

SEQ ID NO: 170354 - DNA, 707 bp, Cannabis sativa
aaaaaaaaaaatgggtagcatcggcccaccatcggacccccatccgattgctttttatgtattatttatttttggtccgatgtgatgtaaatgggaagagtaaattggagataccattatagttggcctagattgcaaatattggtaattataaatttaggggaaattttttaatgttatgtaagtatatttaatcaaattttcctattataattactataatgtatgtatgtatcacacgtattataaataacatggcatgttaattataactattattttaggtttaaatttttattagctggatgtttttaattgactcttaatttataagagtaatttgcggcataaatacttaagtttatcttgtagttgcacataaatacctaagtaaaaattttggcggtaaaaataccttctgttaagattttagaacttccgtaggtacctcgacgttaagtgacaaatcattgcacacgtggcaatatcttattggtccatatcattaattttttttattatttttaaaaatttcatataaaactattaaaaaagaaattaaagattaaaaaaaatactaagaatttaaaattaataaaagcaaaattttttaaactgataaaaaaacattaattaaaaaaataaaagattaaaaactaaatcaaaatttgaaaagtaaatgaaactaaacctaaatgaccaaaccc

SEQ ID NO: 170355 - DNA, 522 bp, Cannabis sativa
aataagatagactgaataaaaaaaataaaattgttttttatttcaacccttgaccgaattatatatcaaggtcgatgggtttgaagtgaaacaatcttttctttcttcaatactgctatttttatattctatttatttaaatgataactttatctatttaataattataattaatcattaaataaaatgtccgtttaaatatatttattaattagaccttccaatgtctcttgactaaaaaacaaatgttgaattctctaatcttcttaaatatgtcattccttagtaaaattcataaaaaagacatagtaattctttagaatcgtaattgattaaataaatcaattaattgagactacaaaacaacattatctcagatagtgtggagaccatgggcttatgtaaccaatttcttaataattagatccaaaatttaacaagtaaatgtcctagcttattaattcctcctaatatagattcagaattacactattgattacatagaacgctctatataccaaa

SEQ ID NO: 170356 - DNA, 916 bp, Cannabis sativa
tcatgccatccattctagaagatcaaggaaggttggttgggctgctattaagcttgatatggaaaaggctttcgacagagttgaatggccttttttaaatcggttgcttgctcatgttggttttccttcttcgttttcctctcttataatgcgttgtctttccacggtccagtttcggttatccataaatggttctctcactgacactttccattctacgcgtggtattcgccaaggggatcctttatctccctatcttttccttttaattgctgagggtctctctgctgcaattcgattgcaagaaactaatgctcatttttctggcattcagatttgcaggggtgctcagcccttgtctcatcttctatttgctgatgatagcatggtcttcaccccagttcattctcgggccagtgattcccttaatgttattctcgatctttacaataaagctacaggtcaattggttaatagagataaatcctctatccttttctcccctaacacttttgctgatgcccagcttcaatttcgtcaatcacttcatcttcatggggagggcttcattagtaagtaccttggtgttcctcattgcgttggcagggtctctaactccatgttccattatctcctctaaaaagtctcatccagattaaactcctggaatgaaaattttttctctcgggctggtaaggaaactctcataaaagcggtggtccaagctattccttcttttgcaatgtcttgcttcaaagtgcccaaattgatttgccaaaaaattcaaagcttgatagctaaattttgggtgggatctcagggcactaaaaaagtccactggaaaaattggaatgttatctctgtctcaaagttttttgggggcctaggtttccgtatcttgtcctctcataaccaa

SEQ ID NO: 170357 - DNA, 680 bp, Cannabis sativa
aacaagaagaagaggagatcgacggtctcaaacaagaacaaaaatcagaacagtactgaggcaactattgtgcctgcaaacgaaaagatcgtcggtggtgcgtggttagttcacactttcgagctgggcgtggttgaggggcgacgaccggcaatggaaactcaaaaattgtcgcacaaagaaccgagagagacagagatgggaaaggtgagaggtcgtccctgtccgtccgcttgccggcctgtccatccactcgcctggaccgtccgcctatccaagagagagagaggaacgatgataaagggaggaggcggcttgagaaatagttgctactactaggattttttttttatttaagaaatagtaaatgtgttagaaataaatggtagtgtattaattaaaagctgtatttttaatttaaaatattaataaaagctgtatttttttttaatttggattaagaagtctttcactactttctaaaaatatatatatatatttaatttaaaatattaattacagtattttttttttaatttggattatgatatggtgacacgccaggtgggtcagcacacatttatccagtcacacttggtgtgtcactatatgttaatattttttttttaaaaaaaataatagaaattatgggagttaatatttagtgacactcatatttt

SEQ ID NO: 170358 - DNA, 1430 bp, Cannabis sativa
agcatgattagggagggcttgagctacggttttcagaaggagttctttaccagcttttgacaaaaacttgccttcccaactctgaattcgcttacacattttgtcttttagaaaaccaaatactgccttcttgttcctactgataatgcacggtaatcccaagtaaagactagaatcatctgcttcaacaatgcccattctttgacatatttgcatacgaacaatagtgtgaatgttggcactaaagaacactgaagattttgagaaatttaccatttgtccagaagctctttcaaagtctttgagcaatgtcaacaccttggtagaatcattctcattggctcgacaaaaaacataactatcgtccgcaaacaacatatgtgagatgaaaggagcaccattagcaactctaatgcctttaatctgatgtgtaacctcataatgtttaattagtgatgaaaaagcttcagcacaaattaaaaacaagtaagaggacaacgggtcaccttgtcgaatgcctcttgtaggaatgattggtccaatgttccacccaccatgaataaccaagtactccactgaagtaatacattgaagtaccagaaaaatccatttgggattgaaccccattttaagtaaaaccgcttcaagaaaagaccattctactctgtcgtatgccttgctgaaatcaagcttcaaggccatgaagccttctttacctcgtctttttcgctttaggtagtgcatgacttcatgagaaatcaaaatgttgtctgtcatataccttcctggaacaaacgcactctgagtgtctgaaatcaattgaggaagcaccactttaagccgattagacaagaccttggatataattttgtagagaacattgcacaacgaaatgggtctcaaatctcccatgttaatcgggtttttctttttagggacaagtacaatgtgtgtacgatttaaaccagtaggcaatacaccatcagaaaataattgccttatgagagaacaaacatcatgcttgacaatgtgccaacacttctgaaaaaatccgggagtcataccatcgggtcctggcgacttgtcaggatgcatttggaaaagtgccttttttatttcttcgtccgtgacaatctcaagcaggctgacattttggaagggagttaccgaactggggatattgtcaatgactcctgctatattaactcttgaagagcaatataattcttgaaaataacctttaacaacatcggccaacccagagttccaatcacaccattgacctgaggagttttgcagcttaataatggcattttgcctttttcgatttgttgctgaagcatgaaaaaaccgactgttatggtctccttcacgaagccaaagttgtttcgattgctggcgccaaaatacctctctttgagcataaacct

SEQ ID NO: 170359 - DNA, 2484 bp, Cannabis sativa
  modified_base (1894)..(1895): a, c, t, g, unknown or other
  modified_base (2301)..(2301): a, c, t, g, unknown or other
tcttcaaaactagggtttaccctttttctctctatatatatttatctgatctgtattctatgtgttttcctatgttgtttttgctttgatttgtatttaaatacttgtaatgagtcgctttatcacagatctaggagttagttacaataacagttgtaactaactcctatttcttgatacagtagaggcgaagccacttaggattgagtccaacttgttttctgttgtaaaatactgatgtggatatttatgtgtataaggactggttataagtggattttactcaacaatttccacctgaaatcctcttataaccagttctgatatctgttttttttatctccgagagccttagcttgatagatcctacttttagtctcctgagtcgattcttaacaagttcatacaatgtgtgaacttgttaagagtcacaattttagtacccatgtttgctgggttatcctcagtaggcaccttttcaatgtcaatttcaccttgagtcactttatctcatagaaagtgatacttgatttctatgtgctttgttctgtcatataacatagggtttttgcgtagaaatatacagctctggctgtctgaatacacagtatgcacacctttaagtagattaagctcattcattagtccttttagccaaatagcttcttttatagcttcagttatggctacatactcagcctctgtagtttatagtaccacaacaggttggagctgaactttccaactaacacaattccctccaatcataaagaaataggtagatgtagatctcctattatctctatccccagcatagtctgaatcactgtagccttcaattatagtgttagcattctgtttcttgtagactaatccaaccttaattgtcccaagtaggtatctaaacacccatttcatggccaaccaatgaacttttcctggatttgccatatatttactaagtacactcataacatagcctaagtcaggtctagtgcttaccattagatacattactgaccctacaacattagaatatggcacatctttcatagcttcaatctccttttctgttttagggctttgctctttagaaagagtgtactgacttgtaattggttgcttaacaacctttgcattcctcatagaaaatttatctatgatcttctcaatgtagtcttcctgtctaagtattagtttgcctttgtccctgtcccttagaatagaaatcccaaggatcttggtagcatttccaagatctttcatttcaaattctgtcttgagcagattcttaaccatatcaaccctagacctttcttggcttataataagcatgtcatctacataaagcagtaagtagatgacatcttttatagagcttcccttgtagtacaaacaggtgtcatgatagctcctgttaaatccatgctttagcataaaagcatcaaacttcctattccattgtctgggagcttgtttgagtccatataaggacttaaccaacttgcagaccatgtcgtcttttcccttgacttcaaaacccttaggttgttccatatagatctcttcttctaggtctccatgtaaaaaagctgtagtaacatccatttgatcaatttccatgtcaaattgatttgctatggttagcatgattcttatagtcttgtacttaactactggtgagaatatctcattgtagtcaactccctctttctgtgtgaatcctttggctactaacctagccttaaaccttataggttcttcttcaattctgccctctttatgcttgtaaacccatttgcaggctattattcttttccctttaggccttagaaccattatccaagttttgtttttctttaaagaaaccatctctgcatccatagctttaaannacttcttagcattaggccctgtcatagcttcttcataagtttgaggctttgtacttagagattgtatagctgaaatgaaggcataggctatgtcttcattccagacattgaaactatacttagtattaggtttaggtatcctcttttctctgtccctggttaattggtagtcatctagagcttcagtgggttgaataacctcattttcatctctctgttgctcttcagtctgtgtatcctccctgtttgaaccttctgtacgttccacctgatcctgatcaggttcatttccagctggttccaccttatttatatcaggttcttcatgatcatctagcttccatagaatagggtcaaactgtattgtacctgcatggttagtttctactgtacctgcagggttagntttaagtaaacaaggaaattcattttcttcaaaaataatatccctgctaataatagttttaaatccacccttttctcttaaccaaattctatagcccttaactccttcaggatagcctagaaaaactcctttaatagctctaggttcaagcttaccaacactttggtgcacaaaagcactaca

SEQ ID NO: 170360 - DNA, 1295 bp, Cannabis sativa
  modified_base (1153)..(1153): a, c, t, g, unknown or other
tttttttttttttttttatcaaatcaagtaaattctttataaacttttttttttgaatcaattatttataaactttattttgtttttaattttgtaatttatattttaactttgtgactaataattttatttgttctattaaaaaaattaacttttatttttgcgctggaagaatttggagtttcattttttcctcaaatattgagattcttttcattaatgatatactatttcttctctatttttttataaatcaaaaattgtattgccacaaacttcatttatgaactagagagtactaacaaaaaaagatggtttgagttgtttagctactgctatactatacatgacatatatcttttacaattcgcatattcatgctaaatcatgttgttttatcttttttggcaaaatgaaagatatctttcttttgatatcatgttttatacaccttattttgaaacatagatggttactacatgtaaaatatctaatgcaggtaaagaactgagggaagagtacattaaaatagacaagatgatgtgataaaaatgagggaagatgaatatataagtattttttttttcttgaacaatatatatatttatatattaagtataatttaaatgtattgttttaacgttattttaatttactgatttgaaatattttttttaataatattgtgttattttacaatattcatattattttttaattcacagtttgatttttatttatttatttatcaaaaatcataaacaaaatattatttttataaaattattatttattctgattttctttttagtttttattaacttatctaatatctcataatacatattcttgcaacaaatgacaattgagatttttgtatttcattcgtgatttcttagacttttgaatttagaaaaatttaactaaatataatttcaatacctccatctattctattcttaattatttcattttttacttttttattacttttaaaagaaaaaatctctaatcaaactaataataataatagtaataatctctaagaacaacaaaaacaaaaatatttaacttaaagaaactatatcaagacaatattttttatacgtatatatcttcctaagtattacttttttttttaatatatatatanatatattctatataaaatgtggctacataacagaattcatagtttatgagaaattattagttggtttttttttaaataaaaaaaaataacaaattattagatgttgccgtaaagggtgagcatccatgtagttagttaaacc

SEQ ID NO: 170361 - DNA, 567 bp, Cannabis sativa
gctaaaaccaatttcggagataattcattaaaatttaaaattattaaacaaatatatattttaaaattttgctccaaaatatattttttaaatttatttttaaggacttgtttggtacgccaagatcgtgttatattaaataataaataacattatgtttgaataaattaatgtattatattaattattacgactaaaatttttaatataatgtatgttatattatttaataaataacaaatggtctgtattaccttgtattataatatttacaaaagattcagggtcaacaacaatctccaacccagacccgaacccgaatccaaacccaaacctaggacccggacccagacctggaccctagacccgaactccggacccagcttggacctaggaatcagacccgggacccaaacccgaatccaaacccagaaccggaccgaaacctaaactcggactcggactcagacccgaccggatctagacctgcaccccgaacaccagactcgaacccaaacccgaacttggacccgaacccgaactcgaacccaaacccgaacttgaacc

SEQ ID NO: 170362 - DNA, 919 bp, Cannabis sativa
  modified_base (851)..(864): a, c, t, g, unknown or other
tttattaatttaagttcgacacatcctcttaattacaatcattttgtttaaaggaaataccctttgattccaattacgatgatattaaataatttagggaaattttaggaatttggggtgaatttggaattgcagctgagtggatttaattaaccgagctgcctacataccttctttatgaaggatcaaattacttgtagttcagaatacggtaatttagaatttggataaaaggattccggtagatgaccattttcaggaatcttttgctatttaaaaatttagaaaaattcctaggtggatgaccttttttatggaatttttagatttgtgttttataccattttgcggtatcggtgactgcacttagtcttagcaactaagtcgcttatgtatccttttataggaatcaagccaaacgtagttccgagagtgttaaaagattttgtatcttcaataactttgtggagaattaactcactttgatattttgaggtaaatgacctcacttggaattttttaggtatatgacctcatttgaattttgtcgaggtgaatgacctctttaagaattttagaaattgagattgtacttaatcttggcaattaggttgactacccaaaagaaagacatattacttgttataaaaatcaaaaaaatattagaaaaaagttaacttgacatatttttacatttagttacataaacattcaatatctaagactctctagtctctatattgtttttatatatgtgtaattatgtttttttttcctaaaagtatataattgttgagttaaaaaattattaagataatttcttctaaggttgttcatccgatccaatccgnnnnnnnnnnnnnnaacaacatccaatccgcactaagtgcggattttattttttggatccaattcaatc

SEQ ID NO: 170363 - DNA, 690 bp, Cannabis sativa
attatattaagtagtaatatgtaacatctacaacttaagtagtcaaaggtcacactttgaataataaaataatcctttaatttatattacaaaatacatatttaaaaataataaaataactgttatatctataaagaaaatattggtaacaaaatcaaaacaactcgtgtacattagtgatcacctgattttcacctagtcgtccctagtgagatttactggtaatcgggcattacctgtgcatataaagtaaaattgccaagagaacttcatcaaggtcaaagaatgaattgagaataactatcacatcattcaagcatatcaaaatatgcctgaagcccaagaaaccaaattctgggcggctaggtagatgttcaacctaggcgtcaaaggtcaacctgatctcgtagtcactttcagtagtgcacaccgctcagtaaaatggtcataaccctcttaatttttatccaaatgacacgattcaagtggcatatgaaagctcttttcaaaacggattgatctaagtgtgtctcatactccaccacaattctgacgatttgggcttcaaaattgactctcgagctagtgtagaattttgcgcaaatatttttattattttattgtaatttaattggacttcattccctataaaaggagagctcctctatctcattactcacacttttcatt

SEQ ID NO: 170364 - DNA, 951 bp, Cannabis sativa
aaaaaaaataaagtaacaacgtgtttatccatataataatagactatttaactcttattagttatttgtgtgtcttaatttttttttaaaattttaataaatgtctaaataactataatatatataattataaaaaaaaaaaaaaattcatttaaatacagagtgtatagaatatactacaccaaaaataaattgtaaaatttttattatatatttagatgtcataaacatcaaagttaataattcaattagttgtcacattaatttatttttcatcgtatttttattaaaaagaaaagaaaagaaggatataaattcttattttctttgcattctcttctcatttgcacaaattgaagaaattatttattatgaaattttaatattgaaatccacttaaacattatgtgtccaaaaacaacaaaataaaatcaaaattatgatttttttcttcattatatttacaaacaggttaaaatctaaatatttaagtataaaaaatcgttttactttttaacaaactttaaaaaaaaatatatttgtattacaattgatcaacatgaaaaattgcaatttgtattacaagatttcaaattagtaagtataaatgtttaatattacttttaaattataattgtgtggataaataattgctagtcaatgttagaagtaacatatttcacatcttaaatgtgctcctatgttgcagcagcaatacatggaacgatattataaaagatactatttcataccttaaagtattataacaaaataataaagttttgactaaaaattactccccatttaaatttgcattttttcctttaagggaatgttacaatctaataaccaaataagttgtgatcttagtcgtgaccgtaataaatatcgtgatcgtaatcaatgttacagacgcgataagctagaaataatatttactagcattgtaat

SEQ ID NO: 170365 - DNA, 1095 bp, Cannabis sativa
ggtgggaagtgtgatgttgtacatgagatctttaaatcaaagatgctcttcattgtaaatgattgtacaaagtattgtggattattaataaaacttgcagatttataaaaaaaaaaaatatatatataacatagataattatttaaaagtatcaacaaaattagaaaatcttatttttttttttttttttttgcataaatcttaatttaaatttaaattaagcgttggttcaattaactaattatttttttataacaaatttgttgattgtttaaaatatctaaacttatttacttattttattatttaataaaattagttagatatattttttgataaataaattttaaattagatcattgcattttatatatttaagaaatataattgaatggtcacttagctacttctagtcataaacataattttttttgtcattaaatatgacttttactcacaacaaaatgttacttctagctaaaatataatatttagatccaagttgttattaatttagctttaatcacaacaagtagtgtgattaaaaacatatttcgtcacaacaaattgtaatttttgtgactagctaatatctttagcaatagatcttttagtcacaatataagaattgtgatttataattaattataacttttttatttttactcacaaattatattgtgattaaaagtaattacatttaataatattaatatttaaattaataattagtcaataaaaactctaatagaactgtaaacaaatatgctagtagttagtatatatatataatatgtatatatggaatataatattgcaatatatataaaagaaatataatcctttccaaatattattatgaatcaattaaatcattaaacttacaagaatgtgagctttccttggaaaattgatgaaacagcttccataagtttctctctttgatctccttgtgaaacgtcgcacactgaaccagttaccttgaaacccttctttctccattcttccaaacacttctccaactcactttccttgcgacaacacgtgtgaactatggctccaaattttgcaagttcttccactatggcatgccta

SEQ ID NO: 170366 - DNA, 790 bp, Cannabis sativa
cacttgttcaatgacaccattaactgaagtgggttttgttttgttataaaaaagatataataaaaaacgtgaaagggtaaaaatgaccttacaattaaaaaaaaaacaaaatccaacgccccatattaatcctactcctaatagaatgtaaatttcaattactttaaatagccgtttgagtccttaatatcgttttttcatctcacctctctctctttcctaagctaattgaatacatttgataaccctaattttgaaacttctaaagctcaaatttttcttaaactttgtaaattaaccaaaattaatcatttctttgagtgattaattatgacttctcctcaagtaattggtgatcctcattaccatatatcaccctatagatatagttatactactcaatctaacacaatagaagaagagccacatgctcgtttctttaccattaacttaaatgctaagttcattcttgctccacactcctctagtatggaagttgaagatgaagaatctttattcgacgacgacgcgggaaattccactgcttttttagaaaatattggatggatttcgtacgagacattgatgaagagcgacgttactgaagccctacttaacattgaagacatgcttgctgaggtctatcttccttctctctcttttattgccgttggcgttattgattgcggtagaaagatgatgaacaacaatgattatgataataataatttgaatgaagaagtcggtgttaatatttccgttgaagtttttgttgatgaactacctcaac

SEQ ID NO: 170367 - DNA, 867 bp, Cannabis sativa
  modified_base (135)..(137): a, c, t, g, unknown or other
catttgctctaaaagaatctcaggaaaagaatgcactgctttggctgaaaagatgactgcccgaattagtggagttccaggaatttgtcttttgcagcccgagttgtactaatcaattcagttttgatggctatnnntgcgtactggtgtcaaatattcatcttgcctaagaaagtgattaggcatttggaagctatttgtagggcttttctttcgaaaggccaagcttgtgtttcaggtccggggctgattgcttgggattctctttgtcaatccaaagctacaggtggactttgttttaggaaaatccatgaatggaatcaagctgcaatggggaagtatatttgggcaatagctcaaaagcaggatagtctttggttgcggtggatcaatagtgtttatctcaaagagaatgaatggtggagttataaggcttcctctcagagtagttggtattggaggagtcttgtaattctcaaggatcaatttcgtgacattgcagggccccagatttgttctcagcagcaacaatatcaggtgactcatggttatgcccttctctgtccagttcacgggaaggttttgtggtcccagcaggtatgggggaggttgaacaccccaaaacactcttttatttcctggttagctattcagggaaggcttcgcaccaaagatagattaaggaaaatgggcatgaatgtaaatgagcagtgtgaattttgtgccacacagcaggagagtgcagagcacttatttttccactgcaatactgctgctgtttgcttgcagatggttaaaaattggcttggatggcatgtcaaagctgattcaatgctgtctctcaccaggtggcttgggagatcaaag

SEQ ID NO: 170368 - DNA, 1120 bp, Cannabis sativa
  modified_base (685)..(697): a, c, t, g, unknown or other
taattctatccccttctttagaaaaaaaaaagtgtgtacccaaacaataataacaacaaaattgatttttcttgattcaaaataagctaatttggatttttactccctgaattttgacatatatcaaatcatatcttctgaactttttaggtcgttaaaaatttctctcgaactattaaaattgttagatttaaagatttttgtccaattttactaaagaaagtttgacgtggataaaattttggaagcacaatttgctacaagttaaagttgagaaggcataatttggtagatatcaaagtttaagagtacaatttagtatatggacaatcgctacattagcaaaattgaatgaaattagataaaaatccttaaattcaataatttcaatagttcaaaggaaatttttaataacaatcaaaatattaggagacatgatttggtatatgtcaaagtccaaggaacaaaattcttaattagccttaaaaatatgtttatatataaaatgtgactatctaaccgtttttgctggattaacaagatattttaagaatataagaatatttcgttaaatttaacagtattagtagggttattttttttttttataaaaatatataaatataaatattatttgttttacgttaattaaacttatactaattttagattaatttaaatatannnnnnnnnnnnnatattatttgtaatattattttttaatttttatttttaatattaagattatgtttaattttaatatttttaaactttatatttatttttatttttaatattgggagtatatttaattttaatatttttaaatttaatatttattttccttaaatttttcaaactttaaatactatttttaagaaaaaatttaataagaggtttaatttataaaattttaaatacacataacataaataaaaattaaaaatataattaaatatacttctttcaattatatatagcaataatattgtatagggtgattttagaatgcacccccttaaaaaaggtacactgatgcaccttacctatttcggtatctagaaaaaaaaattagtctaatttatttttcatatttgtttacgttatagttatttaagat

SEQ ID NO: 170369 - DNA, 650 bp, Cannabis sativa
tggaatgggaaaaccaagtcagtccaaaatgttattgtgtttgctagatgtgatcttgaacattggatttttgcttaagaaaaaactttcactccttcctccttttcaattcagagtggggaaggggacgagcaatggtgtgctccagatgtaaataaattcaagattaatgtggatgcggcaacatttgagaataaggacaggtttggttatggctgggttcttcatgattctagaggccatgtcatggaggcgagaacggggtcttggagtggaagtatcaatccaactcttgccgaggcatttggggtgaaagaggtgctaagttggatcaaggcatctaatgtttctcatgtcaccgtcgaaacaaatagtctcattactgttcaagctctccgtagcctggtgaatactagttctcctttcgactgttacattgctaaatgcaagagaactatttctgatttgaatgatgtttgtttacgttttgttaaacgttctgctaatcgtgtagctcatggtcttacccgagtttcatggttatatgttgagcgtagttattcggttaccactattccgaataacattagtgatgtaattggcaagaattgtcttaaataaagttttcagcttttattcaaaaaaaaaaa

SEQ ID NO: 170370 - DNA, 553 bp, Cannabis sativa
cctctggtagaaaattggactatgtggccttgtggtaaggaatttaaaaattgcaaagcttatcttaggaaaacttattatttgaaaacattatcttttgaggagcaaaaaaaaagtataaggacaaaatagtatatgttgggcaatgggagaaattaataaaatattggacaacagacgatgcaaaggtattttttcttttattatttaattgactatattatttttatcatatttcatgaatttaatatttattaagtgcaattttatatattgttttagaaaataagtactacaaacaaagctggtcgtggtcaaaagaaatataaccatgcaactagcacaaaaatttttgcacaaattagagcagcgtaggtaaaccacaaaattattttagcatatagattgaatatttcttcgtgagtatgcatgctttgattaatatttagctatgtagaaaatagtgaatcgaattgtgtatatatttcatagaatagtacatatttatatacaaagctaggagactaggaaataggaaactaccaacaaaata

SEQ ID NO: 170371 - DNA, 592 bp, Cannabis sativa
attttttcaaaaagtaccatatctaaaaagagaaatgttaggggcagcttaaggtatgttccataagagatagaaaactcttattagtataatttattattggtctgcacattttaattaaataaataatataaaaattaataatcaagcgtcacattattaaagtattagatcccattatagtattgaatcaagattctcggttaaacattggcgttccacattgtgttaaacttatcaaaatatttgactcatcaactaatataatttattaaatatgttaactacttttattgactttattagatgtttaatttttttttataaataacaaaattaattgacttgttaaactttgattggtttaacacagtatagaatatcactttttaacaggagatcgtgattctatagtattaggcacttttaggtgtctaatagcaatgctctactttaaatttttactattatattctaaaaaatatcaataatgataggattctttcataaatacacaaaacaacagaaaaattataaaaatacagttgtacagaattttaaatatttttacgattttataattttatttaca

SEQ ID NO: 170372 - DNA, 690 bp, Cannabis sativa
aatcactagttcaaaagtatgttcaaaatttacaaaaaatttgtgtaataacctataatttgaatttttcagcatgtatagctcaaatatatcatgaatcaactaactaaaatatttatacatagaaatagtgtgtgacatactaattaagcatgtatacataagagaatgaacaagaagaatcaaaagaaattcaattaggaaaaccacttcatattctactttctttccatctaggcatattagtctcatcaaactaagtagaatgaataagaatgatattatctgtgatcaaatttattcttttggattgtatccaagaattgacacattctttttctatgatttttgagatttgttggtaatgtaggaacttaacattcttctttaagcatcatcacccaagagccaactttggttcctctttattgatacctacaatataaacttacatctttctttttggtactacataactttggatcctttgatgttagtctttgaaacctttggtacccaaataaccttcccaaaataggtattcttttccacatggcaataggatttagtgtgaccatcttggttacaataagtgaaagttagtttaaattactagatgatttaacaaaggtagcatttgctaaaaattttatttttaaattttttaatcacaaaaataaaagtaatttt

SEQ ID NO: 170373 - DNA, 589 bp, Cannabis sativa
gggctggacctaggaacaaagaactaaactcagacccgagattcgagacctgaccccagacccaagccttgacctaggacccaccccgagacttaggatccaggactcgatgcttggactcgacccgtaccccatgacttataagtagaaccaaaaccagaagcggatcgagacccaagaacaggaccaggaccaggacctggacccaaacccaaaactgtaactggacaagggcgcagaatcggacataaacccacattcagattctgtgtgtgggttcgggtttgggtctgggtctgggttctggtttgagtccttgttcgagtctaggtccaggtctgggttcgggtgtggatgctgatctgggtctgggtttggtctaggtccgagttcaggtccctggtttgggtccaggtttgggtttgggtctggatctaggtccttatctaggacccaggtttcgatctttgtctgggtctagctctgagtccaggttcgtacgttgatgcctatctaggtcaaagtctgtgtttgggattgggtcccatatttaggtctaatccaattctcagttccgatctgggtacac

SEQ ID NO: 170374 - DNA, 877 bp, Cannabis sativa
caggtgtgtttgctacacaaaccagtgtatgggttgaagtaagctccaaggcagtggaatgtcaggtttaatgaattcatggctaggatcaaattcaccaggagctactatgatccttatgtatatttggatggcaacctttacctactcttgtatgttgatgacatactaatagtaggaaaggacaagcacaatatcaacaaactgaaggaacaattaaaaggtgaattcgagatgaaagatatgggagaagcccagaagatactggaaattgaaatcaaaagaaagagacctggtgtaatcatgttgtcacaagagaaatacctgcagaaagcgttgaagaaattcatgatgaatgaggccaagccagtttcacacctttggctcaacacttgaggctctcaaaagatcaatcacccaaactgaaactgagaggaagcatatggattgcataccatatgccagttgtgttggctgcatgatgtatgccatggtgtgcacaaggctagatttggcctatgccatgagcataatcagtaggtttattgctgatcctggcagcaagttaagcattaggatgcagtcaagtgggtaatgagatatgtgaaagggtccctaagcactggtttaatctacaaagtcagcatgagagaaggctgtgaagttgaaggctttgtggattcagactatatatgctggctgtagtactaacacaaggaggtctctcccagattatgttttcacagctctaggtggatgcataagatggaaatcaaatctccaaaaggtggtagctctgtcttctactaaggctgagtatatggctgctacagaagcaataaaagaagctatgtggctaaagggtctcaccaaggaa

SEQ ID NO: 170375 - DNA, 573 bp, Cannabis sativa
acacatataatatttgttgcttttatattctatatgtggaagtcaaagagcgcatggtagctttgatgaatgttctacttctacaaaaagtacaaatcacacgcaagtcgaaggtaaatatcaatttcgtaatatagagtaatgtaattcactaataaaattatttcattcattttagtcctttcataatcttccaacttttggaaacaagcatatgttatttttataattgtttaaaatatgttaatgcttgaatacgttttattttatatgtttatttataatgatcatattatatatatataattttgattaattaataacatattatatgtatatatttacaattagaacttttattgtcatacttttatgaattatgatttttttttaaagaatccataaaatggtaaatgataggatcattgaaagattacattttcacttttatatatatatactagcaaaaaactacgtgcgaggcacgtatactaaattttatgctagttttttctatgttagttgaaggtgatacaattaaaaattagtaaaaatatattattagttataagg

SEQ ID NO: 170376 - DNA, 712 bp, Cannabis sativa
  modified_base (374)..(375): a, c, t, g, unknown or other
ctctctctctctctctcactcattcacacgcccatatagcatctgtcaacacttgatatttgctatctttgattcctacttggtaaccttaagggagctatattagatttcacctatagtaatctgaattgtattatccctcagtaatacaacaaaaatgggagtaggtcatgacccgcaaacttagggggtcagacctctataaaaatctttgtgttctttacttttgagttttaattgtgtaacacgaggcaaacatcagagtcatacgacttagatgtcggatggccacttttttaggtcaacattaaacattttttaaaataagttattgttgggttttgtgccctatataaaactcatttcaatataannagatttactaattaataaagatcagaaataattctatgttgcacggttcacatgatttctttcatgattatgttcaatgtataaattccattaagtctagaacatatataaatatgtataaatttgttcatgatgatagtgtcgtcaacatggtggaatataatcgtgattctttgttcaaaagtttaattctcatgatttgtcatttcactagatttcggctgaaatgataatcagcagtaaggtatacttacacgttggataagtgttacgtccttcccagggcattagcaaagtttaccagtatcggatgtatggagtatacgttggaagggac

SEQ ID NO: 170377 - DNA, 511 bp, Cannabis sativa
  modified_base (250)..(253): a, c, t, g, unknown or other
gttttctacacatgcttaaatcatttatatctagttgactttgtattttcagatttctttgtagataaaaaaattttcttagcattagagtagagatgatcatgcatgtgtgtataatattattttattttgtattgtaagtatatatgttttgttatttctagtatattatttatttaagataatatttagtttttattttattatatataaatttttttggtatgtatattttaatagtggtatatannnntttgttagcatgatatatattttttgagtattagtttagtattgttatattttttgtggcatataattttattactgcgatatattaagaaatttttacaccaaaaatacaaaaatagtaattttattacatatatacaacaacacggtttcatcaacatttgcacatcaaatccatacacctatcaaccatcaatcaactctcaatcacttccctttctttttttcttttgttttcatttgattttttatttctatt

SEQ ID NO: 170378 - DNA, 568 bp, Cannabis sativa
ttaaatttgcattatatgtccgattctattacgctcttgacgttatcaaaaagtaaaaatttctttttttacttacttaacttataatttaatttataacttataatttaatttataaataaattaagtaaaagccaatttttaatttaattaaattactattgaatataggaattaaattagattactcgtccggctatccaatctaattcaagacccaatcagtcgacaccccattagtagtggaagggctatcatatccaaatttaccagttttttttcacgactatagtctttccttaaaccttagcgaaaggatttactgcattttcattttagagaacaaaatatccccagatacttcgaatcaagcaagtctcaagaatcctttttctgcgcttgcttctgctggaaaaaatttgacaagttatatcagcaaaacagaacaaagtatttcgattcttttgttgatcaggcggcacccggatttgaactggggaaaaaggatttgcagtcccccgccttaccactcggccatgccgccaaaatgctacaaaatagatgacaa

SEQ ID NO: 170379 - DNA, 1145 bp, Cannabis sativa
  modified_base (185)..(195): a, c, t, g, unknown or other
tattctaattttacacctttaaatacaaaatctatatatttagtaattataatgaattattaaatataattttcattttacttatttattaattagaccttacaaagtctctcaattaacaaatgaaccccaaaacctcttttcttcttaattaagaaattgcttagtgaaaattcatatataannnnnnnnnnnatttagaattctaattagttaattaaaaccaattaactgagtctacaagccaatattatctcaaatagtgtgcggaccatgtgcctctataatcaagcttccaataagtagatctaaaatttactgagtaaattctttaacttattaattccttatgaatccactataaattcagaattgcacacttaattatattaaaagctctatatgttccaaggtatagatacgttattaattatccattgttacaatacaaataatcaaagatcctctatagattattgacatcgagtagggaccaatttaccgggctaccttttaatgtattttatccttaaaacacttagtttcatcaaaatgatatttcaataaactaataattacttaaataagagctcttccatttatctctattaatctattctcgaagaaaatcatcatttcacttctatgtcaacatagaagctatggattttgtatctatgatagtgctctcaccaaattgcactaccattcctaagatataggtattgggttgatccaattggtcaactttaacgaacaactctaagaacacaaataacaaatttgagattagacctaaccatctcaggattaagatctactgatctaagatgaactaagtgatattgacttaagaagatacaacagtaagtttataatatctttaccaagttcaatatcagtccaatccgatatatactctatacattcgatatcagcatactttaccaatgctctggaaaggacataatacttatccaaggtgtaagtaaaatttatctatggttaacatgttagtataaatttttcatgggacataaacttcaaagcatataataacaactaccttccactgtgatgacatcactataattgtgaacaataatatgttctagatttatcaaaaattatatattaaaccataa

SEQ ID NO: 170380 - DNA, 633 bp, Cannabis sativa
aaagtgctagctaatcgcatgcgggatctcattgaccatatcatctctgaaacccaaagcgccttcataccggggcgtcttatatctgacaacataatgatagcctttgaggtgatgcattacttgaagcgcaaaagaaaaggcaagaaagggtttatggcgctcaagcttgatatgagcaaggcatacgacagagtggaatggagcttcttaagagcggtaatgattcgaatgggatttgctagtagatgggttgagttgattatggcttgtgtctcaacggtgcgctacaaggttgttcatggtggtcacattctggaatctattacaccttctcgtggcattcgtcaaggagaccctctatcgacttacctgtttattatgtgtgctgaaggactctccgccctcatccaaaagtttgagtctgatagaatcttacaaggctgtcgcgtagcaaatcgggctcctccaatcactcacatgttgtttgcagacgatagctatttcttctgtcaggctagtgagaatgcagctactagatcaacaatcttcttgctatgttcgaaaatgcctctggccaaaaggttaatccctctaaatcttcaattttcttcagtcccaatacggataaca

SEQ ID NO: 170381 - DNA, 659 bp, Cannabis sativa
  modified_base (348)..(354): a, c, t, g, unknown or other
caggaagatctttatagttctcgcatatatcccggtatatgcgagtcttaaatccgatcttcaatcctgcatcatgcgaggcataataatgtgactagactctgtcagggtcacatcatcccgttgagtctggttcaggcgaggtttacactcaagagatctcctttgtgacatctcagccctcctcgaggagagtgagtctacgtgtcacatatatgggagcctggtctcaagtttctaggtgaaaaattcacactataacattttcaaaattttaaatacctacatttaaaaaaaaatttaaatgcatatcgatttttttctaaaaaaaataattattaaaataannnnnnntatattttgaaaattattctaattcaagttgatatgaaattaaaaaatttataaattaaatataattttttatttaataaaatgtataaaaatagaaacaaatgattaagtatcttgaataaaatcaacttaaacttaattatttaattattaatttattaattctagttgaatacctaagaaaaatattctaattaaagttggtctaaaatttttaaaattaattttcaacgttaatatatttttctacttaattattttttttaaaaaaaattagttttctaaaaattactatctagaattta

SEQ ID NO: 170382 - DNA, 1161 bp, Cannabis sativa
ggggtacaggcatggtgctcatcgacgacaggtttgggtccttggctccttgcatcatcaacaaagagagaataatgaaaagaaaaagaagaacctaaggaaaagaaagaaaaaaaaaaggcaaaaacgaaaaagaaaagaaagaattggaaaaaaaaaaaaagaaaagaaaaggaaaaaaaattcggattttttattttattttatttttaaattaattatttacgtggaccaataaaattgtgtcatgtgtacattgtgtccacgtaaacaatccaacatggcagttaacaactaaatttggatggaagatgtaaattactaatggtattgtagttttgagtgttttaacgctaaaatttgggttttgggagttagttgcaagaaaaatgaactattaggggttttgccgcaattgacccaataataattatttttattttagagcattgctattgagcatcagtagtgtctagcactttctagatgtgttattttcgaattggttagcaatactccatacaaattattatattaaactatatgtgacacgatacttaattgcaccaataacgatattgacacgtaggagggtgctaagcagtaccagtgatatcctttagcatttttctttattttattagaattttagctagagtagcttctttcgaataatttaagagcatctctaatggtagcatatcatctaaacatttacattaatctaaatatataatattttattttatctctctttcacatcatttttgacactcttacttctaaaaacactctaatgtataacattcttttaaaatgctataattatgatctcatacattattatttaatatataacataatttttaattacaataatttttagcttcaattttttattaaaaaataaataacatcaatgctacaacatagcatccatacaaatctctagaattacatcattttctctctaatggtatagcatctcaatattttaccatataatatatctaccccacttaatatcctctaaagttttaccattggggatgctttaaataccatcacaaatgcaaagagatgacaatattgacgcatgatgtcatatatacgtatatagcgtacatatatatatatgagtgcactcttaatgggtattac

SEQ ID NO: 170383 - DNA, 595 bp, Cannabis sativa
caagcacaactttttcattttttaatttactttttgaactttttttttatttggttctaatttattatatggtatgaataattacttcagtagcttaattattattttttttctcattattttgatttcaaatatctatatatatatatatatagtagtgtagagatgtgtcagagaagtgttagagacatgtaactccgtcaaaatttgtaggttaatcatatattttattttgggtaaattgcggcataaatacttaatgtttccgatataatacacttaaatacctcatgtttatttttggaggcaaaaatacctaatgttgcaattctcttacaccgttactaccacttccgttaacttatcataaatatagacacgtggagggctcaaaatcaaatgcattacatttatttaatttattttaaaatttaatattcttaatatcaaaaactaaatactacttgttttaaaaaaaaatgcaatactaaattacgatagctaagtaaacgagtgcagtatatggaacatgattatcgaattgaagtgcaaatatcatgtgaaaattgttatgagaacttgttttttttttttt

SEQ ID NO: 170384 - DNA, 573 bp, Cannabis sativa
ttgaatcaggtaagtttgtgatacgtgattgtgacaaagaaagagttcttaagcatcctccatcctttagcaccatttcaagctttaattgggtctcgtgtgattgttgtatacgtcgcaatggtaaagccaacaggctacgcaaatactttactccagagaagttgtcaaattctattgtatctttcaagtctttcatgtatgatagatggcgaatcttgctattggttattagcttgcgagagtcattacaactatcataaataaaacagcattgacctgatacatacatagctaaatcatgcagaagatcatgcatagaaataccccatattgcttttctttgaaaaaatgatcttgatattaaagcattccagtagtcttccccaacatcttgaattcttttccctgtttgagcttgcaaaagaccttctgccatccacattaaaattattttatctttgtcatctttttgaaatgcataatctttggggaagatcgaaagatgagaaaaacatggtttcaaataaggaggtaagaagtggtagctcaaccataaagccggaacaattc

SEQ ID NO: 170385 - DNA, 1054 bp, Cannabis sativa
gcatatatcgtggtatatgcaagtcagatctgtttcttggtcctgcataatgtgagtcgtacaaatgcggctagacttggtcatatccacatcaccttgctgagtctggttcaggcgagctctaatctcgaggagtctctcatggacatctcatctttccttggggaaattgagtacacgtgtcctttaaacaggagtccggtctcgagtttctaggtgagaaaaatctcactataacagtaatattttgtagggtgtactcttttcgaatatatattttattatgtttatgaaacttgttttatgcttcaattttaattatttaagagcttataaatcagttttatttattaaattttatttattgtgcttgttatcatcctttctattttattttgttttcactttgtatatatgttttttaacagatggaatgagttgctgaaaccggttcagtctttggcggtaaaagataatcttctcgtaatattggtggtattttaaaaaagggtaaagtagagaaaaatatggtatgcttatacattttacatgttatgtgtttgtattattgtattaaaatatgtttttttttcttttttttaatttgaatatgtttcattattatttacattattttttgttaatttttagcaaaaattttctgattccatagatgatggttctgagcatattgttaattttataagtaaagaaaaaaagcaaaccctgttgaagtctgtacaagaagaaagcgcccgacggaactgagttgttcatctattcctactgcccctacggtaattataacatgaaaatggtttcattttgtcaattgtatattttgttataatttagttttattgttgtcaaaccggtttttatcccttacatatttatttgtacgttatatatttcattgttaaactggtgttatgtagatcaaagttgttttatttttgtgaaacttttttttttgtttttgtatttgtttccttatttttgttatttgatattttaaattatttttctgtttgtttcttgaatttatatctca

SEQ ID NO: 170386 - DNA, 1077 bp, Cannabis sativa
ttactacaataaatattataatagtttatatttaagagtttgctagaatctaaataaatttactttaaataagtaacaacaacacatcctatctaacagagaagatatcatgtttaaaaatttagtttcttataaattattttagaaattagttgatatttaaaaattcgattttctagtaaagaaactaaaaggttacttttgattttaattattttttccgacatcagtaataaaatatatacttcccatatgttaaaacgatctccttgaaaagtagatcgtggtgatataatttttgagctcaaataattatcggtgtaaccaaaaaaattgtttaaacttttcttaaaaaagacaaaaaaaaaaaagagttattttttaatattaaagaaaattatgaatatattatgtatatatatattttttaattaagcctactaattcctctcacgtagctactatgaaagtggccaataaaatgatatggaatgcttaccggagagagaaaacaatttagaaaaagaaaaagtttaagagaaataaaatgatatgaaataaaacttatcctaatttgaatgtataccgcttagcaatttaagagaattaatattgggtatatccttaaattaaataagtcatcatatatctataaataaaatataattaacgtctcctgctgtaattaatcctaaattttattggcacaactaaagtgacgatctaatatttcttatttattgttgaagtgtataaataaattcatatttatatttataattgataatttatggtttatatatagtttcaactcaaaaataagtgctacacaactaagtataaagaatataatactaatttttgtttcagatatatatacttaattgctactatttttgaaaattaaaagttatgatactctaatttttttagtaattaattacatttgtcatttaaaaataaaacatattatattttttaaaaataatgtcactcaatttattttttgttaaaaaaatattttttaaaatagattacatttaattagttttggtaggctaataataataataataa

SEQ ID NO: 170387 - DNA, 685 bp, Cannabis sativa
  modified_base (70)..(72): a, c, t, g, unknown or other
tatattgtagattgtgagctaatttttgaagttcgacatatttcggtattgatcggattttaacttgctnnnggtatatacattcactaaatttttgttattataattaattatcaatgaatgcttagtggagtttaaatatcttaaatattcatccgtagtgaagtaggttttgtgaatacatgtactgcagtcggatggttggataaattttatatttgtttgttctgtattgttatatttatttgtttgttactttaggcatttttaaaatttttgggaacgtcaaattacaatcgttatgctgccgaaatttcggtagaattaaaataaattttactaaaaaaacataaatattaaaggaaaagtacataacacaaaaaactagttaattactcgctagttgtaaaatattaggtgacataacatatttatataaacttttcaattataaatgacaaaccaaacaaatgaatggattcactttaggaaaagtcattccaattctacctacattccaatcaactaaacactaccctacttagttaattacaacttatacaacttaataacatgaaccaaactaaaataaaagttttagtaatatataaattaatatgaattaattgtgagaaacctagttagttacattgtgtaagtagtaactagttataattagttacta

SEQ ID NO: 170388 - DNA, 509 bp, Cannabis sativa
acaactctctagtcatttttcccacaaagtttatgggcatctttttcgtgttcagaaataacgaagatatacgagtgatgtcggggagcaaacaagatcctttgggagccaaacagcgccctgtgcttaggttggcgtgtaacgtggtttgcatgttttcactactcaaacataaattctaatccgcgcattcttcttattttggtaaaaaacgggatatgaaacctttcaccgcaatctctattaacttagaagtattaaaatgagtcgcgcaaagtcatccaggaagcgcccaatgcccaggttgacgtgtggcctagtgcggtggatcctactgatcagaatctaattccgtctagacaatctacaaaaacaccctttagaggcgatttttaaagcctttcagcgtcagttttggcgaaatttgctaatgacgctgatctaggtgatgttgtggggtctaaaataatcgactccataggggtacatatggcgtcagttattggcta

SEQ ID NO: 170389 - DNA, 848 bp, Cannabis sativa
cattttaagggttacctattagcatgatcggctttgagttgaaatggactataggcaaaaaaaaaaaacaaaaaaaaaattctttaatataaagataaatagtatttttaaaaattattaaaaaatatgtatattttttaaaaagcaattttttcatttgggctcctaaaataagtgagttttaggcgcgagcctaacccgcctatacccaggaccgaccctagttattagaatatttcaaatttagaataaaataaagaattgattttgtaataaatgaatattttatattcattgaatgtggacaaaattaattacgtaatattctatatatgatcatattttaatatttattacccaattcaatttcttgaattaattgtcaaagtatcctgactagagatgcacacgaggcagggaattagcggggagtgctctccctatccccatccccgttaagaattttaatcctcatccccgcttattccccatcggggacgggatggggaatcccctaatggggcggggacggggcgaggaatcccctattgtaaaaataaaatttattttataaaattaaatatttaaaattattaaattacataaaagataaaatattacatattatttactattcaatatagtaattattatacaaaaatacaacttcaaaaattgtaaaaataatattaatatactaaaaaaaaatacaaatgtatttataaaatataaaatattaataaaaaaataattaataaattaaacgggtccccgtcggggctggaagtgtcatccccgtctccgaatttgatccccgtccccgccccattccccatttagacggggaa

SEQ ID NO: 170390 - DNA, 606 bp, Cannabis sativa
tggttcgggacgactatggtaacatcttggcgttgtttgctcataaaatttccttttggtgtgtcgattatccatggtgagttaagggttacgttttgaggtttgaaagttttgatgaagttgggctatcttactgcgaaccttatctctgattgtcaacctttggtagctcctattaggtctgctacaactcctcattggaacttgttgttgttattcactactacaaaaaaaataatagttttttccgacgtttttaaataatagccttttaaagtattccggtcggtttctataatcgccacctatacgatcgtcgcaaaatataggcgacggttaaaaaccgtcgctaatgtggacttctcgacggttttgtataggagacgattttaaaccgtcgggaatgtaaaaaaaaaagagaaaaaaatacaaatttttttgccattaatggtagaaaatctgtattttctcctttttttttcctgcaatagttttataattttatttaaattaaaataaaataactaattaattttattacaataacaactaactttaaaatacattgaatgtatacaataacaaaataaatatatataataaata

SEQ ID NO: 170391 - DNA, 529 bp, Cannabis sativa
tatgtcgagatctacttccatctcccgtttgtctactcaacctattatgcatgtgggatcgcaatccccctgtacttgagcttgcttcatctcgcgttggtcttcttctttggaagagattagacacacgtcccctacccaagaaagtgtgcatgttttccctattcgcgcgagatgggtgttgcggatgtttcggagggagatcactggacctaagttagtttccaaggtttctctcattatcacgaggaaatccatggtcccctggtcaaggttgcctcacctcttcattcatgcaagatgattatggcatgtcaattcgttcattcccttggttcgcaaatctatgggaattcgtggaacatctcatcgatgttcttaattccttgtactatttgggttaggttgattatccattgggacatcccttgtatccccaagttgctcctcttgggtatttgggggattcccttggttattctcttgtctcatagtcttggaacccgaggtcttcctcgtggtctcctta

SEQ ID NO: 170392 - DNA, 640 bp, Cannabis sativa
  modified_base (420)..(445): a, c, t, g, unknown or other
atttttagaaaaagttattttgatgaaaagactataataaactattttttactaaaaatttatttaattatttattatatattacaaaaaataaatatgtttttttaaggaaaaaatatttaaaataaataatatttaaatttctaactttttattttgttttaaaaaatattttatatttataattatatttttattattaacaaacaatatcaacctaaatttcttataaactacaatttttttcttttacaagtgataaaaatataatttaaaaatattaaaaattatttttatcaaatgcatataaatttatattatgaaaaaaaaaattaaaaaatatatagtaataaaaatttaatataatatatttatatatttgtgattattatgaattagattaaaatagtatcattattnnnnnnnnnnnnnnnnnnnnnnnnnnactttaaaatttataatttaccacactcagctcagcttttttcacaattctattacagctatttttccccacagcacagctacaacttcttttccctacaacacagctacaactattttttcacacagcacagctgtaatcctgggtagtgaaaaacaatctttagtgttgtcctcaaaagtgagtgttttaata

SEQ ID NO: 170393 - DNA, 1267 bp, Cannabis sativa
ctttgccagtaagatacatcccttaaaacccgtcatccttttttcgtataatttgatttcatttcgattcaatttattctttgatttgagattttgctgttctgatttgattttagcttttcttctttggttgagtatagtgtttgtttgggctatttctttagcagtagattgatcttgtgtaatgtacaaaatttgtacagtgtaaaatcatggcaaattgacttttaagtataatattagtactttatgatattttctcttgtataataataaggaacaactctaagagggaactttttattgggtttttattttttttatttttacacttcaaagcagttttttttacggaagtttacatagcaatccacataacaattaacaaaatagtttaaatcgcaatcaaaattcacatagtaactcacatagaaattacggtaagtttttttaaaaaaatatattaagtatattttttgagagattcttaatatttattcaaaaagaaaaaaaaaaaaaaaaattgttacttataatgagaaagtgaaaattaacacgtggggatggattttttctcatggaaattttaataaattttattaatagtaattagttaaaataatatcttgtaatttaattgggaaattttttttattaaagacacgattaggattatagttaactttaggaaaacttatattcaattttattcactattcagaatttaacttcatagcttgagtgcttaactattatctaagtacgtaattgtactactaacaatcttttacttgttattctcactattctggggtattttttttattatcgttatttgaaaattttataattttgatataattatagataagatttttataaaggatatttgcggtgaaactttcttaatatttgtaattgttacacatatgactttaaaaaaaaaatgacggtaaaagtatcttattattttattgtaggtgtacctttaagtggcaattaagttcgttaaattcaaaaattcacctcaaactgtgtaaatcgttgtaaatattttcttccaattatattttgctcattttattttaaaaaaaaatacaatttgtttatgtgattataaattacagtataattgcttattaattttaaactacttaaaatttagtttattgatattaaaaatacaaatagtaactctaaataccattttggaccctctgttttgcaaaaattaacaattggaccctatgttttgttaaatgacaaa

SEQ ID NO: 170394 - DNA, 823 bp, Cannabis sativa
accattgtctagggctggcaattggctaggcacagggatgataacatgatctctaactctttcagtgacattcttccttgaataaaccacaggttcaaggttgttacgatttttaatcaatcgtagcatttcttaatctgacagaccaaattcagatttaacaattataggattaatcttttaatatcagtgtcaaaagtcttaggtaaaggttcaaccgtctcccaaaaatttgattccactaaattctccccctgaattaaattttgcgaaaaataagggatattttccacaaacaacacatctatagttatataaacacgtttagtaataggattaaagcatttatatcctttttttattaggaggatacccaaaaaaaaaaaatacatttttcagctctaggatctaacttagacctagaccttttaggaatgtggacataagcagtacaaccaaaaattttcaaaggtaaatcagagtgaatcctagaatctggaaagaattttttgaaactttgcaatggtgtaatgtaattcaaaattttcgtaggcatcctatttatcaaataagatgcagtaagaatggcatcaccccataaatatttaggaattttcatataaaacatcatagcacgagctgtttttaacaaatgtctattttttcgttcagctacaccattctgttccactgtatttggacaagtagactgatgcaaaatacctttttttgtcaaaaaatttccaagaattttattatagggctgtacatcggtcggtttagtcggtttatactatatattttccaacccaacataaagatc

SEQ ID NO: 170395 - DNA, 948 bp, Cannabis sativa
  modified_base (413)..(413): a, c, t, g, unknown or other
cttatcaaatcccccacacttgactcttgatcgtcctcgagtaagttaatgataaaatgaatgatgcttcaactaatcggtctttatgaaaaataattttagttcaaaaattgtagatctacttataattccaaaaaaatccaaactcttcaatcattagaatttaaactcaacataattacttttcaaactcaatttgtgtgtgtttgtgagttcaatcaactcatcatattactaacattcaaatcaattcatgcaggccaacaatcaatgtttatctcaaaataaatgtgtatttcaatgaaaatctactccataagcttaattatcaaaccattctctactaatgtaattacatacaatctaaagatcaatagaactttataggcttataatgtaaggctagggtgaanggtagataaagaaggttaatttgggctcaaattacaccatagcatacatctacaacattctctcaaataatttccatttgtattccccaatcactctcctcaacaatttaatcttgtatttttttaacataaaacttattattcccccacacttaacttgttgtaagcatttatttattttttgacatattttctcatttttttttttttagttttttttatgaaaaacttacaacgtacaagcatttattttaagggaatcgtagttattttcttcatcattactcatacataaccatgaatatttcttcctcaagaaaactcttacagctttacaaatataaaaacatcaatatactatggtgtgtgtttacctcacttttaaccaacaacagtgagtctaattttataagtgacaagtagtttaatatgatagaaatatagtaaagcaaataaagacacaagaattttatagaggttcagccacgagcagttcggtaatagcctaatcatcgttatttgtattgacttaaga

SEQ ID NO: 170396 - DNA, 583 bp, Cannabis sativa
atgagttttctgatgttaaatgtttatggtgattactgggcagacccttgtagttggggtttaatggaaaaaaaagtgttttgggtatatgattttcacgatatgtacttgattaatcttcacttaacctaataaaacagcttctaattaaagttaaaagaaaagaaaaaacttgagcttaggctatgattttcacgtttgtaataaaatgataaattctagaagaagcaacgtaagagtcacaggaagccaactcgggaacatccggttcggatttatgtctgaattcttgtattaaactaactcatatccaaccagatacaatggggagaagaagcaagtgccaaaattgacaaaaaaagaaaagaagggctcaaacaaagtatatgaaaggaaaaaaaaatgatgactcatccttgagactcagcaccatttgttgcatccataggtgtagcttctgctgcagactcatcagctttctcccccttcttgcctgcaatggtgaaaatggtcaggtttaagggatatcactataaagattttgaattttgttcttataagatgaaacaagattagcacattc

SEQ ID NO: 170397 - DNA, 556 bp, Cannabis sativa
ttaattttgttattttataattaaattgtatttttgtaaagtttaactttgttataatataattaaattcatgtttatttcaaatttaatctttgttattttccttattcataattatttcaaaaaaaaattgatatatattaattaaaataaaaagtaatattcaattttaattaaataaaaaaaaaatcagtaagacttatgacttcggtcattaattaaaaagtgaagtctattattctacctttaacttcagttattatgtaaaaaccgaagtcataagctacttacaacttcggttcttacataataaccgaagttgtaagtccctcttacgatttcgattttttaaaatatacgacatcgcctcaaataacttcggttacaactatgcataaaaaccaaagttaaactgagataaaaaccgaagttaaatgtctttttctagtagtgcagaccattcatttcagcttaaatacaaaatcagtctcattagaagatgaaagagtaaaataagactaaactaataacaactttctttcccaacggtaccatc

SEQ ID NO: 170398 - DNA, 706 bp, Cannabis sativa
tattaaaaacttactattgtgtcagctatttctttatcagactctttcgcatactctccttttttatccttgcgagcttccttccataatacagctctttctatttcttcctcagtgtcaagttgttgttgctatttacatcttaataatgttagcactattcgtctattaaaaagtttagcataatagttaatcaaaaaaattagtatagtataattcttggtgaactcacaagctcatattctaaattagggtaacctttacgcccaaggcgatgaggattctcatttgcagcacgtctagcttgttgtaaccttctaagctcctgaaaaaaatagtaaacatgttagttgtttccttcttaaaaaaatctatatgtatttgcatcataatatctgtattgtgtacactcttctcacctgaaattctggtgtagttcgagtcgccacaaaattgtgccaaactggttgagtaatgccaggatatatggcaggtggaaacattaatgtgtgaggattctttgccctataagcaggatcttccatgtacttcattatgaagttattagtcaacctagacttaaaccctcgccacttgttaccaatatttgataatgtttggtgtcgcacacaatcatctaagtcaaaagtagtcttccaaaagcaaaatattgaagtagatattatttgaacaatcaaaaaacaat

SEQ ID NO: 170399 - DNA, 670 bp, Cannabis sativa
  modified_base (619)..(619): a, c, t, g, unknown or other
aaagccaaccgaaattctgattcctacaggcctctctgaactgaaattccggttcagtgcaggaatgactgaaaatttcataattcgaccaaatcaaccccaattcaatccaaacttttcatacctgttctatacaccctagaaaacatattcaatgcaacaaaacatccacccatacacagaatcaaaacttgccattgatgagtcaagcttgagttcaaaaactcaaagcttgctcatccaactaactagctatcaaaacctgcttatatcaccatataaaatcataatttaactactgaaaacataatccaccaacaaccacaaggacaacaaacaaaacatcaaaaaacatgcatgaatccatttctttaaaatcaagaaactaaagagaggttgcttaagcatttacctagagtttgagaacaccaaaaccttgagaaaacagcttgaaatccacagaaaaactcccaaccctagctgctctaagggggccgaaagagagagtgagattgagagagaaagtgtgattttttttctaactttgctaattttgaataaaatgaataaattaagttttattaacttaatatcagctaaagataaccataaaaatctnattataaaatataactaagtccactagaggacaaaatacatatggggcaaa

SEQ ID NO: 170400 - DNA, 525 bp, Cannabis sativa
ttcggtaacggttgaatttggtagaatggataagcagaataactataactgtttaatcgccaaacacataatttccattactccctacgctgtagaatgtgtagtgttaattttatttgccgcgtagttgattagttttttgagaagtgttaattataatttttacatttaaaattatatggcggaatattttttaatttttttatagtagtattattatagtattatccatgtaaatttttgaaaaattctgaatacttgtttacaatgctgaaaatagagttcctgatattccagtataccatgcgcgtttaaaaaacttcaaacgtattttcggcactataaactattcaaaaatttacaggaatgatgttgtaagcataacaaacaccgtcatgaaaaaaaatttgaaaaaaaaatattctgacatgtatttcaaacacagaaattcactacaacagttttgcacattaccggcagaggcatccaccggtattaataggccagaccgccggtaataattaa

SEQ ID NO: 170401 - DNA, 689 bp, Cannabis sativa
attgagcgtagttataacttataccgttgtgaccttattattcattgttagatgaagattgttctactctctgttgatccgtattatagtttttttctacaaattatgtatctcatataagttagaaatcgtattaggaccattagaagaaaaaagaatggtataatatgagaaaagctaatacacccttatttaggaacaggagtgactgtaactatagagttcatatcttgtgtggtgttatggatgggatctttaggtcccattggcttcctcttcgtagactagatgcatcttctaatgcacaatatataagcatgttgaaggagagcatttggagtagcgttaacttcttaaacaaagagattttgttaactcaaccccgcataagacagcaatggatgaacccaagagaatagaacaatgagaattgctaagttggatttacttaaccatcattactcacctgcatagtttgactacagaatttctcatgatatttcttggagtatttggtctacctagtactcacatttttgctcattgttcttacaagaaaatatcctatcagcaaacaactttagtatgattttgattggctcttaggactctatcatgtcagaaagtaaatagattgaatgaaattgctagaattctttattaatcttgctgaaatggaatacaaattt

SEQ ID NO: 170402 - DNA, 929 bp, Cannabis sativa
ggttgaatttgctaaataaagatataaaactattgggtattaagggtttttcttgaaatcacaatgggtcttccattgtctatacaattgttttgctcgacaattgagagtgacattgtgtgtgtgtatataaatatagatatttatcatttgtaattgcctcaccactaaatcaaatttataagcccataactacagtatttgttttatcaccaaaaaatgactaagaccaaatccatttccaaaaacctattccctaccactaactcttgttacggctcagctaagaattacagcccggacgcccacgtatgtccaatgaacttagggactccttcatcaatttgcaagaaatctcctccatcttcctctcggtcaaggagataccggtctcaggcgacagaaccttgctccaattgtgtcatgttgcagagcactcttaactcagtgaatgcttcaaaaaacaaatgtgctgacctgttagatgaggctcgaaagaggattatcgagcttgcttcgaccatgtaccaacaaaacaagctccagggtcaaggaagtgaccaagtgaagacggtggaagcatttttggaagctgccaatgactacctcagaggtgaagcgagagtccctgaggtgattcatctcgattgaggtcttgggaactcgccttttgtgcaccattcactggccccatcctctccaaacctatgaatggtcttacatttctccaaattatgttatgatattttgttgtgttttcttattatggtatgctttatattatttttctaagagtatgttgtgttgtagtttgtgttcacgtgtttattagtaactttagttagtattgagtcatgtcctccacagtactcttaaaagcatgcatgcatgcatggtgttaaagggtattctctatccctagtatcatg

SEQ ID NO: 170403 - DNA, 1378 bp, Cannabis sativa
gtgcttataattctcatgcagaagctttagcctgtttggcctcaataagagaatcagaattactcgatgtaatacctgttgatgtattagcccatctgactatcaatcgcgaggagatgatgcaagtcgatgcaactgagcaaatcacttggatgactccaattgttacatatttaacaatgagaaaactccctgatgacaaagtcgaggctgaaaatttgcaatagcgagctgctcgatacgtcatttatgacaacaagctatatcataggagttttagccaactgttgcttaaatgcatcgatggggatgatgcgattatatatgttgacctcgcttttagccaacgataatgagtcttaattgtaagcgacaagtgatataatatagatgtaatatagtaaaataaataaagacacaaagtttttaaagaggttcggccccgaggagttcggtaatagcctactccccttgatttgtattgacttaagaacaaagaatgcagtgattcttctcttagagttcttacaatgatatctctgagtatatactcttagataagttttttcgaccctttgcctagtgagaatagatcactatttatagggcataagcttgagggaaagtttcccttctgtttacaatgtttataattggtaagactacacatcaaatacagaatacactgattaagagatttgaacatcttgccatatctctgtgatataatcccaaagttatagggattgcttctgtgattcacgatgcaagtgttaaagtttctaagtgttggcatgctgttcggaccgtctactgctcgaccaggaaggttttgtccatgcagatatgtgtggtgttctattcggcatatctctttcgagagaaaacgtgaagtcgattccacgtgtcaccagtacgtgatgccacgtcagaatgccaaaattgggataacatttacccccaagtttgtacgagacttccgaagttacgtgtagacttcatccgaggtgcctttgcatttgaatgggtgacacatgttaggtgcgtctattcgtgatttgatgtgaggctgaccaagcgtctcttcagttttcgtctaattaatgctctgacttaattagtacctcaaaccccagtttttctcctcacgctttgacggttacacttgattaattttgatttcctaatatttgcttttgggggggaaattgaagcgtctgaggcatctcgaaatgattatttcttttcacctgattgcctataaataagactggattttcttcataattttactttactgacttctctactaaacaaactcagagcaaaaaaggatttttactccaagtctgttgtgagatttccaccaaaggcattc

SEQ ID NO: 170404 - DNA, 1107 bp, Cannabis sativa
cactgatattatgagggacagttggctctggaggaggctgagttgaatttgctggtgttgacacaccagaaccctgcaaaggcacaagataacttgccaagtttggcacaattggattagagggtgtaattctttcattaatgatattggatgagggagtgtgtgttgtaggaatgatagcagatgtaaagaattcatcataggcataggaatcagtgtcagatggagaaatagcagaaaaagggaatgatatttcttcaaagataacatcccttgaaatatagacacgacccgaagcatctaagcacttataacccttatgattcaaactgtatcctatgaatgtacatggggaagacctgaactggagtttgtgtttattgtatgggcgaatgttggttgggaaaacatttgcagccaaaggtttgtttttagagttgtgtaatcaggtgtaatagaaaaaagtttttctattggagagacattctgtaggacaggagttggtagtctattggagagatacacagctgttcgaaaagcctcatcccaatattttaatggcatagaagcatgagcaagtaatgttaagccattttcaacaacatgcctatgttttctctctactagaccattttgttcatgggttgtgggacaagggtgcctatgcaagatgccaaattgtttaagtagatctgtgaatggtcgaaattcacccccccaatctgtttgtagacatttaatttgttttcccaattgcaattcagattcggctttaaattgagaaaatgtctttaaggcatcagatttattcttaagtaagtatagccaagtgaatctggaaaaggcatcaacaaattgaatatagtatcgataaccattgacagatgtagtttttgcaggaccccataagtcagcaacaacaagttgcaggggttcagaatagatggtgagagacgatttgggaaatggcaatttatgtattttgcctaagcaacaagcagtacatacagagaaatggtttttattactgatctttacattacaagaatcaagaacagatttgacaatcctttgagaaggatgtccaagcctattatgccacaaatc

SEQ ID NO: 170405 - DNA, 508 bp, Cannabis sativa
aaaaatgatacttattgtagtgtaaaattttgctcatattatattatctgtcaagttttagcaatgtgtatttagaaccacattatacactactattggagctaaattttatgaatataggctaaaaaatacatatacactatatttatagtacttcaatagagatactctgagtatggtattatttatttcaggtctaacctacacgaatttatttttaggaattttctcaaatggtctcatactaatagaagaggtagatacagggtcggtaggctaggtcacgtctaggacgcactcagcctagggaaaaaaaaaaaaaaaaaggttcttttaaaatatacatatttctttaataattttaaaaaaataccatatgttggtaccaaaagtggtatgttttacatttatcaactcgcaaacgcacgaatctttactgcagtgtagagattgtgaagaataaggtcgaacccatagaaattgcgtgggattgaagaaaatacttttt

SEQ ID NO: 170406 - DNA, 589 bp, Cannabis sativa
aaaataaccgatccaatccgcattcttgaaaatttgattgatttgaatttgagctattgtgcggattagattggatccaaaaaataaaatccgcacttagtgcatatcgaatgcactatgagcaaaataatgcggattggattagataaacactcctatcaatatgtgtattgtgctttataagctagtctccaagattatttgcatgagatttaaacttgcacttgtcatttcaaaaacacaaagtgccctcttgcaaaatagattgatataatatatgatggattttgaacttgtccatggtataaagaacaagacttctgctcaaaaagggattgtagtgcttaagttaggagtaaagcattttatcatattgatgttgggctttatgtcttaaataaaactttatttcaatgtaattttttctattcaattatcaatatagaaacagatttattttcattacttatttagtttgttgtttagttcatgtgatcatttatttgtttatttgatttgtaaatttatccaaatccttatcacattgatattcttgtttattgtattgtcagcacagtgaaaaataatc

SEQ ID NO: 170407 - DNA, 503 bp, Cannabis sativa
tgcaaaaacacggtttttcatgtgtcatggattcgaatccatggtattaggtaatatattatacaccctaagcaactaagatatgaatatttattgttaaattaaatgtttaacaaacggggcagttcaaatgacgaaaacacccctccatattctcttcctatgagttaaccatgattagacaaatagagttgtgttttggagtttccgtgggtttgtaattgtattattgtattgtatatgtcatatcatttgggtatttatggggattaattaatgaatgtactgtatatgtcgcaaatgatccaaactacaacaacaatactcctcagattattggtttaaactcagatcagatatgactgacattcatattaatcttaattacattttgaatctccaatgcccatttcaattgtttttcttttacttgcttggaatggagtaataaaattagtaagtggggtaaatatgttaactaattaacactcactattttcata

SEQ ID NO: 170408 - DNA, 779 bp, Cannabis sativa
agttgatccattagtgcaaacacaattagaacaacttaagagccttgtaaaaggcttgaccgaccaaaaaaatcatagatcttgaacttgattgggtaagaggatgaccattctcattagaaaacaatgctctcgacctaccgctcaagttcaaaataccagcagggaagatgtatacaagaaaagaagatcgtttgtctcaccttaaatactttgagatgcaaatatacttgcaaggggtgagaggaaatgtacggtgtaggatcttcccaactactttggcaaaggccgctcagcaatggtaattcaaattagctccggggaagttcagctcatggatttctttctcatctgagtttcatgcacactttttctcttctcgtcagcttcctcttacttagaagacttggtagaagtgaagcaaataccaagagaacctttaagagcttactgttgaaattaaattcatctaagcctttcctacccataagtcagttacatgaaaaacaacttgcactatcacaacaaccaaaatacagttacaaacaaagatcctaactgtaattaactaaaataacagaacaacagaagtattataactgcctaatcatcacccaaggccacttactcttctcctattgcagcagtataaatatccactcccagtttcgatttcggcctagatctgaagactagagagagagagagtgaaccctgtaattcctctgagttcaaagataagaactcagagttgagaaaaagagagaaagagtgagaat

SEQ ID NO: 170409 - DNA, 600 bp, Cannabis sativa
  modified_base (526)..(536): a, c, t, g, unknown or other
tccactcattgttataagttctacatttggctggtttccttataccgttgcaattgcttagactgattgcaatttcaatactgcaatattcactctgctgtgctgaagtgataagttttcttttttctttttaaagttagaatcttcatcatcattttagaacagaaataatagctgaaattcttgagctttcttgttttttaaatattatagaatggtaagctttcgagaggcttgcaatctcttatttccaataacccgagagaaatggagctctccacaatgagactaatctctaatcattcctaccccaaatgaaagttattcttatctatatagtctttggtacaagaattatcccagtccactaacctagaattacagtagtacccttcataaaaaaactctcctataataaagccttgaggctttttcttgaagtaagtttatcatgaagttcttctaactttctttgaacttcaagaactaacaaaaatgggaaagaagcagttatgtgctttgaccnnnnnnnnnnntggaataaactgtgacaatttacatccttttattcagaacgaagtgcaaaagtctatacaaatt

SEQ ID NO: 170410 - DNA, 717 bp, Cannabis sativa
tctctctctctctctcttgttctttttaagaaaaaactgatgaattgaggttttcatgataaaaaacgtagccatagtttcatggttgtaactttcttaaatttgtcacatttaaaataataaataactaactaatatgatttggacaagcaggaaagtcaactgtcaccatatgggatatcagactcccggcaccagtgtacacaagacacaaaaggatcgccctattcaaattaaatcttcggctggacttacttctaatgttgaagccaatcaaactagtgttggtcttccagctaatgtcacacatgatttaaggaatagtttacctcctggattcggtccaagaactggtgttcgcagtaaattgtctagtgtaagtgaccaacatattctttgttattgcttcttttgtgtatgttcttccatgtttttccaatacaattactggagtgcaaggttacccatatttagtcatggccttatgtatatgtcagataggttccggaagtaatcaatgttttaaaatgcaggcccatgtggaaaaatcagctgaagtttatgtctagctttatagcattttaaatacttggacaatacatttttacatttctccactgatgctgtagcaatttgggaatgatacttctaatctgatattattgatgaaaaatgtagcctttatataggctgattacatagtagaattaggcaaca

SEQ ID NO: 170411 - DNA, 1273 bp, Cannabis sativa
tttccaggcttccacaaccccgccggagtatgtcgcatggcatcggaatccaccgatcgagcgttcaagaacctgcctactaaacagaacctatcgtcaaagatcaccccctcctccgagtcaagagcatcaatctccactccctcctcttccccttcgatatcaatgcatgcatatctctcttccacttcctctagagatctgctactagaagccattgcatagaccaagcaaaaatcaacgttgtatggcaaataagaacctagaaagtgagaaaaatacaaaaaagacaaaaagaactttagagagaaagaccaaaacacatgccagctggcaagacattcacattgtattgtattttgttatttttgttaaatagccaaatataataaattagataataaatattataaaaatatttttattttaggtcaatttctttttaaggaaattattataattagaatgaatatatatatataatacaaaaaatcaatataacatagcaattgttataaaataatgggggattttcaatattatacttaaaattagttttatttataaaaatacctttaagaaaattatttgcacaaataccgatgtgccacgtcagcatacttaccgaaattcaaaataattaccgaaaatggaaaaaactagaaaaatctcggtttccagaaatttttgctttttgggagttttgaaaaaagcaaccaaatagttgcttttgatttgaataagatatcaattggttacttttctagtaaaaaaaatatttcaaaattttacacatatataaataataaaataaccatttaatatgtgagaaaaatatattaatcttttggttgcttttgatgtaaataatatatcaattagttactttttattaaagaaaaaattattttaagataattttttatctcatacactttagggttacttattttgattagttaactttgaaattatgattttattttttaattttcaggctattttatattattttattgtttaagatccattgatgttacttttttttaacaattttaaactatattttagaatatgaaaaacatatattttttttctgtataaaaaataataactaagataaaaaataaaagtaacttttttatataatttttaaaaggaagtaactaaattagaactacacatcatacatatatgatgatgtaaatatctaaaatatatacagagaacaaaaacacaacatcatatgatcaattattatatgaaaccctaa

SEQ ID NO: 170412 - DNA, 553 bp, Cannabis sativa
ctagtagaatctctcaatcccatactatttttatgtcatacaattctatataagtctgattttagattacctctctcaagtgtaaaacttaaaatcttaatactaattaatggtgatcaagcattaacaagatgataattatataacacaaaaattacataaacgaataacaataacaaacatgggaataatctaaaaattttgattcataatctaaaatagtttctttcacattctagaaaagagtgtttacttcataatgacaaatataataacatcaataaccatgttcataattaaacaactagacaaaagaataaataagaagaagaagcaaataactctaatgatgattggtgatgattacttggaatctcttctcttttgctcttcaatatgtttttctaatctgtaaaagtatttttgtctctcattcgtcgttggaagtcaaattacacaatttttactgcagaggggttatttgatcatactccggcaatattgacggttcatccttcgcctccaagtggtaggaaaccgtttaaatattttc

SEQ ID NO: 170413 - DNA, 569 bp, Cannabis sativa
actaatagagcaaaaatttatacagcagttttgataaaaactattgaaacaatcgaaacagtaaataaaataaaaaaaatggtatatggctaatctatatatctatatatctatatatataaaggagaagtatgaggcggtgacgcggctgcctaaaatctatctatatatataaaggagaaatatgaggcagtgatgtggcactctaaaatcactctaaatacctctatctattatctccttaattctctcattttttttaattttttaattaagtttatagatataaataataaatattctattttatatatatattaaaaaaaacttaaatatgtaaccttatattttctccaattttaaaaacatatatataatcctaaatatatacggctaccctgctaccttgctaagtgtcatttttcttctataaatttgattgatattttgaagttttttattctttcagtttcgcaatagtcataaatattgtacttttaactgttaccttgctaccctgctaaatattgtacttttagggcacaaaactcaacaaactcccacttgca

SEQ ID NO: 170414 - DNA, 784 bp, Cannabis sativa
gaactttgactagaaatggtaaacactattttatcacttttattgatgattattctgactttacctatgtgtatttaatgaaaaataaaagtgaagcttttgatatgtttaagatagttgtggctaaaattgaaaatcaacttagtagaaagatcaagaagtttcgtagcgatagagacactgaatatgattccactgcttttgttgaattttataactcacatggaatcatagacgataagacaacaccatattcacttgaaatgaatggaaaagctgaaagaaaaaatagaactcttactgaatctgttgttgctattttattgaatttgggtgctgcttgcattggtgggcagaaattttatttattttgtgttatgtgcttaatagagttcctaaatctaaaagaaaaattgttccatgtgaaagtttgaaaaataaactacccaatatcttatattttaaaacttggggttgtttgacatattttagaattcctgatcttaagagaattaaattggctagtaaagcatatgaatgtgtttttattggatatgctgttaataagcatatagattttatgatttaaatgcacatactattttggaatctaatgatgctaatttttacgaacattgatttctatttaaatagagaaatagtgggggtgtgcatcatctagtaacatgtttgctattagggataatgagcatgaagagggtaaagaaactgaacctagaagaagtaaaagagctagagtagctaaagattttggttctaattt

SEQ ID NO: 170415 - DNA, 598 bp, Cannabis sativa
ccctaagtgaagcctataaataaaaagagaatagagctttatctgatgattttctaaactagaaatccctaaaaagatgatttcttcttctctttaattttcgaaaattcagaggctatttcctcttggatttcttcacaaaattttgtgctccttggtgttgagaacttgcccacacatttcaaagcaatactcgacacagtgaggaagactagggagtccaattgtcatcagaaggagaatatagttttagatcttgattatactttgcagcagaattgtttaagggttagagatcagattagaaggagccatattatttcgctaccataaatataaagttttctatacctttacgtgtttaattcattattttaagaaagtcatatttaggatgttatattatagaattataatccaacatacatgttagtaaatctagatcttcgtaaaataatttccaacaattggcttcaaagccacagtattaatttattttcatgaaatatagatttcaaacaatttttcaatgatttggatgtgttcatgatggtttatgtgagtttgatgattaattgtgttattacaaaattttcta

SEQ ID NO: 170416 - DNA, 679 bp, Cannabis sativa
atgtaatagtgttgatgttaatttgtttattatttaggatttttgactattacaatgcttcaaaaaagaaaactccaagagcagctggtattatatggaaaattataaaagtgagtagtctttatctctcaaaaattatataataaattttgtatttcacaaatatttaatgattttacaacaaaatattacttttaattatttattttaagagattcttacacatctatataaatgtgcagtgtcctcgacaacccaaacactttgaatgtggatattatgttatgaaatacatgcgggatttatgcatggattcaagacctctcaattggttaaatactaatgtatatgaaatatacatctttttcaatatatatatataaataatatttaagttcactaatatttattaatatttttttttcagtgcaacaatagaatggagaattattacacaaatgaagaaattgatgaaattcgaatagagtgggccgatgcattcatagaattgatttaatattttattatgtttttattcatttttattgaacaaatgaatcatactatattcattaattatttaatttatacattatcattttattttatttgtttatattaatattttagtttatcttttttctcttctaaattatttttcaacactctttagaagttt

SEQ ID NO: 170417 - DNA, 3318 bp, Cannabis sativa
  modified_base (2820)..(2841): a, c, t, g, unknown or other
  modified_base (3256)..(3261): a, c, t, g, unknown or other
gcaacatgagacattatgttggcacttttaattcataccgagttcatggacctaacttgggcaagcaagccatcagacacaactcggtatgatctcaaaaattgtacctcacttgatgaagccagctcgtgattgtgtattgtgctaaactctttgcattttcaagtgttacagggttttgagagtaaaatacacaatgctgcctgacatccggttctagtgagatcatgaggtttttttttttttttttctttcgttgtccggtgagttgatttttttcaaaccctcggaacaacaaacccacctgcgcattataatgaccccatgatcacgtcgtacatcatcttttcttgtgccaaaacctatctgtttcacgtacatttggtagaatgctttccctttttccagtttgtcgagactcttgcctagcacgtcaaatatttcaatctcatgcactggttttgtgatgtttatctctgctgttatgctttcccattcgtaagtttgttcctcattcatattctgtgatgggaacgccgcatccatattgtatctgttatgacaattaataatttaaataacacattccaagtgtcgaaacttgaaattaaatacaagcataattctattctaaaaagtgacaatgaagaagaaaattaactctaaaaataacataaataataggctaaaaatatcctaacaacgttacatatagaatcatgactttcctaacaaatcgaatcttagttctctttaagtgttaattctagattagaaagttgtgcacaaattcagatagaatctaagttatacttttgctagtgaattaatggtactaaaggataaagaagttactaaaagggtaaaatggtaatttgaccaaaactaattacgaaccaagacatggaggctaatcactggaattgattatatcaatagacactgcagtaaaacccagtaaatataattttataattactaagactttaattctatatttatagtggagtaatcatgtaattattaaacaaaacttattatttgagcttagaatcataggtttatggtccccaaattaccaccttgaagcactgctaagggagagataaagagtagtataatatcattcacaaaactctattttgaactggcaaaacagaaattatttatttttgtaataaataaataatttttcaaattaactaaatagggaaaagacaaaaattattacgacaaaatttttcaaaacatttgttgagacaaaagttgtcagtttaaaagacaccatctttgtcctaaacaagacatggtaggcgcctgtccctatggaatttggcttattgggctaattacttaatttaattagataaatattaaaatttaaaaagtggttaaagatatttcaaaattgttgagatattctctcaaatggtcgagaggttccctcataaatatcattaaccgaattcggttatagatatttatttattcaaataattaaatatgatttaattaatgagatttaactactacaaataaaagcccgatttaagaaatcagtaaccatctggaaaggcaggtttgttgatgcataactcactttacactgctattttcgaaatacctaaaggagaaaaggaaactattttctctctcaagtgttcttgctcatgtattgagaattcaactagcacaatgcactttatcctaatattccacactattccttgtgtgtggtggatcgatttggaagacattggtgtaacttcaattgcatcatcctcatcatctaaattaaggatacaacatacgagaatactctgatagtcatcaagaggtatatgttcttaatttattattttttattttgatttaatgtacacacatctggagatccattggggtacggtacaatgataattagataataccaaagctcttctgttgcgtacctgatttagtaccataaaacctgttatacccaaaatttggctaccatctcagtggagaacacgtgtcaagataaagggaatatggatcgatgcaatcgctttatatggaataactcattaattgcatgagtgtcaaggtatatttgtaacctgcagactgtaaggtcttatgcaagaaatcaatataaaaactgctgcttagtatattagcgagaaaccatatgttactgaatgcgaatagcgagggatcaaggaaagtacatgtaggaagacgaaagcgacatatatcaattgcgaaagcccttagtgtacaaactaagtgttatagtcggatcggctcgagaccaagtaagtgaggttcctttctcgctagggaaaggcttcttataacttcatctcgttagcgtcagcgaggcttgcgaccctggcaagtcagaagctaacattcaaatgagcttcgaagaactctttgtaaataagaaccgcgattgacacaagacatgcatcgtcaacctcggaaggaaaaatggccccaactcgctattgagatcacttgaaccaagcttctgtcgggaaacctccagatacaataattaaagacgtgtttaatccacgatcattttgacccaataaaagcggaaaaatcacagctatatgattttcaaatcataacagcatttacattacgtgatatgtaatcaaatcccatgattttagggatgattattgtaaacatattacggtcaactttgtaattaacagcccactatgtaattataaatagtggcaagtaagatgaaaagggggacgaaaaaactcatacaaaagaggccctaaaaaatagtcaaaaatctgaataagattgacnnnnnnnnnnnnnnnnnnnnnnactgcaaaaccacgtaaaaaactctgtgttcatatttgtatttttacagcttttattttttctgtgtgaaatcactactgtgaggctcaaatttggttaacgaaaatctgcattaacagtttggtcctttcattgagagcctttgtgaaaaagctgagaaaaaccctcccttcttatgaagaaaaaccacctcctttatggcttcaaatccagaaaacattaacacctcacatgaggaaactaatcatcgttctgggaaagagcccatgggctccagaaggtctactaacccgcagtccaaacggaccacccgttcaaggaggactaaacctgagggtggccctagtacacggaccacagattcctagagagcccaaacccgacgttggtcctagttgttgggttttatgccctnnnnnnaactccatttcaatgtaatctattttatttaacattaataaagaaacagaagtattt

SEQ ID NO: 170418 - DNA, 864 bp, Cannabis sativa
  modified_base (425)..(431): a, c, t, g, unknown or other
gaaatagctcggatttaatgggtgggttggctttatttttaactcacccaagattggagaaattattaggggtgggcgtcaattggtttatattacattttaggaagtttttttatttttatatttcaaaatatatttttttttttatttttacggaattccatacaaaaatacctatagcaaccggagcaacctaaattacaaccaaaatctacatagcaacctacatagaaaccactgaagaaattaccagagcaactcaaaccgtaaattaaaaaaaaaaaagttaaaagatagtatgtgaggtaatttctcattaaaataagggctgagatgtaaaatgaccctaaatttgtaaactgggttagtaaatgtccatttttaaaatattagtaaaatgaccaaatataataaattagctaatnnnnnnnataaaaatacatttactacatattaattaatatatataataattaaattaagtgatataattattttagtattgcatattaatatattgtaacaaaagtgaataaacatattagattattaaatatatacaacaacatttaatatatcgtatcattgaaaattaatgtaccgtagaaataaaattatataccacaaaaaaattataacaatactaaattgtactcaaaatatctttatcatgctaacaaaattatataccactattaaaatttgtatatatactaaaaaatttatatataatcatttatagaataaaataaaaattaaatattatcttaaataaataatatactatacagagcaaaaaaaaaaataccacacaataaaatatatatatatatacctataataaaaaaaaataaaacaaaataa

SEQ ID NO: 170419 - DNA, 1173 bp, Cannabis sativa
aagaattttcttatatccagaaccgaaaatggcagtagtaataaagtactgcacaaaaccaaatttaattaaacaatgacaaaaatcactcacatattcaaaacccacaatttttttctaaaattaagctacaaaatctcagatattaaatccaaaaccaatttgaaagattaaatctaaaaacctaataaaagctaagaacaattttttttcaaataaaaaccctaaatcaaaaaaaataaaataaaatacaagagaaattatacctgtaatagcaaaaaagtctttctctttaaaaaccactctcattgtcatgctcttctcattttttttcattttcaaatctgagaatgaaggaataagaaaaaaaaaatatgagaaataggaagaaagagatgcgatatatataaagagaggaacaaagagagctatatataaatagagagataaaagaaagaagaagagatgtacctggaataggtgaagccatagaatactaacgagagagagaaagagagagagaagcaaaattgaaaactgaaaaagtgtttttaaaaattttaaaaatcatcaaaaatctatttttaaaatttatcctttttaattttaaatttttaaaacaaaaaataaaattttttaccgaacatgatttctgtttgaaattagtaatttttgattaaaaaacaaaaaactatttttaaaatagttaccgaaattttccaaattttgtttttgtttttctttgatgaagaattccaattgtgtactcttatgtacatttgaacacgtggcttcattcttattaatattaacttaaagtttttttacgcgaattatgactatgtattctaccctttaattttttaatttgttacaaataatatttctattatttttagtgttgtaaattaattattcttttaagttttaaaaataagatattggcagctaaactaattgaattttaaattttttaatatttaaccacgaaaattgatttttggaggcaaaactacctaaactctcattccgttttgttctgtacccctccgtctaaaaatcacaattaaataccatagtagactgctcaggtgtacacacttgtacacgtgacaaatttttattgggtacataatttaattattttaaatattagaaaattaattaaatttt

SEQ ID NO: 170420 - DNA, 537 bp, Cannabis sativa
atatattcatcccattaaaataaattataatactaataaaaatacacctgtgaacctttctaaacgctctccccttccaaatctttgtgtgccctgctttccaaattcaatatacaagtgtcaatatgcagaatgttgaaaataaacaaaaatgaaaaagtgactaaaggaatcccctttagttttcagttatgatacctttctcctattttgccagttaatttatttcctagctacctacatatgcactccatccataaataaattcccaagtgcatataaaagaatgagtagtgcagcaaatcctcaactggaaaattttgctcattgggggggcatttattagattaactcatttttcataaatggagtcaaaaagaagatcacagtactcaaaaatgagcattttaattgcttatttggtcgcagtttcagcaacaacattcttcattcaatgtggtaagtattagtctgttttaacttcttgaactaaacacaactcagttactcatatgtgtatatgcagaaggaagaaaa

SEQ ID NO: 170421 - DNA, 630 bp, Cannabis sativa
  modified_base (341)..(346): a, c, t, g, unknown or other
attcctctctatatgtgtactcctatagtgatactgtgttctttactatttggaaactattcctctctatatgcatacaagagcataatgagacctctcattattgatcctaaggaattcctttcatgacttttaccttttctagaatagttgaaactattccttagataaatgtaatctatgttttggagccaaaagacttcctatagagttatccactagaataatgctctagcatcttacataagtaagttgcttgcacttgagtaaataacttaccaggcatatcacaagcagcaagtttagataatctcaaacctataatactaggatcaggaagnnnnnntaagtccattgaaaagacttattttcaaaatttttgttcttgtctttgtatagaaaacttttggttattccatatgaatggttttaaccacagttctcttggctttccttcttagttccttattttgataatccattacttgtttaaactaacaatggattttatcacaagtgtcttccaagtcataacagggtcggatccttgaaatcctcccactacgataaggtatcgtgactatctatctaagaacattaatggtattgtcctcatcggttgtgtcaaga

SEQ ID NO: 170422 - DNA, 678 bp, Cannabis sativa
aaagatatcaatcctcattcacattgtgtcaattttatgctttttttcaaactatagaaagttatttaactactaaaaagccaaatagacaaaatagacgatgtaaaatacaagtgaccaagagtcaaaagtctgctaagtcacttggagacacctataccagcacaagcattggtagaaaacaagctatagcaaaaagcaaaagaaaaattcaaagctaaagaaaaatatctacattaagataagaaggagaataagtctgggcttaaaagttgtttagccaactgtttgtcttaagcaacatgtaaatataagtctaagtctaaaattcgctaggtcggccatattgtattagggctgcacacgggtcggattttcgggttttcggatagtcgggttcggattttcggatttcgagtcttggaaatgcataaccgaacccggtttttgggtggtcgggtatgcacgggttgggcgtggtcgggttcggatgttattgggctgagcccgaatgtcatttctgagctcaaatgaatattaatttttaaaaattctatatttttctatttttaccacattggcttttgggttcccaagaaaaggctcaacaaccaagtttcatttatcacattggctttttatttttatctcatagcttttgggtttccaagaaaagta

SEQ ID NO: 170423 - DNA, 521 bp, Cannabis sativa
atttaatgtttttacttgtttaggtttttttttttacactggtaccggaaaagttaccggaatttactgtcagcgccggaaaagtcgccagagtagttgctgccatcagaaaagttgctagagttgctgtcgccgccaaaaaagtcgtcaaaattggtattgttgctgaaaaaattattggaaaaatcactaagaaactggtttcttgatgaagaaaccatcaagaaatcggtttcttagtaatttttctgacactggcaactacttcagcgaattttttggcatcgacagcaaactttgaaaaagtcgtcggaattgacattatcgtcgtaaaaatcaccaagaaactggtttcttgatggaaaccagtttcttggttttttttgtgatttttccagcgacagtgccaattttgatgacttttcccaagtttgttatcggtgccggaaaagtcaccagagtagctgtcggagttggaaaaatcaccgaaaaaatcatgaagaaactagtttcttcatcaa

SEQ ID NO: 170424 - DNA, 609 bp, Cannabis sativa
gaaagcggacagttggttgtaagttgattttcaccattaagtataattcaaatgggagtatcaacagattcaaggctcgacttgtcgccaaggggttcactcaatcatatggtgttgactatcaggagacctttgctcctgtcgccaaacttaatacagtaagaatcttgttatcactagctgtaaattgtgattggcctttatatcagctggatgtaaaaaatgcttttttgaatggggatctcgaagaagaagtctatatggaaattccaccagggatgaagaaacactacagtggtcgagtagtgtgcaaacttctcaaatccctttatggcttgaaacagtcacctcgggcatggtttgacaaatttgcaaagttagttgtcaaacatggatatactcaaagccaggctgatatcatactctatttttttcaagttctctccaaaactagagaaagctatagcaattctcattgtatatgtggatgacataatcttaactggagatgacacagaagaaatttcagatctcaaaagacttcttgcctcagcttttgaaatcaaagatctaggaaccctcaaatactttcttggtatggaagtagct

SEQ ID NO: 170425 - DNA, 522 bp, Cannabis sativa
gcaaaaacacggtttttcaatgacaataactttgaaggttcaggacataaaaataattacattataaggaatactccaagtctccatgtaccaccctatttatatatttatttatttttatagtaataatttattttgacaaaataattaaaaattatatatttacgttaaccgtataaattttaaactttgtaataaataattcataataataatgaattaaatagtataattgttttattattatgtaatataattattttttaagtaactattattatactaataaatagtcatctaattattatcatactataaaaattaattaactgcgcgaagaataattatattgcctaatatatatatataggccatgaatttagttcctcttctaaactggtcacccacaatatattaaatatattaaatatgttacattttttattgtaactatcatggttacatttttttaagccattggattactattagatggttgtgattaatttggaaattaaataa

SEQ ID NO: 170426 - DNA, 1117 bp, Cannabis sativa
  modified_base (318)..(331): a, c, t, g, unknown or other
  modified_base (1078)..(1085): a, c, t, g, unknown or other
agggcacaaaacccaacactgttatctatcatcaccctttttttccttttgttggcgagttggatggtaatcaccaatggatcgatgtgagggtacctcacgttcttctcatcttcctccaaaaatataattgaaggctcttaagtttttactttcttggaaggttctggggcaaacacagattgctcgctctttacttccttcacgtacctcttttaagcgctaatgctctctcttgcaatatgtggccctcccaagataaccaagatatcctctccttccacaggaggaggttgtaatccctggttgcttgggttnnnnnnnnnnnnnngctggttatgtccattgccctgcctcttcacgtattgcttaaagtggcctcgcgcgatgagactctctatctcatccttcaactggcaaaactcgtctgttgtgtgtccaatgtctttgtggtacttgcagtacctgtttggatctcttttatgcctcgtgtgcctcatgggctaaggtttactgaatgcaaccttgtgctcatgcgcgagttagatattctctcgagttttattaagctcagtataaacagtgtaaactggcacgtacttgccgtgcttcttttgtttcttcttgtctttggatgaccccttagagtcatctttcctctttgagccagaggcccctgtgttattagcttaagtcgagacagtacttgttgaaacagtgttgggtttacttcccgaaccagtttttaacaagttcatctcttttcgagcttcttcctttcgaacaaacaccttagccctctcattgaactgggtgatgtttttcactggacgacctcgtaggtcatcccacagtttgtctccagcagtggagagatcaatagtgatccccaactgaagggcaatgagttgggtactcttatccagatttcttactctcgcagcagccgtgctaaagcgacttaagtatgccttaagtgtctcaccaggctgttgctttatgttggtgagtgaggatgttgggattatttttaccaggatctaaatttactaacaattatgtttcattaacatcctannnnnnnntctaaaacaatgaaataaacacttataaagtt

SEQ ID NO: 170427 - DNA, 623 bp, Cannabis sativa
atatatatatatatgggaaattctatggtagactgaaaaaaggggtagtacaccgatgtaacttatagttatttatgttctggacatattcaaatagttttaattttaatttttttttatgacagatacagtgtagtatttaagatttaatgtaaatttttgagaaatttaaaaaatttaacgtgtcaaaagtaatgtcaaaacaatatatgttacacgcttgagtattattttattttatacgtgtgcacaataaactattaatttgaatgttactttttgtgttataaattattttaaattacttaaaacttagagagcataataaataattatattgtacgctcatgtagaaaaataaataaatattaagattatctaatttcaaaaataataataaaaaataataatttataataatagaaatggagagaggttgatgtaggaaataatttgtctaggaaatgggttgtagtagtagtgaagtttttttcaaatctcatcacctaattctactaacataattagttgggactaatattatgcaaaataattagttgggacaattaattaattaaccttaattattaagtaagttgtaacgtccccgcttcaagcctcca

SEQ ID NO: 170428 - DNA, 722 bp, Cannabis sativa
atgacaaggtttggaacaacaaatagttagtgcagaaagtatagtttttttagcaaaaacttaccttaatcaatggcttgctgctcatagttctactgtgatttacccatgtcctggtttcgtgctaggtgatggggctgagcagtggtagccaccaagtgaaaatagcattaaggttaatgttgatggcgctatatttgctgacacaaattgatttgggattggttttgtggttcgcaatgcacaaggactcttaatcaaaggagttaccaagctttatcaagggtcggctacactagaatttgtggaagctttgggtgttaaggaagctttaagttggatcaagcaaaatcgatcttgccaagtttttcttgaaaccgattgcttagtgtttattcaagccttgcgtagttcaattgatatgatttctatgtttggtcaaatagttaatgattgtaaggctttattgaaagaaagtcaacatgtttctatcttttttgctaggcaatcagctaataaggtggctgatgagtccatatttatcttataaatatgattaatttatttattaatattcttaaattgattctttaaattattgattagtgtgatttttatttaataggctattttaaaggctattcatgcattttgagtcttttggagggattttagcatattttggtggaaagtagtggaagtcggcgagctcgattgtacaa

SEQ ID NO: 170429 - DNA, 554 bp, Cannabis sativa
cacgtcagaaccatcctccaagatttctcttaaaattggctcataatcaaaattttatgcatccttgtaaatgtcaactattgtctttgggatgttggcaatgttgtaatcatgatattctgcgcccagtttatggttgagcaaggttctcacaccttgcttattcattcgcacaaccaagacagagaaagtgttgaggaatctctcaaacgactctttatacttgttatgttctgaaatgtaacaactccgttcacttgtctccacattcgatctaggtgagctcttgcttcctcagaccttagtgagtgtgacataactatatatttctcgagtgccattaataacacacacactctcctcataattaccccatgtcttgattaattttatccatatcctctattattttcctaagtttacttctctcgttagatgtcagcaaccgtctcaagcccttaattgtcttaactacgtttggattcattattaactctgcacaacctaaaataaatactagattgaaattaaccaaacttaacatataagacata

SEQ ID NO: 170430 - DNA, 701 bp, Cannabis sativa
gtgtcatggtggggtttgagttgctgcattctttgtttaagaagaataatggggttcgtgggtttatggcgttgaaattggatatgagtaaggcatatgatcgggttgagtggtgtttcttgcgtgctatcatgtccaggtttgggtttccgtgtcggtgggtggacttgattatggattgtgtgtctcggctgagtatgcttttttggttaatgggaggcctcggggaagtgtggtcccttcgcgaggtttgagacaggggtgtcccctttcaccttatttgtttcttttctgtgctgaggcactttcgatgctccttcagcaagctgagacgagtggtgatttgatggggtttaggtgttctcgttctgggccgcgggtgtctcacctattttttgcggatgatagcttgatttttggtagagctaatggtagggaagcagagtctattcgtcggattcttcagtgttatgagagggcttctgggcaacaagtcaattttgataaatctgctgcaatcacattcagtccggaatgttcagcctgcagatcgtactagtgtattgggtattttgggcggcttgggttcagtggccactcacgacaagtatttggggttgccgactgttattggcaagaataagaagcgtacgtttgctagtatttgtgataaggtccagaaacgggtgcggggttggaag

SEQ ID NO: 170431 - DNA, 704 bp, Cannabis sativa
cgttaacatcaacgattcgagcgttgataatattatcagctgcgaggccatattttctaagcatggcaccgtaacctccacccgtgatataaccaccaattccaacagtcgggcaaatcccagctgggaagccatggactttgcttttctgagaaattttgtagtaaagttctccaattgtagcaccagcttgaacccaagccgagttatgttcgatgtcaacatggacgagtcgaaggttgatgagatctatgagaataaaaggagtttctatctcagacacgtaggaaactccttcatagtcgtggcctccactacgaactctgaaatggaagcctaactgctttgagcaaatcacagctgcttggacatgggaatcatggagtggtgtaaaagaatgaactggggttttggaactggagggctctaagaattttgagattagttggtgtggatccgaggacagaagtgaatgacgatgtgtttggtgtgaaaattgttgtgactactggaactgaaagctcagaattgattgagagcattcaatgaagtttttagcagtacttgaattggctgaagttgccaatgaataataagtttggagaaaaagaagagaatatagtagcaattggtgtactgctacggatgatgattttgaaaacatgttaacgtatatatcttctaacaagcttgattttgctctc

SEQ ID NO: 170432 - DNA, 507 bp, Cannabis sativa
ttgttgtacggtctttgtagaatcaatgcttgtttttttgcttaattttagattttttttttgtacgcaccactccttagtagtgatggaaattcggtcagtacatgggacaagaattatctaccttaatggataatgggaggagagtagggtgcaattttatatattccaagctggtttaagatagtgttgtgggtgatactattcatcttatattcgatctatatatataatttctaaatttttgtataattttttaactattatatattaaaattattgattataattgactattaattttttctaatttgctttgtagtaaagaccttttagtaagtagaatgtttgtctatgttaaagtcaatatcttgctttttatttttattttgaattatattatgttgtctctgattttgcctaatatacgtggaccaaccggacaaggacacgtggatcaaacagcttaacatttgaattatttgctaagtctttatgtaaataagg

SEQ ID NO: 170433 - DNA, 954 bp, Cannabis sativa
ggattatcctaggcagacatcgagcggaaatatcccaaaggcagcgaacgcggagaaaaaaaaaaaagaaaaagttaaaggaggggcctaagtatgaaacttgtttcatgccttagactgtccctaaatggagaagtcgttcgcaagttagaaagaaacggtagatcacagacaagaaactacgacttacgacggacttcaccaaaactagttcaccataaaagttcgattcgactaaatcattaccataaaccttgccctaacatgcaaatgagtaatgaaagcaaaatgaaccagaaaacttacacaaaggtagaaagctggaagtcgacgacggctgagggtagaactttgactgacagcgatggaggaacaacagtaagaaatctatggtttctgaaattttctcgaaggggttgcttgggttgaaatggcgaaatagcgaaagtaacccaatgaaagaaaatgctggcttttatagaccagaaatggtgcgagacagctgtgatcagacatcaacgtacggtgggaagcgaaatcgattcacattctatgatccaatggacagggcgaatgggtgccagagcggttaaaaacgattgagtacctctctgacacccgaattaaatgtgtcggtctctcaatggacggaaagcgaattgttgcctgcaaaaggaaataaatattaatgatgacagtcataaatgcagcccacgcgcctgggggacgtcccgttacgtaaacaaagctagctggaggcctcaaacaagcctcatttacccttcactaaatgagacttgggtaaatgttgcctaagatttttcccaaaatacgtggacgcggataagagtgacatgtggatctgaaaggacatccactcacgaaaatcaactaagtcttggacaaaaaagaacaccacagggagtgggcctcccagaggagagcataagacac

SEQ ID NO: 170434 - DNA, 839 bp, Cannabis sativa
aatcttcattattatccttctgggtgtccctctgattatgatcggccttgacgtatttttgcacgtgcgggttattctttcttattagaaattcaatttcccgcttccgattgttgcattcgttggtgtcatggccataatctccatgaaaacggtagaacttggtcatgtctctcttgcttacgtcctttttcatgggggaatgcttcttgtacggagctaatgactgagtagccatgtagatggtttccaaatcctctatcagggtagagagcagtaaacttagaaggattttctataggggcttgttcggtttttccagcgaactttcccctttttccattgccttgtctgttgttgttgttagaccttttaccgcctgagcttgaattgcttgggtactaagggggctgaatagatgttccagtagagggagcctgtggctggttcagtttaagctcgacttctgctcgttgaatggcctcttcaagcttgatgaagccatctgcatgatcgaggaagtcactcatagaatctactggtccatctattttgatatccttctaaagctctccgacgacattcatgccccccagtatcgcggtcaatttccctccttcggttaactgtgcaactttcgttgcctccgtcatgaatttgctgatataagctcggagaggttctcctggcctttccttaactttgaccaggtcttttaaatgcaatgggagttggcgagagaaagagaattttgcatggaattcctaggagaaagccttccaagagttgaaccttcaaggtgtcaacttgaaataccattgttgggcggcttctaagag

SEQ ID NO: 170435 - DNA, 1184 bp, Cannabis sativa
ttcaagatccgatcaatgtaagttcgttaagacaacggaagaatacctttagctctatcccggagaatctatattgcaagtacatatgaagcctcaccaaggtctttcatatataaatggtcagataacaatcgcgttgtcttagataatagatttttatcattagaagcaagcaaaatatcactaacatacagtactaagaaaatgaagctgctcccactgaccttcatatatatacattgatcaactttattctccattgcagggacaattgtatcaaacttgagataccactgtcttgatgcttatttaagtccataaaaagacttattgagcttgcaaaccatatgttctttgccaggcttctcaaaaccaacatgttgagtcatgtagacatcttcatacaaatctccatttagaaaagtagttttcacatccatttgttcaagttccaaatcaaaatgagcaaccatagccatgatgattcacaaagaatctttggtagacacagatgagaatgttactttgaaatcaataccttctctctggctatactctttagcaacaagtctagccttataccttactaaccacttgagtcacgtttaatcttgtaaagccatttgtacccaatgggtctgcaacctttcggtaggacaactaaattccaaactttgtttcgtgacatggaacttaactcatctgtcattgcattcaaccatagcttagattgaggactcctcatggcttcttgataagaaactggctcagaagcatctcccacatcataatcatattcttgcaaatagacaaggtagtcatcatgaatagcaggtttgtgagctctctgtgatcttctcaacacaacttcaccaccctcaatatcaggattttcatcttgcatatgatttcgaggttaatcaggagcttttgttggaatttgttcaatcacaggatcattagtaggagcgaaagcggaagcaacaagtacatagacataaatacgttcttccctgaataaattttctcttgacccttgacttgaaccaaattcatcttcaaaatagacaactctatctgattctatcacttaggtggtgtgagaaggacaatagaatctagaacccctcgaaccaatagtgtagcctacaaaatagccactaatagtcttcggatcaagcttc

SEQ ID NO: 170436 - DNA, 1248 bp, Cannabis sativa
ataatttaagtactgaactcctaaatattgataatacttgcagagatggtcaacattctaggctctatgtactatggatttgttcattctcttgagtttataagtcctgaagcctattcatcgtcaatttcgtatggaccttcccaatttggtccaagtacccccactcctggctcttgggaggccgggaagacccttcttaggactagatcgccaatggcaaatttcctattttttactttggaattaaagtattttgccactttcttttggtacactgcaatgcgtatttgacattcctcccagagctcgtctactagatccaacacctcttgaagcaagccttggttctttgctggatcataagtggctcttttgtgggatggaattatagcctctactaggaccatggctttgcatccgtacaccattgagaatggagagtgtccggttgtggttcttgcagtggttcggttaggccccataacacgtgtggcagttccttaggctaattatttttgcaggccaagagtctttttttcagggtgaccttgagtatctcattgacagcttctacttgaccatttgtttgtggcctcacgaccgcagagaaacttttgattactccgtgttgattgcaaaagtctaagaattcatcacagtcgaatttctttccattgtctgagactatcttgtgaggcaacccatatcgacatacgatattctttatgacataggccaaggatttcttggcaattatggtcttcatggatttggcctccgtccactttttgtaataatctactgccactatggcatattttatcccaccttttccagtggatagggaaccaatgagatttatcccctacaccgcaaagggtcaggggctagtcatcaaagtaatttcattgggtggggcccttgggatatttgcaaacctctggcatggatcacacttcaggacatagtctatataatctttcttcattgtgggccagaaatacccttgccttaatattttatttgagaggcttggtcctccggtgtggtctccacaaaatccgtcatggactcctgcatgatctgtctagcttcaggatttgacacacacctcaaatatggcatgctgagcctccttcgatagagaatatcatcgatcattaagtaccgatgagcctggtaactttctagatgtggtcctttcttgaggcagttctcctgttgttatgtatttaatgatagggt

SEQ ID NO: 170437 - DNA, 1418 bp, Cannabis sativa
  modified_base (663)..(666): a, c, t, g, unknown or other
tgcacacacacatattagcagtgacaatccaacactagttagtagttaaaaaatttgtttttagaaccaagttaaatcctagctttcatttgataacatagaaaaaaaaacataaaataaacatcataccacataccatatctctaacgaaatgaaagttagcaaatgatgaaaagacaaataaatataaatagtaattttttaataatgttttcatggtgcatcttctctttctccaaaatctttacttggtttcgcaatccgggagaagtgtctgtaggttttttaggaagagattgatcgatccaacaaaagtaatcacatcctcgactttcgttgttctcctgaagttaaaataagtacattagcatatttacaaagcctagttcaaaatcttattgcagttaaaagtcttacatagtgcagacatccaaagaagcgacgaccaggatttgctctactactagaagtccaaacataagctagatctccacagtagcaatgggggtgtccttcaagtgaatttttccatgccgtgatatccctctcgaacccgtaggagtcctctccaccacgagccaccatgtgtttttttttaatggtttagtttttgtgaggcttcaaaatgagtgtttccctcgtcctaatggtggagatagtgtnnnntagtatttttggaagaaggaaagtaggttttctgtataaatatggccttctgaaaatgaatttaaggggggaaaccgaatttttttgaaaccgtttgaaagtatgttaaacttggggagcatatttattggtgccttttaaatactttctttcaaagtctttggtgcactatacttatatacaacaagtattgtcaatcacaagcagtccaatcaacttaaaataatattttattttacaatctatgaaaagttaaaagtacaacaagtaaacatgtgtccccaaatgaataaccacacatacagtcggtttggtttcatgtaattatagttggaatggagtgaactttattttttttattttatctccaaataaacatgtgggccgaaattaataaacacactatacattagtttttctctcttcattgatttcttaatttgtatgtttatttcttttaatcatatgacaacagttattattaaaataattattattcatattaataattacgtgtcattatttttatgtattttagttaattattaatttagttaagtaattatgtgttttaataatgacaaaaattcaaaatcatgtggcacaacaacatactgagtgacacttacttgtacacactatcggtgtttatgggtcctgtgacacattgtatgtaatcaagttagctgtagtgtaccggattcactattctcgtaacgaactcaatgaacgtagttcgaactagggttcta

SEQ ID NO: 170438 - DNA, 849 bp, Cannabis sativa
tatttgcaattagtgttgtttatcaagattttcgaaaacagaataaaaattataagaactgaagaataaataatcaaaagagaaagtataaaatgagaaacaatttttaacatggttagggcgttaactaactttaatccacgagtcagtattatttagtaaacttttgcttgtaaataccttaggaaatacacaggatgtatgttctcaagtttgcctgaacaaagtttgcaagagagttcaacccttaatccataaaattaatgagatacttataaaagtttgagaattacattaggtttctcattttcctctactggagaggttacagtaaactatactctggactttctcataaagtctagcccaaggagaagatggtatgctgactaggtggattgaatttgggttgatcgagtcaacaccgcatacactgattgtgagcaattaatttgaattaattgcataatatttgttgtgagaagtttcctctttaatcttgatatgatgcactgttgtgatctaacaactggagtttctttatttgtgtgtaggaatataaagggaaactagaagggtctttcgggaatgtgttgtcttgtctctgtggtctcgtagtaccgaacatgtccttcgggtacaatttgctgaaggtggaagactttgtgagtgcagaatcataacatgttcctggaaggtaacatccagatgggctcgacccatttgcctttaatgacggtcccactgatgggtcgtgaatgctgatctagagtccatgtgtccaatgctagaaacgcaaataacatttacccctaagcttccaaaatgttgcgtatggtggaagcttgc

SEQ ID NO: 170439 - DNA, 500 bp, Cannabis sativa
  modified_base (454)..(455): a, c, t, g, unknown or other
ggatgaaaagaacatttacctctcaaagcctatcgaggtattcttgattcttttcgtatgttgcatccttagaacggtaatgataaaactcacaccttgatcttacagaccttccatcatacacaaggactaatgtgggctagtagaacaatagtgtatgtacagttcttgattaaatctcaacacataagcaagaactatttcttgtatgatagagagaaaaaaaaaatacattataggctttcaaaaaggttacttgaaaaattctatatcaaaaactatatataaatttgttatacggtatatttaaataaacctaataaagattttatttaattaattatttaaatttaaattatttatcaaatcatattaaattatttgaataaataatataactggatttggttataattgtttatatcttataaccgattgagggaatctctcaacnncttgagagaatatctcaactacttttcaaattcaaatatttattt

SEQ ID NO: 170440 - DNA, 881 bp, Cannabis sativa
acatgacaaaatcgttggcaaacaagttatttcttaaaaagaaactgtattcttttaagatgacaccaggaaaagaaattgaagatcatttggatgatttcaataaagtgatccttgatttagagaatattggaatcaaggtggaggatgaagaccaggccatcattgttttaaattctcttccaacagaaagctatgagcattttgttgacaccatgatgtatggtagagagtctttgacactagaggaggttcagagtgctctaatgtcaaaagaaatgaagagaaaggcagataaacaagaagacaataatggtgaagggctctttgtcagaggaaaaggttcaaagaaggagaacagggatcaaagcagtggaaacaaaggcaaggctaatgccaagttcaagagaagatgctttctgtgtaacaagacaagtcatttaaagaaagattgtccaattctgaaagattacaactccaagaagaatggtactgcagatgtagtttctgatggagatgacagtgatggttatgatagtgcaagtgtgttggtaatctctaaagacaagtcagatactggttggatcatagactctgggtgttctttccatatctgtcctgacaagaagcaattcatgaattacaagattatcaacagtggctctgtgaagttaggtgataaccattcatgtccaattgtgggaattggatcagtgaagcttcaaatgactggtggtggagttacagttcttgaacatgtgagacatgttcctgaaattaaaagaaatctgatctctatggcaatgcttgatcatgatggttactcagtaaaggtggagaatggctcattgaaggtaacaaagggatctatggtagtgatg

SEQ ID NO: 170441 - DNA, 947 bp, Cannabis sativa
  modified_base (136)..(138): a, c, t, g, unknown or other
attttattatagggtttatacattacatacataaattttttacttttttttttttacttgatgaaattttttaaaaaatactgtatattggattaagtgaaagttctactgttgtttttaattattctgttttgtnnntttacggttgttttataaaaaaatattatttttggaaaaatttctgtgtgaaagtatttttgtaaaagttaatccaaatttcaatattttggtgaaaaaatcttgagaaatttacattgggtgactaaaatttcaaattaatcccataaataccaatgcttcttttatttaaaccataataccgtgatatttttattttttttgaagaacgtgtatacagggcaaagataagcagcgcatcaatgcaaatgggttgatagtttggtttttgttttttctcttttttatttttttgctcccttttttattttttaaatagaaacataaaattaataatagttttttttaatattaaaaaaaacttcctctattctttttttcttctaaaacaaatttaaaataccaactaatttaataagttaatttatttttacatgtaattatttcatatttaaatattactaaattatattttaatattataaaacactttttaaaaatttctaaaataacttatgaaaaaacaagacattaccataaaaattctagaatagtgaattcaacatatcaaatttgacacttaaacgaaatttaatgtaccaactaattttatggactactaaaatgtattttattatatactaaataatattctacataaatttattttaaagagaaatctcgataaatatctaaaaaaaagtaactaaattgtattcaacataaacttcttttatagagcaatttcaataaatttctaaaaaagtatacccactcgtctctcttcttttttttttttttcttttaca

SEQ ID NO: 170442 - DNA, 569 bp, Cannabis sativa
catattgtttgtgcaagtaggttgtaagaacatcttgaaggtatcaatatctctgtcacttcaaaatctgtgtagtttgttttgtccacccattgtccattataaaatatcataactgttctcggatcttcaatatcaaactgttatcaatcaatgcaaatggaaaaaattgtgaggctaaataacatgtaaagtgaatggaagaactgttcagcagttataaacaaatgcatgttttttttttctttgaagtaaatatacatttatgattagggtaaatggcggtaaaactcccaatactttcgttttggtttcactaaacccccacaacccaaatttctgcgggtaaactcccaatactcgtgttctgttagcaatttaacacttttcatccatttcaagtgttaagtgccatgttggactgtccatgtgtacatctacgtggacaagatgtacacatgggacgattttattggtccacgtaaaaaattatttaataaattaaaaaaaattaatttaaaataaaaaatatatatttttcaaagaaaaaattatttaaaaaataaaaa

SEQ ID NO: 170443 - DNA, 1645 bp, Cannabis sativa
  modified_base (1595)..(1602): a, c, t, g, unknown or other
tagtttgccttcaattattgtgcatcgccactcatttttgtcaattggaagttgcacgtcaagtagatagttgacaataggggtcatccatgtgggtgaactgtctatcatctccacgtcttccctttcacatatacttggctcgctcagcatctccaccggaaccaagttcaattcatccaagtcgttctgcgaggccagttttgccaaggcatcaacattagagttttgctctcttggaattttttccattttaaagtaatcagattttttcaagttcttccgaaccttctctagatacttagccatttttaggcccttggcctagtattccccgagaacctgatttacaatcagttgcgagtcactatggcagatgagattcttgactttcaacgcctcagctatctttaagctagcgattaaggcttcatattcaacctcgttgtttgatgcgtcaaattgaaatctcaaagcatagtgaaacttaaggccctctagtgaaattaatattacctcggcacccgagccctgctcgttggatgcaccatccacgtatatcttcctagtgtctgcgtctcggtgaacaagcagaatttcttctggagttattccttctattaagatgtctgtcaaggcttggcccttgatggatgttcgagggtggtatgttatgtcgaactgccccagttcgattgacaattttatctgtcttccagaagcatatggttttgataaaacttgtctcaaaggctaatatgttaacacttttatggggtgtgcctagaagtaaggccgtagcttgctagatgcatggattaggcacaaagcgagtttttggagagagggatatctcgactcttcccctagtaaccttttacttacatagtaaataggttgttggtacttacccttctcgcactatagtcgcaataatcgcatctttcgagatagccaggtagaggagtaacatttctccacttattggtttcgccaaaattggaggcgccgctaaatgccttttaatgttctgaaaggcctattcacactcttctgttcactcaaatttcttgttacctcgcaatacattaaagaatggcaaacacttatcagctgactttgaaatgaatctgttaagtggagccatccttcctgttaaggcttgtacttccttaggctttgttggtgatggcatgtctatcaatgccttgatttttttcaaggtttacttcgataccccttgcattgactatgaatcccaaaaaatttcctgaggaaactctgaaggaatactttttcgggtttagcttcatattatacttctttaatattttgaagcattctgcgaggtctgtggtatgattctcacttttcactgactttaccaacatatcatcgacgtaaacctccatattttgtctgatcttatttgcgaacatctctttcaccaatcgttgatatgttgccacaccattcttcgacccaaacagcatgaccttgtagcagtaaagttccatgttggctacgaagctcatatgttcctaatctgagacatgcatttttatctggttatatccagaatatgcatccataannnnnnnnagctcgtgcccagcagttgcatccactaactagtcaatcctgg

SEQ ID NO: 170444 - DNA, 623 bp, Cannabis sativa
aaaactgtcagactcaaattgtccattcaaaagctcaatcatagcatcatttgaagtacaattattgagagtcactgtactaatcttgtcttctatttttcattcattaagacaagatcttagggcctcaagtagtgccggagcatcgtgatgacacaaaacatacttaaaactcaaaatatgaatgtgtaatttccaagaatcatcaataaaatgagctgttaaagccatatatccacttttctgatgattgcagtccacatgtcactggttatgcctattctgctcctactttttttctaaattttgactgtatttttctttctcagttttatacattttcataatatcagacctaaccgtatttattgacaccatttgaaacatgggacataaagtgcttgaatattctataaacccgctatgctcaaccatagacaaaggatattcatgcttaacgatcaagaataaagtgggctattagattctatttggatagacaaatttatgtattacagtgtactcttaactcatgagacaccatattgagatagggttgatcacaatctcacaccacacattgatggtgtgggcgtgtgagatgaggagagagagagagagag

SEQ ID NO: 170445 - DNA, 509 bp, Cannabis sativa
aactgaaaattaagaaaggtttataggcagaaaatatcaagaatatgagaagaaaaaaattagagagaacatagcaatttttccatacccgtaagcctttcaactttcttgattactttttcctcaagagtcatccaagaagtcctggagtacaatctaatttttcttttttgctaggattgaactacaaatgtgcataatcagactatcaaaagtctttacatctttcaagttgtatactcattttgattactgaccattttacctcatgcaaaataatagaatttcttaaatacaaattagtgaaagtacattgtttgtctcaccatatatagcttgataacctttcttattttttatttaaaaagagaaatcctttggtattctttaattaaaaagagaagacgttttttttcttcaattgaagaattaatattgattatagataattgataacaatttttactaatatgttattaatggactattattattagcttaatgtagat

SEQ ID NO: 170446 - DNA, 979 bp, Cannabis sativa
  modified_base (933)..(943): a, c, t, g, unknown or other
tgttataatttatagagttaattgcggtaaacattagggttgtacataaatttttgtaaaccgcccaactcgaacaatctgcctaaatcaaaccgagataaccagatgaaaaatgcaaatcgaaaagcccgacgaaaatataacccaccctatctttatattgggcgggttaaaaataatatcaacgcgcccaattaatccgaccaaccttatatttaagagagtttttatatatatatatatgtgctcttattatatataatctatatattatataatttatatacatatttataaaaaatagatagctcaaactattatatttttttatgaaggatgatttgaactttaaattcaatcgttatatttatctcattatcacaataactaaagtataacaattgaatgtgaaaaaaaaatattagtactcagtttagccgagttaatccgactaaatcgaccaatttattgggcgggttgaaacatttttttttaattgggtgggttgcacttaaatttttgtaacccgatctttacattgggttaaataaaatgtaacgtaaacgcagtgacggacccatgatttttactttgtgggggcttatttatcataaaaaatatatttatagctacattataatcactcttactaaatgtatctaattttgtgggggctttactactattttagcctataattattaaataaaaaaaattacatttaattttttaaaaggcaatatttttattcgtgggggctatcaatcttaatgggtccgtccctgcataaacggaccaaaccgaccaacgtacacccttagtaaacatgcatatctcaatattgaaaaaatatagtattgaaatgctcatttttttatatatagcaaaaatacttaaatataataatatttaaatacagtagaacctctattnnnnnnnnnnntattcaagaataatctctaatttgttataaaaatat

SEQ ID NO: 170447 - DNA, 570 bp, Cannabis sativa
  modified_base (481)..(481): a, c, t, g, unknown or other
aaacaatcgactcaactccggtgatagctacaaacagaaaagaaacatcttgattcattaacaaaatctacttccgaccatggaaacaaaacaggttattatgcggaaaataggacgaccctgacgccattaaagcttgtacatggtcttgctggacgattaaaggtggagagacattggacgatgaccaatcgccggggcttgagctgttgagggttgtgcgtggagcctagtcggatggaggtaatttttggttatgcgtagagcctggtggtgaagcttcagatgttgaacggtgatggtgggactgagctgttgtggtcggagtagaggtgggaatggttgcagagaatggtgatggtgaatggtgggggcggctagggttgacttgttgaaggtaatggttgatttgggggtcttcttctggataggggatggaggttctgtcgagaagaaagagaaagaaaaagagaaaaaaaanaagaaaaaaaaagaaaagaaaaaggtaaaaaaaaaagtaaaaaaaaaattaaaatttttttaatctaattttttaatttttttaaatat

SEQ ID NO: 170448 - DNA, 910 bp, Cannabis sativa
aacgtcggtgggatttgatgagattggagggcaattaataaattaaaaataaataaataaattgaaaaagttaatatttgtgagatatttaaaataaaagacagagaaacgtgagcgtgtcagattggtggtccactgagagggcttggtggggaaacagtagaggaatattgccatgtgaattgtggggtcatgggatgcacgattatgttactaatcaagttttggttttttttttttaagaaaattgggtataagtcttaaaaaaatttatattttattttccaatcttaaaaattggtgctatggaattttttctggtgtggattcgagcaagaaatgcttggtggcaacgctttgttgggcaatttggagcgctagaaatgattttgtttggcaaaaaaagttggtaaacgctgaaggaattgtggtgttggcaaaaggttatcttgatcaatggacaaatgctcaaaatactcttattgagtcatcatggtctggttttcagacgggtgatggggttgagcaatggtccgctccaagtgaaaatagcatcaagatcaatgttgacgctgctctttttgaagggggaaccagctatggtttaggaatggcagctcatgaccatcacggcttcttggttgagggccgaatggatttcttctcgggggctgctacaccagaagttgccgaagcaattggagtccgcgaggctctgagttggattaaaaggaaaaattggctacgggcgtcgattgaaacagattgtttagtggttgttcaagcaatacgaagcttaactaaaatgatttccttgtttggacaaatcattaatgaatgtaaacaactcctgttggagttaaaacatgtttctatttattttgttaaacgatcagctaatgtggtagct

SEQ ID NO: 170449 - DNA, 658 bp, Cannabis sativa
actgcgagaagctctagatcgtaatacttgaaaattcttctgaaatcgtttatgctctcttagatttgcctgtattaaattgttaaatattaatgttttataataatttcactagattttgatatatatatataaggttaattatattaaagaatagagtatacatcattccaaatagcattcattagttgctgatgaagtcacacaacgccacatgctacaaatcctctctagataacgtgatctggtacgaggtactatgaattgtgattatgtcacgtttatcgttgtttcttagaaattcatcaataccatctatattagtgagttgggaattaaatccatgatctctgttgtgaataattcatcttcttgatcatcattgtcttttctagaaggcatgggacctttcttcttcgacacatcacgtgttgatggtgcttaagctactggaccctatacaaaacactatataatatatcactatggttgaatatctaaactattcaaactctactaatcattgacaattaatttataacaaaagttaccttgggtgttataattagatatttaggccaaggaaggaacatgtttgctacttccttaacatatttgcacccgtcaattgagattgagatttcagcatcctcttgca

SEQ ID NO: 170450 - DNA, 966 bp, Cannabis sativa
aaaaaaaaaaaaaaactaaactataaatatggtattgacaaaaatagtaaataaaatgcaactaattaaataaatgaacttttattttaattaaattaaactgaacaaaaagaaaatatatatatatatatataggtgactacttaataattatattttttttgtaaccattatggttacattttttttacctataatagcagcttaccaataggtaaaactttattttttagaaacaactaattacaattaattatttttttaaaataattaattgaatatataaagaccttttttagcaattaataatcataaataattttttttatataaattctaactataattattttaacaattaagtcatttaattataatatttacaatgaaacttaacttctttctacaaaaattagacttctttttacataaattagaattctattcttatataataaatttttaaatgatattaaattattttttataactagaagaactaagtatgagtttttctactcgagtttgaggttgcttcgttttctgggagagcttgactatgttttttgactctggtatgattttttaagtaaatgactcattatcaaaaaaaatggaagagtttagccattttttttagaaaatacattcaacctatttcacattttacttttaaaatattgaaataaaaaaaactaaataattaagtgtaataattttaataatttatggcaaaaaaattactaaaagatccttatttattaataaatgacgagaaattaattaataattataattagtttaattttaaaatataattaatcttcattaaagttttaaaaggaaataaattattatgtgataagttaattattatttatttttatttaattttcaaattaatcacaaccattcaatgataatctaataactaaaaaatgtaaccatgatggttacatatttaat

SEQ ID NO: 170451 - DNA, 757 bp, Cannabis sativa
tattgttaattatgcatttgtaaagttatgatgtaaccttcatgtgaattaacattgtaaattgtagatcagatcaatttatttcttacatatcttctaattattagctgctattataggtgtactgtttagctactgattaatactttgtgtgaaatagagaaagaaagtaaagagaaaaaattacaaaaagagacatatgcagtgtgggtcgtctgagatctaacatatattattttttctttttttgttcgatagtttatcaagccattcatttacaattttataaatttttgcaatatacaaggtttgatattaacttttagaatgattactttaatccatgacaaaagagttgttgtatacaaggtaatttgcataaattatctaaagctatttaaacttcaaaaaaataaaactgatttatgtaaaatatactattctctccattgaatggacacaattgaatattttatttataaaactataaagatttttttcttcaaatttttgcatttgaagtttccatttcatactttatattacacttttttattttcttttatttatgatattttttataataacaattaaaaaataacaaaattaatttatgtcattgtactttagtctacttttaaacgatgtatgttatgaaatgtgtttggtttttatatggtattgttctttggtttaattttaagatagaaaataaagtaaaataataataataaaaaagttgactactttgtgaatt

SEQ ID NO: 170452 - DNA, 659 bp, Cannabis sativa
  modified_base (605)..(608): a, c, t, g, unknown or other
cctaaaacctaagaaattaaaggcaaagagagaagaacttacctccaaaccttgaggacccctaacctttattacctctgctaataactggttgaattagcaagaaaaaccctgatttcttgctgggtttccttggctcgagagagagaaaagagaaagagagagtgatatatgagttttgtattttaggctttctaacttaatatttaaataaataataactttctttttttttcttcttatttttcagcctaaatggtcactaaaagacaaaccatttacaacctaagaaatgactattataccctttttaaacattatagctcaaaatacaacttaagggtaatttggtcttttcaaactaatcccgccaaactgacaatttaaagttctaaactattctggtacaattccaattcaatttattttttactttcatgacatttacgacctccccgtaaggttccacaatttcaggccggaaaatattttatttgaattatggtgtgtacgataccgacatattccaatataatctccataattaataaattacgctttatgtattcttattttcctaatcaactcgtatttagtttaagtannnntataatcctactctaatacccacttaataataaaatatgtccaattaaaat

SEQ ID NO: 170453 - DNA, 535 bp, Cannabis sativa
cgtgtgtactagtgtacacataggcagttaactgtgtcacttaattgagtttttcagacagaagtgtaaagagcaaaacagaatgtgagtttcgtagattttgctcccaaaaaatcagtttatgtggtatagtgttaaaaatataaagttcgggtggttttgtcccgataaatagattatttaaaaatcttaatttttttttcttcctcgtcttcttcatctcctctcccaatcccgattcacccccaccctctcgatctctccttttcactcttagggtacaaaaatctccgcctttaaattcattctctagctctctctccacaactctatacctctcttgtttctctctcttttattatagtccatcatctctgatttttttttcagttgataaaacgtgtggttgggaatcggcagtgtgggtggagacgaagatgacgaagaagaaaaaagaaatttaaaaaatcactacaaaattttttacttttagtcacaataaaatttgtgaataaaagtaaaaaagttgtgacta

SEQ ID NO: 170454 - DNA, 728 bp, Cannabis sativa
atgctctaaaattaaatatttgattttggtgatatgagcatgagtttgtattaattattgttgatgatagcatgctcattgtgtagtaattttaacacaaacaacaagaatccaaaatctaagtgtcagaaaaattttcataagttatgacagagagaacatcagtgtcaatttcaagccttcaccagcaacttttgtggaatctaatgtgtctttacattcttgattccgcattgcttcaagattcttggtcagctcttcacaattcctcgtaatatgtccctttttgtgaaaatggtagcactccacttccctcaaagagcatgaatgagtgcgattgtctcttttatcatcatatctttctcctaatgtactcctacgacgacttgattttggccttctcacaagaacttgatcagtatgagacataccacttggttttttgatattatatgtctccaaaagagcagttgacacctcgtccatagtcaaagtagtttttccaacaaaaagtgtagtcactagtatctcataagattttggtaaagaagccaacaaattaatagctttgtcttctgcatcaatttgacatctacaattaacaattgagttatgtacttattaaatctatttatatgatccctaacatcatctccttcaatcatcaccaactcatataattatttcttcaaatataatctatttgttagggattttgacttataaag

SEQ ID NO: 170455 - DNA, 608 bp, Cannabis sativa
cctactgatcgagaaatgccacacacgcgccttgaagtgcagccttaagcctcaaccatgacacctcttgtgcccggtgcatactcccctattttgtccaatttttcaattttttcaacttttaaaaattatttttcaatgaaataaaatttaaatttaggtagaattttgtgtagaatctaatttgtcaaacaaaaatctaattattagattaaaattaatttttgttaattttattattaatttaaattgattttagatattagtaggctttaaatttgaaaatttgatttttctgcagatttgttattatggctattttgaaatttgattaatttttattttgtttattaattttaattatgagatcagatattacatatttcgtttatttaattaataaaatatgaaatgatcttattttgacattaaaataataattaaatttaaagataatctagatatttttaaattgttaaccataaatatgaatttttcaaaaatttgttattattaaatatattttattaatttaaattataaagttagataaatgctattatttggcattttatcttattagatatttattttattaaattatattt

SEQ ID NO: 170456 - DNA, 782 bp, Cannabis sativa
agggcataaaacccaacatttggttgggttgaaaatcgcgaagtggtgaaagtaacccagcaaaggaaaggtgctggcttttataggccaaaaggggtgcaaggcagctgtgatcagacaccatcatatggtggatatttgtatcgatttgaattctgcgatccaacagatagggtgaataggcgtaaagagaagaaaggacggttaaaatatttgagtacctctttgacaccggcattaatgtaaaggtctatcagtatacgggaagcgaatcattgtgtgcaaaagaaaataaaaatcaatgatgacaatcataaatacgacccacgcgccaggggcacgtgccgctacatttattagagaccggaggcaacatacaagtctcatttacctgttactaaatgagacttggggggtaaatgttgcctccgatttttcctaaaatacgtagccgcagctgcgtatgacacgtggaccaaaaggacacctcatctgaaaactagctgagtcatacatatactgataagtgtgcttcagggagtgagcccctggagaagtacataaagcatgtcatttctctccgggagctagaaatacaatgaagcatctccgggagaaggagaacctgttcgaacagtcacctcacatttaatgcagcatgaggaaaacatcttagaacgcccataagagaatttgtcaatcaaaggagctagtgacgactccattatgaagaatcacatcaatcaaataaggataaagattaatctcacctaatccctatg

SEQ ID NO: 170457 - DNA, 583 bp, Cannabis sativa
aaataaataaagtgacacatgttgagaaaaaaactacccttatgtacaaatattttctgtgattgtacataagcaatatccaataatataaggttggtgttaaaagatcaacacctactctataagaatctagaattttctatcattttggtaatattatagaattttctagaatcataaagagttaatagtcataagaagtttcaagaatgttttaagctataataaattgacaatttgctagaacattctagcataataatgtaccatcttttgagtagtataaataggggagtaggtgctttggtggtgtatggtgagttgagtgtacaaatgaagtgtgtcctagtgtataagtcccaataaaactctaaaagagtgtctcatcaaacagtgtgcaagtaaacctttaagtgtgagtgtctagtagtgcttggtgtgtattgtgatcaagttaaagtgttcaagtcttggtgtaattgcttttacagtaataaagtaattaagttttcacatattgtggtgtccaacaagtggtatcagagccagatcgagttcatttcgaaagagtcctttgttgagt

SEQ ID NO: 170458 - DNA, 1835 bp, Cannabis sativa
aaaaaaaaaaaaaaaactgagtttttgaagatgtgtatagttgttgtattgtcacagtaaataatgggtggactagtgtgattgataccaaaatcttttaataatgctagaagctatgctatctcatatgtggcaataaccattgctctgtactgggcttcaacagaagatttggagactgtgggcttcttggacttccaagggatgacaaattgacaaaaaaagaagcaatatcgatatccactaattgacctgtgagtatcaatgcaaaaaccccaatttgcataaaaaaaaaaaaattaagatgtacttctacatctttgaaattagaatcaggaaaggcacttaattaagatagtttgagaatttgaataaaaaaagacaccttgacctgaagtgcctatattgtaatataagatgcacaacatgaagatggaaagttttaggatcatataagtattgattgagagtatttacattatattcagacgaataatagataagtaaatgagcttaccaataagtcgtctatacatagttggatgagggagaggattaccaacatctttaccaagtttgatatggggttctatgggtgtgaaaggcactttggttcccaaaaaacctgtatcatttaacaattgtaatgtcaatgatcgttgagaaatagaaatgcctacagatgcgtgacctattttcaagcccaagaaaaacgtaaggcaagatatttcaattgaaatgtagagtttattgttggaatttataccctaaaagtaagtaattaatggataatatattatagaatacatgaaatacaattatataagatattatatttatatattaattataaaagtataatatataaatatctgaaaatttcttattcatatggagaaggtataatcttgtaaggtcgtacaagagaattaagattatacaatatgaataaaactagtcggtagtgtattcaagtaaaagaatctttaatacataactactaagtacaatttactatacactatactttagtatgtgattttgattcagatcatcacatatgtggataaacatgtagcaaaggtgttgtgtattatttaactatacatgacggcaccgatatgtaataatatctttcatcaatatgtcgtttattatgaaagaattattcatatcacaatgatgatcattagtagatatgtctgaatcatgggtatacataaactcctatttgtgttcattgagttctttgattcactcgttaaagtttctcaaagaagatgactcttacaatttctgttttgggatcttaatgacttgagttggtgaaaacatgttatacaataatagaattcaaactttccgaaaggatcgaatattagttcccatatagtgttaattttaggagtgctaacagttggatccaaatatattattagattatagattaactgttcactttgcattaatgatacataaggagtcaagagataattagaagagtaaaatggtaatttagaccaactctaattatgaactaataattggagggagaacaacttatattgattatatcaatagactactagtaagaattctataaatttaattctatattgtcaaagagtgtaattttatatttatagtggagtaataatagaattaataaacaagattattctattaatcaaatcaataataatcaagtatttttggagcttcaaaatataggtacatagtctctaagtcacctttatacaacattgtacaagggaaggtttaagggcttttttcataaatgtacaacaaaaataaaataattacaaaaaatgtgc

SEQ ID NO: 170459 - DNA, 757 bp, Cannabis sativa
aaacccttattatcaatccaattgcattcgtagcctcagttactcatctccaccattgattgctaagaaaactcaaggtgaatccaaagaagctgcatcaaagaatccattgtcggcggacctatggctgtacaacagaacgagctgaaagaatggcgaagtcactgcttccaaactcatccacattgcccatgctcgcgtctatgttacttttgatattctctacatgtctttctctttcatcttttcttgacaacttttgtatcctttagatattaattagaatgctagctatttgggttttttcactttggaagagagttggcactaataatgcagtgtgagctatgggatattgaacatgggaatgcttgccttgcctcatatataggatcaaagtgtggagttttgcaaggataacttgggtcttggtgaaacaaatcagatattttttgatatctttttctatgtgatattggttttgtaatatctagtataaatatattattatttagtatattattgtacattataatattttattattgcactaaatgggatatacatattattgattaactctagtataaatatattatttatttagtatattattgtacattataatatctagtataatgtggcatttccagtgaaagttcttgcaaaatttgtcttgttcactcacaatatgaactgaaaaaattaactctctatgtaagttggtttaagattgtgtagattacttttttcattt

SEQ ID NO: 170460 - DNA, 973 bp, Cannabis sativa
aatgattttccaaactgcatctgagatgggagatctatctttggatcgcttgttgatcttgttcactaaatcaacagtctgagtaaattgaatggagaggcaagtgaactatgatacaccactggattgcatggagaagagcgtgtgcctcaaccaagattggggaaagagcacctgtatgaggagaactgatggctgcaatggtctgtccagtggagtcttgaatcacagccccgaagcccatagttgagcgagatgttgaaatagctgcatcagaatataaggtgtacatgcccctaggaggaagaggaggctgcattccagaggcaggaggagttggaatcgaagtagcaaaatgttgttgactattcgtgtactccttcaaataattggcagcagaatcttcaatatcatcgagagaagggaacttggattgaaagagagtttggttacgcttgttccaaatggaccacagcaaggcaaagcagagggacaactgatcctttggtagagtttcaaaacctgagaggaggaaatccttaatgtcctgagaatggtgagcaatgaagaaacctgcaagacttgttttttcccaaatttttctagctctggagcatcctaggagagaatgggtgacggtatcttggccgtgagagcaaaaagagcagtaaggagagggaattattttcctggagaaaaggttggaggaagtgggaagaatgtgatgataagcacgccaaatgaaatgtttaatttttggggggatggggagatgccaaagggttttccaccaagttttgaagaaatcccgattagaggttgagggagcagagatagatgaagaagcagaagaagtggctagatggtaagtagtgttaacagtgagatttcctgaagggtgggaactccagatcagggaatctggctgagaaatgtcgatggggatggtgagaatggccttgacaatgtcttg

SEQ ID NO: 170461 - DNA, 1082 bp, Cannabis sativa
  modified_base (1050)..(1056): a, c, t, g, unknown or other
ttctttttttacctgttttgaaagtacatttttgataataacaatatgattcttttcaaaattatactttctggtttttttttttttaaaaaaagtagttttaaaattattttccaattacatagataattgtttagtcttaaaagttctatcattatgatatatttttcaatgcaatcattttaatatgagggaagcatatattttttttactattattagaaaaaataatttaaattaaaagtaatttatagtttaactaaaaagcaaaatcaaaatttaagtttaaacaaaataaaatatatcaactaattttattggttattaaaaatatattttattatttaatatttaaaagttactaaattgtatactacataaatttatattgtgaaacaatattgatcaatttcttattatatttttcaagtcacaacattaataattatttgtgctaaaaaattacactattacgatctactcttaaaaattaaagatatatattttttccgactagtattaaataggtaacattttagttactaaattgtattctcacaaattttttttgtagagcattttcgattgtttttaaaaataacttataagaaaagaactataggttttttaccgaataaaattttcagaattaaaagtaaccttatagcttcttaataaaaaaaagtaataagtaataacttaaataaaattcaaaattaatgtgtcaactgattaatattattaaaaattgtttgtaatttttttataaaagttattatatagtatatattctatataaacttattttgaaaagaaagttatacttattttgctaatataagctacttagtaattttatgtattttattatactttattagatttaaatatattttaaaataacgtaaacgttactatataaaaataagcaaacaaaaaagtaacataaatgtatcttcatgaactatatatataactcaaataaaattatgattttaaaagttagtaacaaatatatatttatataatatatatatgggtgcactcttnnnnnnnattacccatgaatgggtaaaattaga

SEQ ID NO: 170462 - DNA, 1552 bp, Cannabis sativa
ttgtaaatcctaggttttcaaccatggtgccgcgactcgtatggggagtgctgcgacccgccttgtggttctgggcagtttcaaatgcattatttgaatgctcataacttagtgatcgggactccgatttaggtgtttcgagtatcattagaaagctcgttccgagatttatgtatttatttgaatttgattgtcaattttataattatgtaagaatggatttagggattaaccctattatgtgaatcccaaaaattgtgactaggattactggcacttgatcaggagcacccggagatttggaatctccacgtactcggaacaataggtaagaaagtagttagtacgtagagttaagcgcattggcacccatgttgaatattataattgtgattaatttaagaacccggattaggattattacccgaaagtgagcggttatatggtctagggttattaccctagttattattgatttttaaatcctatgccattatttatatattgatttaaagaattatgcactgaaagcataatttggttggactcagcaattagaaccgagatgaactgttctaaggccttattataaataaaagtgtgagcgtaacacgtgggtctatgccacataaatgtaaataggcgtgtgagcgtaacacgcaagtctatatcaaatagacattaagtgtaatggcattattactatacatgtgaaatgtatattgtgattattgatatttataatgtcttgctcgacttggctcacgggtcctctactgtgcaggaaagggtaaatcagtctatgatcagccatgagtacgagagcttggtgatgcttgtacatgctcgagccacactagactaagccggttgggtctatcagtgattgtattttgtaatctcaattttggccgcttaggtcgacacgtaaattaacttgtaatattttgtgaaggttttacgggatttcctgtcatgtaactttttggtttgtttataaagttaaaaattgttagaaattatattttcattctgttacagttaaagtttaagttttcccgcttttatctttctagtaatcccagattagagagattagtgttttattaatggttttcgtagtgtgcctaattgttagggcatcacagtttggtatcagagcgctaaggttcttaaacttcctgtaaatcggttgaacatgtacaatcattgtcagagacaagctcggcttgtggtgtagtaagtgttgagagtaaatgcttaactgcttatgtgattatgtatataccgctttccattttaggcaatatgtgagcatttagtatgtgatatgaaactatttttagtgcattaaattgataaatgtttatttatatgaaatgaaatagttgagttagggtttaaaggcaataagtgcataagtgtggcattggtgtttgacttgtcgatgttattaattacagggttatttgtgaaaatggaccctccacaatcatctagaccatagggcgagcaagtagagcctggtgtagacaaaaagatcggaagagcg

SEQ ID NO: 170463 - DNA, 698 bp, Cannabis sativa
  modified_base (648)..(658): a, c, t, g, unknown or other
ttgcttatataggatttcttctatggttagatttaaataatatggaataaaaaaagattaaatttgctaaaaattctcttaagtggctcgccataggatgggccgcactagttagaattttgcattttatttaacaatttatctgttctttcactagtaccatagtttccaatttcaatcctttaaatgtcaatactatttattcaataattaaaattaattatcaaataaaattttcatttaacttattttagtaattagacttaacaaagtctctaaattaacaaataaaccctaaaatcttttttcatcatgtcacttctatgtctagatagaagctatagattctgtatctatgattagtgctctaactcaattgtactatcatgttatcaagatttatgtgttactgaactaattggttagctttaacgaacacttataagaatataaataaaaatcttaagattgaacctaaccatatgaggattaagatcttttgatctaagatcaccttggtgatattaacttagaaagatacaatgataatattataatatctttaacaagttcaatatccgtccactccaatgtatactacatactatcaatactagcatactttaccaataccttggaaaggacatnnnnnnnnnnnaaggtgtaagtaaactttatcgctaattatcacatcagtg

SEQ ID NO: 170464 - DNA, 1001 bp, Cannabis sativa
gcgagtttttctagagggggatatatagactcttcccctagtaaccttttacttacgtagtaaataggttgctgatgcttaccctcttctcgcactatagctgcactaatagcattttccaagatggccaaatagagaaataacatctctcctgttattggttttgccaaaactaaaggcgtcactagatgcctttttatattctaaaaggcttcttcacactcttttgtccattcgaacttcttgctgccttgcaatacattgaagaaaggaacacacttattagttgacttcgaaatgaatctgttaagtgtagccattcttcctgtcagggcttgtacttccttaggcttatcggtgatggcatgtctattaatgccttgattttctcgggattcgctttgatacccctcgcgttaactatgaaccctaaaatttttcctaaagagactccaaaggagcactttttcgggtttaacttcatgttatacttctttaatattttgaagcatgccgcgaggtcaatggtatgatccccactttttattgattttatcaacatatcatcgaggtaaacctccatgttccgccctatctagtttgcgaacattttgtttaccaatcgccaatatgttaccccagcgttttttagcccaaacagcatgactttatatgttgttacgaagcttgtatgctcttgatctgggacatgcatttttatttggttatatccagagtatgcatccataaatgacataagctcatgtccagcagttgcatccactaactggtcgatctggggtagtggaaagcaatcttttgggcacgccttattcagatcaaaaaaatcaatacacgttctccaaattccattaggctttgggacaagaacaagattgcatatccatgagggataaaacacctcgcatataaagtcattgactaacagcttgtccacttccttttttagtgccccttgcctctcggaatctaagggtctc

SEQ ID NO: 170465 - DNA, 515 bp, Cannabis sativa
tataaaaattaatgtttaaactgttaattagatttgcgtataaagtaaaaaaaaaatcacgtcttagtttcgacgtgttaattttattttaaattttttaaaattttgtcaaatatattaaataactacaacgtttacgatcataacaaaatatatacacccatttcaagggggtatatttaagggtgatcatctaatccgtactctgtggttccaaactccaaccaatccggaccaaaagaccgaaccaaatgatctggtgtgaatgatttggtcaatccgaactgtttaaaaatctctagttcggtcacaattttagaaatttcagtagcggttcaaaccaaaccaatctgtataattatttaaaatatacttaatacataatttttttgacaaaatgttgatatttaagaataattttaggtagaatattgatattaacttaatattgttatgctaataatttattattatttatatattataaaattattaaaagttagttaccgaaaaat

SEQ ID NO: 170466 - DNA, 530 bp, Cannabis sativa
tggatgagctagtggctttttttttttcagtttagaggaagaagtagaataaaaggaaaagaaaaataaaaaggaaaaaaatatatttttttatagttaattttttttttaataattttaaattaatttttataatattttaataattaatattacgtgaaccactaaaaattttccacgtgtacaagtgggcaatccactgtggcattcaactgtgatttttgaacggagggatacagagcaaaacagaatggtagtttagatagtcttaccaccaaaaaatcaatttttatggttaagtgttaaaatatataaagttcgggtggttttgctgtcaatatccctattacgtgcaatgcacgtctacttagttatattcttaatttttattttagttatgtatatttttagttgtataattactttttttatgttatttaataaataaaattagtttttattaaaatgtttaatttaagtattctttataaaaaaaatataattatattcaaaatttattgttaattata

SEQ ID NO: 170467 - DNA, 510 bp, Cannabis sativa
ccagccactttccttctatgctaattttcctaaaatataaaccaatacatagctaatagacaatatcatttaaattaccctctttaaccttattacattttaacatattcttaaaaacataccataaccaaaaatgcttatattccgactaatagaatttgtaaagcataatttagaactttaaaatgttattgtatccaagtttactcatacctccagtacctcaaaaattgaccaattaaacaaaactaccctatataaataggggcccaaccatataataggtgctaaagccttttaaggcgccaaagccataaaaatggcgcaaaaggagtaaaatcaatataaacaaaactatagcaactttacaatataattcattttattggcttaccctaaactaatatatagcaaaacaataagatgagaacaactcaccacctttccaatagtcaaccctataccacataagccgagactcattgtctcaaaactaatgtaacaatttac

SEQ ID NO: 170468 - DNA, 588 bp, Cannabis sativa
agtttcctgccaattgagtatctttttactaagttttgcgtatcttactggaactcccaaaggacaagtggttttgctgtgatgattacagtaggattcatatagctctacaaaatttggtatcacttggactcaagattgttccagcttcattatgtgaaacttaagaagcatgtagataaatgattgtttattgatgaagcagaggatgattttaatggcgaattataagtggaaaaagactacattatttctctcaaggtctgctgctaattgctataggtgatcgagatagtgacacgatcaagagacatgaatctgtgcaattagtaattgataaatgttacaaatagatttttattagacattacatgagcttttatcatgttattttgtacttggaccaaatttcgtgatacatgtattgaatattttgatggtataagaaatatattagattttatcaatgttattttgtacttggatcaaagtgttattattgagaaattatagcaatattaaaatgtaatatttcttaatatatattataataataatgtaataaaaaattatatgattacattttta

SEQ ID NO: 170469 - DNA, 529 bp, Cannabis sativa
tgcatgaaaataaacgttttgcaatttgcagtgtgtttaactttagagaaatgttaaagggcaccactggtgtctaggaccctcttatgtgtcaatatcgctattggttcaactaagtatcaggtcccatatactttaataaaatagcttttaaagagtatcgctagtcaatcgcaacgcgacatgtcgcaaaagtgctcggcaccactggtacctaataggaatgcacttaactttattaataattgtagtgaccacactcacatgtaatcagtccaaaaattaatgtacatttattggatgaatctgtcaagtaaatgaatatggcactgattatgatatatatacattaattgttcacacgtgactagcattttacatagagaaaattacaccctatttttgttttaatatttgtgaaaaggcgactttgaaagttcaaaattctcatcaaattgtttcttttgaaatctcacaacaattttagttgatatatggttctatacgtctctgcataaatttctaatac

SEQ ID NO: 170470 - DNA, 1454 bp, Cannabis sativa
ctattcccttttcaaaaaaaaaaattggggtttccaaatgatcaaaataacgagtaaagttagcagtcattactaggatgacgtatgttttctataacttaaagattgaaccttgcagttatgaacatcttgggctgatttagaataccatttgggaaattacattcaaggagatgaaaattttagaaaatgatgattatgatttccctaccagccatcagtaaccctactacacacaggctctgtaagctaggaagcttaaattagaaagtgcagaatagaaaagcgtaaaaggaaagtttcaaaaatagaattgtaagaagcttgtggtaagtttttaacccatatgaaaaacttcagttatccaacaaacacttacaagatcaatagtgcagataaatttccaataaaggcaggcaaaggaccagtgaagtagttctcatcgatcttgctacaaacaatttgaccaattgtcaagcaatcaattcatccaaagtacataaaagaatgacaaaatgataacaaaagaaaattaggttgaaaagaaattccttacaaaacagctagatattttaaagctgtaatttctctaggaatcatgcctcgtttgcccaaattgtgcagtctcctgcaataataacttataaattatactatgctacaaaaaacatttaagcaatatcagtgctacaatgctaacatatcaatatgaaagtagtaactaatgatagcttaatttatttttccttgttgaacatgagacatgacacgccaatatcaacaccagaacttttgtaattgaagattaacttttgtaattgaaccacacagtagttcataaagaaagaacatacagttgaataatgtggcaagtcttgttattgttgaacgaacaatcacatttaattgctgggttattaccactgctttcaaactctgtctcatctatggcagatccactacatggctctccacttatgttccataggggtgttgcttgtgcatcccattgttggaatattgagttcagggcactcactatctcgttaagcataatacaaaactagtttagatgccatctcttcaacatacaaagtacgagctaaaataaacaaatcgaaatattatatacaaaaaagaactatattacacataattgtaaggaagatccaaaattattgtcaatgcattagtggaaatcatttcttcatattttgagtgaaatattaaattcacacttcgtaccaaaaaaatttatacgtcgagttgcttcaaaaagtggctcgtagaaataagggtgtgtttgtaagtaactgtgtaattactaagtaggataattactaggatagtatttacacagtttaataattacactatattttaaaatgcaaggtctgtttggatatgaggtggtaattatatatgaatttttaatatcttatttggcaaaatag

SEQ ID NO: 170471 - DNA, 592 bp, Cannabis sativa
aatttgacacaaaatatagcatggaccaaaattttctctaccaaattttatacacaataaatattacttttttatttaatttttaatgtaattaataactttttttttatatatatattttatatatttagtatggtctttatatactttcgataaaaaattaatatttttattgacttttttatacatttctatcaaaataaaatttattttacacttagtgtattaaagcacaattgtaaaatttgagtcatgtataatattaactgattttttgagctaaatttagcacaaaatttacaccatcaattggagatgatctcacatgtcttattagagcatctctaataaagatataaaattaaaatatagctcagttagcaaaaacaagtactgtaatgatgtgttaaaaaatattcaaatattgtgttaaatttagcacaacatttgtgataatacaaaatttgtattatcataaatgtactattttatttttatttttatgtcatttaatattttattaatatatttaactataatattaaattatgaataatttatatttttattttattattttatacaataaaat

SEQ ID NO: 170472 - DNA, 514 bp, Cannabis sativa
ttcgggtagtcgggtttgggtttttggatttcgggtgttggatatgcataaccgaacccaattttcggatggtcgtgtatggcgggtttcaggtcaggtatatcgggtttcacgtggtcgggttcgggtgttatttgaatgaccacgtttcctcggcaaaagaaatcatatattatataatatataatatatatatagttatagctaattaaaaaatatacgtatatataattgatagtatagtcaatatcaaatcaatagtcattacagtattatacaaattaattaaataatatatataaaatgaaaattataaaattatataatataaatattattaatacaagacagaaactatgaagtgtatattagaattattaaagttagccttttcaaagaaaaaaagaattattaaagtcaggcccaatactagtccattaggccttttcttattactatgtatatatacagaccttttgtaataaaccctacaagatatatcattttcagcagc

SEQ ID NO: 170473 - DNA, 659 bp, Cannabis sativa
tttcaacttaaatatattttatataaaaattcaaataactacgtatctagaaaaatctaattagttacaacttctttatttaataaaatatcagtttaatacatatagttattcttgaattaatttcattaaactaagtgtatttttcttaaattaatttcaaaataatctgatgaaaaaaatatcatattttgaaaaataattatgttactaataaatttttattaggttaaactagtataattaatatattacaattattcaaatatagtaaatgggccttcacatttttattttagcaacctagtctattttaattattaaaattaaatgggctccctatatgcatctaggtccaaagcaaacatataggcacaagtacacacaataatttggatggatcctatcatgttactggatttatacacaaacgaaaaaagattacaaaatttacctgttgcaaaatatttatttgacctattaacaattagactatggttaaaattagatcattggatctgtcaataagttaaccatagctatttagatcaaacaataataactttaaaaaattagtttgaataaacaataaataaacacacatgtaacaacattggatagttggttataggatttattaaatttaaattaaataatta

SEQ ID NO: 170474 - DNA, 735 bp, Cannabis sativa
attttatatattttattttaaaaatacattaattaatttaatatatattttacacataaaattaaagaaaaaaaaaaactttagatctaaaatattaactttcatcttcctaaacgctaataaaattatgaatgtgtattgaataaattaattttttgacaattttattatgggatcataaaaattaggtttgactaaactagtttattatgtatgttggattattaggttttaaattttttaaattattttaaattatgtaattatgtttttttatgtttttttatatttatatatatatttatatatatttttctttttagtgaaattaatttaaatggtagctaaaatagattagatggatccaatccaatccaatagaaaatcagttaatgcatctaatggttggaaccgacccaatccaatacatctaatgaatcagatcagatcagatgacttaattcgattggattggatcgggtgacaaaatcaaatatccaataaataattggattgaattgttgggtccaaatctattggatatgatccaatgaacacccctggtaaacttattaactaattttatgtctcaatattccaacaataaaaatactaatgttatgacacagactagttgctttaagcttaaggctaattagtaatttttccccttgaactttgacatgtagtaaactgtgcccctaaacttttttggccgttaaaaattctccccaa

SEQ ID NO: 170475 - DNA, 539 bp, Cannabis sativa
  modified_base (378)..(382): a, c, t, g, unknown or other
agagagagagagagagaaagacatgaggggaagacttcttttcttttgattatatgttttatttcttaaaaaaaaataatacattttagttttatttcatatctctatagctccaggcgaactgatcctttttcgccctcaaaaagcttattagttgttatgtcaattgttcatccaggttcttcccaatgaacacacactttgtgggatttcataggtctagaacaactttttccaattcctcaatcggtttgaataaattcctttcatcttaaatctaaggatcaagatcctcatctttcttctcgccttcctcactcaagactgccattagctggtgaccggcctttctgttttgtagctctatgcggtagcatnnnnnagccagcatttggtcacctcgcactactcccacacctatcggtgtctgaaacatcaaggataagtgcttgattgaactaactacccctagtctaattaatgttggtcgacctagcagtatgttgtaggctgatggcaggtcgacaactaaaaagtct

SEQ ID NO: 170476 - DNA, 1299 bp, Cannabis sativa
caatctcgtgaaatgtgaaccaacgggtaaaataacgattatatcattaaatgcaaaatggaataacttattaaatatggaattaatagagtatattcataactcgctgactgtatagtcttaggcgagacaagaatacataaaatatcaattcgtgtattgacgagaaaccatcttgcctcggaaggcataatctcgagggagctacggacactgcataacgagacatctacctcgttacatgtaagaaggtatgacgaggcgaatcgactgttaaaacacttagcgtataatttacgttataataactaagtgtaacaacttggaaacatggaggacatgattgtccagcctgtaaggtcttatagtcaaagagtagttcttaagtttgctcagtacactggtgctcatgccattgctggaaggcatatgaataaaccaagtcaatcatctatgtacaaagtgagatgcctctagcgagatgctcctatctcacgtcaatgtctactaccttaaagataagaataacaaacggttacacgaatttttagctctccacgtgttaagatggaacgtggtcaaagcccacgattcgtgaaaacagttatgtatttcaaattcaaatgtaaataactgtcaacctatattcctataaataggggcagattatatagaaaaaaggggataaaaaatcttcgagagagatcactgattgaaaaaactataattctgtatccagaaatatcttaataagatagagtcgtggactatgcagagttaattgcaaaaccacgtaaaaaacctggtgtcactattgcaattattattcttctcaaatttcttatagcttctgtgtttaatttattaagataaaggcttattaattaacaaaaatctgcgttaacagtttggtactttcattgagagcctacgtgataatagctcagaaaaatccctcctaaccaaccagaagtttatccatggctgatgataatcaaaacgatgatagtcatactgaagagactaatctctgtcttggaaaagaactaatgggttcacagagaacacccacttcaagaacagcacgttcaacacgttcaagaagaagccaacgtggttatgatcaaaactcggaaattgggaatgaggaaaccaatactaatactggtggttatgtacctaggagtgaggatgcctatgatcccactaggtatgtaccgctggttgaattggaaaaccgccaactctagcaacgtctggccgagtctaaccaacaaaacgctgagttggaaagagagg

SEQ ID NO: 170477 - DNA, 529 bp, Cannabis sativa
gactaggacagggacctgacacctgggacctgaacctggactgagacctgtattgggacctggtcctaaaccctcgccaggacctaagacccgcgagccagactaggatctagaccctgacaagcacccaaaccttaactcggaccaagatttggaccgagacctagacccaaacctagaccgggacctggactaataccaagactcaagacccgaactcgaacctcgacccagaccaggacctaggaatcggacttggatgggggacctagacaagggacctaagctctggaacacagatctagatctaaattcgggactcgaactagaatcaagacctgtcctggacccgggaatctgaagtcagacgcagacccggacctgaagcctacaccagacccaaacgaggacaggaacctagacacgaagccataccaggacaaaacccgaacccataatcaaacccaaacccggtacctgaactcaaactcgtacccagaatcagacccaaacctaggcctgcacccag

SEQ ID NO: 170478 - DNA, 1660 bp, Cannabis sativa
  modified_base (76)..(82): a, c, t, g, unknown or other
  modified_base (369)..(370): a, c, t, g, unknown or other
agaataatcaaatccacttagaatttatattcaatgcaaatgtcatagaggaatgcattagtaattaaattttgtnnnnnnnaaatataaatgaacatatgatttttctaaacctatatgttatgggctctcaagattaaattcacatattcctatgcaaatctagacctagaaaatacaaatttagcaccaatttcccatgggtcatacaaggtaaatagcatattcctataccatctacaaatcacacatttttaaggtgataatcttgcatcattcaagtatctctactaatcttattttttctaaaatcaagattagctaacaacctacaattagtgatcaagcaaaagtaggtagacaaacatnnggcatccttgaatgaacaaaactttcttaccaaaatattcataaaatatcaacaaaattcacaatccacggttcattaaaagttctaactaagataaattagttcatgctaaaaaaatacaaaaatatccaaaattctatcatttattatagaaatagaaaataaaatacaagaagagtaaaaggtaaagagagcaaactattagcctaatctcagtctctttcatttcttgtacttctcctccattttttccttttcttcttcttcatcttcttgagtttctttgaataatggctgccaagaattgtgttcttccctctcaatggtgtaatggaggctaggttatattctcccctctttttcacaaaaatatcttcataaaaatttattcctcatgtgccctaggaattttctagagatttcctcacaaatttgtcacaatccacatgtattcatgccacctcagctattttttgccacgtcatctttttcaacattagttcaacaatcacccttgctacttttactgcagcaaagttcctgcaaaacttcagcaaaaccttacactttctctattaagcccttttttttttaccaaaactaaaataaaacttaataatttctactaacaactccaaattacccaaaagaacataaaaatacaaaatagcatatattctcacataatagaaggaaaagaactaaatacaagtaaaatacacacacaaattaagctaaaaaaacataacaaataactctttattcaagagttatcaataatcttcatttactcacactcactgctgcttagccttagctttccccatacctacacatacaaacaataactgtgagtcgacagactcagtaaaaaaagcataatcataatcataaatataactcggattataattaggcgtccatacacccaaccataaccctatccccgcatcctacgcggtactgagtctagaacgttcgtatgacagtactactgaccataatatcagcctatactcgtctagtcgtactgatgtaatagcaccaattagtacttgagccaaacatacatttattggtatctaatacaactatacgtatattgataccctatcaatgtaatctactaggctttataaacatgcacgttaaacatgtaatcacatatgcatatcattataataatcttacctcatttctaaatttaggtgtgctagtcaactagagtggaacagctgctcaacgatttataggcccttaagtcacaatattcataaaactggtgagtga

SEQ ID NO: 170479 - DNA, 639 bp, Cannabis sativa
tatgggcataaggcgaattaaattttggggtactcagaaatatataaaaaaaaaatattaaaaaaagagtgttatagaattagaattcatgacattatataatatgtcatacacctcaatcaactaaactatgaatatttgttatttataatacacttaattttacttaaataaaaatttaatgaaattttttattttttctttgttatttagaattaattaatctcaaattactatgtttattaatgtcattgttttttgctaagagaacatatattaaccttaacacttattgttttctttctaattttatttttctcaggaacttatacatacagcagagtaacttacaatgctacatcaattggatcaaacattaacaattgtagaaaagtggttgacaatgctcttaaaatatcagaaaaatgttcatactcaaaatgcacatttggtaggatatggaatggaggaggaggacttggtgcaactaattatgttggttcatttttctttgatagggcagctcaggtatacatttatgtataaatatactaggcagaagttacgtgtctagccagttagttttattttaggttttagttatagttatggttttttttcaaatgtcatacgtaattt

SEQ ID NO: 170480 - DNA, 641 bp, Cannabis sativa
aatattaaataaataacatagtagacatcattttaaagcactatattctcaactctcatcatactcggtctaatctgttgaataaagagaaaaactctccttggtgtgagctgaacaaagaccttgcttggtcttcatagtgtacttgttaagatccatgttaatctcctacgtgtactctccaccaaagactagattttgaattttgaatagcttgtgtctccatgcataactaaccttagttggtcatatattttgaattattctctcccacacttgtttctctaactaactactacttaatatctattatatcaccataatggaaactataatgtgtcacatgttttctacaccaagtatgttatgacacctcaattcatataaatagttcaaagacaactataattaaaatcatatataaattacctataattcttttaagctccatacatatacatattgtacagttaaatttaaccttaatcatagcttccaaggttcggctacacaaaggaattaataaattctatttattctaataagacttatcatctttatacagtcttggccgaaactacatggccctagacttgggtcattacgacaccaactaatatattttaaatacttaaaatact

SEQ ID NO: 170481 - DNA, 614 bp, Cannabis sativa
  modified_base (415)..(416): a, c, t, g, unknown or other
ttcttaggtcctgcgtccagcccctgtttttcggtctgggtctgagtctcgctccgggtcccggtctttgtttaggtccaaagtcacaggtcccgatccaagtcctagtctgggtatgggttctagtctgagtttgggtttaggtttgggtcctgctacttcctaggtctgggttctagtcctaaacctggtgtgattcctattccgggtttgagatcgtgtttggatgccagtctgggtccaggtccgggtctgggtacagatctgggtctgggtcttggattcaaacacttactatgggttaggccgaaacctcaagtctagattcggatctcggtcttattccagtttaggtccaaggtcttgggtcgcgtcatatgaatgtatttaggtccaggtttggggttgtgtcccnntacttaggtcttgcgtttcgggtccaaggttgtgtcctgtgtctcgagtttggggtcgagttttggatctcgatcccggttttgaggcgcagtttcgggttaaagtcccccatctatgttcggatccttagtccaagtttggttccaggatcgagtttggggcctaggtcccccttctaggttcagatcctaggtccc

SEQ ID NO: 170482 - DNA, 548 bp, Cannabis sativa
aaattattttctgggttgttctatcgttagttttataaaatataaattgaaccctttaaaaccctaactctttcaagccatgaactacccaagacaagtactctcccaagccatcgattatttctgcttgaattcgtattttcgatctaacatttttttcattttcacaggaagcttttgaaaagaagatcaagatcaaaatcaacaatacgggttcaattgtaagtgaaagttagtgactgatattggtgccaggtgaagatctaattttaccactaatctgtcaaaaatcgtaaaattttgggcttttttatttgataaaaaatcttcacctttgattgatcaatggcaggctgctggatcgaaaattttagaaagaaatcgattttcaggctctgtcgatattcattcatgagaactctagcgccggtctctctctctctgaactccggtgcccatttcgtttcagccctcatttcatccaccttgaactccaacgccgctctctttctcgtctcatcgttggtccatctcaacctcaaaatcac

SEQ ID NO: 170483 - DNA, 588 bp, Cannabis sativa
ctctggaggaatgatataatcaaggtcgtcttcaacctcatttgagtccacctcatttgaatcctcactttttgggagaaattgtggtgcagcctctgaattagatgaggaactaatctcaattacttcttgtaattcttctgaaatcacctctctattgtaactgcagccataaactcacgccacttgacaaagaaattgtaaaatttgtcttccacattgacatgacctaggggattcacaacaacatcaggaacaacagtacacccttcaggcagctcctcaatcttacacttctccacttttgaagattgctctggttgctgcatcttaacagcttcagcatcctcctcccattccaatgctacctgtggatctggtagcaccagatacacattagccttctgccattatttctagctgccaaataaggacaacaacaaccataaatcatcaatcctgacaaccataaaacttatgagaacaaacaactaacatatgtaacaaagctttaaaattatacatgtcaaatcctctaacatgagctgaattgaagcattgtttacaaccataaaactcatgtttaaa

SEQ ID NO: 170484 - DNA, 1003 bp, Cannabis sativa
ggaaagaaacaaagaagcatatatagaagagatgaagaatggggatggatgaggggtaaattgttgggagttggaggttatggctctgtttccgaagcgattatccctggcgaagctcgttctagaccaccacaatttaaagacttcccgtcacttttggctgtaaaatctgctcatccaggttcttcttatgccgacctcataatggaaaaggttgtttatacgtctttggggtccagtcctcacatcctcaagttctacggccacgatcatacattttctgaagaacatgatggaaactatggcggaatcatttataacctgtttttggagaatgccttgggtggatcattgagtggtttgatcgagagaacaaaggttgggttgcttgagtctcaagcaagagtacacactcgctctattcttaaaggattggagttgatacaccataagggttttgtccactgcgatataaaaccatccaacattttgatggttcattgtgatgatgataatcctcatggtgtggatggtttggttgccaaaattgctgattttggtctctctaagagaagtaatgatgattttgagaaacgagtgagaggtacttcgttgtatctgtctccagagagtgtttgcgaagaaactcaagaccaggcctctgacatttgggctcttgggtgtgttgttcttgagatgttgactggaagtacgccatgggatgtaaatttggggcaggaagagctgttcagcaagatttctactgaaacaccttctctaccatcttaccttacttccactgctcaagattttttacttgagtgcttcaccagagaccccaatcagagaccttctgctcagatgttgttgaatcattcgtttgctatgaaatgggaagaggattccgaagaagaagacccagaagaagaggattctgaagaagaagacccaaaagaagatcccgaagacgacccagtaaaagatcccgaagaagaggaagatc

SEQ ID NO: 170485 - DNA, 761 bp, Cannabis sativa
  modified_base (184)..(186): a, c, t, g, unknown or other
aagtaaactacattatagattatcttatgagttaaaccctgtgtactaataaattataggaatacatttaatcacacaatcttgattactttctactgtgttgatataacaataaacaagaatatcaatgtgataaggaattggatgaatttataaatcaaacaggtgatcacatgaaccaaannncacattaaacaagtaatgaaataaatctatttgtttattaataaatgaatattcaaaattacattgaaatgaatttttatttaggacacaaaactcaacactaattcccaccttgatgtctgatggaataaattgtgttttgctgccatctgaacctcaacttgcatgaaatattttggtattttcatcaccatttttgaaccaagcaagcttggttttttgactaagataatgaacatagttattgtgagaaacaatgtaatcttttcgagcagcatcttcctctaaaataaactcataattagtcgagtcttgttgaatcctctactgtacaattagaaaactattcagataagtttgatcctagatagcaacatcacccttaccctgcttactccactcttttgggccagctttgaggggtttcaagtgggaaataagttgatacattggctgccccacaattttctccttccaaatagtctttacaacatcataaaccctgttgtgataaatccaacacgcaagtatacgtattgttttaacaagtaatactcaggtaagtgagatcgttc

SEQ ID NO: 170486 - DNA, 597 bp, Cannabis sativa
tggaagagtactccttttaaaattagatgcatcaataattcgagtaacctccaattcttgcattcctacacaatatattgctgtcttctgctcattcggttgcaaccagaggaagctgagaacaatttcagtccttgaagcagtagcaaaacagatatataatctccatgacagaaaactaacaagtcatcagcaaaacacatatggttcaatttgagagatgcacacctatcatgaaatttgaaccctgtccgagtccaaaccttggtgaatatcctagacagatattccattcctaacacaaaaaggaggggagacatcgggtctccttatctcagccctctctttgcattaaagaatccacacatagagccattcagcaatagggagaacttaggagtggatatgcattccataatgagcttggtgaacttactaggaaatcctagagcatccatcatctcatgcaagaaactccattctatagtatcatatgccttcctcaaatcaattttgatcatacaactaggtttgcaattattcctcccataaaatctcaccaagtcttgacataccagcacattgtgagcaataaat

SEQ ID NO: 170487 - DNA, 605 bp, Cannabis sativa
cggacccagactcggaccccagaccagactccaaactcggactcgaacttggactcggacccccgcgacccagactcgacacccggacctaggacccagaccagacccgaacttaattagacctgtgacctgaaacccaaacccagacccggacccaaaccgggacctgaaccctgacccggacctaatcttaggacccaaaccgggacctgaaccctgacccggacctaatcttaggacccgcaccctggacccgaacccagacctagacccggacctggacctagacccaaactcggaactcgaactcatgaaccagggtcgggactcggacccggacccgaacccaaacccggacccggacccgaaccagaccctggacccagactcgaacctagactcggacccgcacccagacccgaacccaaaccccgaattaacccgagatctgcaacctaaacccgagacccgcgaccagacccaggacccagactcggacctagaacccaaactcgaaacccaaacccgagacccaaaccgggactgggacccgaaccctacccttagttggtgttggggttgagtgtattgaaaatatattataa

SEQ ID NO: 170488 - DNA, 1159 bp, Cannabis sativa
tcaaaatggcaatgtacacttctttcctgtattttgttgtacctaaatattatttttagttataataaaaaattacttgttattcaaaacatatttggttacaacaaattataatttttgtgactcgtattattagcacatactttttaaggataacaaagtcttaaaaataaatttttaattataatattgattaatgagtaccttactatacgatgcatgtggaacaccatactctaatattttatcttaagatgatgactattttttactcactaattttaaatcatcgaatcattgacaatcatttatttgtttgtttatttcaagtctctttatactatgatgatttcatgcgatttactcttcatcttgtacactatttgggtatgtgtagatagtgcagaatatttatggagtggtcatggcctctcctaattttttagaaaaagaaaaagaaaaagtatgcataagatataaattaaattagaataattagattttacttattagaaaaatgtgaattttcttattagtaagcctaataataaattgtgaagttaaaattaaaaatgaagcccaaacctagtagcctatttaaattagttatctattttatagtaaaaagtgacaaaaaaaatattttatcttttatgatagaaggcaaaagaatatagttatactcaatatgacataacaaaaattaattattgttcatttttaaaatataataatttaaatttaaactcactacacatgtctcttatcttttatcttatattaaatgtagttatatcacataaaatattttctaatatagcaatacaaatttaaacatattgtacatacgaaaatagtcatcaagttgaaggcttcaaactttgctttaattgaagcaaagtacccattccctctgtaggtgatacggcttggaaaatgctcagccaatgacagaatcagttatggaggcatctgcaatcaaacaaaaaaaaatgcttatttatcataaatcgcataaaatcgcataaaaatcgcattgaaatcgcataaaaaacagagaacaaatggtgtaagtcatcgcaagaaaatcgcatgaaatcgccaaataatcgcacaattcttataggcacaactatcaggtgaacatcgcacaaaatcg

SEQ ID NO: 170489 - DNA, 555 bp, Cannabis sativa
aaaaattaaaatcataaaaaaaaatacataaaaacacacacaaaaaaaaactaaaaatagataaattataataaaaaaaattaatactaaaaataaaaatttatataaaaaaataactaactaacattaaagattatatctagtaactaataacactatttagctaatattattttcatcatcatcgagaattatttggtttgttcttctttttttgttgtgagtatcacaataattttcatcagagtcttctaaatgatttgatatgttattttcagaatgtactttctttatcttttttgttgttttttcattctttaattcatgttcttgttctaatttttcattcgggtcaaaaaattttgacacagtaaaattctcaagcccttctttcaaattgtactcattcaacttcagcttgtaaacaaaatctttcctacaaaacttttgaatctctataggaacatcattgtttagagacaacttgttaaccaatttatttgctgatgtgtccagtaatatttcagctacttcattaaataagaccaaagttgt

SEQ ID NO: 170490 - DNA, 1236 bp, Cannabis sativa
tcattaatcaacaagcaaaaaaaactaacttattctttcaaaaaaaaaaaaaaaaaagccaacttacaatctcaacacaactcaagcccacacctacaaagaggccatttttaacaataaatgagataattttttttttaaataaaactaaataatattttaaactgatattttatcaaaataaaatttaataataactcaatataaaagtattataacaatactaatattagtaacatcaacaaatttttcttcttgtaggcataagtccaaattcattatgtctaaagtatgtttcacatctcgtttccatgtcttaaagttagacatattcagaatttggatggaagccttattgttgttccgtaaactcaaaaaattaaaacttaatcaagctgtaatgtgaagaacactatgctggtgcagagtggaggtaagtgagtgcgagaacggattccatggagttgtttgagtagcagcagtagcaccaatggtggcaccaggatcagaggtagaggacgacattgagaaatgtcacagtagcgattgataccatgtaatgtgaagaacactatgctggtgcagagcaccaagaaccagaacaaactagaagaattccttgctggtgcagagcaccaagaaccagaacagagattttgagagaaagagagtaatgatgtggtaaaaccacaccctctcaatatgacaaagtctttattatataggcactcaaagttgttacaacataacagaaaacaaaacagaaaaagaggttaacaacttaacagacacatataacggtattaactaccgtgactgtttacacaagctatatgagcaatataattaaaaataaactcttctttgtggtgagaatatagcacacagatgatctaatttcatgaagttaacaaaataaaaaaaaattacatatcaattaagaatttttacttttgggcaaataaatttcttaaaatatatatatctgccatgttcgtcctctacgccatccaaaagtgggatgtgccttctccgcacgaggtcagttggtttttttacgtgaagtctaccctcaagcaaggcaggtcggggtacttctacttctctcagcctaacttcaaatggttgacgggcaccgtggacaaggccgtgagaaaaattaggaattttgttgacaagtattacatggttggaggcatgggcaccacttatactcggttccagcaaatccctata

SEQ ID NO: 170491 - DNA, 506 bp, Cannabis sativa
  modified_base (479)..(481): a, c, t, g, unknown or other
tttatgaacccaagttcatacacacttcacaaaatattcaatctcttcacataaaacaaaaataaatattatacaaattcataattataattacaattaatcaaatttatggtgaaataaaacatgctcatcatctttataaacctaaatttattcttcaagaaagccaccggtgttggtttacacataaaagtcacttgtcaatcaataccttgatcgattcacccttcttaccatgtcatagtcgaaagccttcccaccaaaatgtgacactcaacttcctgtgatgctttcgtcactcagatggagatccaacaacccctccgtcgaacaaacatagttcgttggtgagtgttagagaatgagctactcttcccatttccaattggttttttgagatggaactgttggattatggtttttactaggatctagatttactaccatgtatgttgtttaacattctaaatatgaatttnnnaaacaatgtaatttaaacacatata

SEQ ID NO: 170492 - DNA, 703 bp, Cannabis sativa
gagagagagagagagagtttcaaatggggagaatattattgggattaagggtttttagagtattaaattcttatattgtttagggtaaaatattaaaagaccttacacttaatttaagcatgcattatcaaatttttcttaactttttattgctagaatgactattttttggcaatgatgataaaaaagaagcatcattgccaaaataagtatctctatgtctttgacgcattagcatcaatatatttttatagactatcaaatacaagactaaggcaagcatcattaaaacaataagtattgtattcactactcagtgtatattttctaaacacaatatcagatactagataactcaatgcacataattttgtattgtgtggagtaccattattgttaaaatttgagatatgatggtgagtgtgcaggattgagttctatcttaaaattaagtaatggacaataaaaaagtaacctatacattttatataggaatattggcagttaaaccacttgaactttacggtttgtaacagttaaccacaaaaactgaaattttggcggcataactacctaaaccctgatttcgttttgctctgtacacgtctgtccaaaaatcacagttaagtgtcatggtggactgtccacgtgtacacacttttaacgtggtaaatttttagtggtccacgtaatattagtttta

SEQ ID NO: 170493 - DNA, 511 bp, Cannabis sativa
aaaaaaaaaaaaaataatccattcattttttttattgccttttgttgtgtaattggctaattgtgttcataagtgttcttgaagtgataaaatttgtgatgaaagtgtttttcccaatatcatgtgcatagcatgaccaaatctattttgaattcctagaacgagttagattcttaagagagcttaagtctctagaattgtttaatgtttcatttgaggcaaaatcctagagaacacttaattaaggatatgatttaggccatctttggatctttgagcttttcgaattaaccaatatatatttttatccctagtcaccccattgagcttaatttccctcttcattcttaacccatgataagcctccctacacacattatttttcctataactccttaaataccttgatcttgttgggaatattttaccaggatctaaatttactaacaagtatattgattaacatcctaaatataaatatctctaaaataatgaaattaaacatataaga

SEQ ID NO: 170494 - DNA, 689 bp, Cannabis sativa
  modified_base (634)..(641): a, c, t, g, unknown or other
gatgtcaattaatgtatgtttggctcaagtattgattgacgatatcacattggcacgactagagtatcgagtataggctgatattatggtcaatagtactgtcgtacgaacgttctagactctgtaccgcgtggcacacgaggatagggttatgattgggtgtatgggtgcctaattgtgattcgggttatatttatgttatgattatgttttttcttactgagtttgtcaactcacagatattgtatgcatgtgtaagtaagggcaaagctaaggctgaactacagtgagtgcgagttgatgaagattgtacatgtcagggcggttagacctggagcgtacgatctttgggacatcatctatattttgaatggtcaataggcgacaacttttatatcgaatattttgtatcacaattgtaaatattttaaatacgggatcccgatttatataaaaattatttactttcaatttaagggtaattaagtaaaattttaattactctcgatttttaacaaacctgttgattaacaacagattgtacaattaattaaaatcacgataacacgcctaaactagtagggtattacaatttagtgtcagagccgtcaagttgtcttccaaagatcatcannnnnnnnacaatcatcatcagagataagctcgactcacggttcagtaagccttta

SEQ ID NO: 170495 - DNA, 1130 bp, Cannabis sativa
ccattttgctctaacaaacaacaactgtattttccagatatagttctagccaaatcaacaataagatcatgcatgacaaaagatgcaccactccaggtctttgtctttacaaaaaatgacatagatactaaatcatcaaaatactcacagccaacttcttccatttttctactcttttcagaacgttacagattttcagccatccatattaagaccaagtcctctcttcgaaattcatagccttttgggaatattgaacaataagaaaaacaccctttcaagtgtggggggagatagtagtagctcaattccaaaacagctggaacaattttgctcctttcatgtgttagctcccaaatattactctttgctatttgttcccatctctcagcatcccatgttgatctcaagagacctccaagaactttaacagctaaaggtaaaccattacatttcttggaaatttctttgccgatcctttctaattttgggttcacaataaacattctagagttgccactagaagttgcttcacaaatagtgcccaacactcatcttttgataattctataagatggtgcgtatcaacagttcgaatgatatccgcaactttttcattcttgttgttaccattattttgcagcctcttgcaccgtctataaaaggcttcatcatgtctgtccactgaacataatcatcttcccaaacatcatctagaacaatcaaaaacttctttccctttaacttatttgacaaattaatctgaagtgaattcaaattcatgtcactgcaagcattacccggggctacttcttgaaggagagtttttgtcacagctatggcatcaaatttatcagacacatacacccatgccttaagttcaaacatctttgtcactccttcattgttgaaaagggtttgagcaagggtagttttcccaatcccacccattcccactatgggaatgacacatatcttttcactactatcttcatctgacatcaacatcatcaaagcctcttcgtcagtctttctaccatatagttcaggttcatctggtagagaagtctttgcacgtgaactttctaaaggtttcatctcgacaacattcttttcaagattcaagtttc

SEQ ID NO: 170496 - DNA, 600 bp, Cannabis sativa
aaggttgttaccaattaaaagagagttaaaataacatattccatgcattaaaatccaacatggaacccccaatttcatattgcaatatcaacacaaaacatgctcaaacacacaactcatcaagctcaagaacttgagcttaaatcaataatctcatacattttccagcagcatatcattaaatgaaacttcattcccaacctagaaaatactcaaaacaactcatctaatactcaataatataatccttaacaacaactagcaatctcacacccaaaatcaccaaaatcaaccccaattctcaaaacatgcaagctcaagaacaccaacactttatcatgcttttcaaccaaagaaaatcaacaagaaactaaattaaaaactgtagagactacctcaagactttagccagaacaatccccacaataaagcttcaaagattagctcaaattcacaccaatttcttcaaattcaacttgaaaattaaagagggtttagagagagagaggggtcgggtaaggggtggagtaaaccaggaatttccttttgttttttcttcaaaatttcatcttttatcaaatatagaaaataaaggtcaaa

SEQ ID NO: 170497 - DNA, 514 bp, Cannabis sativa
atcattaacaatgcaccaatcaaccctttcaaaggagttactatgtttccaagtgaacttatttccaatacatggcaaaggagtaagattaaacttagaaataaaactctgaaaattatgtatagcatacacagggggataattagtattagatctatcattaacagtgagataatcattaaaatcaccaaaaataaaccacgacatagtaggggcaatatcatacaaccgattcaaaagagtccaagtatgagtttttaccgaaacataaggagaaccatagaaataggaaacatgccatttagtattaggattatcattcatagttacaaaatagtccacatgattagaggagtaattgttaatatgtacatcaatagcagcagtccaaaacagaagtaaaccccctcctaagccccttctaggaatttccaaaatattatcaaaagaaagcctagacttaaaactaaaactagaaccaacccctagtttagtttccataacaaaaagaaaa

SEQ ID NO: 170498 - DNA, 548 bp, Cannabis sativa
gatctacctgatctatgtgtgaagaacttggcatcattgattgttgtgttgcttgagtagactctgaatggtttatatcaggtgaaacagcaggttgaacagcagattgagtcatgggactttgtgcttcagcttcatttgggagagagttactggtttgaggaagctgaacaggaagttgataccaggaacttggggactggacagtaatatcagactctttttgatagttattgagaaaaccattttgaaatggaaaatctctttcattaaaaacaacatgccttgtgatatagactctccctgtggaactcaaacacttataacctttatgaaactcactataccctagattaacacatttggttgaatgatattgaaatttatgtgtttgataggacctaaggcaaggatagcaggctgtcccaaatgttttcaaaaaattataatcaggtttcttaccaaaaagtatttcaattggggatttgccactaaggacaggagtgggcaatcggttaattagaaacacagatgtttggaaagcatca

SEQ ID NO: 170499 - DNA, 519 bp, Cannabis sativa
tttgtttatgaacttaattaattactgtctaatacttttgaatttggtcaatctctgattgcccatgttttcactaatgtatgtattaaattgtataaacacatatttagcgaagaaaaatgttaaaaagtactaattttatttagtcccctccaagatataatatagttaattaatagaattaagtatcagtactatataatttaatttagtacaattgaatattacaaggcgttattttaaggtgatattaaatactattagtgtccaatatactatttaaagaaatattaaggagtcaacatgacataataagcgatataatgttattataaaatttaatatcaatcttatatattttgatttaattaataatataaaatattgtaacattcctgctttaagtctttattgggttcttacactcatggaataaatgactcttatatacgagtacgccactctggctgcttcctgaattgatgactgaccctacagaccaacacgagtgattccagc

SEQ ID NO: 170500 - DNA, 890 bp, Cannabis sativa
gccaagttttggctggccatgcatttgcaggatgcacgctgaccggccataggatcggccaatggtagctgaccaacctccttgaggttgttagtccatcatttgtcatctagtttgagtgtcgggactctccattagttgaagtattgagtagatgacttgaccttcttattggtaagctatactgccatgtggtactgatatcaaccacgtagacatgccacgtcaggtgggcaaaaattgggataacattttcccctaagtccctgtgcagacgtttgtgcggataaggactttctagcttagttgtgaatgatgtagccttaattgagtaaatattgctgcatttttagtctttgaaatatctactcttgattgtctaatctcatttattgtagtaagttaattgcattgtacttatacgtgcgttatacgtgctttttagttgaacactgtgtggcaagtgaagaagtggtcccacaatagccatataagccttatggaggaaaactcctcttcacttttcactttctcactagaaaaagtaactttgaagaagctcttcctcctctctagaggccgaacccacactgctccatctctcgagatttttgcgtcatttcgatgaaccaaagcttcccattctctttatcaacgatttcttgtagtgggtaagctttttgttcctgctatttacttgatttaattgattttactatgattgcatgaatcttttctttactttgaatattttttaattccacgttagattgtaaccctttcgatattttgatccgtatggtagtcttaggatgtgtaatgtgtgatttttagatgaaaaagatctgattctgaccttcattctgattcttggctctttgagtcatgaa

SEQ ID NO: 170501 - DNA, 543 bp, Cannabis sativa
ataatacattgacactttatggtaatactagacaccatactaagcaccatgggtactctttaacgtttcttttaggggtggacatgatcaaatccaattcagttaaatcgaaccaatcaaatcctatccaattataattagattagattggattggatgttaaaagttggattttttttctttattgagaaaaaaatggtctcattaaaacgttaagagggaaaagatcaatgctaggcaatatcattaatcataagaatcaatctataaaacagcatcaatacaattaggatgaccaaaccaccaaatataatgagcatttaaggaaagagctagcttagttaaattgtgggccacactatagcaatcctaggacaatacataaaagaaatatcaataaaatgagtacaataaaaaataatatctctattaatataacctaactaagattgatcaaccttactatgtagaatgacattaataacattaaggtggctgttgcccctgattttgctcaatatacgtggaccaaccgtacaatga

SEQ ID NO: 170502 - DNA, 736 bp, Cannabis sativa
tagaaaaataaataaggtacttaagagagggaactacagatgggtttgctaataatttggcatcctaacttaaaaatacagctaaaaatagtatataggtggtcgatacaggtgctggtgggggtcgataccggtgctggtggtcgtgcggtgccatcggtggtggtgggtcggtggtcgtcggaggtgaaggctgtggcgtcgtgggatgtgggtgtaggctgtggcgtcgttcagcaagagggagagagagtagttttgagtttttgattttagtttttgaaatgggaggggtatttgtgggatattagtaatgtagttatatatgaccaattttaataattatgtatttaggaaaaaaaaattaaggtattgtaagcatggaattttaaatttcccatattttttaagtattttttttgtttaatatagcataaaataagattcaataaattaatacactattgctcaaaaaaaattaatatactaggtcaacaatgtattttttttttagaaaaagaggtaaatgatagatttttttttattattatagtaactcaatttttttttttcaatttgccatactttttacaatcgaatatatatagataaatgtttgaactaatatttatcttatatatacctatttttactatatatcaaattataataaaaaaatagtaatattaggatgagtaaatcacatgatatgtgtctattctactagtatatatat

SEQ ID NO: 170503 - DNA, 678 bp, Cannabis sativa
ttttaaattagagaattctgtcagttgttatttgcaggaatacagggatgctcagaatcgcatttctacatcacctcccagtttccaacagcctcttgcaagacttcaagtcccaagtacaatgtttcagcttaatgtggatgcagccctctctccctcttccaacaagcatgggtacggagctgctgtctccgattgtcatggtaaaatcattgccacccttatggctccttcaaattcaggcctccctccgatttatgctgaagctgaagctctcaaccgggcgttactttggtgtcaagcagtccgttttcctattgctattattgtctccgactgccagaatttggtgcatcgtcttcagaagctctcttcagatcgttcagccctctcgggtcttgttgccatgatagtctcctctttgttttcttttccaggtgcttcggtccactacatccctcggtctacaaacacaacagcccacggccttgcccgagcagcccttggaacggacaaagagataatttggaaccatttaagttcctttccttgaagattttagtctcagctcttgttcttttgtcttcgatcttcttcctcaaaaaaaaaaaataaaaaaaataaaaaaaattttgtaccattttccaatcttggcccaataaaaaatactaatagttt

SEQ ID NO: 170504 - DNA, 576 bp, Cannabis sativa
tcggagtcatggttaatcagctagtaatagaggcaaaccttgcaaagatcaaagcattagtcgaaatgtgatcatcgactaagccaaaagaagaccaaattcgccgctctaaaccgttttatatcgcgatcctttgataaatgcaaggagttttttcaaattttaaaaggcaataagaagttccaatgtgccgaaaaatgtgaagaggcttttcaagcattaaaaatgcatttggggtagctcccaatcctatcaaattccatgttcggcgaagtcttatccatttacctagcggtgtcagaatatgcgattagtttggtactaatccgcgaagatcaaggacgacagtaaccggtgtactatgtcagtaaacacctgttagatgctgagacccgctatcctcaaatggaaaaattagcgttcgccctagtaatgtcgtcgagaaagctgcgaccttattttcaggccaatagcattaaagttttatcaaactaccctttgaggcaagtcttagcaaaaccagagacatcggggagattgttgaaatggtcggtagagttaagccagttcgacatc

SEQ ID NO: 170505 - DNA, 918 bp, Cannabis sativa
  modified_base (867)..(870): a, c, t, g, unknown or other
tttttttttatttttttatttgaaaaaattactttatttgcttttatttattattttttttctttacttctctcatgtttatttttcatttgatttaaaatttctctatatctttttcctctaaaaaaaatttctcgtatttcaaaccacatatataatatttacttttaaaaatcctcaagcatttattttataggtttattaataaaaaaaaataatatatttatataacatatttaagaaaaatatattataatatactattttaaatttgaactagattatttactaaaattatacttcttactattctcttatacacttttaaatatctcatatgccctacttattctatttttttcactaagtttgaaaccactgataattacttctatttttaaagaagaagaaatctatcatttaattaaaactaagccttgctttgattgaattcaccatcatcaactatgacgtttggttacaaaataaaaatagaataggaatggtaataggaataggaatggaatggaatagaatttctgttcttttgtttgataaagattatgaaatcaataacttgtgatgattggtttagtatagaatgaaatgaaatttttattattttggaccaaaatgtcttttacttttttaaaataatttttgttttataaaattaccattatggtacaaataaaaaaataatatatttatatatatgtatcactctcaaactatattttttttagatctaattatcaagtaataaaatataaataaatatataatttaatagtcaattttatactaaatatttaagtatcaacataaatgttattcatataatttaatcatcacacatcgtttatnnnnataattataataataataatattactttcctataattatgtacaaaaa

SEQ ID NO: 170506 - DNA, 539 bp, Cannabis sativa
acgaactctctttgaccttcttctgacgttagttgcttataacgaagcctttatataatctttatagagatttatgataagcttttcaaattgtatctcttgtgctccttaggctagagagcttttatattatgtcgtctatcacatgaatcatcttgtctcgtttatcatttactatatgccacccgagatgaacttgtactgttagttgtttatctggttggttttataaaatggtagttgatatttatgactcgttgtaatactctactagattatgcgtgttatcgtgattttatattaattctacaatccattgctaatcaacggatttcttgaaaatcgtaattattaaaattttatttaattactaataaattaaaaaaattcctataaaattaaataaaatagacctaaaaaaaattaataacaattacagtataaaagttgatgtttataataggatttctttttttggctagaagatgtttataataggatttactatacacttacagagcttaaggggtaaaacaaaa

SEQ ID NO: 170507 - DNA, 504 bp, Cannabis sativa
atagaaatttaagggttttctaacaaattttttttttaaacttaggatattttgttttaatttaattattaaataaaattgataacatcttaacaataaaatatcttatttttcaatttttttcttttttatgtttaatttattaaattataagattaagaatgtaatattagaaatattttaaattctaaattaagatattatattatattatcttattagatatttaattaatttaaattacttatataaactaaaaatttgttagatatttgaattttaattagaatttaggatatttaggagatttgttagattttaaatatttttaaatattctctaacaacctaaatttaaaattctagttatggtatattttaaatattttaattttaaaatggaaatgtcttaacctactttcgagttatctgttacatgtttgtattatttgtttatttatttatttatgtattcagaattttcttacaaacctattatttattt

SEQ ID NO: 170508 - DNA, 514 bp, Cannabis sativa
agttcttctaataattaaatgtaaataaaattcgaataaggcaggagattcttttcttcttaaaaggttttttttaaaaaaaaataatcaaaagtttacaaccgttcatttttttgaaacaattaattatcataagttaaggcttttttctctcctttattttacaaaaatgaattaacagaacaaattttgatgatataatattttgcgagtaaatgtgataccaaaaatagtgccctgttttgggtctgtagccgttttttcctgttttttctttttaactaccacttcacttttgaattgttttcttcatccttcaaccgctccttctgttcatcttttttaattttttttcctgctaactgttcccgccttgctgctgtcttgccggagtagcaattccctgttcgtgtcccatctccgatgacccttatggatcccctaatcaatgacattcatactgccctttctctcactgatgaggaacggtcagttttcacaatcccagaatatt

SEQ ID NO: 170509 - DNA, 527 bp, Cannabis sativa
ttaaattcaactaagagggatatagtattttttttgagagaaagggagcccgctagagagaaagaaaatcaacaagcttgcaggggtcatcgcctatccaaattgcaacttcatccaaccctgaagcccagtgagccaacttttctgcaaaagtgttggcattacggttgacgtgagaaatccgagcatcagggaggtgagacaaagcttccttgatttgacttatgagatctccaaacaccgagatgtcttctttgtgatgattcagcgcgtcagtaatagtcttgcagtcaatttctatctcatgaaccaaaaagtgctcgtcaatgcaccagcgcaaagctgtcagaagagattttgcttcaagagtggcaacagttcctcctccgatgtaaggaagagtcagggctgcgactacgagaccttcactgtttctgataacacccccgaaaccagcttttcctttctccttagagaatgctgtgttggaattatttcaccaggatcttagtgttggaaattatttt

SEQ ID NO: 170510 - DNA, 653 bp, Cannabis sativa
tgatattgtcaaggaagtaccaactaaatgcttgagttaatatcgttggaagtcgatgtgggtgaaaaaaaattgaagtgtcgcctacactgaagcttgtgctactgtaagtgaaaaagaagagagttaatacgatttttattgactcatgaagcgtgtgctactgcccaaaattatttgggctgaagtaaaagcccaatgcattgtaatccatgccaagtaacatatgcatatacaaacataagtatatgtcaaacatatcattattattattattattatcaccacaacaactattgccattttataccatatattagttatttcatatatatatatttatagatatactactcgtttaaattatttttaatacaaactcaatatttatacattctcaaagccaattgatgcactgaaaaataataattatcgaaacatatatttcaattttttgtcagtcagcgcgactactattcaagtcaaccacacttgacccaaagagtaagagacaaactgtagtggccaaaaattacaccaggcccaaatgcctcttacggcccaaatcgaaattacaacccttcaaaccaggtcaataaatataacctactcatccaaaatacattgggctttggctaaaatacaaggcccaa

SEQ ID NO: 170511 - DNA, 517 bp, Cannabis sativa
gttgctctccccagagatgcccagaaaattcctggcttgctgccaagacccaacgagagagtagccatgatcttaggaggacctcacatcgggggaactacccggaaggagctgaaacgttacgcaggggccgtgaagcacagtgaggtttgggaggttactcaactcctagctcaaagaccccggctaatggatcaacccattacattcacagaggaagacgctaagacagtgcgcttcccccatcatgaccccatggtcatagagactcccatcgccaataagattgtggcaagaatcctaattgacaacgggggttctgtgaatttattgttcaaagaatccttcacagtaataggccagacggaccgagatctctcaccaagcggttcccagctcacagggtttaatggaacgacacttatcccaatgggaaaagttaggctcccagtcaccctgttcccagacacaccccaaagcactttcaagtactgcacgtttgtggtggtggactgcc

SEQ ID NO: 170512 - DNA, 615 bp, Cannabis sativa
agggaccacttgatggcgacagatggcatgtgtgtgttgcctttgcgtactgcgttgtcagagtacgtggtcatcggacaaaaagtatgctcccattggtggttatggtctgatgcaggggacaatgccccgacattgcgagatttggtgtcaaaaaattgtcacttataatcttctgaggcgtctcttgggaagccctttcggatgcatcccagtgtaacaccctaactcctaaggatgccacatgtgtgttttagaacatagtttagtaataatagattacctatttagtcaaattcgtgataatattaaaaaaattcactaaaaaagccatagcagtgaataggataacactgctaaaaatttgtttcgaagatcttttgttacaaaagtttgacaaaaagaactatatataaaagtaaatcaaaatacatgatgtacaatctaaagattcctcagtcgtaactcaaagatattttattttaaaaatagtatatataatactcacatgttccaataaaatctccgtaatttataataattacgatcacttaattattttctcaaaatgtactaattatctcataattggctttagtaagattataatcttac

SEQ ID NO: 170513 - DNA, 665 bp, Cannabis sativa
gccaatatggagaatgcactgctcgcatgtcccttagtcgatgattcattaatgacagtaggtcaagctgtaaatggtcatgtggcatggccaaaagactatcttacacctgttgggaaatatttggtatgtttcaatttgtttacttaacttattgtgtttattagttaatggcattgctaacttattgttttttttcatatatatagacacaaccacccaccaagaaacttcagaagcaacccgtgaagaaaagctctgaagatttactcggtcctccaacacagcctctaaaacaccctgggaggccgagtaaggcaaaagttaatgcaaagtatgcccaaccacgccaaacttcttccattattgcattttggaacttcgtcaaaaggtggcccaagtcatccatgctccaattccaagtccagaatgagctatttggggtcgcagatgactctatttggcttgctaagagtgacattcaagaattgtgcaccatgcaatacttgggagcccaacaaataggagtttggtgcaagtatgatttataactcttaataataaactcgctaatgttcatttgacagcaacagttattaattatgacattttatcaggtaccttaaagaaagactgttggacatgggtgggttgaatcgagtcta

SEQ ID NO: 170514 - DNA, 739 bp, Cannabis sativa
tattattttcaatacaccgacaagacaagaaacggaagttgtaataggaccccaacaaaatggatttgattattgtttctaagctttcaataataatatttaaatatatttattattattttgataggatatataattgaggaataagaactcaaatttagttttaaatttataagcggtataaatttaataatcttattagtgtgcgacataaatactcaatattaataaaattataatttaattttgtccaatttcattaatacatgttatttattaaaagaaaatttaaaaatacaatccgtactacatgttttcgtctaaatctaataatttaaaaatttaagtcttacgtacatcatgtttaaaacactaatggagtcagtacactagaagaaaattatacttttattaacatttagtacttagatttatgttgtttacaaattcaaaatttaagtttctatactgttatttactttattttctatagcaagtatagtattaaggtttgtgtcatccattttcaattttcttgtaaatagtaccacgactaatctttatatagaaaaattaacaagatataattatattgaatcttgcttataaaaaagaaatatatagtattctttaataggattggctcaaaagtagggtagcaagagccacatttagggtgggcatctaatccaatctaactttttttttttcatccatccaatctaattagtaattggat

SEQ ID NO: 170515 - DNA, 1927 bp, Cannabis sativa
  modified_base (1884)..(1893): a, c, t, g, unknown or other
ccaagattacttcacctggaaccctaggatatgttaaggattgaccctggatattgaaacagttggggaagtatgttagggatggacccttaacttcaaaacccgtttttattaaaaccaggcgctcctgtaggattgataaaataagtaatttagttggggaagttcttttgagattaatgattgtaaatcacattgctgatgaaatattttgaatttcagttgtgaataaaataattatttctttcaaacaagtaattataaagtgtaaaccctttaaaattacttgaggggcatatatgtatgattaaccgaaattgatttggaaatacatagtacaatgcaaacccatcgtttaaaaaaaattaaaaactttttaaaaaggcctcgaccaaacctttttgatggaagacgggttgaactgttataattccctgaccaaaccttttcaacggaagaggggtcgaattgttttaactgcttgatcaaacctttttgatgagaaagggttcaaactattgtaattttctatttataacctatctgatgagaaaggaaaatcaaaagttataactagcacataaagctgaatactaacggctggggctaagggaaagtattaaacgagacatccaaatgtcttgaaaaaatacttaaacccaatacgtgggtagaaattttaactactcatgtaagcaacgaatatatatataagatgacaagtttattaaaaatatatttgaatgtgcttaaaataagatcattgctgatgatcgcgagatggaattgatgatggctcgcagattgaggagcaggcagataagttgctcgcacgtaagtaagaaattaactacttaacgtcggaagaaaggacaatcaatggaaacccctaataaactttatgcatgtgatagtttatattgtgaataaaacgcaagcaaacattcgcataataaagtttacacttaaaaagtacgaggcattaaaaagcaaagttggccgtccaaccttgcaaatttgtctttacaaaaaaaaagtgccactaggggaaaaaccattgtctcggccaaagggcaatttcctaaaaaaataaagggagataaagaaactaagtgtacatgctgggagatttggagagatcttcttcttcctcctcgacctcgctgtcttcctcttccatcgtggtcttctcacaaagagctaaggtttcctcttctttctcctccaagaagttggtatccatgttagggtttcagagccaagcccgatataccgcgtggaaaccaactttatcgcaccattctacggtctcgatctctttctcagcaagtttttcagcaagcttctcttcaaactcgtcggcttggactttgagggtcttctcggcctcctgttttgcgttctcggcttccttctttgctttctctgcttcatccttcgctttctcggctccttgcttgaggcgggtaatctcctgttgggcattgtctctttgctcacacacaaccttgcatcgggacattaatttgtgagcctcccctccaaatactcgagtcgctcagagagtaatcgattggaagcaaaagaagcttggagaattgcaaacagatgagtataaaagaggtataaaaagataatataattatattaagaacgccgacataccatgaagtgacagtccaaggtccttgaaagcatctcctttgggctcctaagattgagaaactcccaaatctgggggaaggagagtttgaagtttgcaccaacaagcgaccccatatgcctaggcaaattcagacccagcttccccagctgcgaccgaaagggtctcgatggcctgactcgaagaagcagcagcaggggtctgttggaatttattttacnnnnnnnnnngatctactcaaaagtatgttgtttaacaccctaa

SEQ ID NO: 170516 - DNA, 556 bp, Cannabis sativa
taaatcatttaatctaatttgttcgacacatgtaatgtaaagccttatttcctcaatagtgataatgtttaagtttgatgtagacaagacaaccactacagagtctcttaattagaaaaaaaaatgtagtttaataatttttttattatttatttaattataggttttttcatgagtaaaaatcataaaatttattaattaataaattcgttcaaaacaatagaatgcacctcaaaggaacaatcctctaactgaagcacacaacctgtagagaaacaagagtctcttgtcaaacaatgaaccaacttgtttgcagatcgttttacaaaacacaaattaacaaaagataaagccaaaagcaaatttctaacatcttaaaccagaagaccaaactgtgaggacataaaaatattgctttgaacagcttgtacacacatcaagcaatccgtttccaacacgatattgtccaaggaatgagtgttgggttttatgccctaaataaaattcaatttcaaagtaatccagattattccatatcaataaagaaacagaagta

SEQ ID NO: 170517 - DNA, 514 bp, Cannabis sativa
ttaaaatattacaactctattgcattataatacgttgaccagcaaaaagattaaataaatataacaacacataatatatcatatatatacactatatatattatatataataaaggtagaagaagatatatatatatcaatatataaatacactcactcacaacattgagtgtagaatatatagtggggatcaccatgacatgaacaaggtattacacttttgtccaaaagcttatttcctcctatctctaagcattaagggaactctctagtaaatagctttgaaaattatcaagccttttaagattttctagcaaagtgttttcttgatagaaaactcttcatcttctcaaatgagcaccaaagacctccttttataatgtttaggtaatcacacttagaattcaaatacataatacctcatttctctcatataaatgagtgttaatatagtttgtaacaactgtatttcataacatttgaattccatcatcaattgtgtaacatctctttt

SEQ ID NO: 170518 - DNA, 508 bp, Cannabis sativa
ctcaacccatgttagaatgcataagtgtattattgaggaagtagaaatgagtgtatgacaaggtgcatgtagtttcatctcaaaactaattgacaatgagaggagtgttggctatttttgtgctcactaatcttgcacgactcgatcacaagtggctctttcggctcacagtgactttttttagctcactatcctcgaatcacaagcaactttttgtagctcgtctttttgaatcgatttttggatttagatcgattactcgttagaattttagtttgtctcttataccatgttagaatgcagaagtgtatggttgaggaagtatgaataggtgagtgtatgacaaggtgcatgtagttccatcttaaaaccaattgacaataagatgagtagcctatgtattttatgtatggtatttatttaatttttatatattattaatgtgacattctctaacagcccaataaacctcccaatttttatttttatatttacattagcctacaaa

SEQ ID NO: 170519 - DNA, 879 bp, Cannabis sativa
  modified_base (740)..(741): a, c, t, g, unknown or other
taaaaagaaaaactaaattcattgtgattatgtggtaagctactaaatattccaatataatcactactaaatattattgaaaatttatgtagtacacttcttaaataggtgttctgatagatttccttatctattttgatatctaaaaaaaaaattagacaattcttttgtagttatgtacattgtagctatttaaaattatcttgcaaatttttaaaaaattccgaatagtttacaatgtcgaaaataagatttaaacaattacttgccacacgcataagaaaaacagtcgtgtgtgcaacaaaatatttaaatcttattttcggcattgtaaactattcagaagtttttaaaaatttaaaagtgattctaaataattataacgtacacaatcataaaaaaaaaattagattaaaaaattctcttaaatgctaaaacagataagagtctataccgaataagggctttaaacatatccaatattagttatttattgttttgattattttttttttgatataataataaaaacatattaaaataaatatagtatattagttattaacatcacttaagcttcattatcaaaaagaatatcagttaagctaattttacttgaaaaatggtcaatgaaccccagtaattatatttcataatacataaaaaaaaaattcataatacagaacaaaagtattttatcataatgtaaaataagaataagataataatacaaaatattnnaataatctcctacacctatgtaaacaaacactttatatattctcttttctttcaatttttattgattgaattttcttccctatactatagggtaaaaatactaggactaccatataattaccctatatatatatatat

SEQ ID NO: 170520 - DNA, 623 bp, Cannabis sativa
aaaaaaaaaaaaaaaaaacaagcgcaacatactattttaatcatattcttgacttgacacgataaattatgtagtgttattttaaataattataacatattttgttaaatatataaaaagaaattacaactaaaataaatatgtattttgtctcttgaattttgatcttgaactattaccattagtgaaatggaattttcgttaaattttagtaattttattcccaaattataatgactatcatattttatccttcaaattttcactaccacaaaattgtgtcctttttttaaaaaacaaattaaattaaattttagcgttcatgaaagtgcggttagcaaaatgatataactaccaaacttcagttgttaagtatatttaacataagtctaatcaaatctaacataatcctatatttcactaacctttaaaattaaaaggaaaattttttaattttagttttgtaaaacgttctgctaataaagcggtacatttttttgtaaggcgtttttatttttcgtcaatttatgttttttatgactacaactcacctactgagttgatagagattattatagataggggtgttcattggatcacatccaatggatttggacccatcc

SEQ ID NO: 170521 - DNA, 987 bp, Cannabis sativa
ggtctcttaaactcaaatatgacccttccactaattcacaacatgaagaaaccttgtcaaatccaaactcgttcaagaaataaaaacttgaacgtgaataatggtggatttcgaaaccttctgtcttaacccatttggtcacgaccattagcttccttagatcgtgcaaaagctattcaaagtgatcaaacaaatccagaaactctctaagtgtttcataatcaaaatttctctttctctctctaagtttcacatgaaactttatcggtctctctctatgcacagcctcctctcttcaacttatttaagcgttctaaaccctaaaaatatctcataagcatcctatatatatcttcaaacttcaatcttaaccctagatcaacaacttaaaatttttaaaaaaatgataatatatatataaaaaaaatagtgtactgtatataccaatttcataataataacaataataataaactaaataatatgctataatatatttacccatattattattaatatacctataatactatttacaaataattaaatattaaattatctccaattatttaattatttatctagcattacacacaccctcaaaataaaattaaaataaaataaaaattattattactaaaaaaaaatttcgtactccactaaactcgtaaatattcaaaatgataaattatatctgttagcaaacaaaataaactaagtataaagaaaattaattaccattcaagaaaagcggacattatagtgctgacggtctaaaaagatactttcgctgtctcccctttaatttcaatttgggacctttcgtgtgccaatttccagtgttggggtctttgatttgtttcaaaatccacaaatttttcaacgtgtatacccacaaattttttgatatttggccttgtgggattctttcaaatgtcatgtttggccccgtgatctcttaaagatcgttcgttatacccacacttt

SEQ ID NO: 170522 - DNA, 533 bp, Cannabis sativa
atgcaatctaaaaagttatcttctccaagccgtgagttaatggggtcggctgttttgggtgctaatgataataatagtattgggccaaatagtttatctcaagctaatgttgggcacatggaaactacatccattttgcctaatgcttctcatggtgctatggagcaagctaatgaagaaaaagcgttgactcaattttttaatgctcaagaaagtttattgcatgacctcaagcactttgggaacctcgacttgtatgaaatacggaaaataggaggggatattggggtcccggcttcatcggaagttaatgagagaacaactcctttcaagaaaagaaaatttgaagcatccgcctctctgtgttctaggccccacaaggttcctcgcaagtatccagatgtggttcgtgactttccttgggacactacaaacaaagctactgaatcggacttggagattgatgacccatatgaggatagctctagctccccgagctactccggaattttgaagaatgccctggttggttc

SEQ ID NO: 170523 - DNA, 538 bp, Cannabis sativa
ctataacttttcatgtaacaatctgtaaaattaaaatagtaatttcataaaatgtagtatagatcctagcctattcattttgagttttgtgtttctgatatttcatagctgtttttatgtaaattgcttccaatagaatttgttgttgttcgactgtcgttttttttgatgaattcttttattttattcaatgtccctagttgaattggaaagtcttgttaggattatgcattgtgttgttggtttttagtgtctaaaagcttgatccaacaacaatggcgttactgatattttttttctgggcagagaataacgaaagggaagggatgatgagtgtatacggtaagatgtgagtatgtattttttgtaattaaaataaggaatacacataccatatataagtttaaaattcattgtagctgtatttttgttaatttttaaccttttttgtcagtatatgaaaattttcctaaaaaaaaggattatttcacaaatacactaaaataaaaaaaaaaaattacaaaaatatggtttcacg

SEQ ID NO: 170524 - DNA, 788 bp, Cannabis sativa
  modified_base (432)..(435): a, c, t, g, unknown or other
tccgagcaatgttctaacacagtactttccatatcacgaggtcgttcatgtgatgtactcaagtaccaatcatactatataaatagtactcaattttgcactcaagcctgtgataaatctagaaaaatagaaaatagcaatgttatgataattgctaagactttctaagtatctagttcaaaatacaaaaatcctattaaatgtgacatgtccttttacggtgtaattcaagaaatttgggaattagattacggtagtttttggatccctattttcctttgtgattgtgtgaggagtaataatggggttaaagatgatgaatttggattcaagttagtggacttgaattgaaatggacacatgttttatagattgataatggaatcccaagccagtcaagtttttaccatgagcgatccattagatgcacgnnnntcagttgtcttgacgacacaaccaaaagattatgataatcaagagtctaacgttgatgatctcatgcttaatgaacaaattcatcaaatcactccaccacctattgatgtcaccgttggggatgatgtcatatcatctcgtgatgatggtgaaggattatgggtgaactaatctatcaatacatgagtcattgatcacgtattagtattttgtcttttaatatatttacttttagctatcaatttgcatatttttgtatattataatattataatgtatgttttcaaatttgtgtaggattatccatcatggaactaggtggggacgatgagtggagtgcttggttagattat

SEQ ID NO: 170525 - DNA, 579 bp, Cannabis sativa
cacatttcagtaatgaggcacgggaaaaacaatttcccttttactcggtgtgcacagtcaaaaatctctttcgctatcaccttgccaacattaatctttttgcctttcacgatgcaatagagcatccacatcctttcccgactcacggtggagtcatgtgacgtaggcagcagagtggtttgcacgaaattataaagacacttgatatcatgcttcagatccgtccgtttgaaacggaatacaccacgcccatctatttcccactctgcttctggagtggccaattcaggcacaatcttgtgcattagctcatcagtgagcttaccgacatctttggagaactcacaagtcacatttttaagcaagtagtaacgattgatgtctttgtcagaaaatttcactttagtttctcgcaccgtaatctcagctggcaattcattcgccaaaaaattcgcgtagaattcctttactacttgacaaactgccgacgccggatcttcgcacaattgcagccaattcctcttcttaatgttctcgatcagccatggcggcatgctgccaaagtcatcatcccctatt

SEQ ID NO: 170526 - DNA, 700 bp, Cannabis sativa
gatattaatattggtatgcattatataaatattgatcattgagatagcaataaaaataaactacaagaaaactcaaagatggtgatcatgctaattcatgaccatggatgtatataaatgcatgcctaaaccttatgtagcattaccatattaatcgatctctattgctagctacaactaagagttatatatctcatcgaaatatacagctttatacatacatataaacatcattatataattaaatggctttcgttatgaatggtcgcgatgatctttcaatgtatttatcattaccattattattaattatattcatgttcattaatggttgccggtgtgccctagtccccgcagtaatcttgttcggcgactctacactagacgtcggaaataataacattttaccaacgcttatcaaatcaaatttcccaccctacggaagagatttcgacggccacaatcccacagggagattctctaacgggaaattagccatagattttctaggtatgtaacttcgatatatatgatctatcgataactagtaattattttagatattaaaaaattattcttaaatttataatttatggtattggatataaaatttaaaatagagtaatttgcggcataaatacctaagtttatcattcggttacaatttaatacctaagttaaaattttggcggcataaata

SEQ ID NO: 170527 - DNA, 551 bp, Cannabis sativa
tacggtcttgcaaaagatcacatagcaggttatatatatatatatatttataataatatgaccacatcaagaagtagccgcccataagcccaataccaaaaaaacaattgatctgaagccacgcttacatcaatcaaaaagagggatgtctgaagccaaattagtcgactgaagaatatatatatatatgtatatatatatatcacataattcaaaacatgatattatgagatattaaaaaaaaaaaaaacaaattgggcttaggcttttcaaaagtaaataacaaagttaactgtagtcaaatagagaaaagaagatcaccgaaaaccgtattcaaaagtctatatatattaacaaagacaccacaaacgacggagaattccattatgaatgatcgcatattatgatatatcaaacatatacacagattcaaaatattatatcatatatgtaattagatatatgggattgaatctaaagcccccaaataaaaatacagtggcagaattatttaaacagaaatcaaaaccctaatttttaaaatccccaaa

SEQ ID NO: 170528 - DNA, 918 bp, Cannabis sativa
gaacttttcttttacattgatattgttgggagagattgcttctgtctgatgccaactggagggacaaaagcaaaagaaaaagaaaaataattaagggttattttttatttttatatttttaaaattgtttttttaatttttaaagaaaaataatttttttactttttcttttttaaataattaatttttttatttttttaaatatatttatgtggacaaataaaattgtgtcacgtgtacactgtgtacacgtggacattccaccatggcagttaacagctaaaaatggatggaagtgttaaactgctaacaaaacacgaatttagggggttttaccaccaaaattttagaattgagggttagttgtaaaaacctgaccacttaaggaggttatgccgcaaattactctataaaaatatgatatataatctaattcaatacaatacaatacaatacgacttaatacgacgttttaaattacatgagaactgatatctaattatactaataatttaagtgcgttagatattttcgagaaccacgttgtaatgcctgtcaaaagctctaacttgaccaagaagcattttgttgtttcgacaattaatgagcatttatttgacaacagataaaatattattttttattttagaaacaatttactggaaatataaagcacaaaaatgaaacagcactatgtaatcacaagagagcattattacttgggtgttgtttttgacactcattatcagttgagaaactggtccagtattaaattcctaatcctcagtcttgacaacctgcagcgatcgacttctattagcattaacatttaagcattgcaaactattaaagatacttttaaaacatatttattaagcaacatagcaaagtatgaacttatatcttcttccattggcc

SEQ ID NO: 170529 - DNA, 625 bp, Cannabis sativa
acaacaaaacccaataaatgtcacctcctttacctaagacaacgataaaaagaaatataaaaacaatcattcactactatacaaaaaccatatttagcaacagttcacaaccgacacacatatacacattttgtatagcagttgagaatcatgaggttctatatatcctaattaaaactaattggtgaaaagtggaatagcccatgttcttatatatgactcaatactctacaatttatttcatgtgaagtaaaaatttcgaggacgaaattcttaataagataggagttattgtgagcacaaacaaaaaagtaaaggtaaatttcaaggacgaaatttctttaagtgggaggtaattgtaatatccgctttttttgaagggtaattaattttctttatacttagtttattttgtttggtaatggagataatttatcaatggtggctattttttgctcaccaatcttgaaccagtggacatggtcactatcaatataagtgcaaatcgaataggatcacatatgcctgcatgagatatatatggctctgatgccatattgagaatcctgaggttccatcttaaaaccaattagctagtgataagtggagtagctcatgttcttat

SEQ ID NO: 170530 - DNA, 538 bp, Cannabis sativa
ctcttttgaatagttgtggcattcgtaagcatcacacatcttaccctttctattttttttcaacagtcctatcaattctcattaaccagaatttataagacaataaattaataaagaaaaattaattaagatttttgtccctaaattttaatatgcacgaaattatgtttttttgaatttttttagctattataaattcatcttgaattatagagattattggatttaaagatttttgtccaattttagtaaaaaaagtctaacatagatgaaagttgagggtgtttagtatgtcaaaattcgaggagcatgatttagtagatattaaagtttgggcagcataatttaatacatggacaattacaaaattagtaaaattgaatgaaattaaataaaaatccttaaattcaataataaatttttaataattaaaaatgttcataaacatctattctatataaagtgtgcctatataactgaaattcttggtttatgagaaattcatgggtgattttcaatttttatttaataaaataat

SEQ ID NO: 170531 - DNA, 1565 bp, Cannabis sativa
  modified_base (103)..(107): a, c, t, g, unknown or other
  modified_base (993)..(997): a, c, t, g, unknown or other
aaattctcttagtaattcttcactaaaaatttggggtccatggtattgaatgttaaaagatcaatacctactctacaagtatttagaattttctatcattttnnnnntattatagaattttctagaatcatagagagctaatagtcataagaagtttcaagaatattttaggctataataaattgacaaattgctagaaaattctagcataataatgcactatcctttgagtagtataaataggggagttggtccttggtggtgcatggtgagttgaatgataacttgagtgttcaagtaaagtgtgtcctagtgtgttcaactaatccccaacaaaactctaaagagtgtcccatcaaatagtgtgcaagtaaacttttaagtgtaagtgtctagtaaataattaaagtgagtgcttggtgtgtattatgatcaagataaagtgttcaagtcttgatgtaattactttttcaataatagagtaattatgttttcacgtgttttcgtgtccaacaagtggtatcagagtcgaatcgagttcgttctgaaagagtcatttgttgagtttcttagagtgatcgtgtgtggtttagtactacagagtttgcacgatgggtgaccttcaagtggtcggcggaattgagaaacttaacaaccaaaattgcaacacgtgttcgatgcacatggaagcatatctccaaggccaagacttatgtgagattgttggaggcaatgaagtcacacaaccggaggacacatccactttgaagaaatggaagattaaagcaggaaaagccatgttcgcgattcgcaccatagttgaagatgagatgctggagcacatcatgccagtaaagacactgaaggaagcatgggatactttcgcatcattgttcaccaagaagaatgatacgagattgcagcttctggagaatgagcttctctcaattagctaggcagcgcgacatgacgatcaaccaatacttcaccaannnnnaatctctttgtcgcaaaatctctgtattagactctggtgctggcatgtcagatgctagaattagaagaattattattcatggattaaggctagaatttagaacttttattactacaatacaaggttggccaagccaaccttctcttattgagttagaaaacttgcaaggtgaccaagaagtgttagctaagcaaacgtctaaagtctcattaaagagtgacgaagaagcactctttagtagagataagaaaggacgacctcgaccaaatgttagtagaaattttagaaaacatgatgacaaagatagacatcatgggagctcccaaacaaagagtgctcagaataaagacaaataagttggtcatcaaagaataacaataaatttgatgacaaatgctacaactgtggaaagtatagccacatggctaaaagttggcagttcaagaagaaaattgcagaaggcaatgcagtcacataaaatgcagaaaagacaagcggtgaagaatgggacgcagaagcatcattcgcagtggaggaagaagaattagctttgacagcttctgttcca

SEQ ID NO: 170532 - DNA, 675 bp, Cannabis sativa
cattcagaccccttgaatgaagatctgcaggtacaagaactcactgccaggactgcttttattcaatcacagcagcggtacaactcttttttacagcagaaagctaagattagctggattcgagatggagatagcaactcagctttgtttcatgcgagtattaaacaaaggcacaggcagaatcaagtatactcaattgagaatgaagctggggtgagggttactgagccagaacaggtcacagaagcttttatttcttattacaagtctttgctgggatccaaaatggcaaacaggaagaaagtttcaaacagaatactgagtagggggccaaaagtgactgttgagcaagctgagatgcttagtaggcctttttcaaaggaggatgtcaagaaagtagtgtttgagataccaggaaacaaagcaccagggccagatggtttttccagttacttctttcaggataattgggagctggtgggagatgatgtgtacaaggcagttacatcattccttactactggtaagttactcaaagagattaatacaacagtccttactatggttccaaagctaaagtgcccaaacactgtcagagattttaggccaattgcttgttgcaatgttatctacaagattgcaacaaagcttttgtgctctagaatcaaatggatt

SEQ ID NO: 170533 - DNA, 551 bp, Cannabis sativa
  modified_base (374)..(374): a, c, t, g, unknown or other
ctcctcaatctcctgaacctcgtcatccgcttcatgattcccctccttctggacggctggatcctgttcggtgctaggcaaagtggcgtgccgagccacttgaggatcagacgcgtcagccatatgctttgttttcttggtacgagccatcattctatggctgaataaaagatttgagggagaatgcccttcactggaagaaggtgggctagaacggagacgaggatggtcctcgtgaaaaatttgaagcaagtcctggtcgattcgatgctcgctctcccaaaactcacccgggttcatctacaaaagaaaacacacaagatgagtgtttggccggaatattgaacggtaaacaagcaaatatgccgaccagnagtactcaacagattaaagaatgagaatgctcaaagaaaagtcaaaactcaggaagtttgaaattttctcgagttagagcaaaaatttcatgaagcttaaataagcaagatgaaagacaagcattacgcagttcagaaagctagcattatggactgtaaaatcgcatgaaaccatga

SEQ ID NO: 170534 - DNA, 857 bp, Cannabis sativa
tccttgaaattgggtggaagtggtgccatttgaattttcctcgagaaaagggactcctcgtcgagttcatcatccttcaaatattcctttgatgtcgtagccatccttcgacgtagatcttgcatctctgcttctagctctctcattttctatttcactctttctcaagagttggtgaatggaacttggattttcccagcagttcgcatggagcccacgggtagtactcctctcatcccttcgtcatgaggctctacatcatggttgaggggagataccttctgtttaattttcccttgagacgggggttccactgtagtgtccccttgcgtgagattctttggttgaagccccttcataagactataagatgtttctcccattgcggtcttaccccagcagatagattcatgttgctctgggcaacctcttgggttcattctatttgtatttaaagtttatttttgcgcttatcttattagtaatctcgtttaggggattagggtttcttaagtatcttgggtagtgtgcctaatagttagagcggtacagggcctatcgcaaaatgagaaccaaataaacttgtaaataattttaactttacaaacaaaagttacatgtgtcgggatctcaaaaatatttaactaaatattattacaagtgcgtttccattagccgacctaagtggcaaaatagaatcacaaaattcatcactggtagatcccaacccgcttggtctagtgtggccctaacatgtacataaactgtccacctcccatacttatggctgatcggaaacagatttaccctttcttgcaaagtagatgtaacgccctaatgctaaggcacgctacagt

SEQ ID NO: 170535 - DNA, 507 bp, Cannabis sativa
acaactcaagcaacctatggctatatcatcacaagccgaagcatatctagccaatttcaatttcgtgcaacttcaagctacaccagcaacatttcgtgttgcagctgatgttaatcgggtgaaatggactcctcctccagagacaaaattaaaaatgaatgtggatgccgcaattgattcttcgaggagtaagataggtatgggggtgatcatacgagactcatcgggtagtgttgtagcagctatgtctaagcctgctgttggcaattttaaatctcaagaaatggaggccaaagctatgttttggggtctccaattggctgaacaattgcaactacaactacactatgtggaaaccgattgtttgatgttagtcactgctataaatggagctcagtcacaacattctagtttccatgatttagttaaagacatttcttatcatttatcctcttcctctaatgcttgtatatctcatgaaagacgagatgctaaccaagccgctca

SEQ ID NO: 170536 - DNA, 501 bp, Cannabis sativa
tctatcattaattttgaagttctcttaggatttcttctctaaattttgttgtccttgatttgagagtattcccacacatgtcaaagcatgtccctagatgtgttcatgatgatttatgtgtgtttgatgattgattgtgatattaccaaatttttaatgaaaaataatttgatttttgatctacaattattttatttagaaagttggtgaaaaattaagcaaattagccttctacataatttaatttagattaaaattgaaaaagatttgatcttttgatgttataaaaatttttgtttaggattttcccaatacgcgttcgaggatggtgatattttagggctttgctcagataaaactcaattaagacaaggacctgaccaagtgttattaacaagccttgtgtttgaccaagaaatgtgtccctttcaccttgccttgtgtttttccattttttttcttttttttaagttttaaaaattattttttaatgaaataaaa

SEQ ID NO: 170537 - DNA, 555 bp, Cannabis sativa
tatttgaaatatcctatcaatagcttgctttcttcttcttagcaaatcctcaagttctctttttgtggggtttgaaaaatttaaggtaatttcaattaaagtgactttttttctttttgttgggtgatttgaaataaatcaaaattaaacttgtccaatgaacaaattgcgtttgatttagggaaattaggtagttttttcttcttaattaaaataaataaataagaagaattagtttgtgtttgattgagagtgctctggggcaatcaatttaataaaattaaagatataaaacactagattattttttttctttcaaatttcatgactatagagttattttgagtattgttacggtgtctagcaccactatgagatgacgttatggtttagtaattttctataatttttattaaagtaaaataaatgagtcttaatattaaattataccaataatatatgggtaaatataattttagacattgtgttttgcaaaagttatcaattggactctgtattttattaaatgacaaaatgaaccttgtattttctaaa

SEQ ID NO: 170538 - DNA, 744 bp, Cannabis sativa
aagcagacgagaccattcaatttccggtatcattgtgtttgatattaaaagtagttcaattattacttgttctgttaagagtttggtacggctgtattgttagttgtatcccaacggccttctttaatcttgcaggttagccaagagcagttctccccaacagtaggatggcccctccttttatgagagttaatcctatattagattggttatacaagatcgtgcgtgatctctttgcttccttctgtaggttcttttctttcatcaaatgaatgtgaatatattagaacataatgtcttacaaataacttgttcagaggaaaaaattgataaatcttatgttaattccatttttgacatatttaattgacaaaaatattttattatttattgtatatcttcggttggagtatttaaattggtgtccacattttgtgtatctaaatttggaaggaaagttgcctagctttcctatttatggaaattgaggtaaaaacttcaaattggaatctgagtttcactaaaaccctatggatgagtggaaatgaatgttgtaaggttaaactcaaagcgcagccagataatcagatgttaaggttaaacataaacgagattttcaagtcctaaaactcagtattctatggttaaccaagaacagttcaagaacaggcgagattcatagcaaaaaatccagaaatcaggcatgcatttcattgcaattatgtaacagaaagaaatgaagaa

SEQ ID NO: 170539 - DNA, 612 bp, Cannabis sativa
tattaggacaacaataacaataaatacaaaatttaatattatatcacaataaatttattcttttgagtaaaatttccatatacggcattttttttttcatttttataaaagttgtttttattttgaaattatactgttttattttgaggttatgctaaatttatttttataaaaattatttccatttttgaggctatgctattttcatttagaggttatgttatttctattttcataaaataaaaaatcaattataaagtataaataaaaagtccctataatattttatatatgtattataatttagaataaaattattaattttgcataaataaattttaatttatatattttttatttagatataattattcttatataaatacatactttcttaattcaagatttaaaaaatgtataactaatcacaatttaaagactatacttatttataattgttctcgaacttaatttttttttttttataatattcttaaataggatatttttaaattaagtttctactatatatatttatatatatatatatatatatatgacattacaagaagtagattgattttggtaattggctaagaagtagtggtaatt

SEQ ID NO: 170540 - DNA, 789 bp, Cannabis sativa
cgctagtgactagaccaactatgtggccactacccactagtgactagaccaactttaggaaacaaatatgctgttttttcaagtggtcataaactatacgaagccattttttgtgatagataagcaaagttttctcaattctaagcactttctcaaggaggccagctttaaagttcttgactatgtataaagggaacaacaaaaatgtggaagcaagctaatagcatcatccccaaaattgtgaatcatcccactcaacatagatagtcatcattccttctttctttctatatttccttttgaagcattatgggttttatcacgagaacagtagctttatcttgaaaaagagcatagatagccactaatgacaatgaagaaacaaaagctaagaaaaaagcaccactaggcaatatcaaaaatgggattttaagagattaaggtgaatcattccacagttgatatgtcattattacaattgactagagtcactaagttcacaatcacttgtatatacatatctatactcataccccaccaacgtctaaaatttcaaagccaataattcagtgtccaaagaaagaataaatttaacaaatcactgtatacccatcaaatgtttaattaagagctaatacattatcatttatctaaatcaaatacgagattaagctacaaacttgaatctaaaacatgtattgtaccataatattaaaatgcttataatgtgatataataatatatagattaattaggatttttgatccctgaattttgacatgtaacaaa

SEQ ID NO: 170541 - DNA, 500 bp, Cannabis sativa
  modified_base (341)..(341): a, c, t, g, unknown or other
gtttgcgataacttaggttgatgctaaagttagcccttcagtggtaacaagtcggctctcgttcaacaactcttatttctctgtattgtttcactctggggccactcattcttatgtggcagccaaaatttttagtaaattgggtagaccccacgatatgtatgaatcagggtttggaaccctactgcctggtaaagaattagttgtctccaaaaggtggattaggtctatgccgatgagaattgaggatagggagttgagtggtgacttagatcccaataaattcagtactaatagccaagaaattgatacaagagggatgtctagggtttctggccgtngtattggataccactcggcctgactctattcggtcagaagatatcaaggtggttcgggaatttctagataaagctgaaacttcaagcttaaatttgactaaaatctgttcaaattttgggaaaactcaaaacatggaagctttagatttctttttcttc

SEQ ID NO: 170542 - DNA, 598 bp, Cannabis sativa
tagggttaagattagctcaagaatggatgaaatgggatgaatttttcttggttcccagctacttctagggttcggcaaaaggagaagaaaaagaggagcttgatgttatgaaattttgttttcttaccttggaagtaatccttaaatagggtttgttttatttatttatatattattattttttttaaaataacaattagcccacaaaaataaatatgtcaaaacatcaaatgactaatctaccctcaaagaaacctaaacttaaattataacctaggggcattttggtaatttcactaatccatcaacccgacattctaaaaattttctaaactaatccgaaatattctcaaaataattcttccattaatgtcgtgacattactaaccacatcgctaaatttccacaattgtcgggcccgaaaaatatttcatttcattaaataaattctcaataattatccgaagtaagatcataaactttcgtcgtttccaaaataattacatattgaagaaagggaaaaaacagaaaaaaaaaaggaaaaaaaattacaaaaatactatgggccggcccattaaacatttacacagtccacata

SEQ ID NO: 170543 - DNA, 1763 bp, Cannabis sativa
tagttagggtgttacacaacatctctaccaaaactaagttcattttatccaagtcattctgtgaggccagttttgctaaggcgtcggcattggagttttattctctcggaatttgttcgattttaaagtaatcgaatctttccaagttcttctgaacattctctaaatacctctcctttttaaagcctttggctttgtaatccctaaggacctggttcacagttagctgcaaatcactatgacagatgagatttttaactttcaatgcctctcctatctttaagccagctattaaggcttcatactcgacctcattattggatgcgtcagactggaacctcagaacatagtgaaacttaaagccttttggagatattaatattagccttgcaccctaaccctgttcattggatgcaccatccacgtataacttccaggtttccgcatctcgctgagctggtggaatttcttatggagttatacctggcccttgatggaagttcgaggatgatttgttatgttgaactgccccagtttaatggaccattttatcaatcttccagaagcatctggtttcgataaaacttgtctcaagggctgatcggttaacaattttacgggctgcgcctggaagtatggccttagctgacaagacgtatggactaggcacaacgcgattttttctagtccgtgatatctggattctgcccctagtaaccttttactcacatagtaaagaggttgttggtgcttgccctcttctcgcatatagctgcactaatcgcgtcttccgagatgactaaatagaggaacatcgtgtctccagttattggtttcgccaaaagtagaggcattgctagattcctttttatgttctgaaaggcctcttcgtactcttttgtccacttgaactttttgttccctcacaatatgtggaagaccgacacacacttatcagttgacttcgaaatgaatttgttaagtgcggccattattcttgtcagggcttgtacttccttaggctctatcggtgttggtatgtctattaatgccttgattttttttcaggatttgcttcaatacccctcgtgttaactatgaatcccaaaaaatttcttaaggaaactccaaaggaacattttctcgtgtttagcttcatgttataattctttaacatcttcaagcatttcacgaggtctgaggtatgatccttactttttctttattttaccaacatatcgtcgatgtaaacctccatgttttgccctattttgtttgcgtacatttcgtttaccaattgttgatacgttggccaagcgttctttagtccgaacggcataactttataacaatagagtcccatgttggttacaaagcttgtatgttcctgatctgggacatacatttttatcttgttatatccagaatatgcatccataaatgacataagctcgtgcccaacagttacatcaactaactggtcggtcttgggaagtgggaaataatcttttggacacgccctattgagattagagaagtcaatacaagttctccaagttccgttaggcttcgggacgagaacaggattggatatccacgagagataaaacacttcgtgtataaagtcattgactaacaacttgtaaacttcctattttagtgacccttacctctcagaatccaagggcctccttttctgtctcttcactaggtagtttggatcaacatttaaatgatggcaaataatattagggtcgatccct

SEQ ID NO: 170544 - DNA, 544 bp, Cannabis sativa
  modified_base (262)..(285): a, c, t, g, unknown or other
  modified_base (363)..(383): a, c, t, g, unknown or other
tgagaaaaaatttgactaaataatcattttggatactaaacagataaagatgtatcggtgtagcccttttaagggggtgcattatagaatttccctaatatttattgtaaattatgagagttactgcatgaatgtaaatatatttaggaaattctatcatgcatccccttaaaagggatataccgatatatctctttctgttttagtatcaaaaataattttttagtcaattttttcttatggtcatgtaaattatagttannnnnnnnnnnnnnnnnnnnnnnnagaaattcgaaaaagtttaacacaccgaaaattgtgttcaagtagtgtgttgcacgcatgactattttattttatacnnnnnnnnnnnnnnnnnnnnnaacattgttttctatattgtaaatcatttcaaatttctccaaattttgtaagatatatagcgtaaatgaatatgaaaaaaaaattagactaaattttttttctagataccgaaacaagtagggggcatcaatacatcccttttaagggggtgcattgtaga

SEQ ID NO: 170545 - DNA, 619 bp, Cannabis sativa
  modified_base (587)..(587): a, c, t, g, unknown or other
taggaacttgttatctccctgcccgaacctcaaagtggtccatgttcataggagctttaatgtacacacacataatacagctaaatggggtcttgggcttgatagtgagttcatttggaatggctctttgccttccttgtaatcttgtggtgttggtttgttctccacaggattttctttcacaaaaaaaaaaaaaaatactggaacgaaattgttccattggcctttaaaaaaatcaaatccatgtatgtatacaatactggaacttaacgatttcactcgaataatatatatgtatacatatatgtcatcattattatactgccagagaaaagagaatatatataacaaaaaaaaaccatcataataaacctatacatattcacatatatgacaaaacgtaatgtctacatgtgagaaatttgacttttagtcatatatgtatatggtgttagctaactaaaagaataacttaccagataaaaccctcacacgcatttccgtatatgtgtgtttgcatgtattgagtccaaaggttgataaagagacgaaattaagacacaccaatatatctattctatataaantgtgcctatataactgaaattcttggtttatg

SEQ ID NO: 170546 - DNA, 778 bp, Cannabis sativa
ttttttttttttaaattcaaggtcttacatatatattatatatattttaataaataattatatatatatatatataattatgtacatagtgattggtttaaatttatagaaagtattagggttatttttttagtaattttttatttagaaattactctaatatatagtgtatagtagcaattttaagtgtaaattgataaaaaaaaaaactatcacgataataataaataaatcaattatttttaaaaaataactaactagaatattataagttaaaagtaaataatgacaatattataatttaaataaaaaaaacaattattaattattatattatcatagattaaaaaaaatgataaaatttttgacatagtattttgttttttcacaaaagtgttaaaatatataatacttgaataaaaacactactacaatcaaatattattttaaattagcttagctgtcgagaaaattatttattatttgaagataaaagtgttaaaattaatattgtgtcaaaatttaaacaatatttttaaaaaaatttctaaaagaaaaagacatgttttaaatttttccctagatctctcaatatcttgagatttttctgttctcatgagattttttttttatatgtcttgtgatgtatttttagtgagtttactcttaagattattaaggttttaatgaagccatttatctaatacatatatatatatatggatcatttcttaatgggtattacccatgaatgattactaaacaaatttaactataa

SEQ ID NO: 170547 - DNA, 875 bp, Cannabis sativa
gatctttgagattgaactcctcctgcaaattcaccagtaacctcagaattcgatttctgggattcaatttggagattagtgatgcctctttgactttcctcttgaatgattgaggcataggctttattaattcctggaagaggttcttgcattagtacttgggatctagcaagactgtaggattcatttaaaccaacaagaaattcaagaactttatcttcttcttggtactgttgtatcactttcatagccccacaagtacaaacaggtggtggctttcttgaatcaaatcccatagggtttttaacttggtaaagtatgaagtcacactattcgaaccttgattaaggagattcatggcgcgcttagcttcgaaaacacgaggggcattcttttggttgaatctttcttcaagttcagaccaaatggtggaggcattatcgtggtacatgatgctatctcctatttcacttgatacagcttttaatatccaagagatgattaaattgttacatctgcaccaagattcgtggtcttcgtcttcttcatctggttcaggtaatctaccatcaacaaacttcattttgttcctcgcagctaaggccaccatcatcgatctcttccaagatccacagttctcactgccagtaagaacttttgcaacaagcatggcactaggatggtctccatgtgacagataatagggacttcgcggatcgtcatatcgagtagcttgatctaatatggaaaagcgattattgatgccagaatcgttgtcgcgactggaagcatttcgagtctgagctcctcctcctcttgccatggcagctgggacacaacagatgcagagatgggaagagaagaagagaagaaca

SEQ ID NO: 170548 - DNA, 1308 bp, Cannabis sativa
atcatcacatatcggtgcgcttgaaactgtacccttctggacagttccctttcttgaggcaactcgcctttggttatgtattcgatgatggggatcatccagttgggctctggctcaactactgccacaatatttttcgctttaatgcttggttctgtgaggcgttcaacagggaccacccccaatttctcaatctttctatctgacgctaacttagccaaatagtctgcgtgggcattcttttctctggggattctttccactttatcatccgtgaactcatggagtagctcccggacaattgctacatacgcggccattttttctccacgcgtttgagattctcccgacacttggtttaccaccaactgcgaatcactgaagacttctactattgtgacccccacgacttttgctaatcttagtcctgcaattaggactttgtactcagctcattattggaagccgtgaattcgaagcgtagggctgcctggagtcggagtccgttcggagatatcattgctaccccagctccggatccgttttcgttggacgctccgtccacgaatactttccatgctggggtttgtggcattggtaggtttgcgctagcttctgcttcattgcactcggttatgaagtccgctagtgcttgtccttttatagatgtgcgtggtatgtagtgtatgtcgaattggcttaactcgataaccaacttgaggagtcttccggacgcctctgacttctgcaggacttgccagagcggatggtttgtcaacaccttgatagggtgagcctggaagtagggtcttaacttgcttgaagccatcaggaggaaaaaactagtttttcgatcactgggtaccgtatcttctccgtccgccgcccctatcattcatatgcttcttgctgacatagtacatggggtgttgggtattttcctcttcccggactaaggctgcgctgaccgcattctcggagacggccaagtatagtaaccagtcctctctaagaactggctttgacaagatcggaggtttggccatgtgttcttttaattttttgaatccctcctcgcattctttggtccattcaaatttttggcatttcttcagaatgttgaagaagggaatgcacttgtctgtggattgggaaataaaccggctcagggcagcaacttttccggttaggctttgcacatcattgtgcttctttggagatggcatgtttaggagggcttgaattttttccgggtttgcctctatccccttttggctgacgataaatcctagaaactttcctgatttg

SEQ ID NO: 170549 - DNA, 665 bp, Cannabis sativa
  modified_base (60)..(64): a, c, t, g, unknown or other
taaaattttttctttttaattaagtgatatcaagtgcaatatatgtatgtttaatttttnnnnnattaggtaatgtattttttttttaatttttaaattatatatacgtattttatagttaatgaggttaagaatatctaagtattttaaatttaaatttaaatgtcttcatataaatatctacatatttttttttattttaatttaaagttaaaccaataaaattaaaagtatctacaatattttaagtattttaaatttaaattaattttttatgtaaaatatttacttaatttttatttttaaatacttataataaaattaatttttttatataaaatatctacataattttatttttatatgtataataatattataaaattaataaagaatattctattaagtagagtatattaaaaaaatatgattaaactaaaaattttattacataaccacatctatatatatataaaggagaagtatgaggcggtgatgtgacattatacaatagctttaaaactatttttctctactctccttaattctctatttttttttaattttttattaactttataaatattaattgattaattaattaaaaaacatatttagtatcctaaatatcttctaattaccatcactaaatctatatattcaac

SEQ ID NO: 170550 - DNA, 577 bp, Cannabis sativa
attagagatttctctctcctctaaatccgaatcactttactcgtatactttaatttgcatctatcaagtcactctttttctcctttcacacatttatcatttttttatatgtatatttttatattaaaatatttttctttcctttcttttttatattaaaatattttttgattactttttaagatattcattttaaaatgctgaaagcatatattttttatcattgctaaaaaacataaccaaaatcaaatataacattatagtttcttttatattttgttagttaataagtaattactttttaaacttaaacaagttaatttaatacatcaatgattaaaaaaaattatagattttttttagagaactgaaagttcacaactttataggttactaaaaagtattataatttcttattttatcttagatgtaataactaataagattatattctatataaacttattttttataaaacaattttgataggtttataaaatactttgaaggaaacaaaataatatcttaaacattatatgttacattttcaagtagtcaaactttaggtgtaaacaaa

SEQ ID NO: 170551 - DNA, 657 bp, Cannabis sativa
cgacataaacttccatgttcttccagatctagtttgtgaatatttcgttcaccaatcgctgatacgttgccccaacattcttcagcccaaacggcatgacttcataacagcagagtcctatgttggttacaaagcttgtatgttcttgatctgggacatgcatttttatcttgttatatccaaaatatgcatccataaatgacataagctcgtgcccagtagttgcatccactaactggtcgatcttgggtagtggaaaacaatcttttgggcatgccttatttatataagaaaaatcaatacaagttctccaagttctgttaggcttagggacacaaacaagattagctatccacgagggataaaacacctcacgtgtaaagtcataaagtcattgactaataacttgtccacttcctgttttattgtcccttgtctctcagaatccaagggtctccttttctgtctcttcgctaggtagtttggatcaacatttaaatgatggcagataatgttagggtcgatccctatcatatctccatcgctccaagtgaattgatcgtggttcgcccttaagaaacttattagctgctatttgagctgctcgtccagggttcttcccaatgtatacacattttgtgggatttcctgggtcga

SEQ ID NO: 170552 - DNA, 590 bp, Cannabis sativa
cactaaagatattcactttctcatggagcttaatgacgtctcgtacacacatcatcaatactaggaaagatgtataacatgtggcgttatgtgactttatcggaagtcaagtatgttattttttgtataatgtatgctttctttaacctagttttataagaatgttctttatatatttatatatatatataacccttaaatacttagattaattttagaataatattgatgtaatacataaagatgcacacagggtgggaaattggtggggactgctccctccatcccaatccccacttattttccattggggacatggcgaggaatcccctaatggggcgggaacggggcaagaaatcccctataatgtaaaaataaagtttattttaaaaatttaaattactaaattactaaattacataaaaattaaaatattatacattatttattattcaatagattgattattataaaaaacatagtttaaaaattataaaaatgatactaaaatactataaaaatactaacacattataaaattaaatgtataaaaatattaaattacataaaaaaattaaaatattacacat

SEQ ID NO: 170553 - DNA, 545 bp, Cannabis sativa
gaaatagtgaaaatcttatatttccgatagtgctaccgttttgtgaaatatggctacgacccaccttagaattttttatagcactagtaaaaatgaattcatactgctaagatgtgaatatcaagataagtttcgccttaaatttcgttaaaatgccttaattataaaattgaaaatattcttcttttcagggtaaattttaataagttttttcttactcttacagtcgttagaattatgttaaaatctcaccctacacatcttgaaaaattgtaaaatttcttagagaaaaagcaaagaccgttgtgcatcacttttctattgaacatgttgagcaaaaatgtagttttcaagcactaacaatcatattaatcgaaatagtgaaaaatatcgcatttctgatagtggtacccctttgtgaaatgttgttcggacctacctcagatttttttttggcaccattcaaaatgaattcccactactaagacatgaatatgaagattggttttgcgttaaattttgttaaaaatgccccctaattcaaa

SEQ ID NO: 170554 - DNA, 661 bp, Cannabis sativa
ttcaactttaatctctcgcgtgtccttaatgtaacttttttttgttttagacaagtacacatctcaataaatacatttttatccatccgtaataattcataatatgttctctcgtgaccacctaataactctttgacaaaatcttcaccacttaaaacagatgttctttgaagcagtttttcattaaatgtctcattataatcatttaaaaagtataacattaagaaatatgtgaagtcatcaaaatcattttctgaagaagaagatgagctagagtactccatttgattagtcctacaaaagttatgttgacatacaaaattactttgaaaaacgaagaaaaaaacgtgtatataaagtttataacaaagtctttacttgattatcttagtataacatattgaaataaggtcaatcacacataaaactataactcagctccattatcaaatatcctaatatcaattattaaactaatgtatccagccaagctctccttctaagagtaaacatattaataaaggtctctctccaaacaaaattatgcaacttctccacaacttcatgcaggcatcatcactaactccttctattccttcaagttacttgcatacattttgtgacagaaaactctattgggttttatccctaaataaaactc

SEQ ID NO: 170555 - DNA, 672 bp, Cannabis sativa
gaggaaatttacttcacattttttctaacatttagaactaacaactccaagagattatgatatttgaaattaaattttgataacaatatttgaactaacaactcttattagagaagctgcggcttgtatgctagctatggagacgaccatctctttacattattcttttgttttaatggagagcgactctgatacactgatcaagactctgaaaggaatttgttccaaggattgacaattttgtgactttgtaaaaatttctttactaaattgttatgttgtaatttttctttcattattagattaggtaattttgcggctcattatatggccaagtggacttttgccaacaacgttatcttctgtatcagacaatattttttgtaatgaccataagatctaattttagtgtttatctataaatgacttctctttttcaaaaaaaaaaaaaaaaaatcttagataacaataaaaatttggtagaggaccaatcttgaaatggatcttagaaaaataaaaattaaacttttattataagaataattgatatttttaaatatttttttttagtttggactaggggtgttcattggatcacatttaatgaatttggacctatccgatccaatccaattatttattggatattgaatttttccatccgatccaatc

SEQ ID NO: 170556 - DNA, 715 bp, Cannabis sativa
gcttgatcgattcccatgtggtggggtgatggtggaggagtgtgtaggtgggtggctaggtcagatgcaattagatttagtgatttatgttttttttttatcatatatgttttaaatgattattgatttgtttatttttattttaattagttttatgtattttcttcattaattaggcgaagaaaaaaagagtggaattatcaggacagttacgtgtccttagtagtaactctgttaagtggtaccaacggcagagtttaagaagtgagattttgagtattaatgccgcaatttttaaaaattgggtacttattagcaacaaaaatgaataaaatgggtatttatgccgcaaatttccctatttttaattgtgatgaagaatagaaactaagctaaatgaattatatgcttcattaatttattgtctagattaatctatctccattgaactcaatgctttatctaagttaaataaattgtatgtttcatatatttactatttaggtaaaaaaattaattattgagcgcttcgccttggttaattacaatagggagactgagataattgactgcttcatcgttatttgcaggattaataatttaattagaataatgcagaattgtttttttgttgtaaaaatggtttcataagatagagaatggtttcataagttgtaaaaataaaaaaaggagtgaaattgtttttgttgaggtc

SEQ ID NO: 170557 - DNA, 581 bp, Cannabis sativa
gcatacccctgcgcgcgtggatgacgagacctgatcgagacagaaggctgcacgcagccttaatggctgagggaactcaatgacacggtttcagacagcccgtgtccgagtttcctcggttaggcttgtctgaaactgcgcagagtgaatcccctcgtgcgcgcgtgtgtgcatcagttttagatattttcattcaaattcaaaaaagcataactaattcataaaaaattcaaattgagttctataaaagcctaaatttattaattttttgtgtacgttccagtaaaaatattttcagaacgaaaaaaataatatttcacaatatacattgtgatttccatacaatcatcaaataggcacataaaccatcacgaaaccatccaaatcaacacaaacatcattttaaattcatatttaatgaaagtaaatcattaccatggctctgatatcagttgttggattatgttttaccaggatctagatttactactacttatgttatataacatcctaaatatgaatttctaaaataatctaatttaaacacatataaagttcgagaaaccttacattgggtgcag

SEQ ID NO: 170558 - DNA, 1196 bp, Cannabis sativa
ttaaatagtagaactaaaatgaataaacttgaatacaaattgagcaaagtattctaaattgtatataaaatttaaagtaaattaaaaaaataataattcaaagatactaaaattaccactaataaatgacttttctttttctcccaaagaaaaaaaagtttggagacctaaacatacaaggtactgaatatacatatttgtttctaaatgggagatatttctttttgtaattttataattaattaaagattattttggtaattcatgtaatagaggcctataaatattcttattttcattagggttatagattattgagataatacatatagtttaggtttatcttgtactttcatgtatatataaatgtgaaaattaattttaacttatataacttttaggtcacttgataaataatgttaaaattatacatatgcatgttaccaaaaaaattatatattaatttggccggttgccactaaaaattatgaagcaaaaagttttagttttgtgtgattaaattaaggtacttttggtaacaaatttaatttaattaatttatgtataattgtaaaatctaacaataatgaattgtaaataaaactatttaaatattgattaagcttaattacaaaagtatagatatatttattaaacatgtaaggatatatataattaattataatgtttatattctagtgagaatatcattggaatgcagctctagctttttctaataattatatcactcatgcatgagctggtgtacattattattagatttattaaattagttatatattctcatgtgtgcatggtgaatatttccagaataaattatttgtctgttgtgccgcaaatttcgttttgtaattctctatttatttaatgtcacatttaattggagataataaaatagaataaaatagaaatgagataatttttattttattcttttatttagttatatattaaagtaatagaatgttattttaatgatatgacctttgtactattttagtggattagtgattattctatttttttttaaaaaaagttatatatttcaatgtatgatgaaaaaaaaaataataaataataatttttttttttttttttatacatgcattttgaattttattataaaaggaaaatttaatatttcaattagtattgttatgaattgattaatattg

SEQ ID NO: 170559 - DNA, 1478 bp, Cannabis sativa
  modified_base (357)..(357): a, c, t, g, unknown or other
taaggttttgggatgattttgccatagtagggtcttttagagtatttccaatggtaaaactttagaggatgtttggtgaggtggatatattatgtggtaaaatattgagattttatatcattgaagaaaaaaggatgatattctagaaatttacatggatactatattgtagcattaatactatttattttcttaataaaaaattgaagttaaaaaattatagtaaaaattaaggtatatattaaagaataatatgtgagattataattataatatttttaaaaagtattatacattagagtatttttaaaaataaaagtgataaaaataatgtgtaaaaaaaataaaataaaatanaatattatatttttaaataatgtgtaaatttttaacattattaaagaatattattattagagatgcttagtcttgccgtgactagataaatcttagtggcgaagcgagccatttggcaaaatagcatgcatgacaaaaaaccagtcttgccgtgactagataaatcttagtggcgaagcgagccatttggccaaataggatgacaaaaaaccaggacagctgctagtaaaatatccgaaagaacagattattggtattggggcagtcacagttactgacagctactcggtttgcctagactgctttgaaccaacatggactgggttgtattgtatgcttttaatccacattgacacaactacacttttttttaatttactccaatttctgtgataagaaaaatatatatataatgataaataaggaagtgtgtacgcttatttggatattaaaaaaaaacgtgttcatttggcatatggcatatggcatatggcattgacttttggatcatggttggtatcggctgcgccagctaatttttacaggattatgttctccgaactggcatccgtataggagccaaatctcctgtgtaatactgtcttagaatagtgtcactgggtccccttccttccttccttcctttggttaccatcttcatttatctagctaatccatgagtaccatcacaaaagtgtgtacgcttgaccaatatataatttcaagagcaatattaattgttatactcagtagtgactaatgcgcagcacaatctattggaggttgagtccaaatatcttttgcatacacacatcggtatataggagttccagccgtgtaaaattaaggtagacattgtcccacataaaataaatggtagaaaattgagtcataagaacataggctacttcattcattggttttgagatgaaatctcataattctcaacaacactatacctttaattcttgtttacgatatctttatctatttcggcatttaaaaaaattagtttaatattaataattgtatacgttatgtaaaattttaaagaattctgaacaatttaaaatataaaaacatagtgttcaaaaaatttatttcacaaaaaaaaaaaaaaa

SEQ ID NO: 170560 - DNA, 747 bp, Cannabis sativa
aaaatttttcttaaaattcaagaatatgccacatcatcttaatggttacaaaaaaaaaaaagaaaaacgacgaaagatgcatatatatatgtactgttgagcaaaaaaaaaaaacataaaaggcacatttatgtacatcgataaaacaaaatctgatttagaatatatatacagtttggtataaacgaatggggtgattataattactcacttaaattgctgtatattaccacgacaaccgagaagtcttcgaaaaaaaaaagagaacacaaaatgctgttaagagtccaacgtttgaatatactcaaagaaaactaatattatcgatgaatctaattttttaagtggacttctgtgggcagtaatagagtttatatagatatatctaagcaataggtcatatctcaagtttaaaaattacgatttttaaatttaaatggcaagtgtaaaagaaaagataattaatttaattatttctttttcaatttgaaattatattaaattaattaaaatatcagtaaaataatctttttattatttcttttaaataacaataaaaagatttcaagagtcaatttatcgctaaaagtggtaaaattctaaaaccatacaaaatgacacaaaattccaaatgagctcactaaaattaatcttggaatattaaagaggtcattcgtcttacaaaaatttcaaagaggtcattaacctcacaaaaatctcaaaaatggtaattttacctaaaaatta

SEQ ID NO: 170561 - DNA, 573 bp, Cannabis sativa
ttatgcaaataaattatatttattgatccataaaaaaaagtgttatatttatgataaaaaacaatcaacaattgaaacatatattcaaataaattatttgtttatttatacattgtccaatcatattagtgtaaaacatatttctttggttttcatgggataattatataaacactaatttttataaattttttacatttttacgtttatttatttatttattttttacatttttacagtattctataaaaacactaaaaaaaccacataaaaacaacatcagaataacaaaaaatcaacaaaaaaaaaaacaggagtacgacataaaaatatataaaaagaccgtactttatgtaaataaaatctaaaaacccgtaaaaatattgaaaatttcacacatatcgtatttttgtaacgttttttttgttgtttttgtgtgtttttttttcattatcccataatacttttcaattatataatatatttttgggtgtttttacaatgcacactcctaaaaagtaggggtgtgcagaaagtcatccaatccaatctcaaccgatccaatagaatcag

SEQ ID NO: 170562 - DNA, 564 bp, Cannabis sativa
tgccatttcaaatcattgagccataaaatgacagtgtgtgctctatatagtatataacattatttcttcttcttcttcttcttattattattatttaagtaactagtcttcttgcttcagaaaatctagttgggttttaccatcaagcttgttagtgacaataagtctgatgtaatcctctgtactaatagttttataattagccttacaatgtttttttactagatctggtaaaggaccaacaatgcctttaatatgtggactatgaaatgcagcaattgaaatacgttgcttctctgggttcacaacagctctgtgctctatgctcttgaactccccattgctcattatctacatatatacataattggttggtaatgatatgtacaagtacaacaaacacttggtcaatatagagtatccattttcatttttacaaagtgtggctttttttcaaaatagttattttataatttttttaatatatataaaaaagctaacaaaaaaaaaaaaggaaaaagaataggataaatactattgtagaccatgtattttgcaaaagtt

SEQ ID NO: 170563 - DNA, 856 bp, Cannabis sativa
gatgatatattgatactaaaaccatgcctccaagattaactgcctcaacatgaacatgagtatgaacatgaaatgtgctagaacctattcaggatttatggtggaaatcaagggcgtaccaattacagacgcatacggggcgattctttcgtgaaaaatagggttgtagtgttccggatgtgcatagtagtcagcctgacatacaataatatacaacagctttgaggctagtgaatgttgagctattagactgtttcaacttgcaatgcttacatattcaaatcatttcaaagtgagcaatagataatatttctaagtttccatttggaaacagagaaaatgtaccagcacaattcttctcaagtaaattaatacactacatatttatactatcaacatgaggatagcccagaaacaagattcgataatgtagaacgtactttatcaaatggctttgttgaatccttgttttgaaccatgtcttggcaagtgacaacacagccataaacttgaaacaccctatttgatgcccttgctggttgagatacatccttaccctttaccaaaagaaacatatataaattacaaaccaagaaaatttaatttctgacattgttttatagataggcaaggttggaccatatgtaacctgaaactaaccattttaaatagctctggaagcttgttcggatccacaaaactgtgaggaagaagtttaaatatctcttgtgctccaagagaaactacatagcacaaattttttttaaaatttgcattatcacaatagaatagaatagaatatggttacaataggtggtgaaattggagtaagtttcaatgttaaaaataccatttc

SEQ ID NO: 170564 - DNA, 521 bp, Cannabis sativa
aatattatccatgtgtacaaaaatgacacgtggagaatatccaagtttcatgagcggttatgaatgaatagatcccaagagaataattgtcactaggggtgttcatcaaaccgctcaaactgcccgcaccgcaaaaaaatatagtttgaaattctgtgcggtgctgtcgcggtttgaatttttcctaaactgcacagtacggtgcggtttacggtttttaattattaatatgcagttcaaatcgcaccgcaccgcacattataaaaatataaatttttatatttatttaggtccaatatatgtaaatttccaatccaaagcttactaattattataggtatatattatacgtatcctatttggtttgaaatatgtcaaagaatccaattctataatacccagcccaaagattccaaatagggaaccttagtgaacagggacagagggactttagcccatatgtaggctaaagccctcactcaaatatatacatcaattttttttatatgtagatatataca

SEQ ID NO: 170565 - DNA, 776 bp, Cannabis sativa
tcttgcgagcatgactcaatgggagttcttcgacagacggaagtgtgcacgaggcacacgattgcgtgacaaatgagcctattgttactcgcatggttggaaggttgaccttggcttagagaagtcaaggtgtcacacgggtattctactacctaaaaaggtgagctcgtgacactaagcattgttaagataaataaattgcaaaatcttccaaatacaaaatctggtgcaattcagaactgcattgtgaagataaaactcgaacaggaaagaatatatattaccgatcaataatacaaatcgaacaacctgcaaaaaattgtttctgtctaattattatacgaatgtctgtgcaagttgtgattactcttaagaaacacatactcataaaccaagctttgatgccatgataactctttgagaacaacacagaacaaagaaccaagagatggagaaaaaaatagagacaacaatttcatacaattgtaaagtcaaaagtaaaagtaatacaagtaataacaaagcgttatataggcaattaacataaaaatgaataaaataaccctaactaattatttaataggaaaggacatcactacaaaaaatcttacttttagtcaaacacaaaacttgtgattaaaagtaaaaatgttgtaattaattataaatcattactctatgttgtgattaaaaagtctgtggcgcctaaaagtattagtaacaaaaattataattttttgtgactaaatgtgtttttagtcacaaaacttattgtg

SEQ ID NO: 170566 - DNA, 1066 bp, Cannabis sativa
  modified_base (588)..(589): a, c, t, g, unknown or other
  modified_base (1006)..(1012): a, c, t, g, unknown or other
tttttaaataaattaattatactacctacataaatcatgtgtgaactaataaaatagtacacattcttagtataattatatcttcttctctgtgttttgtttttattcataattatctaaacttttcataaactattacattttgacaacacataatttattttttacataaattctttatttctttttagattactcataattagtatttatatgccatacacaataaaatataaacttatataactaagttattgtagcacatttagtagattctcctatttctagttaagtgacattagttcaatcctttacattttcactttatagttttgctttatttattattattattattttattgtatttgaataattttttctgaggttataatacacattttttagggattattttacaaatacatgaaaacaataaataaaaaattacaaaaatacggctgtacgaaattttaaatattttgacgacttttataatttttttttacagaaaatacggtctttttatgttgtacttttcttaatttgttgttgaattttgttatatgtgtgttattttttgttgttnntttcatgttacttttatgttattttcttgtcgtttctatggaaaatcgtaaaaatataaacaaattctttaaacgtaaaaatataacttttttttacaaaaaatagtgtctgaagtaattatctttttttttttatcttttttttattttgtgcattggagaaatttaaaattatttaattagctaaactttttaactaaatgtgtgattgcttttcggaaccacatgtttggcttagtcgcgaggaagtgactatcagacctgaacgtttcatttgactttgcatataggcagattggtcgatctacttggacccgggtaaatgggcccatcattcttaatgggcttatttgaataaaataatacatatagaaataaatgatatggataattacataaggcactattttttgtaannnnnnntacatttttacgtttaatgatttttttttatatatttttacgattttccgtaaa

SEQ ID NO: 170567 - DNA, 1873 bp, Cannabis sativa
ttttattgaaggtagttcatgatctaacatccaggttgacatatgacgtcaaattgaacgttggctaagtgtaaaaacgttcaagggatatccattaagattcttaagtgatatattgacaccagttagttcatttatatgttctggcaaagttggtcaccagttcttggagatattgttgttttacggaaatgagagactcaaaactctttatttccgggtgtgctgaaaattaataatgcaaagttgtgaattttacttctctaacttcatagatcataatcattgtgaaaaactagatggacggtcaaagtgacatcagattcagattcgtataagtaaaacccagcgcaccagaccttttgtcaacctaggcgctaggccctttctcccgaggtcctaggaatttgtttttgatacttctaaggcttctaaacttgagaaagagttctcctactaccttattttttacaattctagattcaatggatgcatcaaattagacatttgagcaatcgaaggtagcatcccaggttgattgtaatgccctaatctatagggacgccacatgggtgattttataaattagtttaatactaatagattaattaattattaaaaatcgtgaacggacattataatggcataaaaagcgtgttcctggaattcctgttataaaaagtttaataaaagaactatatacgacaatacctcaaaaacataaaactaaaatacaccatgaatacaacccaaaacaactcctggcaacccggcacgcaggccggcgaggtcaatatgcacattgctaaagaagaccgtccaatttatacacaatcagaatcaaacaaccacgaattgctcataagctgaaatccaaattactacttttatttaccatgaataaacatcagtatacaactatttgataatagaaaaccattataccaataatagaattcatattcatttaatcatataaattatatatatacgttttaccttataaagtaaccatcttcattacatcacgtcgccgaattaggaaagtcaatactttaatctaataatcttgtattgcattgcctaatcaggcaagcctgtgccattgcctggcaccatatatcgcataattacatcacctaatcaggtgagattgtgccaaaaacctacacccatatatcacataactgcatcacctaatcaggtgagtccgtgccataacatgacaacaatatatcgcatcgtctaatcagacgagcttgtacctgtgcccggtacttatcatatgttactgatgcccttacctatgcctgatacgtcgccaagaagaaacccaacaatggtttcgatctaggccaaaactaggcattttcatatcagtgatgctcatatctacgctcgatacgttgccagaaaaattgcatcacctaatcaggtgaggccttacctatgctcggtactcaacatatatcactgacgcatttacatacgcctggtacatcgctaggaaaatcacatcacctaattaggtgagctcgtacctacgctcggtactcatcatatattactgatgtatgtacctacgcccagtacgttgccaggaaaatcacatcacctaattaggtgagctcatacctacgctcgatactcatcatatattactgacgcctgtacctacacccggtacattgccagaaaaattgcatcacctaatcaggtaagcccatacatcacatgcataatatcttcacattatcgatacttaagcaatcaatcttttcattatataacaatattaactatatctcaatattaatcaattcataacgatactaattgtattacatacaacgtactatgcattacaatatac

SEQ ID NO: 170568 - DNA, 600 bp, Cannabis sativa
aaaatttggaagaagccggagcaagtacgattttagaataattctttaaccaacaagattttcttgtaggaaataatctttggattcaagatgagtctggaacaaaacttaaatgagttcttaaggatgcacatagagttggcaaacttaggggaatttgaagctttgagtgatgagaatcaagctataattattctcaattcactgctagtcttacaaggaagtgacgactgcaataaagtatgggagaatcgagattaatcttgaagaagtaatctgagctctgaagtctaaagatttagagatgaaggtggataaacttaatagctttaatggagatctaaatctaagtagagggagaccaaatcagaagaaaccatggcaaaatcaaggaagaagtaaaagcagaggtccacacaagggaattaatcaaaatagaggaaaatcaaactcaataggacataaagaccctaatggaagctatcattgtggaaagcgacacactccaaaagataatgttaattctacaagagaagtggtggaaaacctaattcagatcatcaagaagatttaaacaaacaaaacaagaacaagaataat

SEQ ID NO: 170569 - DNA, 728 bp, Cannabis sativa
cctctgcgagtttgcaacaccattatgtgtgcctgttgaaacacaagacgaagaacacaattggatttttctctcaataaaagcaccaaaatgttgacctcgcttttagtcaacgacaatgagtcaattatgaagcgattagaaatataataaaaacagagcaaaaaccattaagcaataaagaacactaggttttaaattggttcgacccctttagttcgataatagcctactccccttagattgtattaacttgagaacaaagaatatagtgttttctctctcaaagttctctcaatgaaatctctgagtgttcatcttagatctctctttaaagcaattcttctgatcctttttacagtgaagcttgatcactatttataggggtttaatgcatgagggaaggttttccttttgcttacaatatctataattggaaagaacattttttgcataattagaatacatgaaatgggggattgagacaacctgccatattcctctgattcaatcccatgattgtagagattgccttcgtgcttgggcttcacgataccattcttaagtagtcaagtctttgtacacaactcggagaactaacctcattctttgctcggataatctgccctttactatgctcggataagcagactttgtgcgtgcacactactagaaaaatgttttttagtgatacacattgagtgactctaaaattatttagtgacact

SEQ ID NO: 170570 - DNA, 1022 bp, Cannabis sativa
ctaaaatgatagtgtcactactgcaagctcggtgacactaacttgaaccctatttctgtataggttagtgatttcgttacgaaattggtgactttgatacactacacctaaatttattacagactgttcacctagcaagtgtacatcggtaccactacgtagaaccctagtttggtatcggttagtgggtgactctgttacactacacctaacttgattacagtctttgtgtcgcggtacccctaaacccagtgatgtgtcaatactgcgagtgtacattgacaccactaagtagaactcttttcgatatcggttagtgacttcgttacgaaactggtgactccaataacctacacctaacttgattacatactttgtgtcacgggacacctaaacataaacagtgatagtgtcactactttgagtgtatatcgacaccactaagtagaaccctatttcgttatcggttagttatttcgttacgaaactagtaactctgatacactacacctaacttgattaaatactttgtgtgacgggacccctaaacatctatagtgatagtgtcactactgtgagtgtacatcggcacaactaagtagaacactatttcagtatcggttagtgattttgttacgaaattggtgactccgattcaatacacctaactttattacagactgtacacctaacgagtgtacatcggtaccactaagtagaaccctagttcggtatcggttagtgggtgactctaatacactacaactaacttgattacagactttgtgtcacgggacccttaaacacctatagtgatagtgacaatactgtgagtgtacatcgacacaactaagtagaaccctatttcgatatcggttagtgatttcgttactaaactggtgactacaataacctacacctaacttgatcacatactttgtgtcatgggacccctaaacatctacagtgatagtgccactactgcgagtgtacatcgacaacgctaagtggaaccctatttc

SEQ ID NO: 170571 - DNA, 752 bp, Cannabis sativa
tgtaaaataatagagcaatgaatcttgactaaataaaacctggtgtaaagaattttatgtcataacacaaatgtattgttaaactaatttttagtatcaacaaatatactatgctatttaagtgagatgcttttgaatatgagtgttcatcagtcggtttggtcagtttacgttacatttaattcaacccaacgtaaagaccgggttacaaaaatctaagtgcaacccgtctaatttagaaaaaaaaaattcaacttgcccaaaccgatcactaatgtttatttttttttcacattcaattgttatattttagttaattgtgatagtgagataaatatatagattgaattcaaaatttaaatcaaccaccataaaagaaatatagtaatttgaactttatattttttttttaataaatatgtatataaattttcttaattggattggtcgggttgatattattttcaacttgtccaatataaaaattagacgggttatattttcgagaaaatacattgtatacctattttactttatttgttttaatttttacctctattttttatattctttaagatatacccacttttatagatgatgtcgaccccttaagttaatgtaaattatatggtagacttaagtagagagtaaaggtatattggacaactcactcgaaaaaagtaagtatattataaaaaagatagtctttttaaggggtaagttgaaaaataccccttttattaatcaattaa

SEQ ID NO: 170572 - DNA, 714 bp, Cannabis sativa
ctggtaaaatatttctaacaaatccttcttttgttaaacaaagtaatatttcaacgattccaaatttcccaaataattccaatgaaaactctcaaatcagctttagacaaatcatggaaacctcttaacagaaactctctaatatcacaattcctagcaactcgttagaaatctttaaaccttgaatctttccactctcttgaagctctgaaacactctactagtgcatgagtaacagattcaggacccttagagcaaagagaacaaagaggggacgacaagattttcttatgggaaagattgagagcagtaggaagactatggtgaaaggccctccagaaaaggtgcttcattttgggaggtatttttaaattccaaagggtcttccaccacttgactagagaattactgctagaagaggacggtaaagaagtaattgatttggctaaatgataggctgaattcacagtgaacagacccgaagaatgatgctcccaaacaagagtatcgtctaaagaaatatcagcaagaggaatagtcaaaataccctggagaacttcctcatcaaaaaacattgccaatttctttctatcccaacacccatcagcattaatgaaaaaaagaaacagtaagttcagggggggttgaaaaaccgtgtttttgcagatgtcaattatatatacgaaaatataaaactgtatgcgtctgcagaag

SEQ ID NO: 170573 - DNA, 583 bp, Cannabis sativa
gaaacaaacttgagtatattttatctttatcagaaaaatgtagatttatttaagtaaatataaaaaaaaaaattagtttaatttataacttcttttcataataattttatatttttattgaattttcaattgtttttcattatttgtgaagatataagtttataaatatattaagtttgattttttctttataaatcttaatttatttaagttatttattaaatttttaataattttagtttaattttttaagataggtgataaataaaataaattttgaattcttttaagtaaaattaataaatttttttatttaatttaatatttttatccaattgtttaataattttttattattattttttgaattaatagaatattactcgttaaaaataaaatattataatttttaaaattaattttttaataaaaaggggcaagattttgtataggtcaaagtttaggggttaaaaatgttaatttttaattagggtacattcaatccaatccaattgaaccgaaccgatctaatccaatccaattacaaaaaattagatatccaattataattggattggattgg

SEQ ID NO: 170574 - DNA, 808 bp, Cannabis sativa
  modified_base (736)..(766): a, c, t, g, unknown or other
tatcttcatccatgtaggtagttcgactttgtaaaaggctagcccaactttggagatgaatggaataaggccctcatatttacgtatgagtctggtgtcattgttctctcgaaatctcagttgtccttgttctgtacaatacaagtcacagcctcatgtatgaataaagaactttctaatatttatatataattgtgagtcgacagactcggtaagaaaagcatatcataatcataaatatatatccagaacataatcaggcgcccatacacctaatcacgatctgataactgagtcaggatcgttctcgacaaggtatgactaactgcaaatccagtctatactcagtactctagtcatactgatgtggtagcagttaattcatactatcttgaggcctatcatatggcatctctgtgcaactctatgtacacttcactgataccttgatatgctaatctgatggccattgattttcctaacatatatttattggtacctcggtgcaactctacgtacacctcacttataccctgatatgctattcttacggcaactaacatgtacgctaaatatgtatactaatcttacctcatttccaaattcaggtgtgtcagtctacctgaatggaattgctgctcgatgatttacaggcccctaagtcacaatatttgtaaaactggtgagtgacacgctaaatcttttttcggagacttaaatgttggaaattattttnnnnnnnnnnnnnnnnnnnnnnnnnnnnnnnttattaacatcctaaataagaactttctaaaacgataaatta

SEQ ID NO: 170575 - DNA, 622 bp, Cannabis sativa
gaaacctaggatgtgattcctacacattcaaaacaaacactaataattagtatgtcagtcggtgtatgctacatttaattcaactcaaagagttacaaaagtttaaattcaacccgcccaattaagaaaatataaaacttcaacctagccaattgattggtcgatttagtcggattaactcgcttaaattgagcactaatttttattttcttcacattcaattattatattttaattaattgtgataataagacaaatacataaattaaatttaaaatttaaattaatcaccataaaagaaatattgtggtttcatttttttttttaaaatatgtatatagattatattatatataacttagatacaataaatatatataaaaatctcttagttggatagtcgggttagttcggtttaattgagtgggttggtattattttcaatccatccaatataaaaattaggcgggttatattttcgttaaattttttagtttatatttttcttagagttattcagtttgatttgggcgagttattcgagttgaccggtttataaaaacttatatacagccatacaaacaataaccagtattagataaactaaaaaaaaaaaaaaaaa

SEQ ID NO: 170576 - DNA, 597 bp, Cannabis sativa
gaccaacccgaaaatttaaagaaatccgttcaattcgggtgggtcgggtttaacccgatacacctttcaggcgggtttcagattcaatttttcaagtgaccaggtttcgagtcggacctagacccgcctgtgaacccaaatttttttttattcttacataaacttaaataataataaaagtttacactctacatacattagacctcaaatataatattatatactattcctaaaaaaacgttacataatacaatatatatacggttttttatttgttgaaaatgtatatgtatgtatattttattaaatttaatacttttgttatatatttataaataattaggtaagtgtttaagtttagttatatgtttatatataattaagtatgtttatagataattaggtgagtgtaaaaaaaaaattgaccaagttgatcgggtcaaccttcccaacccgaacccggccaacccgccaactcgtaaacctaaaacctgccaacccgcaacacatgaacgggtcgggtccaggtacaatttttccaacctgaaacctgccaatccaaaacccagtcaacgcgtccgatgttcagtcttacat

SEQ ID NO: 170577 - DNA, 807 bp, Cannabis sativa
atttaatagaaattattagtttaattatttttttctattaaagttaagagttaaaacgaatacttttaagttaattaattaattatttttttaaaataataattttaaatatctaaatttaatttatttattaaagtatggcttagattattatttaaaagtaacaacaaaattagataattattataaaatatcttaatttatatttgaattaaacgttaattcaattaattaattatactttataacaaatttattagttagttatattgtttacatttaaattgtattaaatttaaaattttttattattattatttaaattaataattaagtaatagcaactctaatataactcttaacaaatataaaaaaaataacatgcactttgggtgcggttaactataaaattttaaacttgtatatataaatcttatcaaattttaatgttaatatattttacataatttggttttttagataatatcgaaaactattctaccgaaattttcatttttttataataaagcaactttattgaaagcaaactaagccagaatagtgaccactaagggggccacttcccttaaactgccacggaacctggtctctacaactcgagcctagtgggcgagtaaatcagctgcaatattcacagaacgagtgataaaaacaacaccacaaacttaaattccttacacagattaaaacactcaacaaacacagggtaagaccccatccaaaagccaaggaaccaagatgaagacccttaactgccacttcagaatcttattcaatgatgacatt

SEQ ID NO: 170578 - DNA, 911 bp, Cannabis sativa
cgttctgcaactccattggattcaggagaatacggaggagttacttcatgaattatcccttctttttcacacaaatcatttattgaaagatattcacctccacgatcagatctaactctcttaatctttttatttaattgattttctacttcagctttataagataaaaacatattaaatgcttcatctttatttctaagtaaatataccttagcatatctagaaaagtcatctataaaagtcacataatattttttaccacctcttgtcatcatagtttgtttttttaaatctcccaagtcagtgtgaattaaacttaacaattcagattctctttgaacagatttacaagatttcttagttaatttagcttcaacacaaatttcacatttatttagactagaattattaactccagaaattagaccaagagattgcattttatttatataactaacactaacatgtcctaatctagcatgccataaatcaatagaatcaaccaagtaagcagaagaagatgcattcttattaataacatcagaaacattcaatacaaaaagaccctgattacaatagcctttccccacaaatatattatttttggtcattacaatcttgtcagattcaaatgacaccttaactccaacctttcctaatagagccacagaaattaaatttgctcttatattaggaacatgaagtacatcatttagagccaaagtcttgccagatgtgagtttaagaacaacttttcctttaccaagaacttgagcagttcgagaatcaccaagataaacatgttcttcaccatcccctactggtttgtaggaggaaaagacatctttgttagcacaaatatgtctggtagcaccagagtctaccacccattctttcacattggccacaag

SEQ ID NO: 170579 - DNA, 943 bp, Cannabis sativa
atatatatatatctatataaaggagaatattgaggtcatgacgtggcactctcaaattatattttaaaaaagattctctactcttattaattctctcatttttaatattttattatagcataaatctataaattatattttactattattttaataaaccaattaaaaacttaaatatctagcttcaaatcttctttaatttttaaaacacatataactctaaacttataaatatatattatatatatttatatatcattctatatatcttacgatttttttttcttttttttttttgtttttttaaaaaagattattttatatacattttattctcacactatttcttcttccttcttcttttttctttttatttttttcttttgttttttaatgaaaattctccatctatctctaatcctattttttttttctcttttttcttttatttgctttaagtttaagtaactattaatttttgatgtatgcatgataccttgacagtaacatcaataaataacatcaagatctcgattttcaatatttttccataatttggagacatacaaacctttttctctttatgttgacaacttcaccgtcatcgatatcttcacattattcataatttactcattagtatgaattatttttagtaattttttctcataaaaatattttaaatcaaactttatatatatatgtataaatgtatatatagatatgttttttctgaaaaagataattttagtttatgattaataaccttaggttgatattgtgttttaattatataattataattatgatttattttaaatatatatataaggaataattatgacttgttttaattatatatatatatatgaggatatgattttgtcccgtgatgtactttcacggaatgtatttcgtcgtacattagatgagtctcagagta

SEQ ID NO: 170580 - DNA, 691 bp, Cannabis sativa
atatttttttcactatttttttttcatctctctccttctgttatgtctttttttctattgttatttattttttgtccatgcttgaagtattgggggagatactccgctcggaccactaacgaaaattgaaaacgccggaatagtaaaaagcttggtcagaaattaacaggtttgtttttttattttattagatttatttttccatatgtgaatgtttagtgattggtatattgcttatatgtatgtgtatgtgtaaatatatgtgatttgtactgtgtaaatatatagttttgtttatgtgtatatattatatgtatatatatgtattttatgtaaatatatattttttaagcaatatatttatatgtatatatattatatataatatatattataggcagccgattccaacccgcatggtacggctgcggaatggctcacgcccaatgtattatatatacagtaataaattctaataaatactgaaaaaggtttttaggttaggaatccacaaatggattttaaaattaaattataattttggtagtgtcatttatttacctgttataatttttaatacttaaatattaggccttaatttagatattttaatattttactgcttaatattattctttaattatatacattgtattgtaacataaccgtgtatgacataacacattatata

SEQ ID NO: 170581 - DNA, 513 bp, Cannabis sativa
gcctagcttaggaaagagaaccagcctgaagtaatacatctcataactttatcaatcctttcctcccaatatcgaagtttcaacatcataacctgaataaatgaccaatcaatcgtatcgtacaccttaaccatatccaattttaaagtcaacttcctattattttgaaaatgattctttctcatgcaatgaagcctttcgtacccaatgatagtattgtcatgaatcaatcttcttctaacaaaggcactctgtaataccttagaattatgaaatggattagcaaaatcctaatagataattatgagttaattgaggaattatattattatattgttcaatatatgagaatttatttgattaattatatgttaagacctcgttggtgagccaggggcattttagtaattttaacccgagaagggtaaaataataaaattaatttaattacgtgcttatggaactatattattatatagtatgcatgtgttgtctttttcaggtgtgttctga

SEQ ID NO: 170582 - DNA, 1052 bp, Cannabis sativa
taaagtcttgggcaaggaaccaatatacaaattgatgcttagcatattagagagaaaccatatgtcgctgaatgcgaatagcgaggcatcaagaacagtacacattggaagacgaaagcaacacatatcaattgcgaaagcccttagtgtataaactaagtgtaacaattggatcggctcgaaaccaagttagcgaggtgcccatttcgctatgggaatgcttcctataactccatccagttacgtcagcgaggcttaaaaccctgacgagctcgaagctaaaattcaaatgagctttgaaggactctttgtaaataagaactgcgatcatcccaagacatgcttcgtcgacctcggaaggaaaaatgaccccagctcgctattgagataactggaaccaggcttctgtcgagacatctcaagatatgacaattaaagacgtgtttaaaacacaatcactttgacccagtaaaagtgagaaaatcacagctatatgattttcaaatcataaccgcatttacactacgtgatatgtaatcaaaccccgtgattttaggggatgattgttgtaaacatattacagtcaactttataattaactgccctctacgtaattataaatagtggcaaataagatcaaaaagggacaaaaaactcttacagtagaggccgtgaaaataatcagaaatttgaatgagattgacttgtggactatgcagaactttaactgcaaaaccgtaagaaaaccctgtgttcatacttttacttttatagcttttatttttctgtgtgaaattactactttgagactcaaatttggttagcgaaaatctgtgttaacagtttggtgctttcattgagagcctctgcgaaaaagctcagaataaccctcccttctttcaaagaaaaaccacctccttcatggctgaaaatccaaaaaatgttaacaaccaacatgaggaaactaatcatcattctgggaaagagcccatgggctccaggaggtccaccaacccgcagtccagacagaccacccgttccaggaggactca

SEQ ID NO: 170583 - DNA, 552 bp, Cannabis sativa
taattaaattttatattattatagataaaatatatatgcttatattatatatatattttttaggaaaaggaagaatctattcaaactgaacaaaatttgtttatattaaaattaacatttttttttgattggatgaattgaattcaatccaatctaacatatattgaatctaaaatattatatgaattcgttccgatcttaaaaatatcaagcttaaaatattagataaattcaaattaaaccaatagatatacatggaatacatccaatggataacaccgatccaattcaacatccaatagatattgaatcgattggatgattgaaattaattggatcagatcgaatgaaaaaaattaacatctaatatataattagattagatctgaataagcatacaaatattagatatggtctgataatgaacacccttaaaaataaatatttcattaggtggcctttggttagaataaatgaaagcatagctagaatatgaatgaattttcaatactttaaaatgaaaccaaacaaaggaatgaaataaaatttgtt

SEQ ID NO: 170584 - DNA, 824 bp, Cannabis sativa
ggtaaaataatttccaacacccccaaccaggggcatatccccttgtacggtttgtggcacgattagtgttggccggaatgtagcagtccagctcgcctaggtacccgtcctggtcaagagttcgaaggcgcgcctctgtaatcttggatcgaggacttacccacctggcgcccaaggcaccctgcctcctatgaggaaccgtcgcagtaagctcctcactgacgtagtcaacgccctcgatcaggacgtctccgtcagcatggaatggctgcccagcctcgttgtactccccgtaatttgggggttcaacctcttcatctccctccacctcggaaggacatttggaacgcacatcatccagctcctcaacctctttgactttagcatccccctcacaatcctcctccatcgagacggctgaatcctgttcggcgctgggcagagtggcaagccgagccacttgagcatcagtatcgtcagccagacgcgtagttttctttgtacgagccatcatcctatggctgtgtacaaggtcagaagaatgtccttcgctagaaggaggactacaacgaagacaagggtgatcttcgtgcagaagttgaagcaaatcctggtcgatctgatgtccgagttccaaagactcacctgagttcatctacaaaagacaacacacgagatgagtgttggtcggaatatcaaatgataaacaagcaaatatgccgaccaggaagtactcaaacgattaaagaacggctacgtctaaagaaaagtcaaaactcaagaagtcaaaaaaatttctcgagttagggcaaaaaaaaagttca

SEQ ID NO: 170585 - DNA, 606 bp, Cannabis sativa
aggtccgacaacagtgaaaactcggttgactggctagagatgtcacaacagtattaatgggtattattgtggtactgggaggttatttttgatattggggattttggaattaagtgagttatttgttaatgactaatttactcttagagattattttagtgtaatggtgtgttgggggcaaagtgataaatttgccaagttttggttaagtagattaacataaattatgttattgttatcctttatttttattattagtatgatttttgttttaattgaatagataaatactaggggtgtgcataaatcgatccaatccaatgacagtcgaccgatccaatcacaatggaccgctaaacattggatattcaattgtgatcggataggattggatgttatttttgaatatccaattggatcggatcggatattggatggagtgtctaaaattccaatacatccaacatcaaattaaactaattagtattttcatttagtatggattagtaattagattttataatgttatacgtaaaatatatatgtatacataaaaattaacattaaaattttactctttttttcttagattggatggatccagtc

SEQ ID NO: 170586 - DNA, 535 bp, Cannabis sativa
tatatatatatatattatataagccacactatatagaataagtttacaaaaaaaattacttttagtgacaatctcactacaaaaaatgtcacttttactattgcagtttgttattgtactgacaaatgttacttttaccaacacatctcacgaattatactggtaaaaaagttatagttttaccagccacatttttactggaaaaagttatttgtaccagtacaactcatgtttgcgctggcataacaaatcatgtaaacaccattctcttggtatttttaccagcagaaaagtgtgtcagtaaaagtgacttttgtcatcacaatagtaaactgcgatggcaaaaattacttttaccaacacatcttacgaactacgctggtaaaatgtcataccatttgggattttagatttcatcgtgtaaaaccaggaccgaccctatgttttattatttaatataataatatgtagattaaaatgtggtaatatatgttattatgtgaataatatatattaagtgtttggtaaataaatt

SEQ ID NO: 170587 - DNA, 1249 bp, Cannabis sativa
  modified_base (472)..(473): a, c, t, g, unknown or other
ttttttttttttgaaaaaaaaagtctattacctttaatttttttttttactttaatttttatttagtgtgattttttatattatcttttagttattattttttttcattacagttttattggtctttttcttagtactcttagaatttaagtcctctaaaattataaaatacaaaaaaaaaaaaaaaaaattaagttctaaaaattctttcataaaatacttagtatttggtacaacggtgtaatattgtatatgacacaaaccaagattgttctgtctagaaagattggttcttaaataaggttcgtgtaagtgtaccctccaccttacctaggaacctcggttttgtctaggcaaggttgggacgaagcggtaccttgacaaccttttcaattggcctggaaacatttttgtgttaatcattgcaatattcatttttgtgctatttactataacaaaaacaatcttgttnnatcaaaaataagcaactcatttttgcttagaaaggtctttggtcggaaaagttaatgaacccttcacacttacttggaaatcccggggagttctagtaagttgtgaaggaccattctaaaaacctccaaagtaacctgggaacaagttgaacaaaaaaataaaaaaaaaaaatatttttttttaaaaaaaagcaaacaggagtggatgagtaactcttcttctgacaaaaccatttctagtgaaacttcatccaatccatccactactccttctcccattcacacgataatcgataattctttcgcaatgaataataataatgaaatacaacagagaacacttaatggttacctccaccccacccaaactttcataccaccatgttttatatttctacctaaatgccaagtctcggtgtcatacccggcattattcagcttttgtcaacttttcatggaatggagaatgaaaatccatatgtgcatattagggaatttgaggaagttgtttacactttctatgaccgagcaaccatcaatgatgctgcgcgcttaaagattttccccttctccttgaaggataaagctaaaagttggttgtattctttgagatctaggtctattggaacatgggatgaaatgaccaaaatatttttttattaaatatttccctgttcataagaccaatagtttgaaaagacaaatctcaacattttcccaaaaagacaatgaaacgttctatcaagtttgggagagatttaaagatctcttaagtc

SEQ ID NO: 170588 - DNA, 634 bp, Cannabis sativa
ggtatcctatttctgagttccagggatctcattttgatactttcaaggttcttgaacttgaggacgaggtctcctaccccatttttttttaccatgctagatttattggtcaaatcagatttggcatttgaggaatcgaaagtaccaccccatgttgattgtcaacttgggcgttgggcctagcattaggttaacctaggcggtgggccctatttccaagggctcgagtttgtggttttctccttgcgtttacttgaatcttcattacttctgatgacaaaaaaaatgcctagaataatttttggtgtacttgattagaaaaagtccaggttgacaatatgtcaacctgggtgatgggctcagtgccaagtgtcaacctgggcactgggtcccccttatggaccttcaaaagttttgtttgatccctaaaaatttttgaatcttaatgttttctaaaaaatagagaagatactcagaagagttctttgaaaacatcatcgaaattggcccatgacaaccctagaatatgtcaacctaatcccaggtgtcaacttgggcactaggccttgcttcttgtgacagtcagtagtcccgtgatccataaggggaaataccgggtaagctgtgcaatccc

SEQ ID NO: 170589 - DNA, 916 bp, Cannabis sativa
taggaatccttaatgatgggatgccggtgaaggacataaatgacactctcctttgcctcatcccgaaagttcctaaaccaactcgaatgacaaaatttagaccaataagcctatgcaatgtggtttataaaattgtagcaaagtgtctagctggccgaatgaaacaaagccttcaccaagcaatctcggaggaacaaagtgcctttattgggggaagactcatacaagataatgccatcattgggtttgaaagtctccattgcatgaaaaccaagtggtttgggaacgggaagaaaatggctctaaaattggatatgccaaggcatatgatcgagttgaatggaacttcttggttactatgatgagggggcttgggtatgaggagaaatggatcgaaaaaatcatgagatgtgtagagagtgtttccttctcagtccttattaatggtgaaaagattgggaagttccaacctactcggggtcttcgccaaggtgattcactttccccttacctttttctactttgctctgagggtctttcttgccttattcataatgccgaaagggttggggagataactggggtgcaatttgggaaggatagagttaaagtctcccaccttttcttcgccgacgatagttttgtgttccttaatgcaaaggacacggagtgtgacaccatgaagcttatcctccaacgatattcagcactttcaggccaacaaatcaaccttgacaaatctgaagtgtgtatgggaaagcgaatatcatccgttcagggtcagaattttgccaatagattgggagctcgtcttgtgactcatcatgccaagtatttggggctgcctagttttgtgggaagaaggaaaaaagaggtgtttgagatcataaaggataaagtctggaataaactcaaa

SEQ ID NO: 170590 - DNA, 642 bp, Cannabis sativa
atttgtgcttaggtacaacactgaaattttggactcctaatttgagtcccaaagaattaaaaaaaatagtccaaaataacttatttttaatctaattatcaaaaatgatttggctaagttcgtttttatttatttggatatatttaaatactcttatttatatctttctttctattgttttttttttcttacgtttttccttcttttacgttactctctctctctccttattctttttctctttcttatttctatctcttctttcaaattttaaaaataatttctaatcacgtcgtttactcagatgagcctaaaaaaaaatcattagaatctactgttcaatgtaaatatttcaaaatgtaggaaaatatattatttcactatttttagaaaagaaactatttaattactaatatagacattagttaatattttataacttttttttaattttaattaacattcattttagaattttgttattaaattatattatattataccataactaattagttttcaaaatgacaaaaagctatataaaataatcggtatataaaaatggtagcttattacatgacaactcattagtttcgaaaatattttttaaggttacctaaatatattttaaattataatcta

SEQ ID NO: 170591 - DNA, 536 bp, Cannabis sativa
tgtcaatataccgcttcaccgtcaaattccaacaatgtttggtatctatttactccttggtaatcaaggaaccggccgtgagtgttataatgctttgctaagtctcaccacgaagacctcttttgttgcttagacaccagggggacaagcaaggcctccctcacaaaatttgaagagacgaaagacacctgtagaagtgaagcccaggagaagatggagacaacacctaaagccacttaaagttgcacccaagatagggataacatcaacccctattttgtagaaattttctcaagagatggtctgactgaggaactcgaggaaactcccctcaacacgacaaacctaaccaaggttgtcaagaggggaacaaacctgatggaggctttgagccagatgcccatggcttacctcaagagaaatcaagacatttttgagtggtcgtatgaggacatgattgggatcgacccccaagtcatatgtcatgcccttagcataggcaaagaaaactacagacgtgtgtaacagaaacgtag

SEQ ID NO: 170592 - DNA, 528 bp, Cannabis sativa
accagaaagagaaccaccattaaagccggctacttcacctgagaagacgaccaaaatcaatcaaaatagagattgtttcaaattcataaaaaaaaagtttagaaaactactataaaactaaaattcaaccaaaaatccactttaatttgcataaagctaatctcttaacttcaatttttagatctgtgaaaggcggatctcaaaacattgaactggagttcccaaacaatccaactcgagtataatccaaaaaaaattacatcaatactatagtaaaatgtttatctaggtgtatttttgttgttttctaaatttctaatgatgaattttttcatattaaatcataaagagatatgtagatagagttacgtacgtagatatactattctgatttttaatgtttcacaatagttgcattacagttgcataaatattttgctaacagctatatcatctgatgcaaccttcggccaaccaccaagaacctttcgtctgattgaaaccttcatttgatgcaactttcggcca

SEQ ID NO: 170593 - DNA, 511 bp, Cannabis sativa
attataataagtttgatcctatcaaacttaattttatagttctatttatgggtgtggattcataatgtttaccttttagaagcgaattggtggaattactaaaaaaaattaaaaaatcaaatagatttgaatcaatttctctcaattaaatattacattatctcaaggtattttttttttttgtcaaagcatcattttatttttttggcttgctacgctctttgggcaacttcagactaaagactggttcttgaagtataaaatttgtcttgataaaaattgtatgatgtgtggttctgctaatgaatcaatatctcatttgttccttaattattatctaactaattggtgcatttgtgagatcgagaaaaatacattatactataggattgccttattagcattactaagaaattcagcaagttaatgtttgcttgaaattatggtaaacatgtctttttaggtaaatttagtgacttaaataaggtaattcaaaatgtatttatcatta

SEQ ID NO: 170594 - DNA, 589 bp, Cannabis sativa
aatttttatagcttaagttatataaccaaatatttaattacattaatatcacacatcacactgagaaaagtaagaagatcctatacataccttttcatttctttaaaaatatatgtaataattcatgatgtagatagatcccttaacctcatctaatccattggtattataatatattttaaaaatattaattaattagttgtacatatatggacatattcaattattatttagaaaaataataataataaatggtattattttggtagtgttaagtggtaaccatcaatatgagttgcctgaaatgaaccaacaaaacacggtttttcctatttttttttgttttctatatctctttagtatgattattatttttttaaatttattaagttttagataattcattaaaataaaaggtaagaacaaccatcaacttcttattataatcttttagtcaatctccgtacttaaaaaattgaaatattttttttttcttcagttttttataataatcttcgttatatttacaatatcattcttataaatttttgaaaatttttaaatagtttacagtgccaaaaataaattt

SEQ ID NO: 170595 - DNA, 533 bp, Cannabis sativa
cagttttgtaatgaagacgaacaataccctctcctccacacaacaaagatattatttttcttataatatgaatgatttcaaaggcaataaaagagatattaaacctagctagctactaaaatgtgtctttataattaatgtacacattttagacaactcatacacggtttgaataagatcataactcacaaaaaattgatatacttacaaaattgtgagcagtaagtgcaaattttcttttatagaaaaagaaagccttatttcgatttttttgcacaagatttgatcaagtcaaataattaaaatgaatattatatcagaatataggaatataggggcgttcattaaaccgctcaaactgctctaaccgcctgcactaccaaaaatatgtggtttgaaatttttgcagtcgcggtttgaattttttctaaattacgcgatgcggtgcggtttgcagttttaaattgttaatctacggttcaaaccgcaccgcacattataaaaataccaaattttatatttatttaggtcca

SEQ ID NO: 170596 - DNA, 919 bp, Cannabis sativa
atatatatatatattttatttgtaattttaaggtctaaaatttttaattacaaaactacgcttgtaaaattttaaaattacaaaaatatacttttctcaaaaaatgtaaaaaaaaataactaaaaaataacgaaaaatcaacctcacgataactataaataaattataaaacaaaaaaataaataaataaataaactcatgacaactatataaaaaaacggtttattatttttactgaaaaatttatttttgtaaagaaattaaaaagttcaaaaggtaaaaataaaaaattttccgtgttgatgtattttgtaattttttttcttcaaatttttggtttattatgtaaatttttatctaatataccacccaattaaaaatagggtatttatattttgagtaatttgtagcataaatatctaaatttaacttccaattgcaaataatacctaataagtttaatttttgggaaaaaaataggaaaattccaaaaagggtaaaatattacaatattactatgggccggcccaatcaacatttatacagcccatattaaaaagattacaaaaataccacctggtctataccttaagctgcacgtcacgaacgaagacgatgaagaaacctccatcgatccaatctgctacgcaacgagaatgaaaccagaacgagtgtagaacaaccataaatttcggcgaaatttgattggaaaagaagaactccaatgatctaaacagaaaattatgaaaaaaaatcagaaaaaccgtgaagaaactgaaattaaacatttgattttggttttaatcgttcaaaatcactcaatccagcctcgaaaatctagattcaaccaatgtaaatctgtattaaacagatctggagctccccctcgaatccaaaaaaaatgtatgatatgaaaatt

SEQ ID NO: 170597 - DNA, 815 bp, Cannabis sativa
  modified_base (686)..(688): a, c, t, g, unknown or other
ataaatattcataataatcattgggtcattgggcctagataatagtatttcaaatgggctgatcacaatatattttgggaacttacaaaaatactgtaacataaagttttgtacatttttactgtactaactttattaaaagattgtctttaaaattttaaaattataaaaatactgtgttttagtaacattaaaaaataacttaaaaacaactctacaacaacttaataaacaacaaaaatataactacaaagtaacagaaacaaaacattgacctaattgtaagcaaaataatatcaactcctcaataagtttttgtattacgaattttttttttacttgattttgacaacatgatttatctttttgtactattatattttttcttcataaaatttgttgttacaactttattcttttaattttttttcttttcctttttgagttagtgatatatagttataaaacaactataaactcaaaatatatatatatatatatatatatataaaaataacaaaataaatacacatacatataacaaaaatatcgtctgaaataatttaaaaatatacacaataaaaaatgcacatatataagagaaaaaaaaaataaaaaacaaaaatattagagagggggaagaaaagaaaaacactacaaaattttttacttttagtcacaataannnttgtgactaaagataaaaaagttggggctaattataaattctcattattatgttgtgactgaaaggtccgtggctaaaagtattagtcacaaaatttacgatctgttgtgactaaatgtatttttag

SEQ ID NO: 170598 - DNA, 525 bp, Cannabis sativa
aagtaaggaagttggcatcaacctgcgactatttccagattagccagtttccctgagaagcaaatatgcatgccgacactctggcaggactaagatcttcctccccctccagttaaccagggcgatactatttgactttatcctagagcctagtatcacattggaagaagaagcccagtgcgcagagatagtagcagacccattacaagactgaagatggccaatcatcgaatacctaaaggacgataagctactgccggacccgaaagaagctaaaagatagcatcatgagcctcaaggtacacactgctaatatgttttaatagaaatattttaatattgttatacaagtattatattagtggaattgaagaaatttataaataaacaattattttcttcacaaattaataatggttagtattgtattaatatttggtatcccaaattttgcaatttgacgtggcatcacaagaatggtgacacgtggagtccgcttggagcatctgctcgggaagataggcc

SEQ ID NO: 170599 - DNA, 1478 bp, Cannabis sativa
  modified_base (585)..(594): a, c, t, g, unknown or other
  modified_base (658)..(658): a, c, t, g, unknown or other
tttttttttttgttattaaaaaaaataaatttgtttaaaaaaaaacacataatttttaaaaatgaattaaaaatatattcgaatgtatcataaaaatcatattatgttcataaaaatgtgttaggaggtgcaatttacaatatttggctaaactaaaatttatgtataaataagaaaaagtgtatgaattgtatatatagtagtattaaagagagcttcaaaagtggacttaatcttttacaaaaaaaaaaaagttgtctagcataaataaaattgagttgtaagtttctcttttaaaggaaatctccttgtggatgtaattgactcgttttgttttgaaacattaattgactcggtttgattaatagaaattatctttcttgataaaaaaattaacaaagtaaattaatttaaaaaataattatggtaaaattatctatctaaataaattagatagcgaaagtacttaagtaatcaattttgtcataattaattattaatataaaaaaattgataacaaaattcgtatgtaagattattttttgaaaaaaaatacctatataaaaaataatttaaattaatttnnnnnnnnnnaataataataataatttaaagtaaaaattaataaatttttaaattattaatattattttatttnttaaaaaataaatatataattaaatattattataatatgtaaagttttaattgtatacatgcagtttatcgtaagagtatataccttatatcttaatgaccacatgatctaagattaatgatcaaaaaaacttccctaccggtagggaacttatgctaagttctactatagttttgccctatatatatatggaataggtttcaatgattacattaaatatgtaaccatgatggtcacatttatttttagccatttgattaatattgaagggttgtgattaaattttaaattaaattgaaaataacttgtaacctatagtaacctaatactttatttccttaaaaagttttaattaagattaattttattttaacattaattataattattaattatttttttgcaatttattactaaataaggttcttttagcatttttttttgctcttaaattattttaatatttgtagcaaacatccatataatttgaaattgtaacacataatcttataatttgaaataatttcacatataaccttataatttgaaattattacacttataaccttaatttaaaataattacacctaaatgtttaatttttatttaataatttatttaaaaatttaaaaattatatacaaacaagtttaaaatttaacaaaaataataataaaaaaaactattataaaattaatagagaatgttcaggtgtattgtatcttcccattttttataagttgacatgtttatattttattttactttttaatttataactttattaattttagctagtagcttgtaaagcccgcttagtt

SEQ ID NO: 170600 - DNA, 589 bp, Cannabis sativa
atattaatatttatgcttcaaaaaacgtttaaaaaataatagtgaaaaaagtagtaattttgtcatacgccatattattatatatatataaaaaaaaaaaaataaggtcaactgatttaataaaaaatgggtcgacacacataataaaaacgagctaatttataaaaggacggacccgagacaaataattcgaactcatgaattgttatggcctaattcttaaaatatgggtcaggcccgaaatgaaccatattgttatacttgtcgtgtcagacttttatgagacccaacctgtatttataaaaataatatattttaataaattttaaacaagaaaataaaataaataaaaacttacttaaaaatttaaacttgactattattattttttatttataaaaaaaggtgtataccacaaaaccgagtttaagagtgtaccacaaaacttccaatattatatgctgaatctttaaaaaaaaaataaataaatattatagggtgtttctgcaatgcaccccaaaaaaaaagtgcactgaagcatcctttactgttttggcatataaaaaagtttttttaatctatttttttt

SEQ ID NO: 170601 - DNA, 588 bp, Cannabis sativa
actgataccatatgaggaacagagattattcagagagaaagagggaagaagagaaaaagctttgtttttattgattatgctctgttttaactcattacataagactggtttatatagtagtagggaacctagctgcacccgtttaggaaaagcaagaagccttaggaattagttataacagtttttaactaacttaaataaactctaactaacaatcaccctaatcttgataatgtttgctggacttagaaacgatagggaaaacactcatgacaatgataaactcaagaaaaaggtaaggacttagaggtaaggaagtattgaatgctttgtatgcttctagtctatataatgatagtaggattgtataaatggactaatacggtcagatttataatgcataatagtatttggtgtgtttgttgtgtactcacttagcaagtactccataaatgtgttctttggaacaaccgctatacagtcgttgtcatggattagtgaagtttattatttattactcttgtagaagctctaagattgatgacatacatagttgatgtgtaatatccagattaaaatagtatttaa

SEQ ID NO: 170602 - DNA, 540 bp, Cannabis sativa
ttatgtaaatttaaattcaatgcagttgttttcaatagtaatataactatatatttaattttagtttgtgaaataaagttatgaatttaattttaaaagataattataaatttttcattgtcattgtcagagcatataatcatataatattgagtaaatactattttatattttgcatatttattttgttaaatgacaactcacttatactttttaaattagagcaaaatagatcttaagcttaatttttgtcaaattaagacatataataatctgacttaaaaggtattacaatgagacatttaactatagttttttgcatctatttgtacttaaaactcaccgcatattgatttaataaataaatcgacgcaaaattaaatttatgatctattttgtataattttaaaaaatacaaggactcccatcaataatttttatatataaaatacaaaatatatatctattctatataaagtgtgcctatataaccgaattcttgatttatgagaaattcgtgggtgactttttatttatatt

SEQ ID NO: 170603 - DNA, 1299 bp, Cannabis sativa
gtaaggtttagattttaaatttttaagtatcaacggaaacatataagattagtctaatgaaattggacgaaattatcgttttataaatattaattattttatccactaaaaaaattgagtcaatactaatactgattacaaatttacaactttaactttagctacctaaactacaaatattcttaaatataatagaaattgaattatgtataacctaaaattaaatagctaaaaattctaaaaccattctccatcggagcatctcaatggtaaaaaaaaagaaagatgcttgcttaggtggataaatgatgtggcaaaatgttaagatgttataccattggagtggaaagaatgtcattctaagaatttgtggggatgctatacagtagcatcaatgctatcataattttttaataaaaatttaaaactaaaaatttgttgttgctaaaaataaggaaacatatacaattttttaatgtgtgagatcttaattatagtatttttgaagagtgcgataccatttgagtgtttttaaaagtaagagtataaaaataagagaaaattacgctgtgggacactttttgtaattaaatactgtatataccgaatatatttttatttggtaaaaagtaacgatttttttttatacgtgtacacagttattattttttagagtgggttgagtgttaaacacgattccacgttgtaattttctctgtcaagccatcactcactcaatcacttccatttctctttttcgtttcttcttccattttcttattttccctcatttcagcaaagtattaggtttttctctgctagggtttctcatttcgtttgagtgttaaaccgtttatggtgcgtactaagagttcaatgtcttcatcaccggaggtatctggttcgaagaagaaggtggaaaaagcagaggaagttgcgaaaaaaacggttggatctggttcgaaggttgttgagtctgataaggagaagaaaaataagaatgtgtctatttcgaagaggagtggtgtttctgaggcttcctctgacgatcggcgctctaagaagttaaagagtgttgttgaagatgacgatgattttgattcaaaatgtgatgaagcccctattgtattgccaaaaaaattgaaggttagtatattggttgtttatactgaatcgtgtattttttaatgtgattcttgttaatgtggatgcacatttatatgttagttgtttttttgtatacagagttgtttggtatactaagttgttcacattttgtttgtgttttgtttagagatc

SEQ ID NO: 170604 - DNA, 648 bp, Cannabis sativa
aaaaaaaaaaaaaaagaaaagtcatatcaaataatagagagaaacgctatggggtgtcaatgaggtaggatattattagtgcaaattaatatcgaatccttgatttaattaataatataaaaaattattaaccactcataacgcactacattgatatatgactcataacgcactacattgatatatgatgttgcgcatcataagagcatctccaatgagagttacccatgaaattgtttttaccacatatggaatgtaatcatcatgttttaatgtaattttatcaacactattgtctatatttgacaccagtcatgtgacattactttatctttttctttttttttttatcaaaaaaattactttatgatattattttatagtatttaataaaatttaatcatttaaatagtgtcatgtgtaaccatggtgggcaacttttagagttgtcaaccattagaataatttttatatgaaaagttgtcaaatcatgagagagaaaataaaaattaatattttaagatgatgtgtacacttttaacaactaaatgtcgtcttctattagagatgctctaagagcatctccaatggtagcattctttgaagatgctctatatctccacatcatccaaaatataatattttatt

SEQ ID NO: 170605 - DNA, 579 bp, Cannabis sativa
accaggagagagaagatattttctccaatatctatgatatttccgtaagttgaagtggtattaataattaattaatgtgataattttctgttaacgtatttgttttgtattttttaatgaatatgtgatattataaaaaatgtataaaataaaatgcttgattagaataatatattaaacatacataataaataaatacatttttataatttatatatatacattaatgttcataattttaatattatatttctatagaaaataaattaaattatatttattcaaaataaaatgaataataaacatttattttttaataaaaaattatttgtttataaatattaaaactgtttaatatttatttatttaatttaataaaattgtttattttgtgtttttataaatattttttattattaaaatttttaaaatcattgttaaaataagcataaatcattcttattatgatgtcacaaatgaatcataataatatataatacacattttattgtttttttctaactataaataaacacccttttaaaatttatatacattaatatttataattttgatatt

SEQ ID NO: 170606 - DNA, 737 bp, Cannabis sativa
actcatatatatatatataaatacgcatattttcaattccatgtaaaaattaaaggtcttgttaacttacatttggatttagatttcccttcaacctccttcaaaaaagaaagaaagaaaaaaaaaaaagaacgcccagatcaaaaaattatcaaagcaacaacaattcaaagcaaaacccataaataaagaatccatttttataaaccaaacctatttttcgcgctcccgagctttttccaagtactcttcgcgatcaaatttctttctaaaagtgtttttaactcttccaacaccagttacaccaccctacagtgtcacaccataaaaaatcattaacaagaagaacacaatcataatcaataaaattacatacatgatttaaagatttttaatcaaactacaataaagaacgagaggaacagaaagagtgaaaatttctacttcgttcatatattgtgaaacaaaagcaattaaagtgaagagaatttgaaatttttattgttgttggcttgagccatggcgagacctaaaaattctgtgttgagtgtctatctaaactctcgaatgtaatgcagaattttcagttaattttctctaaagaatagaaacataccaccgtcgaatcgtgtgaaggaactcacaggaggttttgagggaaggaactcagaaaccagctctacgaaggaactcacgggagaagagagaccacagaccaccgtcgaatcgtctgaaga

SEQ ID NO: 170607 - DNA, 2833 bp, Cannabis sativa
  modified_base (435)..(437): a, c, t, g, unknown or other
  modified_base (1319)..(1322): a, c, t, g, unknown or other
  modified_base (2052)..(2058): a, c, t, g, unknown or other
cacacttgccatttcttgttcagcatgggaaccagtacaggatttgcaacacaagctgggtagaaagcttcaattatgaaatcattgttgtgtagctattctacttcttcttttagggctagtgctcgctctttgtccagtagccttcgcttttgtttaactggcggaaagttgggatcaatatttaggacgtgtgaaatgatagaaggatcaattccgaccatatccacatgtgaccaggcaaaaacttctaggtttgctctcaaaaattttattaatgctgattttacttcaagcaacataacttttctgatctttagctttctacccgggatatctggatcgatctcgatctcttctaattcttccataggtccaacattggtccttgggtccccaagttgaggaaccacatcttcatccccgccttggaannntccctacttggaaatgtttttttcccttgcatgtgtttcctctcagacaccctaccccattctttgttggaaacttcaggcacaagtggaatatcgatgtgacagcttttaagtcatacaaagctggatagcctatcattacgttaaaggctgaaggaacatctaatatcaggaattatgccatgatagtcatgctcgccgaagcttgcccaacaatgaggggtaagcgaatttgtcctagaggtgcgactccttggtcgaagaaaccatagacaggcaagagacatgggattagatccttgagctagagtcccatcttttcatagacagtcttcaacaagatattggaagaggctccattatcaatcatggttctggccaccatcttgttagctatctggacctctacaaccaacaggtcgttgagcaaaaacctaatttatacggcatcgtcgtcgttgaaggttatggtaggccctcctgcccgtgggattttaggctttcgttcttctacggccaggattacttcttctttcttgtgctgtgctattcgggcatacctctctcgagctttgcctaaatctccagctatgtgcgggcctccaatgatgacttgcaaatgtccgtctactggtggaggtagcaagtcttggttattgtcgttcctctgactctgatcagccttgacatacttctataaatgcacgttatttttccttatcaggaattaaatttcccactttagattgttgcattcattggtgtcatggctgtaatctccatgaaatcgacagaacttggtcatgtctctcttgctgacatccttcttcatgggcccaggtttcttgtacggggctagcgactgagtggccatgtaaacannnnctatatcctcagtcaagattgtaaatgcagtgtactttgcttgattctcttaaggagcttgctcaattttgctggtgaactttcccttcttcccattcccttgcctgttgttgttgttggaacgtttaccatttgagctcgaattatttgggtaatgggggagttgggcggacattcctgtggaagtaacttttgacttggcaggcttttgctcaccctccacttgctgaatagcctcttcaagtttgatgaagccttcagcacggtcgagaaaatcactcattgagtctactgggtcgttcttcctaatgtccttccaaagttcaccgaggacttcaatggcccccagtgtcgcggacaactttccatcttctgttagcggtgagaccttggtcgcttccgtcatgaatatgctgatgtatgctcggagaggctcgcctggtctttgcttgacttcgaccaagtctcgtagatgcaacgaaagttggcaagaggaggagaattgtgcattgaatttcgaggagaaagctttccacgagttgaactttccaggagctagcttgaaataccattgctgggcggcttccgagagggtagcaggaaaaattcggcaacacacatcccctcgtgtccgttgcagatccatttgcatctcgaaatacttgaggtgggatagaggatcttctcttccagtgtacattttccacgttggcattttaaacttgtgggnnnnnnncaggagattgatctcgggagagataggggttccacgtactcggtccaattcgagatcattgtttctctattcggccatgccttggaacatactctttagttcgtctagctgcgcttgcacatctagactaacctgcttaggattctggtcgatttgagtcatgtcagtatctttctgagtgggaatttgagcacgggtttcgggctgtacgatcgtcgtgccaagctgatcatctactcctctccttctattcagaagcacctggctgtctcattgattgattggcttggtttacaggtggaatggcaccgttagcctggttggaactatcaggtatgacttctcctgatgaattactagacaaggtctgcccacctactacttggccctaaggcgaaacctgtgaccggagatttggcagctgaccatttatagtctgggaagtatagtctgggatgacatgcagaggttgttgccagacaatttggtaggctttttgtatcagcacagtagctttccgactacgattgtcaatctcagcatggtgagcccttaacgcttccatctctttgtctctcaactcggcaaacatgcgcctctgctcttcgaacacgagatttaccgcagcgcgaagtacctcctgatcatgatgtacggtgttggtatgaccctgcatgagtccaagagcaacatagagatttcggatctcactatcatctccaacggacgttcgagcgttggtagcaggcgaaacgactgtgttatgaatgccctg

SEQ ID NO: 170608 - DNA, 599 bp, Cannabis sativa
tatggcgtaacttcctacgccatacatggcgtcagttttttgttaggaaccgacaccatatatacccttatggcatcgatttatagctaataaccgatgccataggggtataaatggtgtcggttgtttataactctacaactcgccttgatcagcgtcggtagtgaatttcgccaaaaccgacactaaaagggctaaaagaccacctctaaagggggtttttgtagtagtgagttgttttattggcctggttttgttggattaaaattctattgtgggcacatatatataatgtatatgctattataaagtgtgatacaaaattaagtgaccaattatgttatgggtatcaaaaaggtattaaattgtcatggaaataatgtgtagataccataagttaatttataatttgttgaggagccaaattgtaaataccaaaatgtcattctaagatgactataaataggtagtggtccccaagaaacactggtttatgtattctctccttctctatcaaagaaagtattttagaaaatagtgtattcttggaagattaaaaccttctctacaatctacaacaatggcttcaggttagtgct

SEQ ID NO: 170609 - DNA, 673 bp, Cannabis sativa
tataacctctttaaacctacaactcaatataaatatataaaaataaatttgtctgatacaagctctctatcaccatatctatctaatattactaatattattaatcttttatctaatattttcaccttccttctctacatattctagcattgtataatgaatttgctattgatttatttttgttctttctattggatagctattctccatgcaactatagtactttcttttttctctatatatttttctgttgttattttcttaaaaaaaaaatcatgaaataatagattcttttcattttttttttatttctcattgatattatgctataaatgaaatagttgtctctattatttttttttatttaccacagtgatttttgctataaatgaaatagttaaggttatgggttaattatgaaatattttttagtagaggaaaaagaaattgaaaagtttttgatgataattgataaaaaatgatgacaaaaagtatttggatgattcacttgcactctatccatacaattattaataatgtaaacaatattctattagtttaatttaataaaacaaactgctatagtcatactttatttagttactgaaatctaaaaaagcaaaaaaaaaacatcaaaaccttaaataaaactaataagggtaaatactatttt

SEQ ID NO: 170610 - DNA, 752 bp, Cannabis sativa
ttaataaaattgcatgatttattgtttttttaaaaaaatctaattgcctaaatacacttgaccaggccaacatttccctcaagctagatagtatatattaaataatccaagcttgtcaatcatattttcaaacatagatttgaacaaaactttttaaaatatcagttgtttgattagcaaaaggtacataagatatcaacactaacatattttccatctgcctccttccctctctaatgtcgactcacacgggaaatgtcgtgattaggttgcagactattatttcaacggattactattaataaaattgcatgatttatttttttaaaaaaaaaaatctaattgcctaaatacacttgaccaagccaacacttttctcaagctaaatagtatatattaagcaatccaagcttgtcaatcttattttcaaacatagatttgaacaagacttttgtcaaaatatcggttgtttgatgagcaaaaggtacataagatatcaacactaacatattttccatctgtctccttccctttctaatgtcgactcacatttccaggcacgtctccccctcaccctgcctcatttttttttctctcgtcgaccctagccatattagaagcatcttcactctatcatctcttctatcgattttcctaatcccttctattgtctcttccacttcaaattagggtcaagaatgcgcgaacacgcacacacatgatcaatcatcgtcatataaaataaaaataaa

SEQ ID NO: 170611 - DNA, 775 bp, Cannabis sativa
ttttgaatacttgaaattcacaaataaagcattactaataagattagtaatattattattaaaattatatattattaatcaattaatttaaatgaattataataataataataaacccaagaatatattactaatcttcacaaactcaagaaaatatatttagtgctaaaactaagactaaatggtttagggtttgaatatatatatagatataaaaaaaaaaatatccctagagtttctatataaaatcgtttttaccgtaaataaatacaaaattgtttttaatatataatatgaggattaggaaagttgatctctaaggcatttatttctaaattaatttattattaaaatagaagaaaatatctttaaaaaataatttatcatattttccttttgtatatatattttgtatttctatgcctttataataaataaagatattttgagtgtttgatacacgaaattttctctaaattaaccaactatcagtaatcaaaattacacctaatattgttttcaaaaaattacacctaatattcagttttttttctttaaaaaaagaaagagaaaattttcttcttcttctttttttatttattttttatttttttacaaaaatgcaccacaatttgagagtttatgagtatgtgtgtcgagtagcttcagttaatctttctacaaatgcattatatatatatatatttatatataacatgtatataaatatttaatctattaaagatgaaaaagtaaaaattatcactttggttat

SEQ ID NO: 170612 - DNA, 902 bp, Cannabis sativa
cctgtcaactatgacccacacagaatcgtactgtctagtagtcctaggtaatcccactacggagtccatggaaatgtcttcccatttccattctgaaaggttcaatggttgcagcaaacctgcaagcctttggtgtttagctttcacttgctgacaggttaaacactttgtaacatactctgctatatcgttcttcattctaggccactagtgcatggacttaaggtcttgatacatttttattgtccctagatgaacagaataaggagttgtgtaagaattatttagaatttctctcttaatatcatcatccatatgaacgcaaacacgattcataaactgtaacaccccattattatccactgtaaagtcactggtcttcccagctgaaatcttatctcgagacttcactaaatcttggtcttgatattgcacttctttaattctttccaggagagtagactgcaaagtaatgttagctaaccgtctcacaataaacttaatgttagctcgggtcatttcatctgccaattacttggaaatctgtttcattgtattcatctggttttgactacttagggcatcagctacaacattggccttcctaggatgataaaggattttacagtcataatcctttaccagctcaagttaacacctttgtctcatgtttaggtctttctggttgaaagtattttagacttttatgattcgtgtaaatctcacatttctcaccatataagtaatgccgtcaaatctttggtgcaaatactactgctgcaaactctagatcgtgaatagggtacctctgtttgtactcttttaattgtcgagaagcataagttattagctttccagtttgcgtaagtacacaacctagaccttgtcttgaggcatcacaa

SEQ ID NO: 170613 - DNA, 671 bp, Cannabis sativa
  modified_base (615)..(623): a, c, t, g, unknown or other
gggggggggggggtttctaggaaatgaatggaacaataacttcatgaaatttccactttaaacattcttctattaagttttttttaggagatatgtctaaatcctaattatatcgttgacgagttctaacctgtaataattttgcaccgtctttgggaacgacaatctctagctacattggttcttaaatcattcaccatcactttaaaaatgtcaagatattctcatattctccaagaaaataggggtcactcagatgaaaaccaaccgaccacaatatttagaggacaccaacctcctgtaaccggagagggccaaaggaagaacaaccaaagtgtaggctatcaagaaaacgttcgaagagagccacccagcactgtgtgactcgataacgacattgatggctaaccccatcaacaaaagcattcaactaccaagaaagccatctctggtgcagagccttctgtcatctacattattaaactgttaggattttatgccctaaataaaatctattttaatgtaatcaaatttactaattaatgaaagataaaatattattttctgttgcatggttcacatgatttctttcatgattatatgtttaatgtatannnnnnnnnaaatccagaacatatagttattcttgattatattgttgtcaacacagt

SEQ ID NO: 170614 - DNA, 758 bp, Cannabis sativa
caaagtaatgggaaaaaacaaggttttagttaaggtttattgttatctgaaactataaaaggatattgggtctaatgtatattattttgtaaatcacagatctaataattttgttcaattttttttattatttttttgcttcagtttataatcgaagtaaaaatctaattagcgtcggtgcactactatttccttcagttatgaaccgaagcaaaaatttttttttttgtttcggttcataaccgaagcaaaaaaaacatttggcgtcggttctaaactgaagcaaaaaatatgactttttgcgtctgtggttattacgtcggttactctaaccgacacaaatagtttatgtgtcactttaaaactgaagcaaaacgtcacttttgtagtagtgaaatcaaagaagagctcgaggccggcagtctccaaagcatcaaccttctccctcaagcggtttgcctcgaccgtctgagcatccttcaaccaaagaaggacctgctgcagagaagtcctctcatcttgaagacgaccaacctcagcagataaggactcgatggtttcctcaaagtgatcagcagcctcgaggtcctttgtcagcacggtgaccttcttctcagcggcaaaaagcttcttgttggcctcatccaactcatggtgagcagctgcagtctccgccctggcctcctcagcttccttcttggccaagtccgcctccgccctcaaggtttcgaacagagccgtactcttggaagtagcag

SEQ ID NO: 170615 - DNA, 606 bp, Cannabis sativa
tatgcaccgtcaagggcaagcagtaacattgcccgttgatcctgaaattgagaagacttgtaggagaaacaaaaagaacaaaaggcaagagagagtttcagcacttgctgaaacaccagtaatcatggctgataacgctaatgttgcgaataatggaggaaacaacagtaataatggaggtgccgttgaagatcaagctaatggtagcagcttgagagattatatcctcccgactcttacgggggttcagccatgcatcaggcaaccagcagtggatgctaataactttgaaattaagcctgtcatacttcaaatggtgcaatcttcagtccagtttggtggactcccttccgaagaccccaatctgcacttgtcaaactttatggagttgtgtgagactttaaagtcaatggtgttagtgatgatgccatccgtttgagactgtttccattctcgctgagaaaatgagccaagagttagttgatctctttgccaccaattctatagccacatggactgacttggcaacaaaatttctatctaagttctttcctccagcaaagtctgctaagctgcgaggaaaaatcaacaatttttgtcagctgg

SEQ ID NO: 170616 - DNA, 821 bp, Cannabis sativa
tattatcagccttgacaatccactttgttttcccaattgtacgctttctgcaatcatctgctatatgccccagccccgaacaatgagtgcaaatggaaggtttccattcgtacttcacgcctatagatgaattccacccatgttcatcttcaaattccagcatctcggggagcttttgattcatactcacttcgattagaattctaggataactcaaccgttccctctctttggtgattgcatctaccataatcggtttccccatttgtccaacaatcttaaacaacgatttctctccccagtattttagctctaatccttccaattgaatccaaattggaactctagacacatcttctttactgaaattctcattaggattccatggtttcatgataaccggtctcctattgaagaaaatgaaccctccattaagcacttgatcccttgcttccacattactaaatcggatgatgtaaatgccaaatgataagagcttcaccctatccagtttatcaccccacatcctttttgcaaagccttccattatctgcaatggtgggtttgctcccaaaacatagcaaacaatggatggcttccaaaacaatacctcatcctcaatatcctctaaggttattttcaccttaggtttcagatcatcacccttaaatggaattttctaagttacgcacaacagatccagagtgcagaacagggggtataggggttttaccttgacgtatgtcactgttacattgctcattccttttgagaaaaaacccaaaatcctttctgatatcgtcctgcctctgaatcgtctt

SEQ ID NO: 170617 - DNA, 836 bp, Cannabis sativa
gtgtcaactatcagcgatgcatataggaaaacttcctggacattcaagccttttttgtttagatcccataagaattttacccaatcccacacacgaataccagtgtcacaaatagggtaaataccccaaggagaggatcgccaaaggtgaaaagcgaagttacaagataggaaaaggtgctccatagtttctgcttccgtaccacacagggggcacctctcatcttcgatagggaatctcctacctagaaccgagcggatcggaagggctttggatagaatacaccaccaaagaaccatgagcctctcagggattttacaattccacagtttgttccacatggaaggggccacctcacttggattcactctatcctcagccagggctcgataggctgatttacaggagaaacgaccattattttccaaggtccagagctagctgtctttgcccgtgccggtaggatttcctcctttgaggatggcagagacagtattacgatcgaagaaactattaagcttttggatgctccatccgccattaggctgaaataactcaacaacctttgactccctattcagaaccggcccagccggcgtgggagtaaaaccttttaggtgagcgatccaaggatcagaccagatgttcgtctcctgaccattagccacacgcttacaagcaccttttcgaataatagatctggacttagtcacatttttccaaaactacgaatcagaaggcttcggttcacactctaggaaggacttacccttcaggtatttggcttcgaggatacgacagcataaagattggttacctgaaaggaggttccatcc

SEQ ID NO: 170618 - DNA, 514 bp, Cannabis sativa
aagattacaaaaattattaatacatattttgcataaaccatgtaaaattattcaaaattacatttttttttaagaattaagtacacaggatatacacataacattaacaattactttggaactggatatatgggaggactcaatacttcaattttgcttatttaaaaatttttacataaagtccttgaaaactaagtgtataactagatatacgtacattgtacgtaactttatgctagtaataatatatatatatatataatggttatacacaatagatcgatttatgtataggcactatttaatttgtacaataatttacacttttatattatagtacttttatatatgtatgcaacaataatttacatttaatataaacatattatttgtttatcaaataaaaatactaattaattaaatattataataatgatcgtaattaatactattatttgactcttaaatatttgattatttaagggcatttgctaatatttttatttttttttta

SEQ ID NO: 170619 - DNA, 691 bp, Cannabis sativa
ctttataaatatgaatagaatatatattttatatattatgttttgaaatatatttgcattgtatgtattaaattttttaaattgctacttttacaataaaatattagttgtatatataattttttaaaatatatctaaatatgtgtgaattgaattggatcggttacttttacatgttaatcaacatccaatctgcatagatttcatattttagatccaatctaatttgcaaaagtgtagactggatcagttattttgaattggttactttttaatattaaattatttaatatttctaaaaaaatagatatatatatatttacctaactgataataaaatacaacaaattattgttgttttatgtatctaacaacaaattaaaataaataaaatagaaaataacaaattcaaagcaagaagaaaaaattgtatgtataaagaaaagtttaactttgttttaaattatattttctttataaatatgaatagaatatacattttatatattatgtttttaaatatatttgtatcgtatgtattaaattttttaaatttctattttttacaataaaatattagttgtatatataatttttcaaatatatccaaatatgtgtgaattgaattagatcggttacttttacatgtcaatcaacatccaatctgtacaagagcgaattttagattttc

SEQ ID NO: 170620 - DNA, 648 bp, Cannabis sativa
taagcatgtgcatcctggtctattcattaattttttaaaaatacatattctattcattccaaagatattttttttatcttatatataattcttttcaattagctatcaaaagttaaaaattaagagaaaaaaattatgaattttaagtagaaggttaatgttagcttaaagttgtaagaggataaataataattttaataaaatagtttaaattttttggtgtttaatattgtaaattatataatcgtaatataataatatttgaaaatattattagttttttattgtatttttttaagggcccaaattttaagattagaacagggcctcaaaaatccttatgacacaatacaattcttttttattaaaatttacatttttttattgggaaattatgttaaaagcacagtaaagttaattaatacacaacaaaatagagttagacattttttttttgaatgaaatatcaacttcattaaatcaagagtattcagaaaacaagatatccctcaaattgggccaaatatcttgttctaaaatgcaaccactagagataaatcgagactgccttgcaatagcatgagcaactcgatttgctgatcgtttaacaaatcgtatcttaacattattaaaagacaataacaacaa

SEQ ID NO: 170621 - DNA, 658 bp, Cannabis sativa
gaaaactcatttctctttctctctttgctcaaccaccatcaaaatcagaaagaaatcagcaatcctcatccctttttctggtatttttcaagaaatcaagaggagaatcaagtagaggtaagccctagcactttaatccttttgttgttcaagcttaaggttagttcttgtgtgcaattttgtgaaactgtggctgttggggtttgtatgaactttagtttgatttctaagttcattttgagttaggtttgagttctagctgctggtttagggttttggtgtggtggatgcacaagtttgagtttgaaaactcaagcttggtccatcaatggcatgttttaattctgtgtgcatttttgggttctatttcttggattatgttggttgatgttattataggtgttctttaaagtttggtgagttttggacatattttgagtaggttttggattgtttggggaaacctagtgcaaaccgattaactagtttgccaggtcctgtaaaactggtaagccggtttcgggataggtttcccaaaaaatccatttcttcgattcgtgtccatttcagagccttggttgggtgattccttgttgcttagggtagtgtagctttagttatcaatagcaaaaccttaagttggaggtttgggtttccc

SEQ ID NO: 170622 - DNA, 552 bp, Cannabis sativa
aaaaaaaatctaaataaatagtttcaaaaatataattgaaataatatgttgtagggaataatatgttgcatgcatgcatgtctgtttttttttttttttaatatacataatatatgatcataaatactgataaaatatttactatacttacaatagacataatcacatcaacaaattaaattataataatttaaatatcaaaaactcgaaaatacatatactatactttattaacactcacgatttagttaaaaccaaaaacaaaacattcacgttttaatatttatatttttataaagaaaaataataaaaaatataaatatttataaataatcaatattgatttttataatttttttttttttgaaggggcattaatgtgaggagctcagttttaactgacaaactcacagaataagattctttttcatataattgagacaaagggcatgtattgaattaaattcttttcaaatttgtgattagcatctaatatatagggtggttttagtaatttttttttttaattttgaaaatattttctaaaaatat

SEQ ID NO: 170623 - DNA, 790 bp, Cannabis sativa
ggtttggacttaggcctgctttgatttaaggtatagagcccgtttggtgaagaaatgggtcatggatgggctttattagagagagatacaatcaggcttacacacaaaggctcatgatcattccattgtgatgtaatatgagctgctaagttgaccatggacttcttacaaaatactgtgaaatgggaaaaaatttacaaaatattgtgaaatgggaaaaaatttacaaaatactgtgaaatgggaaaaaatttacaaaatattgtgatacaaatttttttatatttttactgtactaattttataaaaacattgtgtttataatttcaaaattataaaaaactatatttcagtaaaataataataaaaaaaaacaactcgaaaacaaccctataacaacctagaaaataacatgaaaattttaaaacaacaaaaatataactacaaagcaacagaaaaataacaaaatattagcctaattgtaataagaaaaataatatcaactccttgatatgtttttgtattacaattttttttttttacttaattttgacaattcaatttatcattttgtattattaatttttttaataaaattttgttgttacaactttgttcttttaatttttttttttttctttttgaactagtgatagttaaaaaataactataaactagaaaacaacataaaaataagttttttaaatcctgcaaaagacatacctcgagtactaagcataatgtataaatttcccattttaaaatgttcaattaatgcataaattctaga

SEQ ID NO: 170624 - DNA, 760 bp, Cannabis sativa
gtaaagaacatcgctatttattctaacaactagattccctttgttccacctttaattttcagctcttgttcgaattgatgggtctagcaaggttttggtgttaagagatacttcaggtgattgggataatgtgttagttcgatcaattttttttgcctcataaagttgaagctatcatttccattctttggtcttcaatggatgtgcctgataaaataatatagaattttgagaattcaggttggtatttcgtcgtctagtggtttgtttggttggtggaaaaaattaggaattattacataaaaaatataaattggcattttatttacaaaaatacctttataaggtgtgaccaacatttatacattttatgtgattttaaatatcaaaatatctcttacactataacttacacaatcagacgatggttgcagggtggttgctgcgtggttgtgcggtggttgcatcagacgatggtagcagggtggttggccgaaggttgcatcagacgaatgtttctaggtagttggccaaaggttgcatcatacgaaataactgttagcaaaatatttatgtaattgtaatgcaactgttataaaacattaaaaatcaaaacagtatgtctacgcacgtaactctatctacatgtctctttattagtaatttagaagacaacgaaaatacaccaggataaatattttactatagtattgatgtaattttttttagattatacttgagttggattgtttaggaactc

SEQ ID NO: 170625 - DNA, 1102 bp, Cannabis sativa
aaaaaaaaaaaaaaaaaccgaccatctaatggcggtttaaaccgttggcggttttttcagttttcagtttcgcgcggtttcgattttggcggtgttcggtaggtcggtttgaacagtttttttagttttttagattttatgctcagccctagggcaagtaaaggttaagtttgaggaaatttgttaagtttatttttatgtatttttagagtctattttgtttgtgttttagtatttttatgctttattattcaggtttacgcttgttttattcttgtttcaagttttaatggtaaaatacatcatgtggttgaaatgagagaaaacatgctaaataagatgaattttatggatttagcatgaattttagagttgtaagatactatgggtgaaaaattctaagtttttgattgtaacgccctaatctatagggacgccacgtgtgtgattttataaactattttaatactaatggattaattaattattaaaaatcgtgataatattaaaaacttgaccatagtaaaacactaaaaacggacgttaaaatggcataaaaatcgtgttccgagaatccctgttataaaaatttttgctaaagaaatatatacgacaaccatttaaacacaaaatcaaagtacacagtagatacagccagcccaaacaactcctggcaactcggtgcacaggccggtgaggtcaatatgtacattgttggagaagactgtcacttcatggttgatcaagcttttatttgcctttacctgcaccacatagcacccgcgagtcacaagaactcagcaagaaaagtaataataataatcatatagtttatcattcgaatattgtcatttatatacaataagaatcaagcaatcacacatttctcataagatgaaatccaaattactactggcatctgccatgaataaacatcagtatacatatatttggtaatacaaaattattacaccaataatagaattcgtattcattaaatcaaataaattatatatatatgttacctcataatgtaaccatcttcataacatcacgttgcctaatcaagcaagtcgatgcttaaataggataatcctatatt

SEQ ID NO: 170626 - DNA, 712 bp, Cannabis sativa
cataatataattatactgatactgctattgtaatgtaatctaactggaataaccaacatgtttactaaacatgtaaacacacatgcatatcattatactaatcttaccttggttccgaatgaaagtatgtcggtaaccctgagtggaagctgctgcacgacgatttataagcccctatgacacaacatacgtacaactgataagtgtttactctagaacacatttctaatgtttgaaaagaacctagggtttttctaataaactatgtggtggagacaccctaaaataaattacacaattctgctctaaattatataccatatcgtagagctcttcataagctttaaaatggtatatagaacgtctaaaacggatactcgagtgaaaagttatggccaaaatactaaaatcagcctacccgatacagtccaaccggaattccggttggtacagccctgaaccaatatgaattccggttgtctgggtagaaaaacacgaaaaaatccaatcttacaacctccataacttggtccaatcaatcccaaatgataccaaactttccagaatacataaacacaccataataaatatattctaggcaataaactcaagcaataacctttgaaatgaaaatcatcatggaagagccaagtttgagctcttaagctcaaaccttgaccaaacctcacaacaagcctctaattcaacttaa

SEQ ID NO: 170627 - DNA, 584 bp, Cannabis sativa
gggatccaaacaccaactttagaagagaggatgtgaaacaggtccctatttgggtgcagcttgaagagcttgagcttaaatattggggccaaaaatctcttttcaagatagttggacaggtagggaaactaatcatggtggatagtgtgacaaaagcaagggaaagattgaattatccgagagtgctaatcgaagttcaaatgaaccaacctctgcccatatgttggattttgaggatgaatttggaatgaatgttagtgtgggtataaactatgaatggaagccaataatttatatattttttgcatatatcttttcggacaaaagttagtgtaagaatactttgtttatagtttagaaatatattaatcatgtagttcttcttaatccacatgtgagatttttacaacaaataatagtagtagaaaacttacaaagaagtcatatttctcaacatttaaaaatatataaaataaactaattttactaaaattcttttaatagtaaaaatggatcaaaatattgtaggatgtcaactcattttctctagtggtttcctttatatatatacatagatatagata

SEQ ID NO: 170628 - DNA, 754 bp, Cannabis sativa
ccatctgttcgaagaggattagtacttctgaatgtcaggaacttctggagaaaatcgtgtgtagaatcaggtcttggagttcaaggaatttatcgtacatgggaagagtgactttgatcaattctgtgttgatttccatccatacttattggtctcaaataatgatcttgcctaagaaactactcaaagatatagaagctatttgccgttccttcttatggaaaggcattcaaggaggtgtagggcctggtttgatagcatgggagagtgtatgtaaatcaacgaaatcggggggattaggcttcagaaacattcagaactggaatactgctgcacttggtaggtacatttgggatatagcaagcaagaaagactgcttatttgtgagatggatacatgctgtctatttgaaggatcaacaatggtgggagtataataatcccaccgattgtagctggtattggaagaagattgttggagtcaaaaaccgattgaaagagaaaactgatgctgctggttttttactacagaaatacaaaatttagcagggttacaaattgttattttctaacagtgaggaagtttcttggcatagagatgtctgggataggcttattattccaaagcataaattcattctttggttagtcatgtggggaagattaaacacaaaagaaaggctagctaagtatgatgtgagtatagatgagacttgtctcttatgtgggaaagagaaagaatcaattaagcacct

SEQ ID NO: 170629 - DNA, 864 bp, Cannabis sativa
aaaaaaaaaaaaaaaagaactatcagtggaaagggaaaagttgaaatgttatttttttttcttttttgttttgatatatatatatgtaaggttatgcaattttgtaacgaactactgtatattggtgtatttattgatattaattaataattaatattgactaataaaaaagaaaaatggtagaataggttagaataattataatcagctacagggaaataaattgggaagcttaatcggtaaaaacttattaaaaaccaaatgataatgacttttcagaagaaagtacaattaatgaccttaaataataataatcaaaactaaaatgcaaaaatagaattaaaattaaactaaatcagacaaattaagagaaagaagattaaaaacaaatttcaattaagctgccacatggaaagtttgaaaccttcctctttatatattgatatattgatatattgatatattgatgatatattgatgatattgatttttaattatttttctctttctaaatgattttatatataaatgtaacgtatttatttttataaaaatcaaaacattaaaatttgacaaataaaatacataaatacacaaatctttttaaaaaaggttatagtaacaaaattgaaaaattctccagttaatgatattttatgagagaaactaaaaactaattaaatgagagtaattattattaatcttttttagagatatattaaataaaattttaataaaataagagaaaagaaagaaaaaagattaagaaaaaaagatcatagcatcataatcataatattatatatatttaaatatagatagataaattaaagtaacaaccatatcataaaaataattctaaac

SEQ ID NO: 170630 - DNA, 629 bp, Cannabis sativa
aaattcaagaaaacaagaataggaactaaagagattatacctttgcttaagactactacaaccagttgagaatcaaaggaaaaaagatgaagaacaccaaccctagctgccctaggattttcgagagagagagagagagagagagagagagtttctagtttttcaactcacttttccttattttataaaaatgaaataatacattagttaatcaagggtaatatcaacttatacatgactaaaaatctgatttaaataagtttaataaaactcataaaagacaaagagctaatggggcaaaatgaccattttgcccctcccacactaaaaggcataaaagatcactacggggtattttgggaaattctaaaatcccaaccaatcccgtcattcctaatgtctaactttattctcccgctaactaaaaatactaggatgtgattctaatagccatacaccacgttccaatgttaccggacaccaaacatgcaaactcatgaaatttctataaaagacatatgaaatgcattctgaatccaactaaataattaattcaatactaataaataattttcataatcaagccctaattatctgctaatttccaaattaaaactaagcggtcttta

SEQ ID NO: 170631 - DNA, 979 bp, Cannabis sativa
ttatgtcgagtagcagataagtacttaaatcgtattttttgcggtaaaaatactttttcttatgattgaataatcttagagtagaaatattctatcagttattttccaaaataaataccagtaataaatttctcaaatgatttttattctgaaaaacagtcactaagttacaatatcgagctttcgagaggctcgtctctccaaattctcaatcttttgagaggattggtctctccacaaagagtctactcttatctaattccaagttaagctaaatgaggttgctccctctgtatttataagcattggtcttaaaaagactaaggccacctaagattacaattggaccaatagaattgaaatactaagacaactcagcccatgtacataagagactaagtatttcatttaatcattttgtgatatataagtcttaggcttatcaataccccctaagaatcttcaccttgtcctcaaggtgaaaacttagaaattattctttaatggtagagatatattcctctgttgctttaaaatcttagagacagtgccccttgatcaacacttcatgtcttgcaggtgaacttggtgatgggctaagtttcgatttgtatctccctctatcgaaaatccattaaatgtggaagactcctagtgtatttggcacccatcttttcctgcttgaaaacatgctcaaacataccataattaacccaaaacatgcaccaacccaaagtaatctcttacagatttaaataaccacaacagagagctaaaatacacatttaaaactcaaaatcaaaactcacatgcatctaaattcagatttaaataatatacaatataggctccaaacttgagtaaaatatcaatataaccttatgttgggtccgcccctttattggtgggctggaccaataagggcttaggcccattttatttgaatcaattaaagaaaaaaaaagaagaaaggaagcat

SEQ ID NO: 170632 - DNA, 953 bp, Cannabis sativa
attttgatgataaacaaatatttgcttattattttttactaattatttcttgatcattttgcaagcaaattcacaaagtatcaatatttgctcggtaaagtcaaacatcatcaaagaattgaattcaacaagtatataaactacttcatacttcataagatcaaaagttttattaagagatcaagaattcaagaccctatccaaaaaggacttcaaaagctcaaagtcaaaagtcagccaaaagttcaaagtcaactctcaggaaaagtcaactttagattaaaacataaaaatcaagctaagaagctcgtctacatcaagactacatacaattaaatggtataagtttactttagtcttgttaaagtgatttgcatagtatattagggtttataagttaaatatttgggtcactaacttgtgctacaagttactttttaaaaataacatataatttttctaaattggattttaagattattatcttttaactaagagagcgcaactataattcttgaaatcagataaacgagctaagagttatgcgcattttaagacaaaaaaaattacattttgcgcattatgcgcgtttggaaaatggtgaactgaggtgaaccgtttgtgaaccgtttaagcccaaatttgcatggcttttcatcttattagagagatttttctttttatttcaaaattacatatccattgtatgagaggtgaggttgacaccggtagaaaaacaactcggttgtaggtgaggttgacaccaattttgtaaacaacccgagaagagtgagattgttactacaacaattcaagagtgagattggcacttcaacaatcttaataggttgatattcttttggaaaactattagttgaggtgatgttggcaccggtggaaaaataacttggttggtgagattggcacttcagcaatctagtgaggttgatagt

SEQ ID NO: 170633 - DNA, 581 bp, Cannabis sativa
gttgtacctgaggctgagaagaagattggtggatgttgtcgttttcagcgcagaatcgtttgaatttgaaggaagcaagggaggttggcttagaagaattgttggagttggagagacagagaagagcagtcgaagaagagagagacaaattcagtggagtaaatgttgaggttaaggttgagaatgtagggaagtagttgaaaggttggttgagatggtttatgatcattttgcccacaaaacaaacatgcttctctcctctgagtctgagtactcttcagacacaaaccaaatatcctaaatctcgacagggtatcgtaattcgtaaatggattatgcatacgcctccacttatcaaaatcccttatttataatatagggcctttgaaattgggtgtcattgaatgcaataatgtgtaattttttttttttattattattattttttttttctttgtgtaaagagtgtatttggtactttttgttggaagtaattaaaagggaaactcataaaaatattagaatttgagttaatttttacaaaaatactatcacgcaagaatttttttcaaaaatattgt

SEQ ID NO: 170634 - DNA, 981 bp, Cannabis sativa
  modified_base (516)..(518): a, c, t, g, unknown or other
tcctacaatttgctgctcaatttgttgcctccttgaatcaattatatacactaaactattaatttgcagtctgtttggagctgctcttatacatcataataatatacatagattgcgtaataagtttataaatatttataaaataaaattgaaaggaaaatttgagttctatgcttaactgtgtcccaataacaagacactcccccacataattatccatttatgttattttacagtctaggatgttcactaaatatttgatttaatctaatccaatctaatctgtaaatgtaaatatctgcacttgcgcggattgaattggattaaaaaatctaaaatccgcacttgtgcgaattgaatattgtttgaccttaaaaagtaaccgactcaatccaatccgcacttaattatatatatatatattttttaaaaaattataatatatataatatatattaattttctagtaataataaaaaaagggatattatttcacaaaaacataaaaacaacaannnaattacaaaaatacagtttcacggttttaaatatttttacgatttttttactttatttacagaaaatacggttttttttttgttgtaatcttgttaatttgttattggttttttgttatctgtatgttattttttattgttatatattttgatgttattttcatattatttttatgtagttttcttgttaattttatgttgttttcgtgttatatattgggtacatatataaacataaaaattaatccaatgaaataaaaatataatattttttatttgaattttaagggtaaatagtgtcataagtacccaaagttttatgtttgtaagcttcataaacctaatgtttatttttagcggcatatgtacccattgtaaaactgtaatttttctctaattttgtcagtacagactatgatattgtcttaaacagggcacatataaggcctaaattttttatcat

SEQ ID NO: 170635 - DNA, 711 bp, Cannabis sativa
cattggagctgcccttatgtgagtttgatttggtgtaatgataatgataatgataataagagcattgctattagatattagtagtgcctagtactttttataggtagcgttctataattagttagcgatattttttaaaagttatattcctaagttatataagacacaatatttaattacaccaaataataatatgacaccaaaaagagtactgctttagcaaatgaaacgcgaattaattatgatgtttgacttgttagaatgaatattaaatatataataaacatagaataaataccattttagaccctgtgttttgtaaaagttactaattgaaccttctgttttgttaaatgataaaatggatcatgtattttccaaaatagtacaaatatgacactgaactgattttttgtcaaaataaaattttataataattcgatctaaatgtgttatgacaaaactgtttatattttctatatccgttcgtgctagaaattttcttcaatttggttatattaaaaaaaaaagttgtcttgataaaaaaaaagttgtcaaaaattaaactcaggatcctatttttactattttaattataattgaattaactaattaataaaataacaattgtttatgattatagaatatatatatacatatgggtgactattcaatggttacattttgattgtaaccatatggttacatttt

SEQ ID NO: 170636 - DNA, 566 bp, Cannabis sativa
atgtgtttttacatgaaattaataccgtacatctattagaaattgtaaaccgatcacaacccctcttatttccgtccgtttcgtcgcctttttgactggaatttcatcccgacccgatcggatcttaaccgggtcggacttgactagttttggggttgctggaggttgaagataacctgctaggacgaagcccactcgcggcttccggagagtgagagagagtgaggtagtttcgtaactccgttttttatgattctttttttcgatattattagagtttaatttctgattttttggtaatttttaattaatttttttgactccgtttcataattattattttttaatgataattatgtagttaaaaaattattaaaaataatttttgataatttttcgaaatccgtaaatcatagaatttttttttgggtttcttctcgttctatatgacatagtcactctcttatttgatttatcttgactatgtaatctccaccaatattctccaaatggcatgatcaccatcagaatgtaattcatcaacgcacggatggaaccccatcaga

SEQ ID NO: 170637 - DNA, 717 bp, Cannabis sativa
  modified_base (668)..(668): a, c, t, g, unknown or other
agaggatatgttagacatcgtaagccttttaaggcgataacatgataatcgaaggggctagtgacaactccattatgaaaaattacatcaatcaaggaaggatgaagattaatctcacctaatccctaagatacctacagtataggtaatgcatgccctttgtatctcttgcgaactgtgctcatccattgctggtactcaaaaacaagttatccctttttaactattcccttcaatctttataaatacccttgggaaatatgggaaaggagatcgaaaaaaaagagagaaaaacacaccaagaacattctctataaaagaaatactctcattaataacagagactcgtggactacggctcattaataactgaacaacgtaaaaatcatatgcattaattatcccaaagctcttataattatctcatttaattagttgtcgataacctcggtcaacattttggtgctctcattgagagttgtggaaagcgttgtttgagaaacaacaatcaagaatcagagctgcaatggtggaaactcgaaacaacacgcaccaacctcatcccacccaggatcctcagaacccagaaggtgaagaggctgtttcacgagtgaacgtgggctatgaggaacgagacgagacaaatgatgaggaatatgaagaaaacnttgaagggtacgatgcttacgacgaaggtagctacactgagttgctggt

SEQ ID NO: 170638 - DNA, 1018 bp, Cannabis sativa
taaaataatttccaacaccaagctgttgtcagatatcaggtttcttccgatttaagtgctctcgtagatccggttgggagtaattgctagtagaccccatcttactcatcgatcgtgtcctactcataggctttgtctttgagtggcttgcatatttatatactgcttcttatattttctcgatcattagctcgttgagtactttctcctcttcgagttgatcattgtgggttcttgatcgcctcgaagtcacacttgcttcttcacgctctattctttccccccgagagcggtttgtcgtatttcccccatcagggtctgtacgagtcctcactttatgggtttgagaagaacactggtgatttctagcaggtgacctctgttctcccggttgagtcccaagatcctcctcattgccatgagggatttcttcaccagttttcggtggtctcccatctggttgttcactctgatttttagggggtgtctcgttttccctgggttattcttcccagacattttcctgtctcctggttcgtgagccacgaggtctgccttgtggtctcctcactctaagttcaagttgagtttgagcattcgtcccttgtgccgccctggccgaggctgcatcacgttctaacttagcatttttacgttgtgcctcttccagaaagcgcctcaggtagcggttttccgtttcataagtatcttctcccatagactgggcacctccacgattgaactcttcatccctcgtcccagggttctggccacccccacgctgagttctcctcgagcgtgttgtctgcgtactaggaccaatgtcgggttaggctctctgggaacgtgtagtccgtgtactagggccaccctcaggttgagtcctcctggagcgggtgatccgtttggaccgcgggtgggtagacattctagagcccatgggctcttttccagaacgatgattggtttcctcatgtagagtgttaacattttcaggattttcagccatgaaggaggt

SEQ ID NO: 170639 - DNA, 675 bp, Cannabis sativa
ttaagctatattttttaatttattgagaggttaaattagaatatttaaaattaataacctaactataaggttatatattagtaatggtccccaaaaaacaatgctaactccaaactcatcttcccccattaggagagacaaaggctttagatctatggttatacactcctaataatatgtaatatttttgtgtatagaatttaatcttgatgttggatatttcatgaatgataaataattctaccacctataactttgctctcaacatttacctttgtcatattttgattttattgtcgctggctatttcatagtaaaatcactaatcatgttcatcaaaaaaaaaaaaaaagaagaagaaatatttagataatcaatgattgctggaattcttcttctccaattgttcttcaatgtgtttagcattaataagagcccaatacgcaaatttcaaagagaaacgcccatccatagaaggcttccacaacagactatcctgtattattattattgccacggcctttttgcaattcatgcacaccaattgtagggacaaagactatagctagggattgcttttttagaatcatcattatatatatatatattataaagaccgcttaatttaatttgaaaattagcagttaatcatgtttatttatgaaaattatttat

SEQ ID NO: 170640 - DNA, 680 bp, Cannabis sativa
taagtaactacacttcttatattacaaatatttacacttaatttctttattacattttatatttaatttatatattatatcatttaataaataaataatgtaacattgtaagggctctttctattttttattttttttattttattttttggcaagtggcgtttaagtagtttattaactcttacattttacaatattctgtagttgtattccaatattatttgtttggaaactatttgatatcaatttctaatattatcattattattttaactcctaaaagaaattatataggctaccaaaaggtatcaaattaccaatcccttcataattattgttgttccattatttttgattgtagtatactggtacacaatgaatatataaagaaaaatgcataccatttagtattctatagaacccaatatataacctgtttcaaaaaaataatatatatataacaaaattttccccttaataagacatactatttaatatcttttcttatctaataatgacatatttaagcttaactagtttttggtgtatcttataaattttgatacttaattgtaactaacacgactggatactaattgttagctaaaataaaatttgatacataattgtaactaatgcaattcgataatactataaaatttaggggtaagttgaaaaat

SEQ ID NO: 170641 - DNA, 587 bp, Cannabis sativa
caccttgtaatttagtgatataatactatttataccttttcagttaaaaaggctattatgtaatctgcattaggtgaagtgatttgattttctttttgacaaagtggaaaaatcacatcatcatatagggcagattgcaagatgaaacaccataaagattagctatatatagctaggtagtatgagctatactattattgcaacatatagtgtttttctttaaccttttgagatttaaatttccatttatttaaaagtttatattgatacactatatacttgattataagtttatcattacattatgataatttaactgaaatttctcaagaatttatatacatacatacatatacgtacatatatagatatatatatacattgagaactgccacaattaaagcatatgggtaagtgtatattgcattctcttaaaagtatattttagtagacttctaatttgtgatcactattgtaaagtcatttttggcgagttagttaacaaaatattgttttcttttatggtaagattcttttgcatacatacccgatttcttaccttgtgtgatttcggtttttagttgctc

SEQ ID NO: 170642 - DNA, 558 bp, Cannabis sativa
attattattagaataattggcgcccaaatattcttattttttttagcaaaaatttcttaagtgtatttttttttctacataaatttgagacatcagttaaatattacagttaaatttaaatattaataaaatgattattgtgtacacctgtatatatgtgaaagtaaaatttcgaaatcaatacagtaataatttcgttagtatttaacggtgatatttaactgacacctcaaatttacaaaaaaaaaaataaacacaaggagtttttccacacacacaaaaaaaagaattaagtgtataaaattaaaacataaaaaaaaaaaaatcgtcgcaaataactcttattattactattgactattgagcgttactatcaagccccatctaaatagatagcgatcttttatactttttaaagtaaatagtgacataagtactaaagttaagtttgtaaaaagcataaacttaataattttttttagcagcataagtacctaatatttgtaaaactgtaatttttctctaatttcatcagtatatactctgatattgtcttaa

SEQ ID NO: 170643 - DNA, 536 bp, Cannabis sativa
  modified_base (377)..(378): a, c, t, g, unknown or other
aaaatttaaaagtgatttttttttcaacttaattaaaaaaaataaaaagtaaaaataatcttattgaacttgattttggaaaatatttttacttttctaattttaaaaataaaaaaactgattaaaaaagtgttatcaaacgcacccttaaaattctaacatatttataagggtaaattgcggcataaatatctaatgttttagattttatacacttaaataccttatctttatttttggagacatttcaattcgataatcatgttccatatactgtactggtacttagctacggtattgcatctctattattttttttttttgaaacaagtatcattttgttttttatattcagaatattaaattttaaaataaannaaataaatgtaatgcatctgggccctccacttgtccatatttatgagttaacggaggtggtagtaaaactgtaagagaattgtaacattgggtatttttgcctccaaaaataaagataaggtatttaagtgtataaaatctgaaacattaagtattta

SEQ ID NO: 170644 - DNA, 843 bp, Cannabis sativa
  modified_base (535)..(538): a, c, t, g, unknown or other
ttgaagttcgctttacaaaatataccaacatatttatatcggttcttttggcgaaatagaccatttgggaagtgagctttagtcgaaatatctctcatacttctcttatttatactttgggtgacaagtcctttttttttgtcactgtggtctgtgaaagaaaactggattatttttgttagctctttatttttatcatttatctatatacatatatttttggagtttttcatatatacttttataattaaatttttatttatttgtaccaataaaaacaacatatgaaaataacctttataaaataaaaataacataaccccctttttttttaaatgaaaaaaataaaaaataaaaaacacagtatacatgaaaatttccttgtattggagaataatgtacattcataccaatgtcttaaccaccttttttaaaaaaaaaaatggcttaaattcatggttctcttgtcactatggttgtttatccgttccaattcgcattattttaaactggttactttttaatattaaattannnnatatttattaaaaaaatatattttttttacataactaacaataaaataaattattgttgttttatgtctctaataataaatcaaaatatataaaataaaaaattaaaaaattaaaacaagatgaaaaaaattatatgtataaagaataaatgctgaattttgttttagattatattttctttataaataataatagaatatacttttgatctactatattttaaaatatatttgtatcatatgtaatagatttttaaattatttttgcattaaaatattaattatatatataattcttttttaaa

SEQ ID NO: 170645 - DNA, 935 bp, Cannabis sativa
  modified_base (94)..(104): a, c, t, g, unknown or other
  modified_base (215)..(215): a, c, t, g, unknown or other
  modified_base (854)..(867): a, c, t, g, unknown or other
ctgctggcagcctctctggccatgctcccaccctgtgcgcgcggatggtaccatccgcatcaaatgcaattttttcaattttcttcattttttnnnnnnnnnnnatggaattaatttcgaattttttgtgtgaatttgtatttagatttttagttctcatatttcaaatctaattatcagaattaaattaattagtattttttaaattaatttangatattagtgaaatttgaattttaaaataggtaaaaatctatctttttgcttaattaattatcttattttttaaattttgattaatttatcttatttttaaatttaaggttagatatttaatgttttaatttttttttaataaaattaccttatttgaaatttaaaataagattaatcaaagaattttaaattaaaataacatattttgctaacttttaaatttttgttattttatttaaattaaattgtaaaatcagaaaaattatattaaattatcattttattttattaaatatttaattttttttttaaataacatgaaatttgaaaagctgtttgcattttttttttttgagaaagatatttaggttagttgaaacttaatttttcaaatttagaggtttaattttaaattttttaatttatttattaattttatattccgaaaaaaaaaattatttatttaatttatttttttcgaaattattaaattcattaattaatttaaaattaaataaaccctatatccaactattcaacttgtaattaaaatggactagcttgctaaataaaatgtgacatcatgatagattttatttaagcccaattaggcggccatagcagtgggtacgacatannnnnnnnnnnnnnccctcacatgaacaaccccactatgaaagctcatttgcctgatttggataactgtactaggttaatta

SEQ ID NO: 170646 - DNA, 1552 bp, Cannabis sativa
gaatgacagtgccatggacaagatataattataaaccccatagggacgaccgccacaaatgaattgctgaattgaaagagaagaagaggtgttccatggattcctccccagacccacaaatagggcaccttgcatcatcaatatagaatctcttattaagcacaactcggatagggagggtgttggaaatgatgcatgttaggctatttttagcctattatttatgtcatttttagagttaattttcttcttcattgtcattttttggaatagagttatgatatttttctttaatttcaggtttcgacacctagattgtataaattagtcaaattttagaagaaaaaaaatgatctataaaatagagaaaattttacaagaaaacaaaactaaaacttaacgcttaaattagactatgttttgatcagattttagagaaagtcaaaatataaaacttgtaaatctctatttagctttccaaaacatcttgaatcgttcaatttcgagcaatatcaagagagttatggtcaaaatactattattcatcgcaataggaaattttttgaaaaaaaaaaaagaaagataaaaagatagcattctcaagtggagttgcggctaagtacgagttttatcttttttaagtttaaattttaaatctttttagtatcttttaggtaactttgttagtctatataaacgcattattattcgtgtttttagaacgttttttgagctcaaaaaattcagaaactcttaattaacaaacaatcaaaagggacagaaattagagagctgaaataatcaagaaggctttttcgacaaagtttttagtattctcttattctctattttcttcttttattcttaattgatatgtgtgaagttgttaagatgaaccagagtagctaaatagttttttaggtattgatggatattgtttaacatcaatttatgtatctaatgtgatttaattttcttttaattttctatgtattctatttcatttgtacttaattacttttaattgtctgatcaccaattaaatattgtaatatccatataaaaatagtatttaatttttttttcttgggatattaattatgagagaataattatctcatttatttacattgttaataagttcagattattgcttagagtagttgtaccaattttctataaagagttcaagttgtattaactacgaaagtaaaatattatggtattttcacaaggtaggaaatcgtttaattaaagctcaatatgaaagttcattagggttttataaaacatatattagatttaattaattgtataagtgtattaaatatcattattatctaattaatgttaagaaattcataggtttagagaaattcgcaggtttggaaaattattttactaaaacgaccatatctagagttttataactctgattgaggtgattcaaatggcgttggaaagataattcaaatacttataaactttatagaaatagctatatcatagttcaaaatttttttaggtcaaaactaagccctaaagttacgag

SEQ ID NO: 170647 - DNA, 530 bp, Cannabis sativa
tgcatcagggaatccatgaagttcttaatgaagaagcaatgaaccttgtagaagacaagaaaaagaaattggagatcgaagctaaggcacatagtgccattcttctcaatcttggggatgaagtacttagagaagtgtttgatgaaggaaaagcacttgggctatggaacaagctgtcttcaatctacatgaagaaatcctttgtcaataaattatatctcaagaagagattttatagttttagaattgaggaagcacttagatgatttctcaatatgatcatattggatgttaataatcttggtttcaagatgatgaagaccaagctatcatactgctcagctcccttcccaaaatgtatgaaaattttgtctgactatgatagagaggtgaaagattcctttaactccaaggaagttcataaaggttgttgtttatgatcagtcacatgtaaaccaatttctcacgtgcaactaggagttagttggagttagttggttgttcggtttttgacagttaattctgttaac

SEQ ID NO: 170648 - DNA, 1396 bp, Cannabis sativa
aaaaaaaaagacaaaatgcaaatattactttcacattaagaaaccaaagaaaggaaaactcttatttaaactctttctctcgtgaattaattagagttttttgttattaaatttataaaagttcttttttttttgtaaggcttatgggcatttcttgagtttaagtgtagcttcgtagagattgtattttattactgtaattggtcttgtctttgtgatatggttttaagtgttttagttttgtttgtgttacatgattttattttattttgttctattgttgttcttttttgttcttcgattaatcgtcgtcaaattgttgttagtagttgagaattacaaatttgttgtgattgaatgggctattagtagtacaattatgtacattacacaatagctgagtgctcaagctacgagattgaatgaatttgcagcaacagttcctattgttgtgtttttggagccgtaaatgaagcaaaatataggtgttcttaaagttaattatgatgttgcaatcatttttatttgattttattttagttttttgtcaaatgatctgagaattaagcgattgattgtttagtttatttttttaattttaatcctaatcgtgtctctaacgatatccttattaaattgcagactattattttagttgattgtcattaataaaatttcattatttattaaaaaaaaaaaaaagaatgtaaatttagaattaattataaataaaatatgtgagcttttaaggtttgaaattgaaacctatatttggccaggttatgttttcctttttattacaaaatctacaattttttttttttttttgataattacaaaatctacaattatgtaatgtttgtaaaacaagattattctatatgtattttttttacaaaagaataaaaaaaaaaatctatatttgttggttcgttttaaagatttgaagttttcatataaaaagtgaagtttaatttggaaaattaatgtatatatagacaactaagatatcaaatttccaaaattataagatatggatcaaaatattgatcctctgttaattaaaaagggataaaagggaagtgcaaatataaattttgtcaaatatcatttttgttttctcattaccactttccattatatatttgtaaccaaactttattaaaaatcaccaaataataaaatagtaaaaataacatataaaattggtaaataatggagtcaataagaaattaaactcacccattgagctagctcaaaaatagttatatatagttttatctacatattttttagggtaaattgtggcaaaaatacttaatgtttctgattttatacacttaaatacctaatgtttatttttggtggcaaaaatacctaatgttacaattctctt

SEQ ID NO: 170649 - DNA, 818 bp, Cannabis sativa
atatatatattattcaatattaataatataacattcatacatatatcaaaatattcaactcttattcataatcaaaatatttttaccggctttttagggcataaactttaacaatgcggaccagaataagaagggtctttttcaatcaattcgtgatggaatttggaacaaattttctgattggaaggctcagtttttttcagctggtggtagggaagtgcttgctaatctattatttagtctattcctacttactctatgaatctttttaagctttacgtgactttaactcaagagattcataggctttgtgcttggttttggtagggtgggaatttgaataaaaagaatccctattgatgtacatgagaaaagctatgttagtataagtctcatgttagtatgaggtttaaggatatgttcctatttaatcaggcacttttagctaaacaagctgcaagattgtatacacacctgatactctggttgctagatttttattaccctaattcctctttcttatcaactaaagctactaaaaagtcttcctttatttggccgtctattctttgggtgaaaaatatttttgaggttattggtcgatagatcattagtgatggtacccaggtatctatttataatgatcaatggatacctagcttagatggtaataaatcttcttcgattaggcgtttgcctaatgttgagaatcatggggttccatctcaaaaccaattggtaatgagtagagtagctcatgtttttatatatggctcaattctctaccatttattcaatgtgggacaatgtccacaata

SEQ ID NO: 170650 - DNA, 767 bp, Cannabis sativa
agtcaactagtcaactttgacaagtttgcaatgtgtttcagccccaacgttttgagttctgaacaagaaaggttaattgattttttgggcgtgaagagagttgagtgtcatgagacttatttaagccttcctttttttgcgggacatagtaaggctgggttgtttgattccattcagactaggatctggaagaagtttcatgggtggaaatcaaaattgttctctatggcggggtgtgagatacttatcaaagcagttatccagtctattcccatgtactttatgaatcttttcaagcttccaaagacctttatcaaaaatgtccattatatgtgtgctcgattttggtgggggtgggaatgatgtgaaaaaaaatatacattggtgcacgtgggacaaactttgtttacataaagaagatggcggtttgggttttagagacctgcgtttatttaatcaggctctcttggctaaacaagcttctcgcatttacaatgtccctgattctttggctggccgtgtgttaaaagggttgtacttccgaaagcggtcctttgctgaaatcaagaaatctaagagtggctcctttgtgtggaaaaatatcttatgggggaaaagaactttttgactctagggttgtttggcgtgtaggaaataggaaggacactgttatttattttgacaactgttaggttgtttttagtattatttttaggttaatttttagtgtgtttttaatttacttctactcttgtttggagcaattt

SEQ ID NO: 170651 - DNA, 582 bp, Cannabis sativa
actttagtcgtggacataaagtaactggggatactctgtgataccgagccaaccaagattgttctgcctgcttgagacaacatttcgcttttcacccctccaaacaggcaataattttttccctaaggaattggaaatcccttctctttctagcagtgaaaaagaaagggttcccaaggtgcttttcattgtgacctagcagattcatctctaacatattcttttgttcttccttactcctcaactgagtatttggagaaaaatccagcccgcttttctgtttattaaccatttgaccagaccatttttcgtactttgtaatacagtctgtgaaagccacaacattttgaagattagccttacagaagaatatggcgtcgtcagcataaaacagatgtgtgataggaattgcattccgagagaccttcacaacagtcaaattcccctacttttggcttttataataagtttttacaacacttcgctgcacaaaataaaaagggacggtgatagcagatcaccttgcctcaagccacgcttaggattgaagggagctaacggatgttgggttttgtgccctaa

SEQ ID NO: 170652 - DNA, 746 bp, Cannabis sativa
cattagggcgttacactgtaggacacccaggatgagcttgtatggccgacaagggtttgagaacaagccggccggccaaaaggtgactttcaaagcaagggagggtctgttcgactaaggaagcttgacctttacaaggaaaagatgtacaaagacttgcctccacctacaaatgctagcctccaactgcaaaggctggcctccacttgccaaagctggcaggaacatgacttgcaagatcctagcaagcacatggctggccaaccctgacaggcacatggccatccagaccttggcaggcacatggccggccagaacctggcacgagcatggccgaccaaacctcaacctgcagacattgtatggtcgactagcctggatcctgtaggtgcatggccaaccaacttttgcctagtaggacattgatgcagccctcatttgtggacagcaagtcaagcaatggaatgggccttaacagccacaaaaatagagcaaaaatatctatttttgagggtcaatttagtcatttgtatttattaattaaatatgtaaataacaactttctttacccatttctaagaatattaggcatgtaagctctactatataaaaagcattagcctatctctaaaaccctaagtcattaagcctctaagctccctaagctctcctctttaagtctaaaaccctaatcttctctcatcctctctactacacacccaaagggctctctctctctctctctc

SEQ ID NO: 170653 - DNA, 1569 bp, Cannabis sativa
tactaaactacttttttgttttttaacttcactagtgaatcttatacgaagcacgtggagcaaaatattcatgaccttatgtataaatgttgagaaaaaatattactcatactcaacactacactactataagatattatatcactattattataattaagtattaactttcactttcactgtaaactatttgtaaaggaaagactatttctactcaaatatatatatatatatatatatatataaaatttaagaatgaaccctaaaaaataattgtacaatatacatttttatcgtatgtttagcacataaataattattattctattatttttataagacaatacacagtttaattatttagcttctatatatatatttcattctaaataattttagcgccaaaaatatagtattgttgcagttatacttatttttaatattcctgtaaaacaagttatttaaatcttatttttaaaatataaattactctaaatttatttttaaaaaaaatagttacaaaatatttttaatgagtatatgttatctgcatttttgtcatgatgacacgtggatgtttaaccaaggagggctaagatgtcatatgttgctccatttcctcaattgacgttctcggaaggtaaaggcaccaactttgcgggaagagcctatgtgaagaagagttccctaactgctagctacacggagggtattcgtgagtcaaagtctccccccgttccaggaactaaagttatctgctcctaagaagagtatgaattttcctggaggagccaggttattccgagacacactaaaccgggctacgcctttagcccacaaaagcctcacctaaacgtgtcagaatatggacctagtgactaggctttttaggtacgatgccagaggttgtctcccacgacacgctatcatacaaagcatgtgtgtccttgtgtacctgagcaaatgatctaacggctagggataaagggaaattcaaaaagaaaaagccctaaggtgacacgtgtcggaggcccagctcgtacgatttgacacccttaaatgccatataggaaatatgcaacctaccaatccaacagtcagatttcaccctaacaataatccatccaaggcagcacatccaaagaagttggtctataaatacccccgaaaaagcacaagagagggggaccttttttcggatggaagactcattcttcatcatcccaagcaaacacattttgtgaccctactatcaacttcagaatattcctacaaagcttcctcttcttcaagaggaacaatgtggaggagagttttagtccattgtatctctactttgtgtaaacagttactggccgatgagcataataaaatggactcgtggactaaggatagttaacgcctgaaccacgtaaaaatctcgtatatgttatcttgctacttattctattatcactttcttaagctctaaaaaatatttagttgccaaaaacctcagtaaatattttggtgctttcattgagagctgaagaaagagatatgcacgtgtaatgaccgctctaataattt

SEQ ID NO: 170654 - DNA, 643 bp, Cannabis sativa
  modified_base (447)..(456): a, c, t, g, unknown or other
attgtatatgttttaaattaaaatgagttactagatttttggtgttgtggttgtctaaacttgggtttctctcaacagtaatggtttaagtccctcattttttttaaaaaaaatatatgcaacttattttttatttttattttttttgacgcggtgatcaaaatcacacatgattaaacaaagcagcaatccacaatcggcggagacaactcctcgaaccaggatagctcatcgtctaaccgaagggcatgctttgtcaaaccatgtgctgcagaatttttatcccacgccacatgggacaaagctgcccccgaaaatttagacaatcaagctatgtcttcaaaaataacaccacatcacattgaaaaaatacctccctattattaataattatctccagagctagcgaaactaaaaaaataatgcaacaccaaaccaaaaatacannnnnnnnnnaatgacaatcttcaaaataaaaataaatatacaaattaagaaattaacacgcaactcactagctcaacactcaaaattactaataataactagtcaaaggtattaccctttggctagtaacaacatactaacacccaaatataaattgttgaaaatcaaaatcaaaaaattatatataaaattaaag

SEQ ID NO: 170655 - DNA, 671 bp, Cannabis sativa
attacttcatcaggcacactcttcttttttttgtttgacatgatctcgcgttctttcacaataaaatattagaagaagataaaaaagcaatatattctagtatgaaagtgtaattacatgagggtttgttgctctctcaaaattttgtatttcttctaagcattaataccttgtattgtgcaaaattggacgactctttaaaagtactgaaatgaagcaaattgtctataaccaaaaaaaataaaaaaaatagtaccaagaaaactttcgtgagcttctgcattataatcaactacacttttatacactcattcccactttcacaatatatatatatttatatatatgcatatctatgacaaccaaaaagaaaatgaaatgtaatagagaaactctttaattatcaaaataatcaaaacctgtatacaaataataaatcttttctttgaagaaaaattaagaaaataattcataaagaatatgaaatgctaaaagtggaagtctatgaatcgtcaaaataaccaaaatcgacaaacaaataatatatctttttgaggtaaagaagaaattttttttttgaaaaaaaatagtttgtagaatttaccaaaaatgcaaaggagaaaacctttactttcctagattgggtaagaggaagagatggagatgccttc

SEQ ID NO: 170656 - DNA, 1222 bp, Cannabis sativa
ttgattttctgattgggttctaaaccgctcaggtgtgtgtaaaccatgtccaaagctttgactccaatactcacagtcaacatattctggagaaaaaaattttaaattcggattttacttattagatttattttattatgtattatttttaaaacacaaaaattgttttaattactatatgtgtattaaagcagcacgtgggtagataggctgggttgtatttaggggttaacggggtgaatgcacaaaacagtgaattataaacggaatgggacttaagggggttttcccaccaaaaataaagaaaagggagttaagtgttaaataaatgaaacataaggaggtttggccgcaaatttcactataaaatatttacatagtttttcattttattttaatttaaatttaaagtaataaatttaataataaaattaaaaatatcaataatattttaagtattttaaattaaaataaaaaatctatttatataatttttattattaaactagtgaagtaccacgtgcgaagcacgtactagtacatgaattatatattgtgttaaattttatttttatttaggtggcgtttagttatatgtaatgaaatataaaaaaaaaaaaacaatttttattctattttttttatttagttgcatcttaagagttgaaatgtcacttctattctcattcctatttttatcaaatactatcataatatttagtgatttgataagaagattttttacaaaacttattaagactcaaataaataattttttgtatatattttgaaaagtataatgtatgtattatatttttatggagaataaatataactctctcttaatttttttggattttttatttaatataatatattattttgtcaaatatttaaatattattagtaaacttataatgtagtatatatatatatttgtctactatagctataataatttgctattaaaataaatttcattcttaactaattaaattttattgatttttaatcttcatttgatttcaaccattacttttagaattatactaaataataacactttttaaatttattacaaaattatggtgaaaaaatattaggataagctaatatatcataaaccttaatatatttataaattatattaatttaaaagagtatgtaatgttagataaattaacaattaacccaagatctatttgtatataacatagaacac

SEQ ID NO: 170657 - DNA, 553 bp, Cannabis sativa
  modified_base (423)..(429): a, c, t, g, unknown or other
atattattccaccatattccctaactggttaatatatttatatatatactaactacatacattttcatatatacgaagcatatataaaggaaatctcgcaatataagtaagaattatattaattagtcagtagtagtgttagtatcactatggttgagactctgtatttaatttcatcaataccgcaatataacatttagaatggtgttaaacaccacattacccctaacagtaataatataatggcatgtttacttaaaggaaatggaaatgaatggtatggtattgattcccatacaatttttaactaaattttagaaaggtgaaaactagtgggaccgagagaaaacaaaaggaaaagttctccctacatttttatagggaatgcctttccctttcctaacttaatttattttaattttnnnnnnnttaattaaaaatgaaaaagacaaatacatcccttaaaaatttataaacagaaaataattacatgttctaataatgataattttgtcaaattaaagtattacgattacctttcctagttatgtaa

SEQ ID NO: 170658 - DNA, 980 bp, Cannabis sativa
cgccaccgacaaagatgaagtgagcgagtcaaatggcacatcctctcaatattatgcgatacaaaaatcatcacatttttggtttttagctatattgatattatagatatacggtccccaaaactatacaactacatacatctacaccaataatacatctctcatatgctggtctccattggattgaatacgtaggtgtggatctattaaataaaattgccaaatggcagataaagatcatttgattaataaatggtcccaacccaactggattgagtaataagttactatacttcgaccagtatgattatagagttgagtatgatgagtgatgatgagcaagcgacaaaatcatgttgggagctaacatgccatgcatgcaaacccattctttatccccgaaattttatgttctatgcgagtgatggagctaatcttcccatttacgtaattaaaactcgttatctcaactactttttcggtgcattaaatatagtacagactaaatatgatcaaaaatgccacttttccaaaattgtggtatacgtaaaaaagattaaacatatgttgttatggacagccatagttgtttgttaattcatatatataatgggataagttgagaaatatctcttttttttatatctattaattaattaaaaatactctcgtattaaatttcattaaagtctacccacttttatgagcgaattacccaacatatcttcacctacttaagtctagcacataatttacattatgttagagagtccaacattgataatgtgtgaaaagataataaaatatataagatgaatgagctacttctctcattgtcaattaattttgagatagaacttcatttaccttatctcaaattctagcaaggtatcagagaaaaaataaacaaaaaaaaaacctctaacaactatccgacccaaaaaaagactgatcgaagtaaaactaaataaaaaaaaaaa

SEQ ID NO: 170659 - DNA, 518 bp, Cannabis sativa
gtgatgtgtatatatatgtagcttatataaaggattattataaatgtgtatcatttataaacgatagggcatatattgatgagaattgctaaaatgtattattggtgtctaacactttttttttggtatcatattgttattagtgtaattaagtattgtgtcttatataatttaaaaaaataacttttagagaattttactatttaatcgtaagacgatacttatagaaagtgttgacaccactaatatccaataataatgctctatattgattgatactggtaattattttttttttaagaaattaatatatatagtagatgtttgaatggctatattatttatattttgttatgatttttttataataggctgcagcaaattattatttaataaatttttatatttagaattaaagtaattataataaattattcaatagaaataaattaattttttaatctaattattaattattaaataagaactttgtacaattcatatgtacagatatatat

SEQ ID NO: 170660 - DNA, 831 bp, Cannabis sativa
aatagtttacaatttggaaaactcgggtggaaaatcaaacacatcttaaaattaagaaccttaggacggataatgggttagagtttattaactccaaatttgacaagttatgtctataatttggaatcactaggcatagaaccatagtgaagacccctgggcaaaatggtgttgctgaaataatgaaccaaaccttgttaaacaaagttagatgtttactgttcacttccattaaaaaaatctttttggggggaagctctagcaacaacaacctaccttataaatataagctcaaatagagtgatagacttaaaaacaccttatcaaatgtagtacaacaaaaccctcaacctaacgcatttaagaacatttgggagtatagcatatgtacaccaatctattgataagttggaacctagatccgtgaagggaactttcctaggttatgtgttgtggtaattttaacacgcaagtttatgtatcgtaacaagtattactcacaaaagtgaggtcgatcccacgaggattgtagttaagtacattaaaattaaactcttacttctatttggctaagtaaaatttgagataaaattaaactataaaacaataagaataataaaactcaggaagcaagtaaattaataggcaaattaacaatgaataaaggttagggctttcgatttcaattgtgtctatcgattatggcctaatatgattatcattctattacaaatttctatgcaatagcaagtttactaaggtaatttatagtattctcagatatataaacctcaattacatgcaaattttcaactctcgtgataaattaaa

SEQ ID NO: 170661 - DNA, 834 bp, Cannabis sativa
gggtgtgctttcttttgattttgagataatagttgaattagctcattgttttaagattttaattaagaataaatgtgtattaattattgtatttaatttttatataacttttttgttatatttatgtattttttttttctatttttctagttaattacatttttttattactgaatttattctttttaataaatttctaatattttttatttttatatataaagtatggttatcggaaattgttattttgatatattttttaaagttaacaattaaaattaacactattaaattaaataattaattatttttcttaaaatatctaaattaattttttttatttcataatttattaaaataaaatttatataattatttaaaagtgttaacaaaattagatagacactttttatatcaatccaatttaaatttcaattaattatttaattttaaatttattaattattttgcttaaaacatctaaatttaatttttattttattgtttattaaaatataacttacttttttttttttgaataaacttacaaaattatttaaaagtattaaaattaagtacatatttttatagctctaaaaaaataaattttataatttaaaaaatatgatagagttgaattagatttttttttattatttgaattaataataaaaaaatagcaacatggaatacatgtcttagcaaacatgtcaaggaacatagttaattttttaagtcaatttacaacaaatgcattagaattatggtcaaattaaaatagggctatttacaaaaatatgggaaaataaagataagttttgatatatatggcat

SEQ ID NO: 170662 - DNA, 607 bp, Cannabis sativa
tcttggaaccagctaggattctagattttctctacaaattcttatgattttccagcatcttatagagtatccaagttatggtaaagtttctagcaactccctctttagtttcttaagctttagattgtgaaattttgcatgaattgggtttatgagttctatagtggctgttgttgtttgattttgttttttggagtttagttatgatgtattatgttgaattgagctagttttggtggctgttagtaggttagagcaagctttgagtttgagaactcaagcttggctctttaatggtgattttgattctgaacttggttagttgttttgttgcttgaaatatgtctattggggtataatatgcaggtctggaaggtttggtaaggattggaatcgatttggttaggttttggattttttgggagttttttggtgtaaaccggttaatcggatttgctgctgggttccccgaaaaattcgtgttagtttcagagcctcggttggttagctccctgttagtttagggtattactatattaacttaagtcaccggttgtgatatagcgtgtcacttaaccatgttatgatcgatgtgatttaggggcct

SEQ ID NO: 170663 - DNA, 503 bp, Cannabis sativa
  modified_base (232)..(232): a, c, t, g, unknown or other
acaatatctgattttgaatgctcttaaattttgccatcccttttctcatggaatctgcccctatttataggattataaattgattgtcatccttttttgggattgatttaaatataaatgttcatgaaatgtggacaatccccacgtttcatttaaatcacacgtgggataatattaaataactatccaaccgctctttagctttatcctttagatggttattgctgacgtngaaggttatatcttctctgattcgagttatcttccttgtccatcttgaaaagaaaaaatgctaagtgttgggaagtagtctgtctcgttatattctctttgtggctttaataatgcgaggtgatcttcttgctatatgtaatgcgaggtagtttatgttgatacattcaatatgctcgggtggatgaatatccccttctcattgttatatttcgaacttcatatcaatagttattatccttttctcacttttgactataaagtcaacgagt

SEQ ID NO: 170664 - DNA, 628 bp, Cannabis sativa
tgcatgatttgccaaatccttgtactgtttgatatttattaatgcattatgtttcaaaaaaaaaaaaaagaaataaaaatagcataatctcaaaattgaaacaacttgtataaaaataaaaaatataaaaaaaacttaaaaatgaaaaataaataaaaaatactgtatacataacaattttccttaaaataataatataataataaacatttatttattaattatatattaattaaaataacaattattaaccttgttgaattcagatttggctagccgacaatggaatcatatttatgactaatattaccatgtgtacacaataagaacaggaaaataaagagaatatttttatagaagttcgacctccttaattagcggataatgacctactccactttcagttgtattgatactagagataataccactcatatcacatgggttgtggatttcgaagtggctctcttgagattataatatgagaatcagtagacaaatctcaggtaagtgagagaaagagacttagagcatgtttggtattattttctgttttctgttttcaaaaaattgtttttagaaatgagaacaaaaaatagttttagaagtttttaaaaacaagtcatgt

SEQ ID NO: 170665 - DNA, 530 bp, Cannabis sativa
ggagatagatgaatagcttaagaaaaaaggtgatgatgaaaaaaaaatataaaataaatgaaataatgaaatgggaaatatggggtaacatgtgattattgtgataaaaaaatatatagaaaactgtgccagaagtgacaagtcaatataaaagaaatttaaaaaaaaaaacagtataagttatattgtgcacagtatagatattatttataccggtgtacattataaatgtaatatttggcaaaaatacagtatgatgtgtaatctcccctttattttgtatggcaaaaataaataatgtaaaaaaaatatgggattaaaaaataattaaagtttaaaatatggaaaaaaaatactaaataaatttaataaaacttgtaataataagttttcgccgaaaaagtcactggcgccggaaaagttagtgttgccagaaaaatcactgtcgccagaaaagtcaccgccactagaaaagttaccagaaatagatatctcaaatataactaaaaatagaattgattctataacat

SEQ ID NO: 170666 - DNA, 1563 bp, Cannabis sativa
acaatcccaatacccttttttttttctaattacacgagtgaaaattttatttcaacaatattgcaacaactttacatttatttttttttttttgaatttgacacttattgtctgattcttttcttcttttttttttttttcaaattgttaccaatcaattttttttcatcttctctcaattttcacacttttttccacacacatacaacaaaacttcccatccaaatttccaaactaaagatctacttatgatatgattagggtaaaatatttggatattcatggatttatcttgtttaggctcaatatgtgtagaaacaaagaagatgctaaggctcaaaaagggtaactaggataaaattatagggatagcttgaatggcacaatcgatcgaaaaaatacataaatcactttcctaatcatacataatttattatttcacctcaaatagcaagcaagcaagttctaaaattttccaaataacttttcacatatcacactcagcatacataaaccaattcaattgctataaaattatctaatatgattccatgctcttttaaatcccaaaactaaaattagtcaagaatgtaatatcaccaagcacatggattttttgaaaaataaataaaattttcaaactatgctatctacctacttttaaattgactcgcatttagaaaattgactcaaaataaagaaacaactaaaaactaaaaattaaaaatcaactaaaaataaaaatttaagttcacccccaaactaaagtggcacattgtccccaatgtgacattaaagagaaaggaaatggaacttacttgagcgccacatcaacaagcgattgacgcccataataactgtcatgcaagacaacttgaaagttattattgtaattgccttcaagcttggcatgcgatgagtttgaaccaaaagcagccccaataacacaagactttggatgatgagcttggggagaagcctttcatagttcgtagacgatataatatggtgggaatggtgttgatgaaaagtatggatctattggtggtgtataagtcaatatcattgataaatttgaatcaacgatgccatgtgcttcctcatcctctaatgtcacattatctacactttcatctaacaacacttctttttgttgcttattatccacttggctatccataaccttgcttgtgatttcatgatcatggatgaattcattctcttccatgatatactacacgacatttattatttatcaagtaagactccgatttagccaaattttgagttaataccactttaaaaggatcttgatcttcaattgtagtctcattctctttcatgtattcaactaatgacacttcttcatcattcaaacaactcttataactttcattattagagttattacattctgaatcatgagccattaaattatcacataaggaccttaccatgtccgtcaatcaattaatctctcctagaagtgattgtagaagtgatagtatattctcctcttcttcagttggttggggtgagtttgggcaataaggagggtattgg

SEQ ID NO: 170667 - DNA, 802 bp, Cannabis sativa
aactaatacttaactgaaactcacataacagaacgctagtgcaaatataacaaactaaaaacccagatacgactagacattgattagaacaaaaactgtcacaaaataatgacactaacaggatataattcaaaaaatcaacttaatgatgtttgaactacacatcaacttaatgtttctccacccctatcagttttcgcacgatctttaaccacttaccttaatggtttttcaacattgctagaaatacatgaaatttatcaaacatttcaaatttctttgcataaggtaaaatctagagcaatatctagctcgcgttatacattggcaataagacagcaagataagaaacgtatggcgatatgataaaggtggacgtcttcactggtgtaatagatcgaaactctatcgctaaaagggtagataatgagttctttaagagcttgcaactcattgacccacatactcatgagtatgttgaaagattaagagaaataagcaaagtacaactaatctcaaaatttcaaaagactaccaagagtttctacgaaagggtagcgaggacaaacatcttaactagtgtctcgaagaatgtgaccatctattcttaaacactattaagagatgtgagccatagttagaatatgttacctcagcaacaaaagactacttctagataatatcaaaagatagttatcaatggatatttcattttatccacatttcataaaggttacatagataagatcgaaaaagaataactgtgaggggaaaaaccccaataagtaggggcagaacctaa

SEQ ID NO: 170668 - DNA, 1229 bp, Cannabis sativa
tgagcaacgaggcgaaagggaaatccccccggtagatttcaatgacagattcaaatttagtcgctatagtttggatcaaaccgccaaagctccatacaccaccaccgacgacagaactggaatggtgggagtcgggaatcagatctgggtcttcatattcttaatcgttggatggttttttgggagacccggataaggattcgtataagtgcctgagtcacagttacaagtccacctctgaatccactctaggggaccaatcgactacgatgattcagtctatcgatcatcatgggcggattgaatttaggtttgaatgagtaaggaaagaaagaaggtcaatcattaggctgaaaaaccaaaagtgaatggatccaaacaaaatgaatcgaatgagaaaacaaaaagtgaatggatccttggggtctgagtttggtgttgggaattgaatcagagagaaattcattgtcgtaggctgtggttgataaattcaaagagacgatttttctaggtgatgtttgaattgagtgggggacattaattttcggcttcgatttgcaaatcgttgcaatgtcatatttggattctttgatttggtcaaagaaggatttttttgataattaagaagaagaaaaaaaaaattaacggcgttagcttcaaaacgttaaaaaaattaaaagcaccgttaaactaagaattgccgttagataagcacttttaatatataaagatatttatatttatatttatatatacatgttatttgcgtagctagttcacagaaattttggccattagatttgagaacatgcatataatttgtgaggtgataaatattaatcaattatttgatgagattagactaaattcgtaagttggctctgcctatatatagttcctatgatcaattatttgcctatatatttggtttgttgaatcatactactatatatatggctagatatttttataccgtttaattttttggtttaattaattattaattattaaatatacagctagattgattatacgggtgtttaattaattattaatattgatttaaaaaaaatagaaaaatgagaaaattaaaaacggaataaataaaattatttggtttcgttacctaatttttatttttaaatttatataataatcttataaaattaataaagaatattctgttaaggaatcgttaaaccaaaaattcttgccacattttatataaa

SEQ ID NO: 170669 - DNA, 893 bp, Cannabis sativa
atcatgtttggcgctaggtagggtcagatgcgttgactttacgcattgtctgtttattgcgagccatcatcctgtggctgggcgggaagagtgagttaagacgtctgtcacttgaagaggtcagactagaacaaagatgagggtaatcctggtcgattcagtgttcgattctccaaaactcaccaaggtttcatctacaaaagataacaagcgagatgagtgtttggtaggcatatcgaaccataaataggcaaatatgccgagtaggagtactcaacagattaaagaatagaaatattcgacgaaaagtcataactcagaagtttgaaattctcgagagttagggcaaagttttcacaaagctttgaataagcaaggtgaaagacagacattgtgcagtcaaaaggcaagcattatgaattgtgaagccacataaatcattgcaaaggaaaatcgtagagttttagaacctagggttttctacctatcttcgatagcaaaattaagatcgcattcagaaattaaatgtgcaaagtaaaagtagaaggaaccgaaaacttactcactgatcgacgtcttgattcagtttacgcgaagttattcggatagttcttgtgaaaatgtcacgacaaacttgaagcgaagaacttctctttttgctctgaacttgcttaatggtatagttggtgaaaatgagtttgggaacaatgcttagtcgtatttataggcagagaaaaaacgaaaagaggtaatcatttcaaatacctcagacgcctcgatttccccaaaaaaaaatattggaaatcaaaagtaatcaagtgtaaccgtcaaacgtggtgagagaaaattggatttcaaagcattaatttcatcagagcatttattagccgaaa

SEQ ID NO: 170670 - DNA, 588 bp, Cannabis sativa
taaatgtgtttgggagagaatgatcaccccaaaacacaggtttattatgtggcttataatgtggagaaggctccaaacaaaggaaagcttgaaaagataataatgaatatggatatgacatgtttattatgtggaaatgctaatgagaacattgagtatttgttttttgaatgtgcttatagcagtaaatatttggagaagataaaacgttggctgaattgggatataaaaagcatccaacttcagccgctgttgcaatgtatttctcgagccaaaaactttagcaacaatcggcaaagcatgctatttgttgtgatggcagacgtggtctaccatttatggcatgtccataatgatgtcctttgaaataataaattatggatgattgatcaaactatttttaagattcattgtgattgtaaacatagaatccttagtgttatgccttgttagcaccaaggatacagattgacttatgagattatatatatatatatatatattgtatagatatatgaatgtaatgactttaataggttgtaaatgtttagattgaggaatacaaaagtacttattcatcaaaaaaaa

SEQ ID NO: 170671 - DNA, 759 bp, Cannabis sativa
caacgaacggcgtgatgatccctctaaatacttgaggtcgaaaatcaaattggacgaaaatcataagaaaaatgtcaatgacaaagatggcatacactgtttcagaataatctgggtatgattttctacagaaatgcttacagagtttttgaaaatggcaaaggtaatgaaaaggtggatccttttttcgttttatactcttgggttgatctccgtcagattaaggagacaattgatccaatgggtaaaatttaaaaaaggaagtggaaaagaaggttattaaatgttgatgtgccttgaaaccacaaaactgcaaaaatcagaggacatgcattatttcaaaagggattatgacaaaaataccatttataatcatttaaaaagcacttttcattaaaaagaactttttaaggggcgattgttgtactcaaaatttggctggcacttcagaggaggacatgtatcaaccttggagaatatgacgtaacgaatataatgtcaattatattaaaggatattaaaatggaataactcatttaatgcggagattgatagtgcatatttataacttgctgactgtaaagtcttaagcgagataaggatatacaaattattgacttatgcattgacgagaaatcattctgcgtcataagacacaatcaaagggatggcatcagtaatacaaagcgaggcaccaacctcgctacgtataaaaagatggtgacgagacatcttgactgttagaacacttagcgtata

SEQ ID NO: 170672 - DNA, 729 bp, Cannabis sativa
ggacatctcttgctgaacctcgtctaaggcagcaagacaatggttcacctgttgaacctcatgcttgacctcctggacaattgcaagagcagaactcgaacttgcaccagcagcagcaacagctttcaacgcttgggaaaagcaccatcaaagtactccgagggttaaaatatgatgccactgaggggaggctcaagtgtctcatgagaataggccacatccttttgagaggacagaatcttaaagattaaattaggaaaaacaagcttatgagtacgttttttacctctccgaaatgaaataatctggtgcaagatattagaagccaaattgatggatgtccccgaggtgatacgaaagagaaaagaggccacatcttgagacaccacggttttgttggaatttggaagccaatttctaagagcgaacctcatgagtgatgcatggttaatatgtgagatgagtaatgcgaagactctgcccagatttccattcaactcgtgcaccagtgagttcagtgagcatcagatggcgatccatagacattatagcatttgtcacatcttctggcagttgtgaagccttagaaatatcttattcagaaaaggaaaaccaatttcctcgaacatacactttatgaaagaattcagaattctcatcaagaaaatcatcagagaagttagcataaaattctttgacaattccatcaatatatccttcaaaaccagt

SEQ ID NO: 170673 - DNA, 1007 bp, Cannabis sativa
  modified_base (962)..(982): a, c, t, g, unknown or other
agagagagagagagtcaagtcaaatagtcaatcactttaataaagttaatacttttaaattttaatattaataaaataataatatattatatattattacttatcagtacacaattacaatataataaataaagtaaataattaaaaaattatatagaaggtatttcggttggtttcgattttattggtcggtttacgatccaaaaaaaatcgaccgactattggcgattttttcggttttcggttctgccagtttcagtgttccagcggcggtgtgttcagtaaggtcggtttgaacagttgtttttttgattctctggattttatgctcagctctagtgtgtgttatgattcgtatactaccaacactagtacagtggtggtacagagtgcatcggtaaaatatatgatgttcaaatggtacggtacagtgttacaaatactagtacgaaacaagtatgtagtgtatgtggtacaacactcagtggtcctcagggtacggttcaatgctaccaacactagtacgagacgagtacttagtgcatgtggtacaaggttcgtacttcttttaagaatattctgcatgcatctaaagccttataaatgggtgtatgggtacctatatacaagtcggtattatgttatatgttttttgcttttcttacggagtttgtcgactcacatatattatttgcttgtgtaggtaaaaaaacggtaaaggctaagcactagtgagtccagagctcaagggtgattgtacatatcaggatggttagacctggagagttcggtcttgggacgacttgggcctttattttgtagtcgcagagcgacatgtatcaaaactgtattttgattatgattgtaaattttaaagacgagatcccagattttatgtacggttatatatctataaaagttttaaatttaattaaaagtttaaattgttgggttttatgccnnnnnnnnnnnnnnnnnnnnnataattagatttacttattaatata

SEQ ID NO: 170674 - DNA, 697 bp, Cannabis sativa
accccagaaatcacatacacaagtaaatatatatatcgtaaatgcagaaaagtaaagggaaaagataacaccggatttatagaggttccctgaaattgtgcgggtacgtcctcttcgagctcgcctcgttccactatgattcttcaatgttcaagagttacaaagctaggattccaactcacaaaggtacgagtggtaatccctgtgttttacaatatttaatcctctctttgctctctgtatttccctctttgattgtctctaatctcttcttttcctttgatgttgcataaacaacccccttgagttgtggatctccaaaccctaactagggtttcaaggctaacccactgtaagcctcttccaccaactcccttttattttgttgctctgtgattaatctggagagacatgcggatctatgtatctattttctgatctggtattgtgatgctctacttgtaaaatgttgatttttcctggtttatatatgtgttgtatttagagcatacagagaggaagttagttacaaagtattaataaactttgtaactaacccaactactttgtctaggtaacttagggccgaaggccacataagattattactgtttgtaaactctttgtaaatgtctggttttacagtgtatagttaatatgggattttatttcaacaccaaatcatgccccctgaact

SEQ ID NO: 170675 - DNA, 735 bp, Cannabis sativa
tagatggtgctttttacaactgagacactctgggtgagtgttcgggtttcggtgccactctagcgagtacctcgaccgtagttcccctggaacctcttattctgacctgagccaccagtagcagtagatgccttgctttttcttatcagtggccaagccactacctcccttgttaaagcctgatgcaggatgtgtaggagccccaccaacaaacagagtcccacgagactctaatgtgcactccactgcgccctcagcccgtagtgccttatccaccgtttcaacataggtggtactgtcgtcagtagtgatcattaggtcatgtctgatcttcgcattaaatccatctaggtacttctcttgcttactgaaatcggttggcataattcccgaggccaatctcgtcaaacgatcaaattgagttgtgtattcagtaatactcatgttctccttctgagtcagttgggtgaattcttttcttttagcatttctgtctgcttcattgtaatacttagcattgaatagtttctggaacttttcccaggtcatagtcgttacatcatgaatcatggacaccatgtcccaccaaaccagtgcgtcttcttgaaattgaaaagttgcacaggccaccctatcattattggtgacgcccataaaattcaagattctggtaatcactgttagccattgcttggctttcataacatcgggaccgcccaggaaaactcgaggtgc

SEQ ID NO: 170676 - DNA, 903 bp, Cannabis sativa
aatcctgtgccttcttgtttctcctggggatcaaagtaggatttttcttagggtcttactcagaaggataccgtatagggcttggctccctagttttaggcctttgagtgcttggcgaggactcctcttgtgtttcctttagtctcccaggcacggctttgggttgtacatgtattccgtttccatggctttttgcatggcgaccattatttcttgcatcctcctattctgttccttttgggcagccagtttggcctcttgatcagctgctttttgccgtagaatcagcaactcagtgtagctaccttcatcgtaagcatcgtacccttaaaatttttcttcatattcctcatcgttcgtctcgtctcgttcctcagagcccacgttaactcgtgaagcagcctcttcaccttttgggttctaaggatcctggggaggacgaggttggcgtgtgttgtttcaagtttccaccattgcagctttgattcttgactattgtttctcaaacatcacttcccatagctctcaatgaaagtaccaaaatgttgatcgaggtttttagcaaccgattaaatgagatatgataagagctttgggataattaatgcagatgatttttacgtggttcgggcattaattaatgagccatggtccatgaatctttgttatttatgagagttcttgtatagagaatgttcttggtgtctttttctctctcctttttctgatccccattcccatttttctcaagggtatttatagagattggtggggatagttcaaaagggataacttgtctttgagttccagtaatgcatgagcacaagttcccaagagatacaaaatagggcatgcataacctatgtcgtaggtatcatagggattaggtgagattaatcttta

SEQ ID NO: 170677 - DNA, 637 bp, Cannabis sativa
ttctttatgttctttactttggaatttactctaaataaaagtaatcacaaaggcacacaaacttgcccaggaatagcagaacaactatcatttgtaaaagaaacactatcttctaaaaatataagaatttaagaagggaaagaacttaaccttttgctactggtttaagggatatttatagggataaatgacactcctaactgagctctaaaggcctgaatacaaagagaactcataatacaaaaactcattaaataaataaattctatctgaacaactatgaaaagtatgcaaacaaaatcccgatctgtctagtcagcattgtgaatctagactccataaaatccaagttcatccgcatgaattttccttagacatcacgaatattagaaaaactataaatgacgatttttttttaacttatatagaaagtgtccagataaaatccttatctatctagtcagcatcataaatttacactccatcaaagtcaagttcatccccacaaatactccttggacatcatgaatcctacctagagattaatgtagatcatattagaaaataaataaaattaattataacgaaataccacatatagatatggaataattacataaggcaccattttttgtaa

SEQ ID NO: 170678 - DNA, 609 bp, Cannabis sativa
agttacgacattacttccaggcacacccaatataatggtgcgtttactaaactatcattgcaatcagaataatcaatgggagaaatgtattagcttataatagaaaatattcggaaacaatattttattatgatgtttactaaactgtccggaaagaaaactagaatcatattattttgtttacataactaggaaaggtaatcagaatgctttaatttgacaaaattcccattattagaacatgtaattattttttgtttatagatttttgaggggcatatttgtctttttcctttttaattaataaaattaaaattaaaataaattaaggaaagggaaaggcattccctataaaaatggggggagaacctttccctttgttttctccctaatttgtgcgggtcccactagtttctccctttccaaattttcgtaaagaattgtatgggaatcaataccataccattcattcccattccctttaagtcaacatgccataaatgttgactgatcaacccttgagacaagttttatcaaaaccagactcttctggaagattgataaaatggtcaattgaactggggtagttcgacataacatatcaccctc

SEQ ID NO: 170679 - DNA, 648 bp, Cannabis sativa
actaaattaaatttgtattcttattattatgttattttttaataaaataaaatttctctttattatattataacacaaataatacatattggactatttatttatttattattattatagtttttatgtaaaaagtttgggtttagttgtactattaattaaggtggtgtgtagagaagtaaattatggatgctatagtaggttacaagttatatttttctttacccatttttactttaccatcaaactattttagtgagtagatgttttttggtgctctaatcgatgaatatgctttattgatgaatatatggtttagaaaagaaatgtagcaaataaaaagggtctttcaaattttgcttatttataattatgatcacctgaaacacacaatttctcagattggctcttccctctatactatatataaatatgtgtcttaaataagaaaaaaaaaatagaccttttgtcttaagttgctaaccaataagtataaccaactttataaaacttatatatcttacatatataaatggaatatataacccacttgttcatattaccaagtctatacttctaataattttgttttgaaaagctagggttttatgattatgatcaataattctcaacaaataatttcaaata

SEQ ID NO: 170680 - DNA, 691 bp, Cannabis sativa
ctgccggtagaagtactagaagctttgagaattaaagaagctcttagttggataaaaagtaatcagtgacaacaagtaaccatagagacgaacaacatggtttcagttcaagctctctgaagttctttttctatatcctctgtttttggattaattataaaggattgtaaagagttgcttacttatttggaaaatgttcaattattttttattaaatgatttgcaaatcgagtagttcattgtgaggctagaagctctcaattcacatctgatcttagtattttttagtttaatgcttcgactgaactcttatctttattgtacccaacatattgattactgttatgatgattttctttcaaaaaaaaaaaagttgagcatggcgccttgcgattaattaatgatattctatagaaattattacattcaattatatgacacccgatacttaattacactaatagcaatatgcaatggcgtatccagaatttaaaataaaggggcataatttttttttttgtaaggctggaacaaaagtaaatttaaaaaggaaaaaaaaagttctctgtgtgggaattgaaccttatctctgttatatgcaatctagcgtaatcattacactaaacataatattatatttataaatattattttttattacaaatatatgtcgtaactaattaaaatacat

SEQ ID NO: 170681 - DNA, 710 bp, Cannabis sativa
taagatagggtttcggctgggaaaacaaatgactttacaacagtggatgatacgggaggaatgctatgatttacaaatcgtgttggtgcgcctatggatgatgatattaaaagagagactatgaataagtctcatacgactccttactcagttcatccattgtcaacaaagatgtatcaagacctcaaggccatgttctggtggccaggcatgaaaaatgatattgccgtatgttgctaagtgtttaacttgtcagcaagtgaaggctgaacatcaaaggcccgcagggttgctgcagccactgaatattctggattggaaatgggaagacattgttatggtcttcgtggtgggattgtctagaaccacgggacagtacgactctgtgtgcgtcatagttgataggtttactaagtcaacgcactttttacctgttcgaacaaacttctccattgatcagtatgctgagttatacgttagagaaatttttcatcttcatgatgtcccaaagtccattgttttggatagagatccaaaattcacatcaagattctaggagagtctacatcgagctatgggtactcagttgaaatttagcacaacatttcatcctcagacagatggacagtcccagaggaccattcaaatcttacaagacatgcttcgggcatgtgtgcttgactttgaaggatcatgggtaaagtaccttc

SEQ ID NO: 170682 - DNA, 1024 bp, Cannabis sativa
aaggagggtttgagacgtattgtacccccagtattctttcttgcacgaaaaacaatgggcatgcgagagtcatgttgaatttttatgtaacaagcttcggcttttgggaaggaaggctgaagttgtataaaaattcaaacttagacattgcttgaaaggatcaaagggaaagcatcacaaagggttggatagacttcaagcagtccttccaatctaaggaggagggtttaagacgaaccgtacccccagtgagctttcttgcacgaaaaacaatgtgcatgtgagagtcatgttgaatttttatataacaagctttggcttttgggaaggaaagatgaagttgtataaaaattgaagcttagacttcgcttgaaaggatcaaagcgaaagcatcatggagggtaggataaactttaagcattccttccaatctaggaaggagggttgaagaagtaccgtacccctagtgatctttcttgaacaaaaaacagcatgcatgtgagagtcatgttgaattttgttataacaagcttcggctttctggaaggaaggctgaagttgtatgaaaattcaagcttagaatttgcttgaaaggattaaaaggaaagcatcacgaaaggtaggatagacttcaagcagtccttccgatctaggaaggaaggttgaagacgtaccgtacccctagtgatctttcttgcacaaaaaacaacgtgcattgaagagtcacgtttaatttttatgtaacaagcttcagctttcgggaagaaggctaaagttgtataaaaattcaagcttagacttcgcttgaaggatcaaagggaaagcatcacggagggtaggataatcttcaagtagtccttccaatccaggaaggatggttgaagacgtactgtacccccagtgatctttcttggacgaaaaacaacgatcatgcgagagtgatattgaatttttatgtaccaagcatcagcttcagggaaggtattgggttttgtgcccgaaataaaaacccatttcaatataa

SEQ ID NO: 170683 - DNA, 522 bp, Cannabis sativa
ggtgcagtaggcaaaaaaccagtagaaatacctgactgctgttgtgtcggagtcatatcagcagtggacaaatcagcaggcaaaatctcagtatgttgctgctgagtatgcatatgattatgtgaaaatagactgggatgttggttctggtatgcagcatgattatgacaatgagagaaaaaattctcataagcagcaggtatgccacctgttttaacatatggaaaaatctgctcatagaaaaacacatctcttgacataaaaatctggtttgtgtttaaatcaagaagcttgtaagccttcataccagtaggatacccaagaaaaatacatgggacagatctaggagtgaacttagacctagattgacttaaggttgaggcataagcaagacaaccgaaagcttttaagtgctcataagcaggtgacttagagtaaagaatgtggaaaggggatttgttctttagattgggtgttggtgtcctattaatgaggtaggcagcagttgacacacactctccc

SEQ ID NO: 170684 - DNA, 502 bp, Cannabis sativa
tctgttggaatttcagaaaatgtttgaacattattaataaattacgtacagtacgattttctttttctctcattaaaaacttttgaaaaaatgtatttcattattactttactgtgtatgtcatttttgacatcgattcaaattttacttggtgagaaagtgggtcctacattaataagtttaggttggtggcaatcaaagcatgcaaaacacatggtgagtaatatgtggtccacggtccaccatgatttttcagtagtaaataaatattcctgaatggtcccatcaagattttattatttatgaatataattatcttatttttagttggtcccacgtctaacatgagaattggtgtgagtttttttttagggtaaatactattttggatcctttcctttataaaagttaccaattggatcttgtgttttgttaaatgacaaaatggaccttatattttctaaaatagtacaaataagaccttgaattgattttttgtcaa

SEQ ID NO: 170685 - DNA, 673 bp, Cannabis sativa
tgtttttatttattggtaagtgggaattggttttttttttaagtctagttttgtcaataactgatttcttgttatgtaaaatttattcttttttatgtacctttttgaaataatctatgatattaagaaaaaatatttaaaacaatgattatttaaacagataaaaattcaaaactcaaaatgttgtagtgtgtatcttattgaaaaaattatattctgttcaactttactcaatgctgagaaaccagtttttataaaactgtcaatcactatctatttatcttgtagctgatcaatccttcttctttgactccttgcttttgtcattctattttggagatttggaaagctgtggattattgcagttcttcgattgtgaccaacttttccgcaccttgtgcatttcaagacaacttttggttctccttttgatcttattcttttctttctaggccttccaactggttttcttgattttggtggccacactattcgtttcatgctctcaggtatagtccattctctttcatttggtagaggatgtacagttctttcatatgttgccttcattgttactcttttgtggtattcgacaacatagtcataagcttttaatcctctttttgcaaatacagctattgcatgtgagcatggtgttggaaatattttacca

SEQ ID NO: 170686 - DNA, 753 bp, Cannabis sativa
  modified_base (540)..(542): a, c, t, g, unknown or other
tgaaagacaggcattatgcagttcgaaaagcaagaattatgagcgacgaaatagcacggatcgttacaaagaaaaacacagagtttctaaagttagggtttcctacatatcatctacagtgaagttaaaagtgcattcagaaagtaaatgtgcaaagtaaatgtaaaagaaatcgagaacttactcaaggattgaacgtctcgattcaggttacgccaagccaaacgagcagtttctatgaaaacacttcagcaaacttgaagctaaaaagctctctttttgctctgaacttacttagcaaggaaggttggtgaaaatgggtttgtgaacaagtgctcactggtatttataggtgaacaacaaaaaggggtaatcattttaaaagaacatcagacgtcgcggttccccccaaaagcgaatatgggaaaccaaaagcaatcaagtgcaaccgtcaaacgtggtgagagaaaatcggatttcgaaacagtacttgtgtcagagcatttattagccgaaaatcaaagggacgcccagtcagcnnnacatcgagtcgcgaacagacgcgtctgacaagtgtcaccaattcaaatacaaagacaactcggaggaagtctacacgcaacttcgaaagtcccgtacaaacttggggttaaatgttatcccaatttttgcactctgacatggcatcatgcgatggtgacacgtagtgtaaagccctaaataattaggcacgctacccaaaatacttatgaa

SEQ ID NO: 170687 - DNA, 1279 bp, Cannabis sativa
gtcgcggcccgcgccacggcccgtgtggccttactgagatatttgctttgatttttcacataggcgggtcacggcccgtgtctcctctgctccatattccacgtgcttttatcttttttctgggtttgaatttgatatttttccactgggatatcttttacgcgatattctatctttttctattgatattttccaactcttcatctattttaaatctgcaaaattaaaagataaaaagcatgaaaatgctccaaacctgatttaaactaaataaaaaaatatgctaaaattcacctaaatttaatactaaaaataacctaacaaccccaccccattctttgttgggaacttaaggcatgaataaaatattgatgtaacagcctttaagtcatataaagctggtcggcctaacatgacatcaaatgctgatggaatgtccaataccaagaattgtgccattatagttatgctcttcgaacattgcccaacagtgaggggtaggaaaattcgccctaaaggtgggactccttggccgaagaaaccatacacgggctggaggtaggggttaaatctttgagctggagccccattttttaatacgttgtcttgaataagatgttggaagaggctccattgtctatcatggttcgggccaccatcttgttagctatctggacttccacgaccaacgggtcgttgtgcgaaaaactgatattaatagcatcttcatcattgaatgttatggtgggctctcctgcctgtgggatcttcggtttcttttcttcgatggccagaactatttcttcttgctcgtgctgtattgttcgggcatacctttctcgggctttgcctgaatctcctgctatgtacggacccccaataatgacttgcagatgtccatctactggtggtggtagtaaatcttggttgttatcgcccctctgattttgatcagccttgacatacttctgtatgtgcggactattttttcttatcagaaattcaatttcccgcttcaaattgttgcattcattgatgtcatggccgtaatccgcatgaaatcgacaaaacttggtcatgtctttcttgcttacatcttcatgggtgcgggcttcttgtacggggctaatgactgagtagccatgtacacacttttgatatcttctgtcagtacagaaaatgcagtaaacttggtaggattctccctgggagtttgttcggtcttgccagtgaactttccctttttcccatttctttgcgtattattgttggaccattt

SEQ ID NO: 170688 - DNA, 573 bp, Cannabis sativa
acatcattatttaataacgaaatggaattcatatcagatttttaaaattggtaacaatctaccccaaaaatttcgcatgagtggttaccattcaatatcattgtcgacactgcacaatgctctgacaaaaaaaatgccattgtcaacattgcaaaagattcaataaaattcaccgccaagcaaagatcaactattgcaatcgaaatacaacaaagaaaaaaaaaaaaagcaaacactagcacaaaaagtaaattatacatatagacatgtttcaattacactaattatcttgattaattttttaatttaaagttatctcttatgtgaagtaaataagaaactcatgagtattttttttcattttaaaattaactcaaggaaataagaaattcattagtaacttttcatttgaaatttaactcgcataccatttgattcattagataagaaagtaataaaagtactaaagttgagtactgatgaaatgacaccactattttagtatactaaattcaaaacttcatgtattattaaatctaaatgtatatcaaatctaataccctaaataaaaaa

SEQ ID NO: 170689 - DNA, 872 bp, Cannabis sativa
cttgaactgataagtgttgtggtatttataggcataaagatcctaagtcgatggctgcaactgttcagttgtcaagttagttatgacttaacaaacaaaaaaaactccttgtaacaatatttctacgtcagcacaagacaaagtgcttacggatgggacataccactacaacaaaaagggttttttatcccgatttttaagggcattttatcctggttttcgctaaaataaaaaccggaatatatgccagtgggataaaaagtcttataaaaaccgggataaaaagaggccttttatcccggtttttatgtaaacaccgggataaaaggcctctttttatcccggtttttatgtaaaaaccaggattaaatgtcaaaaaataaaataaaaaaaataaaaaaaataatcagacctaaaatcttattatcaatattccaatgtttcacaatatttatacatatatttttcagataaaaaaaatctattactttacaattttttttcgtatataacatatacaaattagtataataaaatccaaaataaatatgactacaataaaaaccacaaacactcaacaaccacgaaccaccgtcgacaatcaccacgaaccgccgtcgacgccacaaactcagaagcactgtggttaacgaactgccacaaacttccaacctccgtccaactaaaaaaaaagagagaatgatagagatccagaatatacgaagaacaaatttatttttccaaaaaaaaaataaagaatggaatggttcttggatatttcggaggatgtggagctcagatctgaaatccgttggtcgtccgtcacgaggaaaaagttgcttggctgctggatgaagatatagaagtgggga

SEQ ID NO: 170690 - DNA, 610 bp, Cannabis sativa
tcggcagtccataatgcgcccgccgagaatgttccatttttagttgaaaaaaaagctccaataacgacgggctacaagtgtactgtcgagattactatctccaaaattttatttttaatatttagactcaatctcgacagccacacgcgggcccgccgagattgagggtccgaatttgcccagttttcttgtagtggctgccatgaccgcggtgagtttttggtattcgtttctcttttagcccgtgctttatcccatggcctttgatctcttgtgcttaagttgttttcttttccagatcgctgcagagaccggtcgcctctcaatgaccctgatagatcatgggtatgtcatgtccgaatttaggggcacggacgaggccatgaaaagtctgagagacttggcggtcgagaggaaagcgttctgggaggaggccaaacagagggaggcacaggcgaaggagaggcaccaggaggagctgaaggttcagggcgaggttgtggccaaggccaagcgcgagttgagagaagctaatgaggttgtggaggagctaactgccaggctaaagtcaatggaggagctgcaacaggcagattttcagtcgacgact

SEQ ID NO: 170691 - DNA, 1044 bp, Cannabis sativa
  modified_base (304)..(313): a, c, t, g, unknown or other
acaagctttcggagcctttgcttttggagcggcgtgcttcttcgccggtgcagaagccttaagcgaggtggatttggcagatgacgtcgtgaatgagcccttgaccttcactagcttttcagcagcaacaaggtgttgttaaaaaaaagttttttttaagttttttttgtggttaatttagagagattatatattatttttgttgaaatacattttattttgatgaatttttcttaatttatggttggtttatatagaggttatggtgttttccgatctagtgtggtggtggtggttatgtatnnnnnnnnnnatttatcgatagattctcgataggctatcgacaagatgttaaaaaaagtttgtttataattttttttgtggttaatttagagagattatatattatttgtgttgaaatacattttattttgatgattttttcttaatgtatggtcggttttatatggtggttatggtgttttccgatctagtatggtggtggtggttatgtatgttctcgattatttatcgatagattctcgataggttatcgacaagatgttaaaaaaagtttatttttagttttttttttatagttagatcgattatatcttatttgtgttgaaatacatttcattttgatgataatttcttttaatttatgtatgcttgattatcgacatattgtcgatggattctcgataggttctcgatagtattaattagtcttttagttgttatgtttggtgaatgtatactgattatcgatgggttctcgacaagttctcgataggatttagtggttatagtattttctgatctagtgtggtggtagtggttctgtatgttctcgattatttatcgaaatattatcggtaggttattgacaaggtgttgtttaaaaaaagtttatttttagtttttttttgtggtcaattagagagattatatattattagtgttgaaaatgcactttattttgatgaatttttcttaatttatggtcggttttatatggtagttatggtgttttctgatcta

SEQ ID NO: 170692 - DNA, 549 bp, Cannabis sativa
cgaatacttaaagaaaatagcgagtatataagtagcaagaaaaattaattatataaatatatttgttcagagttcagtctgcgtagtctattttgagagattcccatgcaaaatcttattttattcatgtgtatttttttatagtgtatatttctagtttctttcagtcaattttttttaattgtatatttggtgttttatgtagtttagatacatattatttagtttaattgtttgacatattttattaaaatataaagataagattttttttttttaatttacacaatgttcagtagtagatctttatatgttaattatatattaccatttctactattaatgtaattatttatttaacttttaaaaaataaattatcattttaactgtcactaactctaaaagaaaaaaagataagaaaaaagttgaaagtatatagttataacaacaaatttcacaaaaaaaaaatgtagtagtacaaaaagataaatcaagttatcaaaactaagtgttaagaaaaaatttcacattcaaaatattaaaaatga

SEQ ID NO: 170693 - DNA, 700 bp, Cannabis sativa
attaaatccttaacacaacaagattgaggaaagaattcaaatgagacattgttatctgtagcaaacttagaaacactcattagattctttgtaattaaaggcacatgaagaagattatgtaatgctaaggattgactatgaatgggagaaagaaaggttgtatgaccaacagttttgataggcaaacctgagccatctcccatgagtatttgttgatcaccactgagatcagtggagttggtgagattctgagcatgaggagttaagtggtgtgtggctccagaatcgggataccatgcattgtctccaacaacatcaggataggcatatagagattgagcttctgcaaggttagcactgccagtaaaggtattgaaagattcagggccttgaaaggatttatcaaacctgtaaaaacactgtttgacagtgtgtcccaacttgtggcaaagttggcattgtctttctgtccccatgcagtgtactgtcctcgaccatgtgtatgaccacctcgagaaattgagggattgccacgcccagatggattaccacgaccttgagttgcagaagcaaaacctggtggtggatgttgcatcgaatattgtccagaattgaaaggagtgcctctggacaatggtgagacattagagtgagtagatgaaggataataaggggaagaaaaggtaccacgtccaccagt

SEQ ID NO: 170694 - DNA, 761 bp, Cannabis sativa
aacgagaattagacgcttttcatacgggtagacggtcgaagagagaacgaccaccatttagtgctcatttgggcatacagcaaagagaaaacatcgtggtggttttgggtaaacaacaatgcaccattaacgtcagagaaagactcgccggaggaaagagggagaggacaaagatgaagcgagagtgagaaggagaatcaaaaactaatcgtttttttctttattacttatttatttatttaaaatctatcttttttttttgaaaaaaatatcatttttttctatttattaaataaatattaatatgaggtggactaataataagctaacacatgtcaacactactatgtccagtcaccacttagcatacaacgaaagtagaaaaagtgtaacgtttggtatttaattcgtcaaaaaaaaatatggtaattaagtgtatataatcgaaaatataaagtatttatgccgcaaatattcctaataataataattctaaaggtgacatgacaccttaaaaaaatattcaaaccactttattttttttcgttttcttattctacattttctaatatataaatattaataatttaaattaattataataatataaattaaaaatatttataataaataattcacattctaaaataaaatatatctattctatataaagtgtgcatatataactgaattcttagtttatgagaaattcgtgggttattttttatttttatttgataaaataataaaataataataaa

SEQ ID NO: 170695 - DNA, 855 bp, Cannabis sativa
ttgaagaagaagattaagattgattttgaggacatagctgaggaagttaattactggcaaccttctttagtttgctatgtaattggagcaaatcctcctataagtgaaggctttgtgcgaagattgtggaaggaagaagtggtaaaagttggcttacttgctaagggaatttttatcattagattccagagtatggagcaaagagataaggttatgcagcagggatatgttttctttgataggaaaccaatggtgatgaaaccttggaatccaatagatgatttcactaaagaggaagtcacaaatgtaccaacctggatacaattgaaggggctggattttaagtactggggtgaatcatcgttgctcaagatagtgagtcaactgggagagcctttataggttgataatgtcaccaagaacagagatcgctgcaatacccccgagttctaattcaggttagtttggctcaaaactttcttgaaaaaattgatttcatagatgaatttaatcatgaggtggaattagaagtgaagcaatgaatggattccacttgtgtgttataattgttctggtattgggcatagtacaaaggactgcagaaagaaagaagagaaacaggagcaaggaaaacaagtttgggtgccaaaaaagaaaaaaccagaaaaggagcagcaggttgatgaggaggggttccaaagagtaaataatggcaagaaagtgatggtgaacaatgaaacagaagagactattgtgaagaacatgtttggaactctagaggatgaaggggcaatcaagattaacataggaggggagggagatccctcaacctcaaatggatagattcttatgttg

SEQ ID NO: 170696 - DNA, 531 bp, Cannabis sativa
  modified_base (506)..(506): a, c, t, g, unknown or other
actcaataaaagaaaataattaatgcaaaggtagggcatacattgtaatttgattagaaaataatgtattttctcaattgttacatcagagcattttcattggagtaatgtagtgtatatgtattttttagttcatattcataaaatttaactcgaatgatagtgtataatgtggtttaaatttgacacatgttaaaaattgtgtcaaatttgacacaaaatataacatggactaaatttttctctaccaaattttacatcacaataaatattacttttttatttattttttagccactcattaatataattaataacttatatatatatatttttatatatttagtatggtttttatatactttcaataaaaaaaattaatatttttattgactttttttacacatttctattaaaataaagtttatattacacttaggaggcttttagttgggaggaatgaaaatataggaataggaatgggaataggaatgggaataggaatngaatggaataaaatttaaaatggat

SEQ ID NO: 170697 - DNA, 565 bp, Cannabis sativa
aatatttagggtttaatcccaaattttccttatacaattaaacatagtttataataagttaccaaataaaaaaaattcttttaattgcccacttgtcagctagcatgaaagaagaccttgacttattaagtggcttatatagactcttaaatgtaaaccacataaaattgtttgttgacaaacactattatttcttttgtttaattattttaaattatttgtcagttccttacaaaaaaaattatttgtcagtttttcctctaatcatcctgaacacataggatctgattttatgtaatataaaagagaataatcaacactgggcaaaaaaaaaaccactaaaacaataaatatgtatacttctaaattctaataaccttaaaatataggtaaaaaaaaaccccttaaaataggtaattagacgaagtcggcaaaataacaacttaattacgacacttcacatatattaaattatgttaaaatttctctttttttttttgaaacaaagattgcaactttcattaaagcaaatcagctaacaaaatagcttccaaaccagaaggga

SEQ ID NO: 170698 - DNA, 766 bp, Cannabis sativa
atgtaattaattatttaaaaaaatgttatatattaaagatgtcgataaatattgtaataataagatgttcaataacttctttattttatcctttaaaataacttattaaaatttcactttttttattttaccttacactttttctgaaaataaggcgtttcatagataaagaaaattagacctcgcggtcattataaatgatagaaacaggtatagaggattactccataacacctgtaaaattttgggtgaaagcccacctagccacattatgcgcagcaaaattacaaatacaggacataaaagaaaagttacaagaaagaaaataattagagagttgattacatagagatacataattatcaatattccaaaaatagtgcattcccttcagcgctttgataaccacttctgaatcactctcctctaagatatagtcatgcttcctgagcctcgccgtgtgcaacgcaagatgacacgtcgccgcctcaccaattagagggtcactgaagttaagacaggacgtagcatcccacacaaccgcaccattgtgatccctggcaagggccacaatccacatggtttctccaccaactttaacatcacagttgattttgatccagtcctccagcggaggcgtccaagtaggcgtaaccataggaagcaccggggggaaaaggatgaaggcataatctgtataacaatgggagatagagttaataacattcaaaatattatcatgggtcgagttatgtatcttatcatt

SEQ ID NO: 170699 - DNA, 502 bp, Cannabis sativa
actctcacttctgttctctatgtggctaaactggattgtaatttactgtcaattagtaaatttactcatgacctaaattgtgtgactaagttttactcaaatttgtatgtgtttcaggaattggattcggggaagatgattggcagtgctaagatgtgttatgggctctacatcctacaagattacactccttccgttaggataactccgaaattcagtttgttttctttaaataatcaatctattccaaataaaaataatgatattatgttgtggcactatcgtcttggtcatccaaattttctatatttgtcaaaaatgtttccatctttatttactaataaaaatctgaaacttttttgttgtgaaatttgtcaatttgcgaaacacactcgaagtacctattctagaataccattaaatcttccaaacctttttcattgatccatagtgatctgtggggtcgctcacgcgtaaacaatataactggacatagatggtt

SEQ ID NO: 170700 - DNA, 960 bp, Cannabis sativa
atggtatgcattgcataccatccgggcgcgtccaagggggagccggaccgaggctggccgcacaagcatcatacgtagagggtttccaggcgcggacgtgggttcagagaagaaccctatctgagaaaccttagacaccctgtgtccgaatgcgcgtgacaccgagtgtcactcgggtgtacgggcacaggagatgcaatcccctacccgtttttttttcaaatttcaaaaactcacaactaattcaatttaattgaatttagttctataaaaaaataaattgcttaattttttccatgttatctacataaaataattccagatcgtgaatctaattattttatataaaaatttcgtaaacatcaatcaatcatcaaataaatacatagatcaacatgaatcacatccacatcacacattcattgttttaaatccatatttctttaaagtaaatcattgcaatggttctgaggctagttgttggattatatgttaccagaatctagattaactaacaagtatattgattaacactctaaatatgaattctctaaaataatgtaattagacacatgtaaagtttaagtaaagtttaagtgaccttacattggtggcagtgtaataatatgtctcctcctattcagatctctaacccttgttcctttctgtcgcaaagtattatcaagatctgagtccgattctccttcaagtgttggattcttcactgtcttacacactatgattaagtacttgacttgctatgggtgtgcatatactctttcagtataggctcgaaaaatatgaagagggagagaggatttcaaaattttgtgaaggaaaggaggctctcaaaaactctagttatctgacagaatgaaatttaggttaaatgcattggatgataatgagagcatcctattccttttacactatttcacctatggttaggatttaaattat

SEQ ID NO: 170701 - DNA, 1040 bp, Cannabis sativa
taattttagtgtttgtaaattgtataatgtagtcacagattcaggtagcatcacaatttcagtctcagaaagatctaaatagtgaagatgttttaggtcaccaattgaatcagataattcagccatatgaagaccacgaaaagatagaactctcaaatatttcaacatagatagtagattttgcactacttccttagaaataatgatttcaaaatatcttgaacctaatagtgttaaaaaggttcgtaagtttgtagattcaaaatcatagctaaataccttgttatcagtagaatgttccattacacatccgaggtgacgtgtcttcttctcaaatttaacaatgtcttcattgtgctctaataaagaactatactttccagaaacaattttagccaaatccacaagaagatcatgcatcacaaaataagatatgcctccccaatccctggattttacaaaaaatgacatagatactaaatcatcaaagtactcactaccaacgtcttccattcttcgattccccttggagagcatgacaagattttctgccatccataataagaccaactcttgtctttgaaattgatagccttttgggaatattgaacaaaaagcgaaacatcttttcaagtgtagaggaagatagtagtagctcacttctaaagcagcaggaaggccatcactcctttcatgcgtcaaatcccaaatattattccttgctatttgttcccatctccatacatccaaagttgatctcaagatgcctcctagaactttagcagctaaaggtaaaccattacatttgttggaaatttctctgccgatcctttctaaacttgggttctcagtaaaatttctagagttgtcaccagaagcatgcttcacaaatagtacccaacactcatcttttgataattttctaagatgatgtgtatcaacagttcgaatgacatctgcaacttttccatttcttgttgttactattattttgctgccttttgccccaccattgaaaggcttcatcacttctgtccact

SEQ ID NO: 170702 - DNA, 651 bp, Cannabis sativa
  modified_base (578)..(580): a, c, t, g, unknown or other
gacatcaaatatagcggagtctatcaatacagcaaataaagcagcaaggaatttaccaataaccttaatgttggaatgcatgagaagcgttgtacaaaaataggtttggactaatggcaatgaggcgaatgaaactttacagagatatcatcagaagcagaagctgtactgagagagaactatctaaaatctacgaaatttgaggtatcttatttgcttttaattgattaatactatattttgaaaattgaaataaagtaacctgatacattattatactgaaaaaaatttgtaccaggtgacattattcgtaatacctttttttttattgttattttacatatgtttggtaggtgagacaatgcaatactattttttcagaagttattgaagaacgaggaacatatataatcaatattcaagagaaaacatgcacatgtagaaggtttcaagaagatgaagtactatgttcacatggacttgctgtcattgcaaaaaaaaagctaaattgttatgacttttgttctccttactacaaaactaaaacaatgaaagcaacttatgcagaaacagtttannntttgccacatgaggatgaatggagtctaccagaagaattggacatacttgtcctacctccaaaaggaaaaa

SEQ ID NO: 170703 - DNA, 966 bp, Cannabis sativa
aattagttatactaataaaaaaaaatgtggaaaaattgaatgatactattttgtacaatttttgaaaatatagtgtccaatttataatttaaaagttttaaccctcataatagtaagtatcaccatttatttactccacaatttacttaattatagcaattaacgtaaataaaaaaattaaaaaaaatgctaaaaggtatttgtggttagggttgattcttttctaatttagatcttaggtaaaaataaaaataagagtaaaaaaaaagtgaaattattaagatttgaactctcaactttttagtggttaaactaatcaaattatcactaagtttcaacacatatttaatattataagtattttaatttattttattactaactatattacaattttttttttcgaaatggggcctaagcggtgggggcttaaggcggacgtctctttcgtcccacctcaaggttggctctatttgtggtgcttagcactcactcttcttattgccattttgctgttaatgtaattaagtatcgaatttcatataatttaatataataatcacaagacaccacttttaaaatatgttaggttggtagctaatatgaatgctcataaatatattatcttaattttttttattaaaataaaaaataaaaaattgtggggttaaggaaaaaagtgagtagagtgtcttgacgtgttttttaggcttgttgtgtcgtatttttcaaactaatctatatgtatttatatatcgtgttttttatgcttctcgtgtcaatttgtagtatcatgtcgtattgtgtcctaatctatattattttgtacttattggtactcgtgccttcgagactcgtataacaaaaattgatccatatttacaatactacttataaatatagggatatgattttgtcccgttattgtactttcacagattgtaatccgtgatgtacgacaaccgt

SEQ ID NO: 170704 - DNA, 1429 bp, Cannabis sativa
aaaaaatagaggaagctaaaattttggccatatatttttgctaaagataacaaaaaattaaaattctattcagaccctttatattttaaaactcttaactgtaatattcgtttggaccatttattattaaaaattaagatttttaaaaattaaaaaataagaatatatatcagcaatggagcttagtctacccaactcaactatttttaactataaatttattcgaactatctttaatgaagtcagttatagaccaatgcctaattccttttttttctagtagtgggagaaaaaataaaatagataaaaataataattttttgtttaataatattcatctataagatcatgatagataaaaaatgatgaatgagagtggaaaaaaaatagcgtaaaagtattaattgatgaaattttttttggccgaatatattcacaattagtagttatacccatggcatagatatttattttaaaattatatatgaaattttttttcaataacttaatatttataacatttaatataataaaaaatagaaaataattaaaaaaatagagaaaatagataaataggatttaacaatttgtctaccacgtctagtaataaattatacaatttatttatttaaaaaaaaaaataaatgaaacttaaattcaaaatattcattaaaaaaatgaagagaatagataaattattctctttttttagttaataaaaataaatttgaaaaattaggagagaaaaaaaatggagttctttggacatattttagatttttataaaaaaaatgatgggagttagctttagttgtaaataaatactcataattatgttcttttttaaaaaataaataataaataattaaacatcatatgtttaaactcattcatttccattaaaaaaatttatctctatttaagaatgaacattgaaaaattagaatgaaatttgtgtacatgtaacatataaaatggaaaaataattctgtttttattatttgagtctgctattaggaaactatccttgcaccaattaatttttaaattcatattagtattatacaatattataataatataaaatttatgatagtagataataaaaaacaattaagatttaaaaaacagaaaagatatctcattagtaaatcaaaatgcaccaaactccttaatttttctttaatttgcaacttgtagaaaaaaaaaaaaaaaacaaaaactaatgtatcttagtttgatacaaatataaaagaattaataattttttaagaaatggggttagaattataaggagttcattcattaattaattttaatgcatcgtatttatgtgttgaagctaatttaatttttccattagtcttatcttttgacatggttctttagtcttgtcttttgacatggttttttagtcttttccttttag

SEQ ID NO: 170705 - DNA, 1075 bp, Cannabis sativa
cttgttaaaaattcttccttaaatacaacaatcagataactatgccccttctattaaattatatttcttttaccgttaaaaataatatttttactcactcaattttaaccaatataaaattttattcccttttattaaaaatatattgactttgaaatttggactgaacttctaatccacacccgcttgatagattggcgagaaaggaaaagtagttaagtaattataagtgcgacacaataaattcatagtagttcaccctgtatcgcgacaataatggagctacgtctactttgattttttatttctcatgagatggtaattaccaaaaaaaggctaagtgtcagaagctccaatttctagggagagaaactctgacctagtaggtagttttttaaacttaaaaaatgagctaaaggagctctccttttataggtgaaagaggcccacaaaaatgggaaaaaaatacaaattgtatgtttttggttgttgatgatgatctaacagcgaaaattagctcttagtagtgatgggtattttttgaagcccaacaggtcctactacgggtaacttgaagcttattttcgtaactctcttggagtgaaatttgacgatgatatattcagatttacgattgaaatgtgggacatgacttaatatagcattgaattagcttcaaactgcaagttgaatcgcattaatcagatcaatattgagtgagttatggctattttattgaagacagttcatgacccagcaccaaggttgacatccagcgcccaagttgacatcctagtgcccatgttgacatatgacgtcaacctggatgtttggtaagtataaaaatgtccaagggatatactttaagatgcctaagtgatattttaacatcacttagtctgttttagtgttgtagcgaatctgatcaccaattctcaaagatgttgttgttctgcagatatgagaaactcgaaactcttcatttccaagtgagtttcccatgttggaaatgagaaatacaaagttgtgaatttaacttctcttacttcatgtgtaatactcaatttatatataa

SEQ ID NO: 170706 - DNA, 662 bp, Cannabis sativa
ttgtgtgaatattggacatttgataacattctagaacgtcaaaatcactccattattcgaatgcacaaagagattttgagttgaattcatcatctgtggagaagatcgactcttttgttggatatgtgagataagcttgactgtttttttttctttagggcactattttgcataatgccccttttttccacacacataacatcgatcatattttttacgaaagttgcgctttctttgcaaaaattttattttgcgtcctttgtgctttgagaacttgaacgtcttgaacttgtttttgttctttgggtcggtttttgctagaacacaaagatttcgaagggcatttgatgagtaaatcttgtctgctacaaactttgcctagttttttggattgcttcataaattcttggacaaatttcttctgggagaacattttttcaagggcctttaagactagttggaaaatttctccaattagagcatttgttacgctttttcccgatccagagagtagcctaaaagtttatttaccaagtggctctagaatagatgaaaggaaggcttgctttagatttgtatcatcaatgccacttatttggcagaatcgtttagtcattcttttgtaatgcttttccaagtctcttttgtccattgaacaacac

SEQ ID NO: 170707 - DNA, 2242 bp, Cannabis sativa
  modified_base (260)..(266): a, c, t, g, unknown or other
  modified_base (1089)..(1094): a, c, t, g, unknown or other
  modified_base (1267)..(1271): a, c, t, g, unknown or other
  modified_base (1777)..(1784): a, c, t, g, unknown or other
ccagagtgtttcacctctaggacataattgcctacccctcactgttgggcaagctctgaagagcataactataatggcacaatttttgaaattggacgttccattaccatttaatgtcatgttaggccgaccagctttatatgacctaaaagctgttacatcgatacttcattcatggcttaagtttccaacaaaaattgggtagggtgcctgaaaggaaatcagcaagttgctcgggaatgttacaaccttgccctaannnnnnntaaaaaggaagtatcctctagccagagttcaggccagggaaaaaacatcgccaaatagggaaccgcccaaggcggggatgaagatgtggattcctgacttggggagccaaacaccaatgttggtctagtggaagaactagaagaaatcgaaattgacccaaatgttccaaccagaaagcttaagattggaaaaggtttgttgctcgaagtaaaatcagcattgatcaaatttttcagagcaaacctagaaattttggcatggtcacatgaggatatggtcgaaatcgatccttctataatttcacatgtcttgaatattgacccaaatttctagcctgttcaacaaaaacaaagactgttggacaaggagggagccctagcgctaaaagaagaagtagataagctatgcaactataacttcataattgtaattgaagctgaagctttctacccagcctaggcctaggttgctaatctcgtactgttacccaagccaaataagaaatggtgagtatctattgatttcaccgacctcaacaaggcgtgctcaaaagactgttttccacttcgaagaatagttcagcttgtggacgcaatagcagggcaaaaaatattaagcttcatggacgcctattcgagatacaatcaaatcaagatgcatccaccagaccaacatacaagtttctgaacagttatgggtctgtattgctataaggtcatgccatttggtctcaaaaatgctggagctacataccaaagattggtaaacaagatgtccaaagaccagatcggacaaaacatggaagtgtacgtggatgacatnnnnnncaaatccaggaaggctggggggcatatagatgatctggacgaatgcttcaaagtcctccatgaagtacaatatgaaactcaatcccctaaagtgctctttcggagtgagctcgggtaagtttctaggcttcatcatcaatgcctaaggaattgaagccaatccagagaagatnnnnnccctcctggatatgaaatcgccaataaaaaccaaggaagttcaaagtttgacttgtcgaattgtcgcactcagcagatttgtttcaaaatcaacaaacaagtgtgttccgttcttgaacattctacgaggaaataaacaatttgagtggatggaggaatgtgaaaaggcttttcaagagctaaaaatgcaacacgcaaaacctcctgtgctctccaaacctctggacggagaagaacgtgggatatacctggctgacacggaacatgctgtaagtgtcgtactaatcagagaggagaataatatccaacacccggtctattacataagtaaaagactcattgaggttgaaggtcggtatccattgatagaaaagctcacctattgcctaattctagcaacaagaaagataagaccttactttcaagctcatcctgttcgggtatacactgaccaactgttacgccaaatattgcaaagaccagacgcctctggacggttgctcaannnnnnnntggagttgggccaatatgagattatcttccaaccccgaacaacaattaagggtcaagaatagcagatttgtagttgaatgtacaggtaaagaagagtgtgttttaaaaaacaactcagagcgagtacaaataccacaaccgagtaacagtgaagacaagctgacttagaagctacacgtggacgggtcggctacagatcaactattcggtgcagggatcgcccttgtcacacctggggggcaacacctgcacgctgtagtcatatttggatttaaggcatccaataatgagtctgaatatgaagctatgatctctggcctaaaactagcccgggagatgaaggccgagcacattgagatctgtagcaattcagagctggtggtaaatcatgtatctggagagtacaaggctcgaggggaaaagatgatagcaaatctgaacaaaatacatgatctgct

SEQ ID NO: 170708 - DNA, 926 bp, Cannabis sativa
ttagtgcaaaatagattcactattttggtaaatatatgactttgaggcccactgtaagattttagctcatcgggtgaaggtgtccatacaaagggggccagcgcaatctgaataggtgtcacgcgtgggtactgctaaagtagacaagaatgtcatatgggcatcattggacaaagagggtatatcccttttagggtgtattttcggtccaacccttgagagttgcagcagccattttatgaagaaataaacctcaaaaataagagagaaaaacagagagagagttagagttataagtgttgtaatatcaaagcctaaaacagagagaaaagagagaaaaacttgaaattacctgctgacttttgtggctaggattctcaaagaaccttgtaaccgattttgacatggatagtgaagaatcaagcctctttgaaggaagcttgacggagacgtatctctgattttaaataattaaattgccaaaaaaaaaaagacctgacaatctccccctttggtactttaaataattaaaatatattttaatttttaaaaacttgcaaaacaaaattagcaaaatcataaaaataaactcctcttgagaagcacaccattaacacaaactacaatggtaattttaacaaaattttaacacataaaccaaactcataagtactactcccttttttgattatctcaagggccaaaactcaaagatgaacttaaagtatccactaatcttcaaagaaaccgctcttcatggaaaaaacacttccccctttttttgaatttttaatttaataaggtcacacgaaaataagatggaaaaataatagaaaaagaaataaatgagcaattaaacaagatttttgacaacatttgaaataagtgctgaaatggaaaaatttaaagtcaataatcacataaaa

SEQ ID NO: 170709 - DNA, 709 bp, Cannabis sativa
gataatgaggcacaaatatatggatcagggccggcctgacttttagtgggccatagaaaaaaaaattattttaggcccttatttagaaaaaatatggtatttttcaaaattagtaaaaaaaatagtataattttaaaaggtaatattttttttaggcccttggaataggtgggccctaagcacaggcctagcccgcctatgcccagaaccggggtaacactatttatgttctttcaagtagggacatcaatattttttacattttaaaaaaatttaattcaatcatcttatttatatgatcgtttatattataattataataagtattttaattaatttttaattttttttaaataatttataatgtcaaaaatagagtttataaatttagttgtgtgcatgctcgtttctcattgtatgcatgcaactgaatttttgaattttattttcaaaattataaattattttaaattttttaaaataagtgaaatatactataattacgatatataggcgaaaatttcagttataatttttataagctattaaaatggagacatttctaccaataagaataaaaataatgaacctattatataattttattttatttattattgtgtatgcatatatttatgtgtatatttatagagtgtgtctttaatgtggtatactatagtcaggcccagccctaggcataggcgggcta

SEQ ID NO: 170710 - DNA, 610 bp, Cannabis sativa
gactgatatttctatggattttgttttaggtttgcctaggactaagaggggtagagattctatttttgtggtggtagatagattttccaagatggcacacttcattgcatgtcataaaaccgatgatgcatcacatattgctgatttcttcttcaaagaaattgttaggttacatggcatgcctaggaccattgtttctgatagggatgcaaagtttttgagttacttttggaagactttatggggaaaattgggaaccaagttgttattttctactacttgtcatccacaaacggatggtcaaactgaagtagtgaatagaactttgtcttctttattacgtgctatcattaaaaagaacttgaaaacatgggaagattgtttgccacatgttgaatttgcttacaatagaagtatacattctgcatctaagttttcaccatttgaaattgcttatggctttaacccattgtcacctctggatttaacttctttacctttgagtgaacgtgtgaacttagatggcaaaaagaaggcagaatttgtaaagatgattcatgaaaaggcacgactgaacattgaacggaggactaaacaatatgtccatcaa

SEQ ID NO: 170711 - DNA, 852 bp, Cannabis sativa
ctctctctctctctctcttatcacctctggctccacctcgaatccatctgaagaatagaagagaaaagagagagagagagatcgcggtggttttgattgagagctccaatggcggaggtcatgctcaacgatacttctaacgcccccatcaacgctcactccaagcccaaacccgatctaatgcctcctccccaagaccgtcctgtttgagtctacgccgatgggatctacgatctctttcatttgggccacgctcgctcccttgaacaagccaagaaattgtacttctctctcttcttcttttacacaatttttttatatgtaattttagtttatgaaatcgtgttggattgtatctctacgttgttaatcatttaatcctctttcgtcttcatagtttctctcgatatttttttctgttgtgccttcaaattttcgtaataattaatgttggtatggattaatttttattttttttattattattatcattgtttacaaaaatatgagatttgtgtttatttttatttttgattgtgcttagatctgggttcatatgggttgggatgtgaggttttttgtgtgtaattgtttagtgtgtctgttataaactgacgggataagtgtaaaaattattttttataattttttgcgagtgttgagagccgacgaaaataatttgaaacgacgattgataactaatgcaaatacagatatttttccatctacagtatacacgttggttaggagaactgacaaaaaacttttaatgttgttgaccgaggttttcggcaaccaataaaatattaaagattaacgagctgtaagaaattaagagaaggatttttacgt

SEQ ID NO: 170712 - DNA, 774 bp, Cannabis sativa
gagctctccttgcctggtgttttctttgttcttgcttagttactagtgttaggggttgtgttccaagcgttaagggtttttcttgagcactatgtgaccagtttgtcaacggggagtctctcaccaacttagaaatacatctacaggaagtagttccacgattagagcgataagtttctctaattcgttgagacaggttagctctccgttgttcatgcttaatgcgttggctttcgatgttcctccaattttccatgaaccagtaaaactgttcatgttgcttatcaatagagtctcgcatttgttgttgtaattgagttgagtgacttgaggattggcctcccaaggctcctctttaaacatacccacgagtatgtgggtcaatgagttgcaagctctaaaaaactcgttatcttccctttctacttaactcattctttcttgctattcacttgccccgtttatctcagtctagttaggaggatttaacttgtaatcctagcatcctcgtaaatcattatgctgatagtacctcatcaggtcatcacatcttttaaattgtagcttattcctacgatgggacattcattcctagcattcattcattcttcgcatttattatttccttcattctattagacttatataaaacttttcatgtccttatttagtgctcaaaatatgggcataataattgtccttatattatattaaaccatataaagtagatgcaatcaaaattaatcactttaagctttaatcattgttaatttt

SEQ ID NO: 170713 - DNA, 1182 bp, Cannabis sativa
tttgttaaataaatattagttatgaccatctctttttttactgtaatttttctcaaagagctacggagttggtttttaagtggctgtgatttaaagcttggaccttatcctttactagctagattacttgggtaggtgttaaaagaacagatctgttggctaagattattaatataatgaccgcataactagacatgaaaattaatagaatattattgatttaattaataatatatgattatttgtgcattaggaaaaaaataagccatattgtcataaaaaggcataagagttataatttctcgattataaattttattaaattttagatgtgttgtgtgaattttagtatttttcacgatttatgtccagtaatagtggaaatggagattttggccaattatgtcacttaaatacgatttagtatcttagaattagcgggacaagatttatgggtagttactagttagaatatcggggttacgcgggttattacccaatttagaggctcaactgctctattcagccactcatcaagatttttctgccaattaatttggcccaaccagtttgttacctcataaatcacttttctaggaaaagcacgtttaaaaaagagagatgaatatgagactctaaagttaactcacaaataggacatgataaagactccacattaataaacctagtaaggatatcacaatttaatgttcattaaccgcctgccacaaaataaaacgatgctttgggacctttaacttatgctagactaccttgtggtaattcaccttgtcttttaaaataaggagcaagtagaattttttagccttaaacttccatgagctaccagcacccaacaactcatgcttgtcaacaatatttctaaaattgatgagttttctaaagtactagattgtgtccaaacgaggagaaaataacaaaaaatctcaattcttcatataaatgttattaatctatcggacccaaagacaatattgctttgtagaaattgcctataaatacacatggaggcttatttcttcagttatttcataatataatcgataacataggtctataaaaccctaatctcatatctaaaatcctcatttcttctttctttaccagctatctctcaatgaaaaaaatcactgccaatgctcctaaatatctattttctcc

SEQ ID NO: 170714 - DNA, 684 bp, Cannabis sativa
ctctctctctctctttaattttttccaattatctcttttttttttcaaattttttttttaactttgtatatatgtaaatatatataagagtaatttgcaatgaaaatacttaaattttactccgagtaataaataaatacctaagtcatattgccaaaaatatgacttaggtatttatttgctactcagagtaaaacttaggtatttttgctgcaaattactctatatataataagtgtgcatttttatatctcgtttttaacactctttctctctcttacaaaaagaataagagcactcctatattttttggtcttttacatgattaataaaagtagtatttttttttttatgttttgtagttatataatttttatattttaacaaaaatgatgtattgttatttttctattgatttataattttctttttttttatagttgatttatgttgcggtttaggtgtcctatagttatttttaaattatttttttgtacagatgttgtttagtttatatgtattttttatcgtgtatattttcagtttacagacaatgttattgttgtatatatgtgcatttatttagttatttttatgttaatttttagttattttttcaatttatagttgttttttaactatcactaactcaaaaaggacaagagaaaaaaaagttgaaagaat

SEQ ID NO: 170715 - DNA, 720 bp, Cannabis sativa
tataaaattaaagtgcatttaataaaatatataaatatttctctgagattaaaattaattcaaagctttgtactgaacatataatactaataagttcgttcacaaataataaaagaaattgataactgtagactgtagtgaaataaattttctgttatttatttttgaagaataattaatgtttctcacgaaagaaaaaaaaagaaactaaagaaataaaaatattgaaaatatgttattatgaaattaaagttaaatggtggtaaaagtaatgaaaggtttaaactgtataaacttaatgtttataaatttgtaacgggtataaatttaatgtttataagtttgtaagcactataaatttaatgtttatttttagcactatataagtaattaatatttgtaaaattgtaatttcttctagtttcattagtagaaattccgttttaaatttattaaaagaacatttataagtaaataatattgcatatatttttgtttagacccaataatctaaaatttgaacttccatatatgtgtcatatttaagacaataatagagtttgtattgataaaattagaaaaaaaattacagttttacaaatatgggtacttaaattgctaaaaataaacattaaatttataccacttacaaatttaaaattttaaatacgcaattaaaatatagggtgattctacaatgaacccccttaaaagggatgt

SEQ ID NO: 170716 - DNA, 510 bp, Cannabis sativa
ccagatcagggtctgaagtatgttattgtggaagcatgtagagaccgtttttaactctccctttgagtatgacattccctatgagtttgtccttaacaaaccaacattttgaatgaaattcaagaaaaaagttattatcattggttaattttaagacactaacaaggtttttctttatgtcaggaactttaagaactgaattaagctttagaggttgagaaacattaggaattgagtgagtaccaagatgagatatagtaagtttcttaccattaccaacagtgagagcatcttcgaaaaaatagggttgttcatgttcaagattttccatgccaggagcaatatgatttgtagcatcggtatcagcataccattcttgatcaatagcatagtttgggatcattgaggatgtgtaagcctgattgtaatatctcggaaaataaatattatttaaataggtatatttttattaaatatgtaattatgttggtaatgaagtaagattatgat

SEQ ID NO: 170717 - DNA, 652 bp, Cannabis sativa
aacagaaggagacacacctttaaataccaggaatatgggacaatgatctgaagtagagacttccaagttgtatagggtcgactgagggaataaagacaaccatgtgtaagtaactagcgccttgtcgagtctttcttcaacccaattatcaccattccttcccttctcccaagtaaaagggtaacccaccagaggcaattcggttaagttacaatcgttcaaagcttctacaaagccatcaataagtcggtctgggtatggcctgccgcctctcttttcatcattagagcttaaattgttcatatctcccatgagacaccaaggaaggttgcttgcatctttaatagagcgaaagaggttccaagtgttgaaccgaagctctcttctaggctccccatatactccagtaagcctccattgaacacagtgttgcaattgaacaatagcgtcaatatgatgaaaggaaaacccttgaatagccacgtcactagattctttccacaacaaagccaaacccccactatgcccacgggcctcaacaacaaaacaactatcaaagcccaaacggactctaataaactccatacttgtcttattacataaagtctcacaaagaaataacaaatcaggcttcttttggaacacaaggtcc

SEQ ID NO: 170718 - DNA, 650 bp, Cannabis sativa
ttattcaagtgatgtttcacaattaatttataagttgatttttgatttttttttttggaaatacagtttctttaaagtacattagatcagacagtgtgaaatgtgaatgattagcctaccgacacatttttattaaaatcattaaaagagaaacaaatgtaatatgacagcatttgttgttatacttgtatagcctataggttggtcacttatgtttatgagatgtctttttgtgtattttgttaccatacttgctttttttttttttttgagaaacaataattgctattatacactaatagttgtgcttctaaattgttagtgattttttttataataattattattaagaactcaaatctactatctaattttgtaagtgtaaaatatattataatttgtttttaatttagtagtatttgatactttttaatactatatttattgggaaatttttttcttttatcaaaataaattctaagagaaatgttatagggcatacatcagtttagtactttcttatgtgttaatattgttattgatccaactaagtatcgaaactaatataatttaggaataattacataagataccattttttgtaaaataattacatttttacgttcaaagaatatatatatttttttttt

SEQ ID NO: 170719 - DNA, 977 bp, Cannabis sativa
tacttcaacaacttttcaacatttaacaacaagtatttcaagttttttaagttcttatatttaatatagattagtttatcattattctttcacattatctttttttattatattgtatagtaatagagttttatttttattttgtaggtttttttttttttgtagaagacctacaaatacagagaatttacccataactttaattttaaatataatgtcttagaaattttattgattttagtttcttattaatgttaagctactgatatgggttgtgtgttaatttttaagtttgtatattgatttttttgaaattgtcattctaatataattgtgttttttggtttggtgttgcaatattttttcaaattcgctagctttggagccaactattaataataagaaggtatttttttcaatgtgatgtggtgttattttgaaaacgttatagctttattgtttaaattttcgagggcaaatttatcccatatgactcgggataagaattctgcagcacatgatttggcaaagcatgcccttcggttagacaatgagctatcttggttcgaggaagtgtcgtcgtcgattgtggattactgctttattaatcttgtgtgattttgatcactgcgtccaaaaaatatacatatatataaaaaagtttaatatattttattgcccaatattaataaattaaatataataaaaaatgagttttttcatttttacacttcaaaatatttttattttcttgcatttttacataattctacacagaaactcctatagtaactaacagcaattgaaatccgtatagcagcctacatagaaaacatctgagaaaccaccagagcaacctaaaccataaatttaaaaatatatatgtatatgagcataggcggacccacattgtagctgccccccctgaaaaaaaaatcgagaaaaaaatgtatatgtattttaattagttacaacat

SEQ ID NO: 170720 - DNA, 708 bp, Cannabis sativa
aaattttttatttattattattaactgtaattaatattttatttttttagttttcttttttcttaatttcttaatatttaactcttgtatagtataaataggagatcacctattggaataaaacactaagaaaattcctatctcttctttaaattataatattacacaatacgttatcagcacgagtctctaactaaggaataataaagtttgttatatgtgatcttgaattatttcaaagtcatgatacgctatatatatgtatatatatacttatctgaatgaaacacattcgagctagctatttttttttatttattttgttatgaattaatatttaaacaatatatgtctatacttattattatacccgaaatttggttaacacatcagaggaaaacacgtgtcaagctgggaagaatacaaaccaaggcacgtattataattatatttgaggtggaataactcgttaaaaccataattgacagagtatatttacaactcggcttactgaatagtcttatgcgagataaagatatacaaactgttgccttgcacatcaacaagaagaaaccatgtaatttttttaggtgtataagacgaggcactaaccttgattactggatgagatatattaattgtgaagacacttagcgtataatatgcagtatacaagttgagtataatagacgggtgaaccaaagcaag

SEQ ID NO: 170721 - DNA, 572 bp, Cannabis sativa
attttaatcagtcaagcctctgttcccattttaatcagcattttaactcactaactactcatacatatataaatatattgttcacaacttatttctctcataagaacgaaacattttgataaataaacaatgaaaatgaagagaatatagaatccaaaaaaatgatttaaattgaaatatggggaaaatgattattgaatttcaaccaaagaaaataaaacacaactgcccactttccccaaattaattttgcagtgaactctttcgaaaaatatgcacagaatttagcacaacaccgatacaaacaattcctgctttaatttattaatcaacaaaaaagaagaaaagagtgatagtaaacattatataacaaaaacttatacactaaaaggcacaaactaacagataaagattgtggatctgacggtcgactcatcaggttgcaaattctaccatgttttggataagattggaaattactccttgatagaagataatatcaaacacaaaaaggaagaagagggattacttgttgatgataatctcaagaacctggctcaatcttctctgta

SEQ ID NO: 170722 - DNA, 1701 bp, Cannabis sativa
ttttttttttttttttttgagtgacatgtttctcattttttttattaaagtttttatcatattttttagttttaaatgtttttccaaaaaaggttgcctttctatataataatactatatccccctcaagttcgcaaagtattgtttcaaatgtatccggacaaatctccaggccccgatggaatgaccccgggttctttcagaagagttggtcgattgttaaaggtgacattatcaaaatggtaaggcagttttttcaccatggtttattttctccaaatctgaataaaactattctggttttaatccctaaaaagaagcatcctatgaatatgggggacttgagacccattgctttatgcaacatgttatataagattgtgtctgaggtggtggttaataaacttaacaacgttatgccaactatcatatctgacactcaaagtgagttcttacaaggtcgtttaatttcggataatatcatgattgcttaattatgagataatgcataatttgaaaagaaaacgaagagggagggatggctatatggctctcaaacttgatgttagtaaaacctatgataaacttgagtggggtgatctccgtgctatgatggaaaggataggctttgatgggcgatggataaacttggttatgcaatgtgtttgttcggtctcgtatactatcttgcatggtgggaaggagttgggacctattgctgctcaacgggatttgcgtcaaggtgatcggttatcgccttacctctttattttatgtgctgaaggcttctctagtttgctgcgaagttatgagcaaagtggtttgctcacgggttgtaagattgctcgaggtgcgccagtcatttctcatatgctttttgcggacgatagttatatttattgcaaagctactgaggaagaagcgcacaatgttaaggagcttttgcatacttatgaggtggcttcgggtcaaagaattaattttgctaagtcctccgtgtgcttcatcaacaatacaaattgtgatcttcgggatgctatttgtgcttcgttggaaatttatgaagctgatgaaaatgggtactatctgggccttccatgttcggttgggaggaacaagaataatgctatcctcgggtttcttaaggacaagcttcgtaagaggattcaaggttgggacggtcgtatattgtctcgtgcggggaaggaggtcttgttgaaatctgtagctcaagccttgccaaattatgccatgaatgtttttcttttgcctttagatatttgtaaggagttagaaagacttatggctaagtttttgtggcattcggattctagtagtaggaagggtataaactagatgagttgggataggttgtgtcgtcataagcatacagggggattgggcttcagatgtttgagagactttaatttagctcttctagggaagcaattctggcgactttttgtgaatgacagttcgttggtcagtaggatttacaaggcaaagtactatgcacatggtagtttattctcaactgagttgggagataacccaagctttatttggcgaagcatcatggaagccaaaagccttatatactcgggagctcgaagaactattgctaatggggtgaatgtctcaattcttgatgacccttggctccctcataacactaatggctttgttgaaacaaggcatcct

SEQ ID NO: 170723 - DNA, 530 bp, Cannabis sativa
agagagagagagagagagagagagagagagagagagagagaagtgacgaatgacggtggttctcttggtggagctcgtggccatggctgaccatggtaaagcttgaatgggctttcacctatggtggagctcgtggtggagctcctgaaagagaaagtgagaaagagagagcaagagacgagtgatggagctcgtgaatcgccatctaagagagaaagagagatggagaactctagagagagaccgaaattttgaaaatgtatagattttaaaaaatttagatctaaaacgtattatattggagcgagagaaaatacgttatttgaaattttttagattcgaactagttacagacgattaaaaactgtggcatataacactataggcgataatttttaaccgttggcaattcccctttaaaaaaagggaaaaaaacaaaaaaatacaaaaaaggaaaaaaaattacaaaaatactttgggccggcccattaaacatttatacagtccacatacaaatatttataaaaata

SEQ ID NO: 170724 - DNA, 743 bp, Cannabis sativa
tgtagggtatttaagggtagttactcccagaagtcaataatggccctaccaacactagtatggagtcgatacttcagtgcatgtgatacaacagttgtacttttattaagaacgttcttagccatttagtgagtcttacacatgggctcaggacggcttaagtacaaagctggtattgcattgtctatgtgtattttatgcatatcttactgagtctgtcgactcatcagttttctaccctgtgtagataagggaaagtgtagataagggaaagactaaggtggaggagtagtgagttggaggctcagcaaggattgtacatatcgcggcagtgcaacctagagggtttcggtctcagtgtattttgagttgccttttgttgtcgttaggagacttgtaaaaaaaataatactatgtaaatttatgtatatattgttgggattttatgctctaaataaaacttgtttcaatataatttgatttgttatcaataaaagattagaagtcatttatgtttacatgcagttttcatgtttatggtttagtgtgtacaatttctgttaagtccaggacatatagttattcacaattacattgatgtcaacacaatggaaggtaattgtgattatatgcttcaaaagataatatctcatgattcatatgtgttgcgatatttttgcacacgcaagtgtacgtatcgtttcaagtagtagactcactaggagtgaggtcgatcccacagg

SEQ ID NO: 170725 - DNA, 695 bp, Cannabis sativa
aaaaaaaaaaaaaaacaaagagttacatttacactccaaaaaataataaatagtactttttttttgaagaaattccattgatgatcttttgatcatactgctaaagttttatttttctttcaagatgaacatattacttgtccacagtatatagaataactgcatgtaatatagaaattgattaaaaaaattctctttcttcttaagaaaattgaaaattctataaagcacacccttaaaagggatgcaccgataaatctctactctatctgttttagtatccgaaataatttttaagttaattatttttgcatggttatgtaaattatagttattgaagatatcctgcaaaattttcagaaattcgaaaaaatttaacatgccaaaaaactacgttcaaacagtgtgttgcacgcgtaactactttattttgtacgcgtgtaaaatagattgtttgaacattgctttctatattgtaaattattccaaatttctcaaaattttgtaagatatcttaaatagctataacgtacaagaatatgaagaaaaaaaatagactaaaaaattcttctgaatgccgaaacaagtagagagtgcatcagtacatccctttttacggggagcattgtagaatcaccctattgttttctatattgtaaattattccaaatttctcaaaattttgtaagatatct

SEQ ID NO: 170726 - DNA, 675 bp, Cannabis sativa
attctttattgcttaatctgaattctagggttatatttgttggattttaaggcttgaaagagtgtttttaagctccctgtatgatgataaaaatctatttgttggtttggaggttttgattaagttttggattgaattgggtgtgtttaagggctgattttttaagttcatgttgctggttttctaggtttggaacccaggtgctgcggcatggcttttgcatgccgcggcccacccctattttttgagacctgggagttggccctaggtgccgcggcatggctttttcatgccacggcccgccctcatgtttctgggcagattcaagtgttaactttgaaaattcataactttgtgattcgaacttcgtttttggagttctatataccgttgtaaagatcgttccaaactctatgtgattatctgtattttgaatgccatgtatacattttataaatgtggaatcaggggttaaccctatttgtgtaaatctcaatctcagtctcagaattgtgactaggattaccggcacttagtcaagagcacccagagatttagaatctctactattgcatgacatcaagtaagacagtagtttagcacgtagagttatgcgcagtggggcttatattggaagtgatatatgtgagtaattagtaaccaggattagggtta

SEQ ID NO: 170727 - DNA, 1086 bp, Cannabis sativa
gttttatagatacatattaaataagtttattttaaagtttattttaagtacaatcatttagtaacttctaataataaaaaaaaagactaatatataaagttagtttgtacattagttttttaaaattatatatttgagttattttttgttaacaaaatattaaaaaaaaaaaaaactagatgacttttgatgatagtagtacttttttttaaactcaatgatagttactagtatttataaatattttttagtgactcgtaaaattgattgatatattaaattttgtttgagttaaaaatttaatttattttattataaaaaaaaaactaaaaagttatatttactattttttttatagaaacctacctaaatggttcaacaaaattaacttatttaaatattatatgttttttttaaatatgaacaataaaatactttttagtaactcttgaaagtgaatgacataacatatttaattttgttgattttaaaatttaggtaattaaaaaaaaaagaaactaatacttattgtttttttttttttttattttggtcatgcgaaaaatatatgcgcttatcaaaatagttatcttaaaaagtatattctaattatataatatttttaagttaaataattaagtttgaaaaaatttatttaattttcttgataaaaaaaataaaagaaagtgaaacagtaaatgtcatttaattaagaggaaaagataaaaaattaaaaaataaaaaattagataagagagtcaagttatttttaagaaaaaaaaaaaaagctgagactaaatacagttaacaaaagaagaagaaaagaaaagagttgaaagattgactctatggctagtaaaacaaatagatagcgattttcggtatacgcatatgacaaattattaaaaaaaattcacattcacagcattaaaatgttagagcatatttttgtatatattttataaagtatgtatatcggggtaattttctcttaaaaaaatagataattatataaagtactatttttcgttaaaattttacatttttatgtttaatttttttatgtatatatttttatattttttt

SEQ ID NO: 170728 - DNA, 985 bp, Cannabis sativa
atgtttgaaaaataagggtacttgatcagttttggtgtgtgaatatagtgggaaacactacgacagatgggttttagtgcaaagacttgcatgcttgctgcaaggtgtagatggacaatatgtaggggcgtaggttgagattaagactgagctagtttgcggcatgttatgggcatgttttgtgtttatagggacaatagtgttgtatgggacagttcaaaaaacatatgccgatgggagatagcggattgggatgactttatgtcttaagagtagggctgggtgttatcaagtttgtcaaaagttagcaagtcatcagaggattcagagttgattttgggagatagacttgtgacacagttttgagaggtgacacaagcaggagccagagggcaaattagctcagaggaacaagtatccagtgggtcagtggggccttttgcatgaagccgtgggtgtgcggtaggtgcagagggccaatgttgtgaacttcgcgaagagattttgtgcaagagtgcacttggtgctgcattgggtgcagttggcttgcgagcctcatccaaatgggacgcaccaaattttatcctgcgatgagagtgtcttgctcgattgccatcaggaggatggtgcgccatggagttggcatgtgaagtttctatagggccttgtccagagggacttggctttagtggaagcgtgttgtgtaggtgctgttgaatacggttggtttgcgaacctcaccccgaggggtgcaccatacttagtccttgtcaaaaggagtatgcattggacgattggcgagtgagctattatcaaaggatgtgttagctttagggtcagtgccgcaagggctacttggttgactgttgggactttgtgatgaactcagaggagttcatattgggggaagtattctagagcggaggcactactgcatgggagattctgaatagcgacagtcgcacagggtctttgatcaagtcca

SEQ ID NO: 170729 - DNA, 509 bp, Cannabis sativa
tttttattttttaaaatttttaatagtagtttcagctgtttatgtacaaatttatttaatgaaattacttgctgtttgtctaaacataatcttgtatagaaattgaaagttctaaaaagatttatgctttggtccatttccataatcaataggtgcacatcacatgtttatcttgttaattaaatatgaaattatgagtttcttatggggtcgaatgatgttttgtttagatttaaacagcatgctttcatttttataatactcaacttcgacatttgatgctgaaaatgtagtcaattttgtttgtcatatcgtaatgtatgttattgttcaggttatctttttgcaatgtgtatttgaaattagctattagatatttattagatttcgtagaaagtaagctgaatatggttcttattacattgatgttggaaatgtgtagagttaaacttccatctggcgccaagaagattttgccaagtggttgcagagctatgattggtcaggtt

SEQ ID NO: 170730 - DNA, 561 bp, Cannabis sativa
cttacaatagttttccaccgccaatgactatcaacccctttctcaaattattgtagtgacaatctcactctaactgagttgtttataatactcaacctcacctcaatcacaattcaaaaatgtgtttagaattacaagtaaactcactctagaagtatgatgatacaatgaagaacctagagtagtgattagcaagcacacttacaataataaataaatacaaatttggctcaaagtgtgtgaaaagtattttgttagattttaaacttgagagctcttaaaatcacttgaatatgtatgatatatagaataaatgctcagccaacattttattttgagtgaaaaatgagtttatatagtgtaggaacaaaaactagccgtttatagccattagcacgattttcaaaaaggaatactggaaaaaacaatctacctttttatggtctaccttttttgtaaaaagcggtctgccatttaaaaatggagaccggaaaataggttagtagaaaaaagccacttttttggctttgaaatgcgcataactttctactcgtttatctg

SEQ ID NO: 170731 - DNA, 501 bp, Cannabis sativa
tctctggtgcaaagggatcggttcgacggacccctacttctcggttactgagtcgcacggtgatggcgacgggtcgtagctcgctgggaggaggtcaggctcaaaataggttatgggttcccaaagctcgccctgcctcgcgcatgccaggaatttctgttatggttaatacagctcttggtcgtactctgcttgatggaaagttgactgaaaacttgcctattattagttcaaattctgctgacctaaagaagatgtgtggaaaagagaaaggctttttagatggggttgttgggccggctcactcttctattgggccggtttcaaaaatggatcaatttaaagatggagcttcttctggtgggccttttaataggtgcaatgaatccaatttagcccttaatggagccgagcccactttggagaaccaaaaaacatttctgcctttgcttaaggttaaggggtcgtgtgatacctttgggccgggtgggcttcctgggt

SEQ ID NO: 170732 - DNA, 1353 bp, Cannabis sativa
gaatacgttcttggatctacttgacacactgcgttctcattggcgttcggctcggaagcaatgttacccgtagaagttaacattgccacccacagacgtgaattctataatcaagaggaaaaccaagaacttttgaatacgttcttggatctacttgaagaaagatgcaatgagtcggaaataactaatgcagcttaccaacaaataacgagatactttaacaaaagagtccaaaaaaggcagtttaaagtaggagatttggtgttgagacgagtatttgtaaatacgcgagacccaacagcaggagtgttcaacataaactgggatggtccatatgttattgaagttgtcattggaaccggggtttacaaattagcttggcttaacgaatcgctaataaagaatcactggaacagtagatatttatgaccttattatcagtaattttaatgtgtaaatgtatttatttctgtaatgattaatcattgttatgaataaaattaatttttttcaagtaattacaaagtttctttcttgtaaaattacttgaggagcgtatatatgtgtataataactagattccacctagaaatatatattgtatattgcaaactgtattgcaaaagtgcaaagcctaaaaattaaaactttttcacagaggaaaggatagttgattgaaattgtctttggacagtataaagtcaagaattgaaaaactttttctttaaaagaaaaaaattaagatagcagttgtaagtgaggatcaatcaagcacacaacccttttctcaaggtacatttgttaaacatcacggtatcagtaactaataaggaaattatgttattttaaattaatcacatgttgacataatttcttaccacactactagacttattgacaatgtcgatttaatactttggtatttgtgattatgaatgtcttttgttgattttaaaataatatgattttcatagttcaatatcaaaggttaagttggactggtatgttcagatgctatcaaagaactatcatttttaaagtgactacaagtgttttcctattgttcaacctatgagtctttcttaaaaaaaaaaattattttgatatataatatatatgtattaaaattaatgtagcccaagtgggagaatattaaatttttatttggacttacaataaattttattggttttattaaaacctaggttgattggatagttctttgctgtgatggcccatattgttcgtgatcaatagttaatgggcttagcatctatgtgtgtaggtgaagcagaagtgtagacttttctgaggaaattacactctataccctttttatattgtcccctttta

SEQ ID NO: 170733 - DNA, 653 bp, Cannabis sativa
ttgtatagtatacgacacccctatcacattatgtcaactacagttaactacattgatagttctatcaaagatagtaaataggctcggctcataatttcaattgatgtcaaagctcccacttttaatattaacaattgtggacatttgtttatgttattttcttgagttaaatcatcttgtatgtataatctcatgtatatacttaacttaagattatattgaacaacaaaagatcttttctaaataaattgtatgtaagtaaaatataattatgtgtgaataattctttttatttaaatatttagtaattgtattatagaattacactttaagggcaccaattagtcactgtgcttgtaccatgatacgcaccaactataatagtcaatcacacttagtttaagtttgaatttagtttcaactttagatatttattttatttaaatttaaatttaaactatggttatagatattttttacggttgagatattttcttatctagttaaagatatttattagatattaaatttgaacaaatatctagaccaaggccttcgccttctccttctctcaacaagcatgttggcaacacagatctcgtcctcttcctcttcaaactttcagaatagtgatgagtctcaaaactcctttt

SEQ ID NO: 170734 - DNA, 782 bp, Cannabis sativa
cggttcgagtttggggagaaaactaaagatttgcaaccctgccaaaactggtcgactggttggttctggtgctgcagaaccagtcgatcgatttaggtagcaggggggaagttttcagttttcttcagggccagttttagggctcagggtgattttcgtgtctggtatagattgtttaaaagttgtaaaacctattttggagctaattgaagatagggtttaccgattgtgagaattagggttattcccggaatgattgatttaagttatttattggatgttgttgtcatgacataggacccgggattgtcaagctttgattccacctaggtcagcatgtaggctaaattttgactgtggtaaaaaaatattacatgccgtatatggtcaacgttaaactgttatagtctcgattatgatcgagggaaaaataatagaaaatgattatcatcgttatgactcggttataatcgagggtaatgatatgaaacgattaatatcgttgtgacttgattatgatcgagtaaaagaaacggtcattactgttatgagtaattactcttgacaccttgaataggtttcttacttatcatttgctgtatcgggcaacgatagtgacatatgtagctcgtggttaacgagtggtaagagtactttatgaagtaacgaaattgtgtggttacgatattatgaaatgaatcaagagtgtttgtaacaccctaactagcctaggcgtgttaacgtgatttttagacttgttgtccagctcgttgctaatcaac

SEQ ID NO: 170735 - DNA, 743 bp, Cannabis sativa
aaacaatgtgtttctcttctacatgagatagtctttctgcattgctttttgatttcttacatcatgtattacaaaataattatgaagtaatgatcagtcagtcccatggctatctaagagctaagtgagcatatgttactgaaatctgtagtcccttgtatatttatttgtttacttgatcgattctaaattattcattactgcagaaggaagagtgatcgagaagaagaagaagaagaagaagagcaagcaagaatgaaggtatcgactaagagtgattaggaggatgtggcattgaaagagatgactgttccaacagctagagaagcacacgagcaagtgagagagcaagagtggttttagcctctgcatctgtaataaatagatacttgtctattattttaactcatgcagtgagtgagtagagaatgcgaagagtacttgcttggaaatcattgagatggaaacttacttgtaaatcctacttcacttcattgtatggataatgtgaatttcaaatttacttctacacttgaatttcatgctgtcacatctatgtattatttgatttaagtgtagatgttataattaattcatttcatactaaatctggtgcgattcactggctttcctgagaattaattatgatgaagcaagaaatgttgttctcttatcctgttcttcaaaccagtttgctcttatggtatgtaaatgtttacttctgaattttatcacttttatga

SEQ ID NO: 170736 - DNA, 876 bp, Cannabis sativa
ttaaatgtatagtagtgtctaacattactcaatatgtcatattgttattgggtaattaataagtattacggtctcacaaaatttaatgtaataatttttatgaaatatcactaaccattataatttactagtggtcacttatttgtagtaagaaatactgctggtacctaataacaatattaaaaaaaaaaaaaaaactattaggacaatattaaactcgctccacatacactctaatatgcacacatttataactccaatttctttaaataacaatattcattgtagttaaagcttacatgatgtacacatttttgagaaattatgtacaattgaaattgaaaaatatattttagatgaaaaaattattatatttatgtataagagattgtaaaatggagaaaactttaaaaaaaaaaattatgagaaaattaatttatgagaaaaattattacaaactataagtataattacctatttaaaatatatgaatatatacatataaatatatacaaaaaattgggagccctgcctgttgaagtttctagacataattatcagaatcaaagaaaatcaaagagaagaaaagaaagagattggcagaaaataccactacaagaaatgtcacttttattaatacagtttgttactacattggtaaaagtaattttaccagtgcatttcacaaactgcgttggcaaaaaggtcaaagttttaccaatgcatatttacagtggctaaaatctaacttttaccaacacatttatgcgttggtataagtataagtgttctatatgggtgcactcttaatgggtattacccataaatgcgtaaaattagaaaattttgaatttttatgcttgatttctctatcta

SEQ ID NO: 170737 - DNA, 1072 bp, Cannabis sativa
ttagtcttgaaatagcacaaaaaccttgataacatatatcaactttcttaaagagattatcatttacaaaataaggtgtcatcagtaaactgaaggtggcttgccccaacatctcttccaacatattgtatatagacccatttctttcttttcctaacattctacaccaaaacatcaactacaacaatgaacaagaaaagggatgaaggatattaaacttttacctatatgatcgttacttttggtgatacttagttttattgatatacttcatagttatatcaattttttattatgacatgtaggatacaatttttatgatcgttacttttgattatattagatgtactttatatttatataattttctaagttacatgaaaaatcttatcattattatattataaatgttattgttagtcatatgaatattgttttttattataatatataaatattgttatgaaagccaattttaatatctacaaatgtaggtggggaaaattgtaaagaaatttgcaattttcccctacctacaacaatacatcattttatagccgacacaaaaagtaaaaaaaaaaaaaaaaacaattcgaaaaaaaaaacaattcgtaaaattatgtgtcaagttgtaaccgacgcaataatataattagcttcagtcactatttgaagctaagtttgttgcttcattccaaaactgacgctaatagagcgtactttttgcttcagttctaaatcgaagcaaaaaaaagtttgcgtccgttaagaaatgaagcaaataacttgactatttgcgtctgctgttataacatcagtttacacaaccgacacaaaatatttttgtgtcattttacaactgaagcaaaaagtcatttttgtagtagtgacaatagaagttgttagtgcgactttttcaggcttaatggatattcctgtcgaggcagatttcttattggcagttgttcccctttattttgtccaatacgtgcaccaacccgactgtgacacgtggattgaagaagtaagactttgagataattcgactaagtcttcttaatcaaaaggatca

SEQ ID NO: 170738 - DNA, 738 bp, Cannabis sativa
gtcaacaattttatcatgattcattagccatgttttgtttacaatctatctgggtaattttcgatttactttgttcagagatgactttggttcatgtatctacaaaaacctttattacaaaagtcataaagaagcaatatttaatcaaatttttcaatatgactaatgtgtttttctatgtgcaaaaaattggtgaagttctaagtctttgcaatttgtttcataattttgaagttcatttccatttccctctttctgtgttcagtttacagatgttgagtttgagagaaagaaagagagaacgaaagagaagaatgtgtttctgtattattgatttgaatgaattattacacacacttataaataagtcagtatttataaacaacagattaacgaagccaattaattatagagttagttggatgacagcagagaaaactaacaaaacaatgaacaataacagtgtgagattttgagtattactgctagtccttgaagcggtagtacaaatataaagagtaacaaaaagaacttaatatcacaacaagaaaggatcatttagagaaattttatggttattttttatttattttcaatgcacaaatacacaagatcttacttcttactattataaaaccatcttaatcatgtgattgttagaataacatgattacatcaatttttttcatataattttgactcagccagtaaaatcttttaagtattctttcgtttgtc

SEQ ID NO: 170739 - DNA, 782 bp, Cannabis sativa
caattattatagtgagaattttttgcctagaaatcaagatcaatctcttacaaaattgacacgtggatccaacctcaagggatgaatgagctattaattaatgactcttcgagagttaacatcgcttgacctaaactcgcaagatgatgcaacctttatagagtctagtcacatactgtgccttgcagagtataaactaagaaggaccacgaggggtttatacaagttgcgcagcatatactaagaagatataatatatgcggcgatgactaggtagccttctcctgcagcagctgagtgaagatcacttctttacataataaactaatctaaacaacaaagcgtacttgataacttgatagggatttgtgtgtctcatgtttttcagcgcatataaggtgtccatatgtgtgacttagatagaacacagacaccttagcacgaggctcattagtcctccttagaaagatagaacacatcgaaagcctgggagcttgtgcgagaatatgaacagacaacacgcatcatataggccgcatcgttgctatacttattacaacagatttaaactattcttcatttattcttttacatttattataaattaatgttgatattaattgtaaaacactcctataaccggtcagttatgtgtaactaaaaggacacttgctttgtatataaaagagtgatttaacatgaataaaaaagagagaaatcctttgcaacagtggactaagcagaccgtgatctgactgaaccactatactgttgggttttat

SEQ ID NO: 170740 - DNA, 956 bp, Cannabis sativa
cattgcagccaccacttgaccatccgagtcacgaaggattgcaccaaaacctgaaatacggttcacagtatctactgctgcatcagtattaagcttcagtcggccagaaggaggattgagccacttaggcgctactgtaggatcattatttcggtgaacctcattcctgagaattgtgggagaagcctgtcgagaagcttgatactcgcctaaatatgagagagcagatatgaggagcacttcatgaggcttaggcttggttccatgatattccttatttctctctgtccatatactccaaagaatacaagcaaattgttccaattcttgttgaggccatgtttccgaggctttaaagaaaatgtccttgaaagtggaggattcatgaatgatactatccaatgaaaaggaggatcctctccaaactttcttagctcgtttacaaaggaaaagagcatggacaatggattcattgttgccacggcatagtgaacagatcgctgaggctgcaatatgtcgatgttgcagaatagcagccactggaaggcattcctgaacagctttccataaaaagattctgactttagaaggaatatttagcttccaaaaatgtttccataactgtgtcgaaagagatgaagcagagggagcttcttggtctgcgaacttggaagccaaaatataacctgacttgacagtgtagatcccagttgtttcatggtgccaaatgattttgtcatcatgagagaaagtggacaaaggaacactaagaatcttgtcaatatcaatatctagaaaatttgatttgagactcggcatatgccactgtcgatcaccatcaataagctcactaacagtaagattaaaatctgaccctttaaaaaataatggcttgaaggatgtatggctaggcagccacggatcagtcgcacacttaatctgcaatccattgccta

SEQ ID NO: 170741 - DNA, 844 bp, Cannabis sativa
tttaattgcctccaaacatcttctccttaagcaacaattaaaaaaataaatgttctatattttcaatagcttattcatatatcaaacaaagagaacctgagctgatatttgtaaattaaagagcctttttagtttttaatctgtcactgtaagaaatgtcacttttatcagtacagttcgctactgcgctggtaaacttttaccagcacattttgcaattgcgctggcaaaaaagttaaagttttactatcactcatttgcagtggctaaaatctaacttttacaaaagtcatttttgccatcacttttcattttgtgctggtaaaagttctaataccaactttgatttgctaatctttttgccaacatatcagaagtaaattctattttaccagcgtaataccaaacttttgccaacataaaaatatgctgcaaaagtgacatttctttgtagtgtcttcatcactgccatccatattaatagtaatttttaaaaatctaatttagtagcatttttcaaatgtcactcattttgttttttcttttgaataaaataatatatttttaattaaaatacttttaatgacatgcattttaagtgtcaataaaactcaaaatacagtgacatttcaagttatatatagtgatactaaaataagttatatttttgacctactaatttaacaaatctcttaaggttagaaattgtaacattttcaaatgttacttacatgttatgtcttcgaacgtttcgtgtcttgcttaacagatatatttttttatgttataccaatttaatattatatcttgtgtatttgagtctatatttttttttttttttttt

SEQ ID NO: 170742 - DNA, 1018 bp, Cannabis sativa
ttatttaatttaagttattaaaactctaacctacaaaaatagtgagatttttagcaacaaaataaaataaagtgtttaacggtaaaaataacagtaacagatattttcagtgatatttgggaaaaatattaggtttcagaatccacttaagtgaaaactagattagcaattgaaccaattattttttaacaaaaatagattttctttcgcttaaaattatgacttcttagcattaaatgtgaaacaatttaatgtaaatacataaaatttaggaatattaattttaataaaatgtagaaccaagcattaataatttctaactataaaaaatatgtgatattaaagataaaagaaattattttatgaagcgaaaatcataaacatatatttaactgagaatcaaaataaaaataaatacttaattacatacgctaggtttcatcatccaccttaataataagaaaacttaaaaactcataaaaaaataaactaattaagaaaagcggtaaactaacactaaataactttaagtattttctctagctttctcagtctgaaattatattgaattctaaaaaacctaaggttttatttataagaaggtaaaaagactaatgcgcaattaaactttaaaaattgcatgtgggtaaaaataaaattaccctatagttaaaacacagtgccacatgtaaagtgttgattggttgctttgggtgaggtggtgccacgaggcacccattgattggctgcaaaaaaaggagtggaagttgatatttaggctgaagggaatcggagggagagagagcctattcttggggttggtgtgtggggcgcacgcatggcccaggatgagccctgcacatcatgcgcacgtgggagacgtggggagggacaaactgttaggattttatgaccaaaataaaatccatttcaatataatcgaattgctcaatagaagattagaagtcatttaagtttacatgttattttcatgattatggtttaatataaaattttt

SEQ ID NO: 170743 - DNA, 518 bp, Cannabis sativa
catatcatatcatactaatatatggaatatctcattagtgttgtaaagaaagaataacctagatttattttaatttggcaacacaataaaacatattatgctgattttgattttgatcattattaacatatacactacctataaatacacatgttttgatcaatcaacttcacaaacccatagaagaagaaaaaaaaatgggatcttatttcaagatttcattagttacagtagtactcactcttttatcagtgtcttttactttagaagctcaccgaattggagttgagaatgttgatcccaaattagagtctaaggaagttggccaaaaagcaaaagttccatccggtcccaatccacgaactccaccaagttcaagttcgagccttttacacgataaagaaaatccactaagatgggcccaaaaagcaaaagttccatctggtccaaatccgcgaaatccaccaagttctgtttcatacctactaggatggagccaaaaagcaaaagttccatct

SEQ ID NO: 170744 - DNA, 1425 bp, Cannabis sativa
  modified_base (468)..(483): a, c, t, g, unknown or other
ttgagtatcttcacgattgggtccctcgtcccttattccaggattctgttcattccttcgttgatttctcctcgaacgtcttgtttgcgtactgggagcaacgtcaagatgggtcctcctagaacgagtggtccagtgttggggccaccctcaggttgagttctcctagagcgggtggtctgtctagactgtgggttggaagaccttctggagcccatgggttctttcctagaatggtgatgagtttctttgtgtggtgtattagtggccatgaaggagatggtttttctataaaataggagggttttttctaagctttttcatgaaggctctcaatgaaagtaccaaactgttaaagcaaattttcgttagccaaaaattgagcctaacaatgataatctcacacagataaataaatacagtaaaggaaaaagtatgtacataaaagattttttacgtggttttgcnnnnnnnnnnnnnnnnagtccacgagtcaatcttattaaattcttgatggcttttcagggcctttttcttatgatttttttgtctcccttttttgatctaacttgccactatttatcattacatagtaggcagttaattacatagttgactataatctttacaacacttatcccctgaaatcttgggatttgattacatatcacgtagtataaatgtgggtattatttgaatatcatatcacacagctgtgatttatccccttttacaaggccaaaatgatcgtgtgtttaaacacatcttaaatcatagcattctgggatgtctcgacaagaactcggttccaatgaccttgatagcgagctggagctttttctcctatctttccaagttcgacaatgcacgcctcgccgcttttttgttcgaaggcttaacgcttcattttgacaatcacagttcttatttataatgagtaccttagcaatcatttgaatgtcagcttctgactcatcaagactattagtctcactgaaagacatctgaagttaattggtcaaattcacaggagtgtgccttcctatagtgagataggcgcatcgcttattaggtcttgagtccacccgactgttatacttagtttgtatataatatggtaagtgtttccacagtcaatatgtatcgcttttttgcttcccaaaggtaacggagtcgatgtctcaccttatgcatccaatgcagtatggtttcttgttaatacctgaggtaacagtttgaatatctttatctcgcataagaccctatagtcagcgagttgcaagtatactctgttacttccgcatttaatgagttattccatcaaaaatgattaattaccatttcacgcatcgatccagttccccttaatttgacatgtttcctccactgaaatggtagccgaatttcgagtataacaatattagt

SEQ ID NO: 170745 - DNA, 656 bp, Cannabis sativa
taaattttcataattaacaactcatgtttgaataaactaccatacaagtatatatatacaaataatttttgaatatgaaagttttgtatatctctcccgtaaagtaactactattttaatgatcatatttaatagagtgttatagtatagtgtatatacattttttaacctatttacatcaaattaattaaactctaataagagtatataacattgtgtaaatttaacaaatactaaaatttataataaatttgttacaaaatataacattgactaaaatttaggtcataataaatattactttttatttaatttttttattacacataaactaattaataactttttatatttttatttatatatttagtgtaatttttttattagaaatgagaagccttttctcttggcccattaccgacccactcgaccttgcttttactgtgtatatatatacactttgctgtgaaaataaaccctacaactattattttcaacagccacatattttcgcctgatactaatgaaaataatgagtcttttctctctaaaattgtatcagtgatataccttatcttcataaaaccctagccacctccttcttcattaccacttctctctcttctcccatagctccaagaactagaaattccacc

SEQ ID NO: 170746 - DNA, 575 bp, Cannabis sativa
  modified_base (202)..(202): a, c, t, g, unknown or other
ttcataactttgtgattcagactctattttgggagttgtatatatcgttggaaagctcattccgagctctatgtgattatatgtgttttgaatgccatgtatatactttataaatgtggaattaggggttaaccctatttgtgtaaaccctagaatttgtgattaggattaccgacacttggtcaggagcacccggggattnggaatctctactattgcgggacattaagtaagacagtagttttcatgtaaagttatgtgttgtggcacttatactagaaacaatatatgtgagtaaatagtaaccgggattagggttactaccctaacattggtggtttaatagcctagggttattaccctagtgatatatgttgtgtaaatactatgccatgttaaatatatgagtatattgagattcagggttatgtgttcgaggaataaccgggttggaatcggtaactagaattgagatgaaccactctaaggccttattatatttagacgtgtgagcacaacacgtaggtctatgttacataaacataaataggcatgtgagcgtaacatgcaggttt

SEQ ID NO: 170747 - DNA, 1125 bp, Cannabis sativa
attattatcatactttttaatgtgctgtaattttgggccggtctatttatatttacgtgttgtgcttttgaacttgtcgtacttaagttcatttctttttgtgttgtgttgtgcgaatttataacatctcaccgtgtcgtgtacaaactcatatttttttgtgctaggtcgtacttgtacctctcgggcttgtgccgatttcatgcagtgtcaaaaagttcggtttgtatttatatttgtagttgaattgttgaaacaactaataataacatgctcttcatatatatatatatatatgaggggtgttcattggatcacatctaatggatttggatccaaccgatccaatcaaattatttactggatattggattttgtcatccgatccaaccccattgaattgaatcatccgatttgatctgatccaatagctgtattggattggattagttctcaccataggatgcataactggctttttattagattggattggatcccttcaatccattttagctaccatttaagccgatttcattaaaaaaatatatgtatatatcgaaaacataatttgaaacctaataatccaacatatataataaacattagtttagtccaactcaattctcatgatcttataataaaatcgtcaaaaaataaaacttactcaatacgcattgcatgacaattttatttctatttagaaagatgagaattaataatattttaaatctaaggtttatttttaatctaatgtgtgcatgtgcacaataagaataaaatcaattagacaattaatatatttttctaaataaaatatattaaatatataaatttataaatatattttaaaaatatataaatataattagatgactattggatgataattggatcggttcaactcggttatttattggattggatgtcccttctaacaaccaatcagatccaattaaattttcaaaatttacttacgatatgatctaattataattgaatattaaaagttttccaagaagtcttgcctattggcatgtgttttggtttttctctctaaagtctttctttgtcttttactgggttatttctttttgggttattatttttctgggttaatattgg

SEQ ID NO: 170748 - DNA, 771 bp, Cannabis sativa
cactatcagaaatttgagatttttcactatttcattaaaatgattcttagtgcttgaaaactactttttctctcaatgtttcttaagaaaattgatgcagaatgctcttggcatcatcactgtgaaatttcattatttttttagatgtgcagggtgagattttaagagaacactaacgagtgtaagagtaaggagaaactagttcaaatctaccctaaatagtagaacgttttaaatttttttaattagggggtcattttatccaaatttaacgcaaaatcgatcttgaaatttacgtcttagtagtatgaaatcattgtgactagaaggaaaaaatattttgaggtgggtccgagccacatttcacaaaggggtgccattatcagaaatgtgagattttcactatttcgataaaaatgattgttagtgcttgaaaactactttttctctcaatgtttccaatagaaaagtgattcgcaacgctcttggtttcatccgtgtgaaatttcccaattttttgagatgtgtaggaagagatattaagaaaacactaatgagtgtatgagtaaggtaaaatttgtaaaaatttaccctgaaaagtagaatgttttaaattttttaagtagtgggtcattttaataaaatttaacgaaaaaacaatcttaatattggcgtcttagtagtatgaaatcattgtgattagagggaaaaaatattttgaggagggtccgagccacatttcacaaatgggtaccactataagaaatgtga

SEQ ID NO: 170749 - DNA, 681 bp, Cannabis sativa
tggattcaaattgatttaggtttcaaattttcgggttacctggtgtaaatcggttaacaaatttttgaggccctgtaaaacttgtataccggatcagcaactgggttcccgaaatttttgtgttgtcgattcgtgttaattttcagagctttggttggataattccttgattatttagggtagtgccatgttaacttttgttaggaaaacttttggttttaaacctatgtccccagatggtgatttagcgtgtcactcacccgtgttacgaataatgttatttatgggcttgtaatttgtcgagcagttgttccactcaggttggctggcacagttgaattcagtaatgaggtaagattagtataatgttatgcatatgtgtttacatgttttatgtacatgttatttatgcctgagagtacattgatagcagtagtatcagagtatactacataccgatagatgtatgtttggctcaaatactgatcgatgctatcacaaaagtatgactaggcatattgagtataagttgatattatggtcgatagtattgtcttatgaatgttgtagagttagcaccgcgtgggacacggggatagggttattgttgggtgtatgggcgcctgattataatctgggttattgctatgttattacttgtgcttttcttactgagtctat

SEQ ID NO: 170750 - DNA, 1443 bp, Cannabis sativa
caataaatatatgagatgtgtatcgaatcaaatgttataagaatagaacgattaaaaaattaaaaaaaaaaaaaaaaaaaactttgtaaagaagtcaatatatatctattgaaaacatactataaaattctaaattttaaaaaaaaaatatcaccatacaatatcaaatttaaaaacgaaagataaataagtgatacaatttaataaaagtttaaaactttgtaaacaactgattataaaataaaacatctatagagaacataccatacaattcatattgaatagttatttttcttaaaattcaaaacttgtcttaaaatttaaaacttgacagaaaattgaaacataggcacaaacatacaagggaggtgtgatttttaaaatttggagtcctcaaccgagaactaaaaaagaaaatcttccacacaaactttttttttttttttttatattttataagtgtatataaatatttttcctcttccaactttaaaaaaaatagtaagtaattgtttaatttttcttaattgaatcttatctgtagatttattattcttattattattattattttgagaaaaaaaaaagttagctacagttatagtaacaaatttaaaaatgttaatcattttttttaaaaaaaaaataagttagctacggaattatgatatatttgtgtgattaattaatataaaaatgatcaaattaacgaaaaaataaattgaggtatttgtagattaaataaattagaaaaataagagattaaggagtgaataaataaaaatagttgaggaaattatagaatgaatagtagaaaaaataaagtaaatagaatattgacaataattagtaatctactaagaattatattataaaatatagagagaagtaaacaccaatagaaaatcaaaacgaatgaataaatcataaataattcgaagttattgacaatagtgaagctgtggacataaaaaaaaattctatatgtcttcaaattatcgagaattattttgataagtgatagattaagaataaatatatcatattaacaataattagtaatctaccaaaaaaaaatatattatagaatatagaaagaaaagaaatactaattgaaaatcgaggtcttgatgttgtccattaatatcattactattgttcattattctttaaggtactctaaacaaacaaaaggaaaaaaaaaattaaaaaaaaatatagaattagagaaaaattgtgcacgaaaaaataaaagaaaagaaaaatagaaaaaaaaattaaaaaaaaaaagagaaaaacgtgaaagagtgagtgagtgataatacatacatatgtatagattaataaagatttaaatttaacattatatattttagtttttattttaaatgtatatattttagatattttattagttgattaattataatattatttttctta

SEQ ID NO: 170751 - DNA, 786 bp, Cannabis sativa
cattttgacaatccttaaaaaggtctttaccttaagaaatatgaggttccattgtaaaattaataggtgatgattagagtaatctcaagcatctttgcaccatctagatcttattttgctcgaatctcaagcgtatttgcaccatttgaatctcatattgttggctaaccatctggatagatgtagattgaaagcccgctaggaatatgactctgataacatgttgagaaacatgaggttccattttaaaactaattaataataagtggagtaccccatgttcttatgtatgacttaatacttttacatttaatccatatgggacaatgttctccaatacgtacacttcatatctttttcgacattaaattgttttttagtctaattctttttcatgattatgtactttgtaattatttaggattacttatattttttttttttaaaaaaaatcgactagtttatattggcaataattaagttcaaacaattagttactatacgtataagaaaaaatagtcacaaaatatttaaatattattttcgggactgtaaactatttagatttttttgaaaatttaataggtggacttaaataactacaatgtatacaattatgacaataattataagaggaaattacacttagtatgggatcttaaaagttattataataaatatgacacatttaagtttgaccaatttatatggtatttttaatttttagatttttttatggcatttgatatgccatatatatgtaattaggtttccaaatctcatatt

SEQ ID NO: 170752 - DNA, 659 bp, Cannabis sativa
gcaagcaaacaccacctaagtgtctaaatttgaattggaaaggaaaatttgagaatatatacatatattaaggggtaattaaccctaattttatgtgtatccatatttcttaaatataagtcaacttttttatgtttcccaaaatgtcctccttattttaaaactctccactatttcactttcatctttccctcttttggtctctttctcttttttgaattcatgaaattgcaccctcccaaatttcatcccgagtcttggactgccaccctagtagcccaaacacctcgcgccactatcgaacttccccaaccacctgagcaccaccaacatagttccccaaccacccaatgaaccgagaagtggatccctacctattgtcgaatgtaagtttttttttaaaaaaaaaatatattcattttgttataaatgttatttggaattattcggtttaattaaatttgatgttatcacccctaagtaacaccactttgtcttaatccttgcaatttaataacaggtgaaataaaaaaaaaaatggcaaaaccacaacgttataatattatatatatatagtactacattttttagtctaataattactctaagaaaatacactataatatattagtatataatatatattgaatgaatgaatg

SEQ ID NO: 170753 - DNA, 798 bp, Cannabis sativa
caaatgtgaagcctagtcctacacccatggtggctggaaaacctttatccttgacagatggggagcctctcaattcaccaactgcctacagaagcacgattggagccctgcaatatctgagtcacaccagaccagatatttcttttgctgtgaataaactgagtcagttcctcaaggctccaaccactgcccactggaatgcaacaaagagagttctcagatatttgaaaggcaccatgtaccatggagtacatttcaccaggaactaatcttaatttggttggtttttcggatgccgattgggcatgctgtccagatgacagaaaatccattgcaggctattgtgtttacatgggagattctctgatttcgtggtcttcaaagaaacaatccgtggtagcccgatcaagtacggagtccgaatacagatcactcgctcaactagcatctgaactgtcatggctgcaggaactattcaaggaaatgaagctatacacttcaacacctccagtaatttggtgtgataatatgagtgcaagtgcactagcctctaatcccgtttaccatgctaggactaaacacattgagctggatgtgcacttcgtgagagacaaggttctacaaaggaaattggagattcggtacattccatcgcatgatcaagttgcagactgcctcacaaaaggattatcaccagccaggtttcacttcctgatagacaaactccatgtgaaagaatccccctgtcgtttgaggggtggtgtgaagaaatgacctgtgacatggctgccactcatg

SEQ ID NO: 170754 - DNA, 1017 bp, Cannabis sativa
tatatatatatatttaataatttcaatctctctgtttgattgtttattgtttgcgtttttagaattatggttctttgtatgtatatgtccttccattcaacctataaagcttaagaatttataacactcgttgagcaccctcctactttcagaaaaataaaatgtgacataatttttattatgattgaatataagtttaacccaacccttgatcaagatgattcgaccaaaaaaatatttataaatattattttacacattatgtggatttttgtacaattatatatatactggatggatattagttaatatgtgtatattaattttattatttttctagttttattatgatattcttaatattgtatgcaggactacttgataattagcaagtcttattttcacaaaaaaaattaaaattttcttgattgttcattgccagaggtatgtacaatgacttaattattttgtttaacaatattatgaaaattttagaggagtttgaaaatgttagatatctatccatagcgaagtaggttctgagattatactgcggtcgaatgggtggaataatatgcatgttaaatgagtttgaatatcttaaatattcatacgtagtgaagtaggttctgcgattaactatggtcggatgggtgatgattttgtattttcatttattgttttttgttgttaattgataggtgatttattaaattggtaaatattgtataaacagaggaaactctaccgaaatttttaaaaattgaattatttttaaataactagtacttaaataaaaaaaatagtttaaaaactcgatagattgatcttttagcttacttaatgtgatttaattattttaggtggttttagttagatatggataaagaatggatgaaagaaaataaattgtctaaggaatatgaagagggtgttgagtatttcatggaatttgccataaaaaatggcgacgaccctaatatgataccttgcccatgtgtgatgtgtcgaaatttt

SEQ ID NO: 170755 - DNA, 692 bp, Cannabis sativa
ataggacttgatctcgatctgcaacacttctaaatcgcacaagaaaaacaccataagaaatcattcccactttgtcattttatctttccaaacccgcctcacaaatctatccaaaattgacattgggagatttgctccaagaacacaacagacaattgagggagtccaaaagtctacctcttcttggatatcctcctttgtgattttgactctttgtttggatggagaaccagcaaatttggagtccaaattacgaattatattcccaaatctaaggataggaggtaaaacttccttacctcgagcaactgcagcaggaaattaagtttgagcttctctgtattgtttagcttccatgaaatgtgcaaattccatacgaatctcttccctcctaatgctgtcatttgtgtctagagcaggtgaaagtacatgctccttctcaacattcatcgacacttccgtatcgtcttcctcttcagagaagagaatgggttcaattccaagaacttcatccatggaattggtcttcttcacatccatggttgattcagggccgcgtttcttcttcttcttcacaagagatttaggtttgctctgtttcgccctcgtcttcgccatggcaccaactcaaggaattgagagaaagctagagagagaaaacccttttagtatctgtaacgccccaatatttt

SEQ ID NO: 170756 - DNA, 633 bp, Cannabis sativa
tataaacagtatatatatgtatatgtcaaatgaagaagatgatgaagctttaagaattactctgttgctagaattaatatatttttgtactttaataaaattgcaaaaaaataaagcaaacattaatgaaaatacataatcaactatctatttgatgaccttcaaatcagctttgacttaagtagcattacttgcccatttaaaagattaatttagttcaatatgaagcaaaaatatactaattaattaaaaaaaaagtttaatggtaaatcattaaatatgaaatgtaacagaagaataaggtagaaaggaaaacataagtattgacctcacttttagacaacaacaatgagttaataaaagtgattagaaataataagtaatgataataataattaaacaaataaaacacataaattgtagaaaagaactaagaagttcttaatctatctcgaaagctcgtacaatagtttttgcaacttaagtgctctgaaaaaactgatttcggatcccaaaatagtgaaatgatttcactatatataggtaatgattacatcaattaggtttcccaaaactaataagatcttaaaataggaaacttaagtactttccttaaacaaataaagtaaaaaa

SEQ ID NO: 170757 - DNA, 575 bp, Cannabis sativa
  modified_base (163)..(167): a, c, t, g, unknown or other
tggaaataaccgacggcatagggacagcgtcgattttttggaaataaccgacggcatagggtgaccctatgccgtcggttatttccaaaaaaccgacgccataagtggtgtcaaaatctcttccaacaaattccaaccctatgtcgtcggttctttaatattnnnnngaaaaaaagtgcctctaaaggcttagtttgtagtagtgtctcctctatttatttttagttggccctttcaaaatcaaaatttttatttacttatctacatataaaaaaaattattaaaaaaataataaaaataaaaattgggatattaagagcaccctcaatgataatttcagtatttttgccaaattttagttaaaataattaaaaagttaaaatagagagtcaattttgttattcttactctaatcatatttttttattagggttagtatttgtttattttaagtataattataattaaaaaatttaaatataaattaatttaagggaaaaaaacagaaaaatacaaaaaaagaaaaaaaattacaaaaatactatgggccggcccattaaacatttatacagtcc

SEQ ID NO: 170758 - DNA, 975 bp, Cannabis sativa
atatatatataactatatttaaagcctattatatatagtttagtttggtttttttataaaaaaaatgtttatttaccccgcatactgaaatttttaattttttttattttcttattgtggggcgaaatttttttctaaaatattatgtaagttttatactgtgtactgtgttcagttttcactgttgttctacggttatttttttagttgttccgctgttgtttttagttgtactgtcttgtgtactactgttgttttataaaaacacattattttttgaagaaaaaaaattcgtgtggcaatatactagattttaggcaaaagtttacaattttaccgtcacacagaattttttgcgaaaatactatctttctacaaaacaatctaaaataaccgtaaaacaacaaaacagaacagttaaaaacaacagtaaaacaactaaaaaataattgtaaaagtgaaaacttaacacagtacacagtatatgaaacttacacagtatttttaaaaaaaaatccaccctacagtaaaaaagaaaaaaaaatcataaatttcagtatgtgctgtaaaaagcccaaaaaaatatgagaaaattacactcactgtgggattttataagttgtttacttaaatatggtacttttaagtttgaccaatttatatgacatttttttatttttaggtatttttatggtattttatatgtcatatatatgtaaattaagttttcaaagcccatatttaatgtttttatttgtttaggtagttttattcgttactgatgctagaaaatcgctggagtttgctgtcggtgccaaaaaagtcgaagtagttgtcagtgccaaaaaagtcgtcgagtttctgccaacactgaaaaattcgtcggaattggtatttttgccgaaaaaaaccaagaaactggtttcttgatgaagaaaccactttcttagcttccggcgacaatgccaattttga

SEQ ID NO: 170759 - DNA, 1232 bp, Cannabis sativa
actcaaactcaagccattctcctctttgatgttccgatcaccatcatcatcattattatcatcataatcgtcgtcgtccaaataatcatacttcggggaaggtggcgtcgagggtattttcagtattctaggttgagactctcactcaaatggaattgcaataggccttctaaagttatctttgtcaaaatctaatgatgttgactttgaccttgccataattttcttcaaaaattctggatttgtagattgtcatcaattaatttttgaattagctttgtttcaaaaacaaacaatattttcttggtttaacgatactttttgggtttccatcctactaattaacaacagaatattttttattaattttataatattattatatatattttatatgatttaaatttaaaatacttaaaatattatacatatttttaatcatatttttaaatttattaatttagctttaaattaaaataaatttttttatgtaaatatggtatataaagatatttaaatttaaaatattataaatatttttaactttattattatttattttatatcttaaattaaaatggttgtaataagaaattgattgcttttaattatggtaaacctattcacacatcatattttttgtaaaatttgggaataaaaaatctttatatcaaatttacgaatccagccattatatacacactcaaatttaattatttgagttttgattaagaatatatatatatagtaaattgaaaacatacattacctaattaaaaaaattaaacatacgtgtattacacttaaatcacctaattgaacctaattaaaaaaaataaactaattatatttgcattgcacgtaacatcaacctagtatatcactataaaaaaacaaaatctacgtgataattttttaatcacaatataaaattttttatgactaaatgtgaccttttttttttttgatttactaaatgtgacttttagttacaataaaatattatttgtgactaaaacataatatttgaatacaagttagttgttactaattaatttagtattagttacaacaagtattgtaactaaaatgtaaaaatatatttaattacaacaatgataatttatgtgtatatatataaatatgtttggtttcaaaccgtcgcctatagtatagccacggttataaaccgtcgcctatagtatagccacggttataaatcgtcgcctata

SEQ ID NO: 170760 - DNA, 533 bp, Cannabis sativa
caaaattaaattgaatgctgatgggactataaacaagctcaaagctaggttggttgccaagggatttcatcaacaaccaggtttcgatttcacagagactttcagtcctgttgtcaaacctgtgacaattcgaattgtcttgtctttggctttggcaaagggctggtgtatacaacaattagacattaataatgcctttttaaatggagatttaaaggaagaggtctatatggtacagcctcctggattcgaactacctgatgcacctcatctggtttgcaaattaaataaagctatatacggtttaaagcaggctccacgagcctggttcgagaaattgcagacctgtttactgtcatttggatttgtttcttcaaagtccgattacagcttgttcattttacacacttccaggtctatgattcttctattggtgtatgtagatgatataatcatcactgggagtgatgctgaacaagtttcttctctcattcaagctcttgacaacaaattctccctcaaaaatcttggca

SEQ ID NO: 170761 - DNA, 660 bp, Cannabis sativa
gagattggagataattgtacatgtagagatagtgaaacttggagagttcgatctagagattctacatgtcgtgttggtttttacagaacttatattttataaaaattaaaaaagatatgaaagattgaattttgggtgataaagtgtcgagcatggtgctcgcacgcaccaggtgcctcggacaggacacccaatgcgcgcagaaggggacaatttttttctgaaagctcggtcacgcctagctttagacactattggctgcaaatcacgcccaccaaaccctccgggcgccgagaaatcttagccaaggcaccctacatccgacactaagtgcgtgcatcccaggctgctggaatttgcaccaaaagtctaagtttttggtgatttttcactaaatttcaaattttttgaatttcaaaagctaaatatataaataaaatattatttttttaatatctaaaactaaatatcaaattttcaaattaataatatttaattttaatagattattattaatttttgatatttttaagtttaaatttaaaacttagttattttatattttaggttagattttaaaaatttgttaatttgtttaactttacagattatttaattataaggttagatattttaatatttggtatattttaaattaaa

SEQ ID NO: 170762 - DNA, 915 bp, Cannabis sativa
  modified_base (125)..(128): a, c, t, g, unknown or other
tgaccctcaaaactgtacaactacgaaaccaaacgacgcgtttttccaaaaagggattaagaaaaaaaggccctttatatttattaaaaatcactttttattaaaaaaagaactttttaaggggnnnntgttatacccgaaattcagctaccatcttagtggaggacacgtgttaagacagggaatatggatcgatgaaatcgctttttatggaataactcattaattgcgtaagtagcagagtatatatgcaacctgctgactataaggtcttatgcgaggaaaagatatacaaactgttgcttagcatattaacgagaaaccatatgtcattgaatgcatatagcgaggcatcaagtacgttacatctgggaagaccaaagcgacacatatcgactgcagaaacacttaatatataatgtacaaactaagtataacagtcagatttgctcgagacccaataagcgaggtgcctatctcgctatgtgaaggctcattcctgtaacttcccccagttaacttcagacatcttctgagaaagatttaaaatcctgacgagttggaatataacattcaactgaaccttgagaaactctctgttaacgagaactgcgattgtcccaaatgaagcgataagcttttaaacaaagaagcaacaaggcatccattgttgatctcagaaggataaggaaaatggctcctgctcgccattacaaaaactggaaccaagcacctatcgaaacaccctcggacgtaacaattaaagatgtgttaaaacacacgatcattttgaccatgtaaaagcaagaaaatcacaattatatgattttcaaattataaccgcatttacactacgtgatatgtaatcaagccacatgatttcagtggataatcgttgtaaaaagattacagtca

SEQ ID NO: 170763 - DNA, 701 bp, Cannabis sativa
actcatgctttgcttcattctattcgctaaacacttcgagattactttgtatatgacattacataggctaattggacggaattcggacatcacagtgggctgttgaaccttcggtataaggcagatcagagtttcattgagcagtttacaatcggcatcattattcaatacatccaagcaggccgaaatgacctcttcgcctactacctcttcgcccaagcttgttcaaagtgaaatctagtgccccattttttgttgaaagtgtccaccatctttcccggacttgcttgaatcaaaagtggtctatgatccgaattccaccaacttaagagggaaactttcttctttcgaaatctgtccttccaatcgggattacaaaaaactctatcaagtttctcgaaaatcaaatttgcggccctcccattgcaccaagtaaaaccatcctcttccggcttaatttctctcaaccaacaatccgagatagctgttcgaaaattcctcataagatagtcgggtttgggccccctcccttcttttcgtttctatgaagaatttcattaaagtcgccaccacatacccaagcaccattgaacatcggtttaagcctttgtaatagcttccaactttctagtcttccccccgggtcggggctgccatagaagcctgtaaaacgccacgtaaatcccaagtcattttccaca

SEQ ID NO: 170764 - DNA, 651 bp, Cannabis sativa
ctgaaacagtacagcacgagcaagcagaattagtcctggccatagaagggaggaagccaaagatcccacgagcgggggaccccgccataacatttaatgatgaagatactgtcaagataagatttccgcacaacgacccattggtcgtggaagtccagatagccaacaagatggtagccataaccatggtagataatcgagcctcttccaacatcttattcaagaccacatatgaaaagatagggctccaactcaaagatttaacccctgtctttagcccgtgtatggtttcttcggccaaggagtcgcacctctagggcgaattcgcctacccctcactgttggacaagctccaacgagcataactataatggcccaattttttatattggacattccatcagcctttaacgtcatattaggccgaccagctttgtatgacttaaacgctgttactttgatattccattcatgccttaagttcctgacaaagaatgaggtagggtgtctaagaggaaaccagcagtttgttcgggaatgttataacatttccatagcctaggataagaaggaagtatcctctagccagagctcggacaagggaaaaagcatttctaagtacggaacttcccaaggcggggataaagatgt

SEQ ID NO: 170765 - DNA, 644 bp, Cannabis sativa
  modified_base (615)..(618): a, c, t, g, unknown or other
ttgtaataaaatttctaacaatgagaagcttattccttttcaatgtaggaggagataaatcaagattgcgagaatacaagaataatagattttgtgtgaaagttattcatgggtgaacgtgatggtatattttgtattttactattttaaataatagtaatatatgtatttacatattttcttgcgttgagataagaaagttatatatgttaatatataaagaattatgtatatgtatatgtatatgtagcatatatatttgatcatgaatttatatcatattaatatatatagtgatatataatatgatatttaaatttataacatgtttatatatgtatatgttgacctcagaaattgatcaaccaacagtagggtcgtatggatctaatgcttgccacatattatacaaatagaatggaaaagtaataaacacacaaatttgctatcgatgttcgacccccttagttagtgggtaatgacctactcttttttttttgttgtattgatacttagagataatactattcagatccctataggtggatctgatatagctctctatatagatacaaaatatgaatcagtaggcagattttgttgggttttatgccnnnnataaaactctttacaatctgattagt

SEQ ID NO: 170766 - DNA, 579 bp, Cannabis sativa
  modified_base (525)..(537): a, c, t, g, unknown or other
cagtaaataacgaaataattgcgagagaagagttggcagagtttaattcgagcctgacccattacaatgttactgataaggaactcaattgaccataaaaatgaggaggaagcaaagttgaaagtaggtgaatcaaggactgggaaagaaagctacacttactggcacaagacagagagtggcttgggagagacgttgtcccaagaaggaattggaggttagggaaaaagaggtcctggagctttgcagtgcagccatggctataccagctaaaagatttgataaagttcttgttgcattgagatgcaataatgaataccgctgattctttattttgaatatggatattattttgaggacactggtgtgagtgttcttagcaccatataattaagctaatttactattttcacaacaataaattcttattagtgccttacaccaacagttgccctatatcacgtgatttatatttcattttttttttcaagaagaggagatctaatgtaacaccctaactatctnnnnnnnnnnnnntgatttttaaacgtactgtgcagcccgttgctaatcaacgag

SEQ ID NO: 170767 - DNA, 509 bp, Cannabis sativa
tgccgagataggacctatcttgataccgactaagacatgcttattttggattcgaccacaaccacttccaattcagaccaagccgcctaaatcttagaggaattttcctaaataaatatgggatatttacatcacataaaaaaaatttaatttttttatttttatatcgtatggcgaaatttttttcaaaaatattgtataaattttgtactctgtactgtgttaagcttttactgttgttttacggttgtttttagttgtttattgttgtttttagttgttatgtttgtgttccactattattttataaaaatacagtatttttgaaaaaaaaaaatgtgacagtatttttgtaaaaattaactcaaatttcagtatatttgtaattttctcaatttttaatgtcattcactttttgtagaaaaaaataaataattcaacaaaatatgaaaaaataaataaaaatggcaaaaatatgagaaactaaaaagtatataaataggcttaac

SEQ ID NO: 170768 - DNA, 904 bp, Cannabis sativa
  modified_base (539)..(541): a, c, t, g, unknown or other
cataagttacattgatgaacaacaaagaagaattcttatggagagagattgttctactgtagcttatttcttttatttcaaaggttgtaattttaaaaatacttaatatttacttggttcatatttcatttaatgttttatttattattttcttatagttgattagtacatgcatgttaatcatacaatctcacacagtttgctttttaataatcatgcatctcatactagaaacatgattatttaggattatcctatatgttttatgtgtattgtatttagagaaattaataacataaaatgttatgtgaaattaaatagtttcatgacctcgtaattcacaccaagtgactttctccaaaagctagtcacataattaaccagtattttccaaaaatgtattttgttaattctatttttggcatattttattgaaaaatatattatattatttattgtatattttcgactggagtatttaaattggtgtctatattttgtgtatctaaattttcaaggaaagttgtctagctttcctnnntatggaaattgaggtaaaaatggtaagtttgattacacaatttactcatctctaactagctgatatattctgatcttgtaagagtttcccattttgatagatcagatttcttgaagagtgaatcggagctaaactttcattttctataaaaggaaagttgcacttactggccacgattctgtaggtacagaaatggaaattcctgggctgattgaagatttattttagggaattttttagttggctagggtcttgtttagaccgtgtgtaagctgtcagtaaggtgtatattgattataaatacacattatagcatctaggtttagtatctctttcatacactttgaattgtattcatatctt

SEQ ID NO: 170769 - DNA, 1250 bp, Cannabis sativa
atacatacattcgcatatatattacatatcatatgctgttcttaccctctttctgaattcgattgagttggccgacctgaacagtaagtctcgtgctggatggatgccctaatcacataacataactgggtaaatcacatgttaaaagcctaatctgggaaccgcaaacctataatttaagggtctgttattactaataggaactaaaatatcctaggaaacaaggaaacacccaactaaggcactaaaatgggccagaattgagaaaacgagttgttcggggaatctgccaaaaccggtcaaccggttttacaggtcctaccaaactggttcaccggtttgcaccaggttttcccaaacagctccaaacttgctcaaaacttatccaaatgccaccaaaccttccaaagtgcctaaaatgagcttacacacatatttaaacaaatagaactaagaaaaatactcataatcaaaatatgtcattaatgacctatgtttgaatttccaaacccaaatttgttcaattccatcataacacatcaaaatcagcaaccaaaactcaatatcaacttagaatgaacctaaaaatcgaaccccaaacacttctaaccctaacagccacaaaaactcaaagttgcatgctttaaccaaatagaatttaacgaaatcaagaaataagagcttttagggcttaccttggttggaacctcctcaaatccttgctgaaaacacaaaaatcagctgaaaatcctaagtgtttcccttggttttgcttcagttgaaagagagatagagagagttcaaaaatgtgtttttctttaatttttggcttttccttatttttctcaaaaatgatcaattatccttcatttttggctaagaaacaaatcacaggatagctgccaccatcttaaacagccacctatgtcaccttgacaaaattactaaaataaccgttaagcttaaacacttaggtattttttaaagctagggataaaaatggtcaaaatccataaccccactcaaacccggtattccatttttctccaacatatatctcactaagaaaaaggttctagacttacccatgttaataaaatagacatccatcgcattttctgttatcgtcgagcaaaaattataaagataacataatttatatataagacaaataatactcctagattttaataaaatctccagaattgagaaattataactctgacgcccacttttaataatgggactca

SEQ ID NO: 170770 - DNA, 585 bp, Cannabis sativa
ctaaaaataaggttcaaacatgcctattttaatcattttttaaaaaattaattttgtattatttattatttattattagtagtattgaaaatccaaaaatatttataagaacatttaagtttttcctaaaattttatgtttacttaaacaaaatagattcaaacttcttcatatttacaaaatcatcatatccatgtattgcttatcgaatttctttacttaagtataaaaaaacaaagatacaagttgtaacgtcctgatttctcgagacgtcacacttgctagtctgtttaaaacatttataataaagacaataaactaatttattgaaaatattcaaagcatgaaatctcattatttaatcatttataaatttttaaacattaacttttacaaaagtaatcgagtcataatcttaaacaaaatattttttaaccaaaatattgtgacaatcccctaacatgtaatccatgtctcgagctcgccatcctcactgtttagctttgcctaactttacatgcacacaaagtactcgtgagctaacgcccagtaagaagagcaatgtaggacataaccccccccaac

SEQ ID NO: 170771 - DNA, 594 bp, Cannabis sativa
  modified_base (278)..(280): a, c, t, g, unknown or other
attctcccactcaaataaggtactctgattaagtgtacaagaactcttattggtatcaatttctattacaacagtaatatattaattgcaacataaattaagatcaagaaaatattctaaataatttgctaattttgttcattatattacatccatgtttaatcaaaaatatgtgtgccacagagtactgtggtgtattgggtatagtttggagctcaaaatgaactacatatttcaatagtttaatccaccgctaagtgatatagagatcatgtggnnntatgaatataatccagagttcaatagatttaaaagatcgttgaactgcatattattcttaacttcttccacccctatcagatcaaaaggtctttttattaaacaaattcttaataaattgttttagaattaataattattcataaacatagaattaaaattctaagtatttatgtggcattcattctttgcggagtctaatataccataggatttgtatcaataataaaagacaaacacatacaaacattaaaaacatatatataattggtattggcatacacaacataaagaaatatgaagctcaattcataa

SEQ ID NO: 170772 - DNA, 537 bp, Cannabis sativa
gctaatttataacaccaatggtcagtactgaagttggtaagatatagaattttgctagtgttaatcatgtataatttatatgtcagatagatcaaaaggtccttgtatgctagcaaatgtttatgtttttcattttatgtacaattgagttgcacacttatttttgttttgttactatgttatgttctgtatctttttttaaaaaaaaacttatttttattgtaaaattgaaactaaagatcgcagtaagttcaaagcaatcatttattatggtttttttaaaaaataaaaatcttatgtttatggtttttttttttacataaatttatatttatgctatactaatttattttgaattttcattggatatacgtaatataaattttaattacataaataaatttgggatattttgcttaaatgtaaaatatggtattttaatatatatcacctaattagaaatagtttatttatatttttaatatctttttctcccaaaacacccttacattttaaaaaactctctctctctctctc

SEQ ID NO: 170773 - DNA, 678 bp, Cannabis sativa
gatacaaatatatataattattaataaaataatgaaaaaaatgtcgtgtatgttacagttgatatgctagttttaggtttatcttataaaatattttagaagtgtgtcttaattgattatattcactttgtccagaattcttgttttctacttattttaggtttaaatggtaaaattcataatatgaactgaaaatgaagaaaaaaaaatgttaaatgagatgaatatgatgaattatcaagaaatttggagttttaggatataattggtgaaaattctaagttttgggatgcttagcatgctctgtttgtgatcaaaaatcaagtctgaaacttcaagtcaatttttgactatgatgcgttcattttaggaaaactattgtggataaaaattctagatctctctttcacacttgaatcatccaatttcgagcaattttgaaagagttatgacaaaaatattatcagtcgtcgcactaagaagcttgctacacaaaaatagccttcaggggccacgacatgtaggttgaatgttgcggcccgcctcatttaattagcaaaaattagggtttttaccctattgaaaggctatataatgaactgttcggttatttttagtattaattttagattaagttcagtatatttttaatttaattttaatcgtgtttggagcatt

SEQ ID NO: 170774 - DNA, 511 bp, Cannabis sativa
aaatgaattaacttaaattagaaataagagtaaacttaaaattgaaggaaaacttagaaatttccaagcctctctccttctctctcgaacaccaaggaaaccagctgggaattgttgtggttacctcaatttgtgtgatcttggttgattagaacactccaattcaaggtaaataactctagctctcctttccatgatttttttcctaagcttaatgtaagttttatgcatgaacttgggtgtttagggtactgtaggtttgggatggtttgttttcgtgtttcgtgttttgggattaggtggggagtatgttgtttgatttgagctgatatggtacgctttgttgaggtttggctaacgtttgagtttgagaagtgaaatcttgacctttaaaggtgaattgattattagtgtttgttgttgagttttattgttttgttttagtttattatggtatgtacaggtattctggaagttattggagagcttgggattgaattgaagtgtgggg

SEQ ID NO: 170775 - DNA, 509 bp, Cannabis sativa
ggtaaaataattcccaacaaacccgcccaattaaactgacttaacccgaaataacccgaataatactattaattttcaattatatatatattttttttaaatattagcagattatttattttattttattaaaaaaactaaagttttagtggcaagtttttattaaaaaataattgccagatttttattaaaagtaaaagttaaaaaaaaaacccctaaatctaagactcagtcactgtctctctcatccttatcctctctcgcttcttctaacgatgtcttcacgcagccgacaactttatggaggaaatactttattttttttgatttggtcaccaactgagaagttttttggtttcattatcggcagaatagaaatgggacacctttatggaggcagttccttatgccaaacatcaattctcatagggatattagtattgacattgagcacgccatgttcaaattctctacgaataaataacatgaaatctatggtttatcaatcc

SEQ ID NO: 170776 - DNA, 611 bp, Cannabis sativa
attaaaaataaaaatatatttattaaaaatttatatttaatttaataattataaataattcaatgtaagtctatgcagtacaatatacttttcttacctcaagttcaggtttaggtatgttggccgacctacttagagtacgatcgatgatctcaggtccttaagcttctcgctctaagaattcactattctactactaccagagcttagatcgctaagttttgaattgaaaatcgaaaaaaatagatataagagggagagggtttcgtcgaagaaggaggatgagggttcgtttgttttgtgtttgtaaacatatatatataaatatattgttaacgctttatatctattctatataaagtgtgcctatataattgaattcttagtttatgaatcataggtgattttttatttttatttaataaaataataataaaacaaatctcattaatatttgaattgatatttgatgcttattattcgagaatcacaacccatttaaagtaagggagattaattttttttttttttttttataaaacaagagggcaaaaataaagttaaaaagaaaacaaccggggatttgatacggagagtgaagcttctgagtc

SEQ ID NO: 170777 - DNA, 678 bp, Cannabis sativa
tgaccttttcttctctagaggctggccggccttaggggtggccgacagctcctttaaggaagttggtctgtcacttaatgtcccgtttgagtgtcggagtccctattggctaagttgttgacttggccatcttgttggtgagttgtattaccacatggctctgattttgtccacataaggaatgccatgtatggtggctaaaaattgggataacatttgccccgaagtccctgtgtagacatttgtacggacactactacaaaagtggcttttcccaacggtttataagagagtcaattttgaaaaccgttagaaaaggtaagcagagatttttcccagcggtttaaaaccgaagcaaaaaaactgttgggaaaaacaaatgccaatagtgaagcaccgtgggcaatactaaatgaaatttttttaaaaaaaatagtaaatgccaacagtttataactgttgggaatactaagtacaaccattggctatacttagtattcccaacagttaaaaacggttgggaaatattctttttagtttaccaaaaaaataagtttcagatttaagaagaaaaaaatttttttttacttaataaaaaaatttgtatttaataaaagaaaatactttaaaaaagttttaaattaaaaaaaataaagaaatttgtacttttttcttttc

SEQ ID NO: 170778 - DNA, 533 bp, Cannabis sativa
ggatagctctcttaatgcgcctgttggctgcctaagcaactctctgccaaacaaatgaccctgctcctctactaagcctctgagtaccctggcaagtaggtcgtatcataggatgcccagctggtgcagggcctagtggaggggaaggtagtgacaacccgatagtatctccactacgggaagtccttgccacttggccctcactagtcgcgtgggctcatctttaggtcccccaataagacctttcaacttggaagacatatctacaataagaaagtagcaaagttagaaaacaatcataaacattcaatataagacaaaagaatggtgttatcaactatcaaataccatcgccatcaaaagaggaactatcagagtcctcgacaataaccttgcccttgcccctaaatgtgtaacctaatgcaaaaaataggataacaattattatctaaataatatatattaagtgtatggtaaataaatgtgtaacctatggttttagcctacacttttgtaacctacatgttgtaact

SEQ ID NO: 170779 - DNA, 722 bp, Cannabis sativa
gtttccctcattgaccaaggactcacatacattcatggtccaatccttaaggcaccatgcctccatgcatgttagcatgcccttgagacaagccaccaaactagtgcatacattagaactctgtctctttccagcatggtgcattagtcgcatgtgcatatgcaaactagcccacgaatgactaccctggtcatctcgtgttgagactcatatccaaggcacaccacaacatcttttagaggtttaggccacgtcccgtgcaagcggcataccgcaagccaatggaaacatacctgctaacctctattagcattcttaaatgtactaatgggtcaccccgataatgtccatgagtattcaaactcctggagacatatgagtcccctcatggtcctcatatgcctaccccactagccccactgactaatagtagctcacttaacaccaaggtgccatgggatggtggagagctgacaccagacactcgccatttaaagagcatcctcagcttttagccttctactaataacatatatgatttttgccctgtacacatatggtcatcaccatataccaaatcacagagtttctcaaatctgattgcatcattatattcgtacacccaaataaatggcgaatgccaagtcccatcccaatccagataatattgaagatatttataaaaatgtcactaccgtacaaactaagcatcagcatgccac

SEQ ID NO: 170780 - DNA, 783 bp, Cannabis sativa
cccaagcccgtaagtcgacctacaatctcaactaccctccaatcatcaattctcctattgcatctctaacccctaggtttggtgatcatgatgaatcccattcatctgatcgcacctcgtagaagtcgtcttcttctaatggtgttcccaatgccaagagagccattgttcctttgcctgtggcaagctctcgaattaggtccaaggtttctactccaaagaaaccagaggtggttcaggccaaagaagtctccaaagagaagaaaatggtgacctcattttctagggcaaaaaggctcaaagatcatccaccgtccatctcttcatgagattgtgaaccagaagaagagcttgaagataaagaacaagaatcaaaggctgggtctaattctagtgaggaatttatttcaaaagatctctcttctgttgatggttctggttctgaaagtgaagtgcctcaagatgctcctgtcagtacaaaaccagttgatgttcctgctgcagtttaaaagaaagacaaaggaaaaagacccatggtttctccaagccctattcttcctcaaaaaaggaaaaggccctttagtattactcttgttttatatgtggaagatattcttcttgcatctaatgatatggggttgctatgtgaagtgaaatgatttctttcaaataactttgagatgaaagacatgggttcagcatcctattacataggcattaagattcatagagatagataccgaggtatcttaggtttatcttgttagttttatgatactaaat

SEQ ID NO: 170781 - DNA, 1182 bp, Cannabis sativa
  modified_base (825)..(829): a, c, t, g, unknown or other
agaatcgtgtttatcacaagacgttcatcatcgacctctgaggggaaaatggccctaactcgctattatgatccttgggaccaagcttctatcgagacatccctggatacaacaattaaagacgtgtttaaatacacgaccattttgacccgataaaagcgggcaaatcacagctatatgatttttaaatcataaccgcatttacactacgtgatgtaatcaaaccccatgattttaggggatgattgttgatacatattacagtcaactttgtaattaactgcccactatgtaattataaatagtggtaagcaagatcaaaaaagggacagaaaaactcatacaaaagaggacctgagaaaacaatcagaaatctgaataagattgactgcaaaaccacgtaaaaaccctatgtgttcatattttttatgttatagcttttattttttctgtgtgagattgtcacggttaggctcaaatttgattaacaaaaatctgcgttaacaaattattttaaggataaaatatattgaagggtagaccgttaaatttgtccttactcgatgtaaataatatatatatgatctttaatttcttggattataacaatggataattaatagttgagataatattggcttgtagactcagttaattagttttaattaaataattagaattctaagttagactgtgtgttatttataaatttttactaaagaagggcttaattgtgaagaaagaggatttatgatttattttttattaagagactttgtaaggttctaataaataaataagttaaatgataattttatttgatannnnnttataattattaaataaatagattcgacatttatatgattaaaattaaaatatgacatttgtgaaagaaaaacataagttgttaaataaatggtaaaattaaaattcgtggggtccacttaaggttaattttaaactattattttatcttttttaattcaatattatttaaaccataaccccatatgaaatcctacaaatagataatgataggctcctattttcataaactcctcatactattctgtcaaataactaaaaataaagagcctctcatatttcaaaattctctctctctctctctcttttcctctctctttcggcctcttggtgcagcaagggacttgggatttt

SEQ ID NO: 170782 - DNA, 830 bp, Cannabis sativa
aaaactcagaatttttctggtcttccagaaccagccgaccagttggttctggtgcaccagaaccggtcaacgggtttgcctgcactggaaattttttagttttcctcaaggcgagttttagggctcggggtgatttttcctgtttagtatagattgtttaaaagttgtaaagcctatttttgagttaatttttaagttaaggttcaccggttatgggatttagggttattctcagaattattgatttaaggtatttatgtaatgttgttgttgtgacataggatccagtatcgttaagctatgtttatccacttaggctggcatacacacttaatctctggattgaggtaagaagagcattaagcaccatatatggctaacgttatgaaaattattgactcgattatgatcgagatctcaatatgtgtttgttgtaacataatctcaatcgagattaatgatatgtaattattgtgactcgattatgatcgagaaaataataggaaatgattattatcgttgtgactcaattatgatcgagggaaatgataggaaacgattatcattgttgtgactcgattataattgaggttaatgatatgaaacgattattatcgttgtgactcgattatgatcgagtataagaaacggtcattaccattatgaggaattactcctaaaaccgcagataggtttcttacttatcgtttgctgtatcgggcaacgatagtggcatatgttgttcgtggttaacgagcgataaaggtactttatgaagtatcggcattgtgtggttacgatgttgtgaaatggattaagcgtgatattat

SEQ ID NO: 170783 - DNA, 572 bp, Cannabis sativa
aacatcagcaaagagctcaaaagcttcatctgggtaagacccaggtcctgatctagcctcattaagcttatcatcagatctcgccaccgccggtctatacagaaccaggtcgtacaagaatctcccctgaggactgagcagtgcagcgtacatgggtggagcggagaccgtagccaaatcgggcgtgaccagagtcgatgaatccttctcactcgcggtttcatctaatcgtcgtacatcgttggtcaacagtccctagaggaacttgacggtgtctagtcctcggaatcggaccacggagcgggatttgaggagggaagctaaaggacccacttttttgaggtctggtttccgatggaggcttttatagtgacatagattgacccaaatggtttttgggaacagaagggcgtacccagatgaaggggatgaagattactggtttttagcaagaagaaaatggttgtgaagaagaagagggcgatgaaggggacgaagaagaaaagggcaagattaggttttgagttttaatttattttattttaatttaattaaaatatgaatattaaata

SEQ ID NO: 170784 - DNA, 587 bp, Cannabis sativa
catgcaaagaaacaatacaacaagcgataatagaaagaagtcttaaattttcttcgagggagttaaagaggaggttaagattaagatcctgggaattgctcacatggaggaggagtcttttcctcttaagtacttgggagtcaatctaagaccaaccaaatggaaggcatcgaattgtggtataattctagataaatttaatgcgaaactcaatggctgggctagtaggaacttctcctttgttggccgggcccagcttatccactctgttttgcttagtatccgaaatttttggattagcgtcttcatcctgcctcaaagaataattactaccattgataaaagatgcatagacttcctttggggttcgattggtaatagaagcaaattttatctcccctcttgggaaaaagtttgtcttcttaaacaacttggaggtattggtttccgagaaggtaaaagtggaacatggccatgatagctaagcatatttgggcaatttctagcaaacaaaacaacctttgggtgaagtggattaattcgatctgtaacgtccccgcttcaagcctccattgggtccttacacc

SEQ ID NO: 170785 - DNA, 610 bp, Cannabis sativa
  modified_base (543)..(566): a, c, t, g, unknown or other
cgctgatgtaatattttgaacttccgtcgtgaataagataattatttctttcgacaagtaattatatagcatggccctttaaaattacttgaggggcatatatgtatatttaaccgaaatttatctagaaatatatgacataatgaaaacccactactttaaaaataaatttttttaaaattttttagaggttcctgaccaaatctttctgacgagaaaggggtccaactattataacttcttgactaaacctttttgacgagaaaggggtcaaattgttataacttcctcttgaaacctttctgacgagaaagggatcaaaaaaattataattttttgattaaaaacctatatgacgggaaaggaaaattaaaagttataaatgagatataactcataactcacgtgtaaagctgaatactaatggctcgcacactaaaggaaagtattaaacaagagatatcaaggtgtcttgaaaaaagtacttaaacctaacacgtgggtataagatctaactgttgggtgttatgccctaaataaaannnnnnnnnnnnnnnnnnnnnnnncttattaatatagatcagaaaaaacatttaatgttgcatggttc

SEQ ID NO: 170786 - DNA, 1031 bp, Cannabis sativa
agtcaaaaatgaagttagataatctgtgggttgataaagctttcgagttaggagaaactttgtgccaacgggatcccggcacttgtaaatatttttataaagtttataaagtttcttagtttatactaaaagttttaatttgacacaattttaaagaaaattctttgattagcaaagatagcacttcaattataaaattactgtagtgtgccttagcattagggcgttacaaaatattagcaactaggagtaaccaaacttgtgataactaggagtaactaagcttgtggtacttggtttaatccacatgggacaaccaggaaaagtaatgactataaactagaaccgttattatgttctctacttaccggttatctctataaatagtatattaattaaacttgttattataggactattcttatagattttttttttaaaaaaattgtaattgttgtatacaataaaataagacgttgtgataagacatcaataatatttttttatacattgaatctaaaaatatgaaatttgcacttagtgcaaaaattgattgaatgaacacccgaatgataaagtggagataaaactcttcaaaaaaaaaaataaaataaaataaaatagaaaaaaaaattaaagtgatgtaaaatcatcaaatgaaggttacaaggatttaactcatgtgctagaataatttattgtataatttgaatcttattgatttatatattgttgtgtatagaatataaatatatacatgtgttttctaatctaatatgcatttactttttccaactatacatgtcttttcccaaatagttcttaatattgcttttatttaagtttatgtatatggagaaaaatatatttaaagaacacgtatattctcttttgctacagaggcttttttctaaaacaaaaatttgaagtaaaaaaattatgaatgtagaagaagatttccatccaagtggtaaagagtggcctttgagaagaaaatataattatgttaaaaatgtgtactactaactagt

SEQ ID NO: 170787 - DNA, 1677 bp, Cannabis sativa
  modified_base (1586)..(1590): a, c, t, g, unknown or other
ttttctattattttttaaaatgatattttgtactatattttttttgctcataaaatattttttatttttttagtagtgattttttctttttaattttataaatgatcttttttttttcttttcaatatcatggaaaatggatacgttgacatttttcttattaattacatatctttatttattttaattagaattttaacttttgtttaaatatacataaattcgtaagctttttttaattttttatttttatcttatttatactatctatatatagttaaatgttagtagtgtttatatatatataaataaagagtggtttctcatattattttttaaatcaaaagttatgagacccgatattaaaatgcatcgataacggtatgccacatctttcagtgcttggcacctcctttagcattttacttattaatatgtacatatctttgttcactttaattaaaattttaactttttgtttaactatacataactttgtaagtttcaaaatttttagttctattttattttttgtcttatttatatggtcaataattaattatatttattactacttttttttataaatttatttagttgtttttgttttatgatatatatgtataggatgtattatattttagtattaaatgttgaattaaatatattatttctgttgaaataaattaagtaatttaattagttagataattacaattaaaatttcttcaaaattataagtaattttatatagtaaaatttatataggagtctgtatgatgatacttgagtataataatattttctttaaaatattttatgtttattttttatatatattacttttctgcatatagattatttgtaaatatttttagaaaatttaagaaaaaatataattttatcttgaaaatcaaataactattggttggtaaaaatattttattatttaaattattataaatctaaattttatatttattttcctaaagttcttgttttttttttttttatattttctcaaacttaataagattatcttagtaatttgatttttttgtttactatatttggagttgtgtgttttatttttatttttaccaattattaatatttatccttttcctctctcttttattaatctcttttttttttttcattttttttaaatctctcattttttacaccatttgctttcttaaaataccgtttttaagtcttttgtacattttttaatttttcttcttatttattaattagtaaatatataatagtgtaaaaagtatatgagtatatatatagtattaatcttttttgtgttgttattacttttttttataaatttttgttagttattattttattttcttataagctttccttattagtagataatagtagaaaaaataagatgaacttacatttagatagtgaagaaaataccatacttatattcttgtttaaatatatattttttaataattatttaaatataattaatgaaaataaaaaatatgattataactcatatatattgacgggtattaagtcccacgtactccctacctagtaaatatatatatatnnnnnctagcaaaaagctacgtgcaaggcacgtatactaaattttatgccaatttttttttatgttagttgaaagtgatacaattaaaaatt

SEQ ID NO: 170788 - DNA, 617 bp, Cannabis sativa
  modified_base (227)..(228): a, c, t, g, unknown or other
attgacctagcaggaccatggccgaccagacgtacctcccttgtaggtctatcaacccggcaggactctatgtacaacctaaaacgtaaacagcaagctacctgtgaattgggcccttaacagcccaacaaactaatggaaaatatctacttttgaggggtaatttagtcttttatatttaattaatttaatgtgtaaatatctaagggtttcattgtaaattaggnntttaggcttcctatataaaggtcttaactctaacttagaaaacccaagttactaaaccttaacctagcctccaaatcactctaagtccgaaaacttattctcctctctctctctcttgtacatgcccaatagggctctctctcttctcacttcatctctcacatgcctctaaggctttttatctctctcattagagatctttctacttgatccatgttttgtatccttatagagagctatatctgatcccagctatagtgatcatcttaatagtatagtattatctttaagggggccaaacttctataaaaatccttgtctcatttgctactaattcaataactatatatatatattttttttttaaaaaaaaataatttatcttaatc

SEQ ID NO: 170789 - DNA, 945 bp, Cannabis sativa
aattaaaatatgagtggtttaggcttaatccctaaatgatctttgaatgattttgaaaatgtgatttttgagaatatgtagcacttgtcacattttctgacatagtccatcaagtcttcgatcatcgttggccaaaaatacccttgtcagagtatctttttggataagctttgcccccgacatggtttccgcagaagccttatcataagctgttcatcttcgactttggtgatgcacctcaggagaggcatagagaaactccagctgtacattatcctgtctaggatcaagtacctaacaacttttcttcttagtttgttagcttcgtttttgtcttcaggcaaggctactttggaggtaagttgcgataggtgtcatccatgctgtagtgtcatccaacatgtcgatttcttctgggacaataatgttgggttcttctaggaactgtatgggcaccaagtttgctttgtcagcaatggtgctacttgccagacgggcaagtgcaatggtgctaatcgtgtagcctttgagctaacttagcaagtctctgatttttctcaagtatgccaccattctatcacttcgagttgtgtatttatctagaacttgattcacaactaattgagaatcgctgtatatgtccaggtggtcaatctgtacttcatgcgctagcttgaggccaactattagggcttcgtattttacctcattgtttgaggctttgatgccgaattttattttttcgtgcagttgttgcccctaaggtgttgtaagggcaatgcatgcaccaaacaattggtcagtgcaacttccgtcaacatggagttttcatgttagctcttcgggattttgttgctactcttgctcttgttgatctcttgagttttgaggggtctcaagagttaagttggtacagtcagccacgaagtctgcaagggcttgacc

SEQ ID NO: 170790 - DNA, 956 bp, Cannabis sativa
attttcacaagacttgggactttctagtgtgaaattccctcttatgtactggtgtgcctctatattgtccattcattcacttccttctttcttgttgcttttcttttttttttcttttttttttggtcattgaattttaatatataaatataaaattttagtttctgggttttgaaacttgttgcccaatttagaagttgaatctttttgtgggggtgggtttgatatttaatgtggtgttgatgggtgatattgttcaggaaagtgaaatttagcttggcgatgggttgtggttgctttggtgaattgaattggtgtagaggaagcttaaatctggtgagccacaaactcaggtgagatttgtattctagaatatattgattaactttctggtttttatgtccttttcacataaataatcgtgctagagtaatctgtggaatgcaaactttcttctccgttggaggtggtggccttggtcgctctctcggtcgctccctgctgatggctcgtcccatggttggagaagaaagtctagtcgccaccattttctctctccaccactctagttccacagatttagggtttttagtttttatttgtattttttttatctaaaattagatattaattgtttttgatttgtattaattgttttatttcagattttattataaatttattaaattaatttttatgtaaatattttttttgtaaagtaaacttaatttttactttaatggttaatattaggtggctatttaataagatgaagtgtcattattttaaatgacgtggcattattttaaatgaagtgtcatgccatctggtgtccagtttgcatgataacagcaagctacctacacaatgtctgaaagtgtaacggaaggtatttatgctgccaaaattttaacttaggtattaaattgcaaccgaatgataaacttaggtattta

SEQ ID NO: 170791 - DNA, 581 bp, Cannabis sativa
ttcaattctatgttgctagctagctatgtatgtgtgtaatgagtacaaattacattgatcgcgcgtttactaaaatgtaactggaatcagaataatcaatgagagaaatgaattggtttaatatataaaaaaaataatcgaaaataatattttattatgttgtttactaaactgtctggaaaaaaaaaccaaaatcataatattttgtttacataactaggaaagacaattagaatgctttaatttgataaaattgtcattattagaacatgtaattattttctatttgtagatttttaaagggtatatttgttttttttatttttaattaataaaattaaaattaaaataaactagcaaaggaaaggtattctatagggtagaaactttccctttgtttttttccctcatctgtgttgttcattttccatttgaagtgtttattactggtgcagtgaaactcttgtatcaattacttttaaaggcttttaattaacacatgatttcataatatcctactagaattcattttggaaaatttacatctaaacccctaaaatacatctcaattacacaaatga

SEQ ID NO: 170792 - DNA, 1036 bp, Cannabis sativa
aaaatggatatttgagagatttgatgtgaaaaaatattgagagacagaaataagtttgtatttgataaatgtaaaaaaaagcttctctactttagagaagctattatgagtactttaaccagtgcaagactcgcactgtaccacctacgtagtttataactattacttctttttcttaaaattttagtttaatgtagtattgattattattaaaaaattgtaaattgtgaccaaaccccctaaagtttcactacacttacaactaactctcaaaagtcaaaattgttcttttttatggcaaaatctctcaaattcgtattctgctagcaatttatcattttaatttatttttagctattaactaccatattagattgtctaggtgtacataatatatgtgttaattatatttttggcatatttaattaacaaaattattttattaatttattattaatttcggatgtggtgtaaatattggtttccatattttgtatgtgaatttaatctatctttagaaggaaagttgtctagctctcctatttatggaaaataagataaaaatggtaagtttggttactcatttctattctacctaaccagctgtcatattctgatcttgtgtgagtttctcattttgtttgatcagatttcttgagaagaaaaccagagctaaactttcctctgttgtcttgacacaaccgatgaggtcaataccacttaggttcttagatagaaagtcacaatacctcgtcgtagtgggagggtttcaagaaactcaccctgttatgacttggaagacacttgtgattaaaatctattgttactttaaacaagaaatggatagtcagaataaggaactaagaagcaaatcaaagagaattatggttaaaaccattcatatggagtaaccaaaaagttttctaacaaggacaagaaaggaaattttgaaaatatgtttatttattggacttaacaaaacttcctgatcctaatattaaatgtttgagtttatctaaacctatggcttgtggta

SEQ ID NO: 170793 - DNA, 529 bp, Cannabis sativa
aaaattgtcagtccaagggttattaacgataccccagtccagacgctcttgaatgttccttggggaggcgacattattgttccacgtgagcaaggggccagacgggtcaagaggagagaggttaaaagagtcaaggagctgtctgaagtcagaggaagggcccctatcaggatttcccccttgcttatcctgggaaaaaaggaatgcattaaagtccccaatgataagccacgggtcccgagagttatccctaccaattctgttcaggatattccaagtgtgggccttaagagagtcaatcggagaaccataaaaacaagtaagatggaaaaacgcgttggaaacagtacacgaaacatagcaatcaaaatggctaatagattgagaaagtaaagtgatagttacatcatttgaccaaaataaaagcaagcccccacttctaccaatcctaggtatttctaaacccgagtcaaaatggagcttgtgctttaaattgtctacaacattcttagcaagcctagattccata

SEQ ID NO: 170794 - DNA, 732 bp, Cannabis sativa
ggccccatcaggtcctatatcgggcattatttgtcttcaacctagattcaacttttcatcacgatgcattggacctacgtcggaaatgcatcggacttggattaggcatgtctagaaaaaacattttttaacccagaaatcacagatttaaatctaaccctaaatctaatccaaaacgcacatatcagactctaaatctatcaataaataaataatattttaatattaaatcaataagaaaagcattcaaaaatggcgtagggaaaatcttatcttggtggttgttcgtcttcgtggtgggtcaactgggtggtgagtggagtgggttttcgtcctcagattgtgggttaattggtgctcagatggtgggttcggtggctcttttccttcgtggtgctgggttcggtggctattttccttcgtggtgctgggttcggtgggtttgacagagttcgagagaaagagagaaaggggaggaagagggagtccgtttttagaataagaggagtaaaatggaattttagtaaaaattaacttattgttttaattttgaattagtcaaccaatcttagtccaactaatgcctaaaaaatcagatctccctttgataaacacccataatgtgtgtatatgtatatattgcgtgtaacgccctaatgttaaggcacgctacagtgctttttcaattattgtgcaatctttgctaatcaaagaaatttctcaaaaaacgtg

SEQ ID NO: 170795 - DNA, 950 bp, Cannabis sativa
ttattgtgcacaattagtgaaacttaatcttggtagcacaactttcatcagaacaagtttagtggatgatgtaaggtatttcgaaagggtttacatgaaccttgtagcatgtaaatctggttccaagttctgtaggcccatcatcaagttagatggttgctttttgaaagggtattgcaggggtatgttgcttgtagccattggtattgatggaaacaacaacatgtttcctcttgcatatgttgttgttgaaaaggaaaacactgatagttggacttggtttgtgcaactactgaaagaggacctagatgtacaagacacaacattattcactttcatttcagacaggcaaaaggggctggaaaggattgtagcagaagtttatgaaggttgtgaaatacatttttgtgttaggcatctttatgccaacttcaagaaggagtttcctggattgttgttgaagcaacaattatgggcttgtgctagagctactacagtggaagaattcaaaaggagaatggatgaattgaaggagacaaatgcagcagcttttgattggttgtccaaaaagtcaccatctgaatggaccaagtcccactttaggactttcagtaagtgtgatatgttgctgaataatctttgtgagagtttcaactcagccatactagatggaagagacaaggcaataataactttgttagagtatgttcgatactggctgatggatagaatgagaaagcaaagagaaagtgtcagtaagtggaaaaatccagtggggaagaggatctttgatatcctgtagaagaataggaagtttgcaatgaaatgtcagtgtacaaagtctgatggaagcttgttccaagtgacattgtctactgggcaggtggaatcaacaaatttggagaccaaaacatgctcttgcagatcttatgtgtaacaccctaactaac

SEQ ID NO: 170796 - DNA, 1767 bp, Cannabis sativa
tgtgttttgctcgtgccgacttatatttctcaaatagaccagcccatttcatatttggacttaaatttgtattttactttttcatatatttttttataattgctaattatatgtatatttcaaaattttaattatatttatataacgttaaagctttagttatatttatataacgtttgaaccatatatttttatagataaacatataaaaaaattattaatattattagaaattaaatagttacttataaatactaaaatttttatatcacaccctataaataaattaatatataatcttaaattttcatgctttaataattttaattattagaattataatattcaatattattttaatttatttataatttataaattcatatcttattattattattattattaataaattgtaagatttttaatatgtcctgtcgtattttttaggcttgtcgtgtgtcgtattttttgggcttgtcgtgtgttgcacttttcgagctagtctattcgtgcttacgtatcgtgcttttcgtgcttctcgcgtagtgtcatgcttaaggacatattttttgtgtcgtgtcatactaattcgtaacattgtctcgtgtcgtgcccaagcacgtattttttcgtgcttagtcgtgctcgtgccttctgaactcgtgtcgtgtcaaaaagcccaacctatatttatagcacttatcggtattggtgtaattcaatatcaagtcctacttattttaatttaataaaatattatagaaaatcactaaccaacaataaaatatcatctcatagtggtattagacaccttagtgccttataacaatgcttaaaaaaaagagcattattataaggtatcagtattgtctagcactatctagaggtagaaccttttaattgattagtaatattttataataattattaaattaaattatgtggaacttgatttttttttgaattaaaaaattaacttttattaaatcaaattagctaccaagatagcttccaaactagtaaggacctaacccccgcgagaaacacagccaagaatagaaccagaagaatgagctaaaaagttaaccgcctggttcccggaccgtttaacaaaattaattgaaaaaggaaacaaaagagaggactgcataagagcaacacaattcgtaattaaaagtcctaccggagacaacaaccgcctcttctgttgcatgacttgtaccagcagcagcgagtccgactctataaccacactagtaggcacaccccctctacccaccttcccttcacccaactgagtgcctccttcaacgtcatagcttcagccaaaaatgggtcgggttgaccataagttttaaccgccaacgcatcaatgaataaaccattatgatcccaagcaatccaccccaaaccaagactattgtcatcctcaaagacagcaacatcacaattaacctttatctcaccaaaacaaggtttagcccattgctcacacccagaagtattcggaccagaaattggcgacacaactctactttccatctgagccttcttccaagaatcaaggtaagtaattgcagcattcaccaccctctctatcgacaaaaccttattggtccaaaccaagtcattacgagctccccaaactccccaaagaagcatagcaagcctctcaatacgatccacagactgacccttacaaacattatcaaaccagctgccaaacacagcagcttcaccccctccaaccgtccctcccagccc

SEQ ID NO: 170797 - DNA, 751 bp, Cannabis sativa
acgaaggattccatggctgaggagcttcagatcaatccaaacaaattgaaccttattgatcattatgggcgatcctcacaagtgattcttgagggtaagtattaccccttgtgaatggtggtttgaactggattatacatattattattttctgttgctccattgatcttttatctttgtctccacaagaatggacatagaatttgcgagcaatcttagaggtcctcctgaagctgacaaggaatccaggaagaaagttggcgtggtttcggattctactaaagaaaccaatcaacccaagacccaagcttgcaaagaagacctttgtgccaacctctctctggtattgagaaatttcctgaggctgggaatgaggtcttggctgcaggaaatgggatcttctgatgtggagaatgaggtccatgcagaggtcaagaccttctacgtgtagacggtctttctcgacctatgtgtagacggtctttctccagtttatcaacccccttgtattctttgttttgaagatgacttaacggtttgcccctagtcaaatttttgtaaagacgagtttgtaaatcaacttgggttttctcttatcttaaatgtcttgtactcttttcatttgaacttaatataattgtgttctcttgcatttttatccacaatgtaaacaactatattttgatcaaatgtaaagtacttttgggtttttccattgcttgtaatcttcctgtttaagtagttagttatc

SEQ ID NO: 170798 - DNA, 931 bp, Cannabis sativa
tggttctcgtctgaatttgggtttaggtctgagtcttgatctagggtcgggtcccgtgtcttgagtctagggtttagtttttgatctcggtccaagttctggggcccaattttttgttaaagttccccatctagatcccgatccttggtccaggtcttggtcaaggttcaggtttggggcccaagtcccttatctagctccggatcctaggtcccagcctaggtccaagttcaggttcgggtttggatcttgagtttgggtataagtctaggtcccagtacgtgttcaggtttgagtttaggcccaggtcccggtctgagtccaagtccctgttcgagtcagggtcagggtcccgatctgtgtcccactcaaggtctaggtgccagataatgttgtggtctgggtttcggttcgggttcaggtcccgagtttttgtctaggttcaggactagatctgggtctaggtcttggtatggggttccgatctcggtatgggtatttagggttttagggttttcggtttagtgtttagggatttaaggtttagggtttagggttagggtttagggataagtgtaaagagtttaggatttagggtttaagatttagggtttagggtttaagggtacgatttaaggttcgggtgtgggtttgggtctgagacttggtttgggtctaggtttgtgtttgggttcaggtccgagtcttggtcccaaatccaaacactaaccacatgtcgagtctagtttaagttctgattctggtccgggtctgggtccgggtcaaggtccaattcccagatttagacaccgaccatgggtccggtccaagcctcgagccttaggtcctgtccagagtccaaatctagatcctagtctaattctagctcatgtcttgggccctggttcgggtctcaggtccaggtttgggt

SEQ ID NO: 170799 - DNA, 737 bp, Cannabis sativa
cacccgaaccctctccctctctcttaccctcttgattttcaaagcttgaatttgtaaggaactagcttgatttgaagcttgtttgttggaaaagggtgttggaggcttgaggcttgattgtgcaagtgattgaggtagtttttatagttttaaattgtgtttcccttgctgaaatattgtggtagaaacatgcttaggttatttgattttggttatgcatgtgttgtgaaaaggatgcttaatcttgttagtttgtatgttaatctcttgacttgtgtggattgagcttagagaataattcatggatgtatttcaagcttcaatttgattatttatttgctgtttgtggttggttgctgctggaaaatatgtgtgagtattgggttttagctcaaagttcttgagcttgagtattgcaagtttgaagcatgagtttgtgtgtcatgcaatctgaaatcttgggtttattgatggaaattggtatttgaaacatgatttttatttccttgttaattgttagcatcaatatttggtaatttgagtgtttggttgagttttgggatggaaaagattggattttcaagctgaaattcgtgatgttcttggctggtttctgggttctgcacccagatgccgcggcatgctccctgcccctcttggtggaacttgggttttttttcccaggtgccgcggcatggtctgggcatgccgcggcccgccctcatgatttttgggca

SEQ ID NO: 170800 - DNA, 567 bp, Cannabis sativa
gtcaaagttcagggaaaaaaaaataattagcctaaataataatgtgtgatatcgtaattatagtatttttgaagagtgctatgacacgtttaccaaattgtaattggaatcagaataattaatgagagaaatgtatcggtttaaaatagaaaataatcggaaacaatattttattacgatgtttactaaactatccggaaagaaaactagaatcatattattttgtttacataactaggaaatgtaatcggaatgctttaacttgacaaaattgccatcattggaacatgtaattattttctgtttatagaaatttaaggggtatatttgtctttttcatttttttaataaaattaaaattaaaataaattaagtaaggaaatgaaaaggcattccctatataaatggggggagaacctttccctttgttttctccctaatttttgtgggtcccacaagtttctctctttccaaaattttgtaaacaattgtatgggaatcaataccatatcattcattcccattccctttaagtaaacatgccattaatggagaaatgtaacggaa

SEQ ID NO: 170801 - DNA, 605 bp, Cannabis sativa
gcttctccggggggagcaactgggccaatgctccggctagaccccctggtgctccttggggcaaaggtccaggtgcttgaaccggattggggtgacgcaaccggttcttgatccattcgtaaagatgtcccaatcggatcaagtgtttgatctcctccttgaggtttttgcattcattggtgctatgcccaatgtcgttgtgatactcgcatctttgggatccctccgggagctatccctgtacagatgaggcagtctccggtagtgcgtgttttgcctagtagtgaaatacacacgctcttgggagtccattagctctgtgtactgggtatattggggagtgtaccccctttttgccgcttatcctccctccagttgctgcctttcgaggaccttttgctccgagagccttgagagggacctgctacgcttgcggtccgagcggagtgagacgggacttgtctgcttatcccagatgggttcccaaaatgagaagacgcaggggctaatgcttgaccctgactatatcctggggtagcggaaaattgtatgccactcatcggtggagcggctgttggtaaggttcctgggagctgagctccggg

SEQ ID NO: 170802 - DNA, 547 bp, Cannabis sativa
  modified_base (512)..(512): a, c, t, g, unknown or other
aattgccgtcaaattaaccccagcagccaacacgctttggcaaaaaaacaatccaccaaacaatctgtcaagtagttataatattattttttttgtaataaaatgaccaaaaaactttatggatgagtaattaaaaatatgttggtcaatctaatataaagaaggaaattcttttaatgaaataatcttatttttatttatagtgtacgtctagtaaaataaaatacaataaaagtaaatatacatcggaaaagattgataacaagatttaaaattcctaaaaacaattaatagaatagagttatcttcaaaaaatgtcaaaatctataaatcccaataaaaaaaaggcttttaaaaatgaaaatgtttcctacatttagaacttaagctcaggacaacatcttttgggaagaacaaattgaaaataaagatttaaaacttatttgtttcacagtaaaaatatatatctattctgtataaagtgtgactatataactgaattcttggtttangagaaattcataggtgactttttatttatatttaa

SEQ ID NO: 170803 - DNA, 932 bp, Cannabis sativa
aatatactctcattcaaaaaggttgctttaacagtaaagaaaaaattcagcaactattgattagcaattatttaaccatttttctaataaatttgattttgttcttgttgcttgttgttccaagtgtaaaaattcccattatattttacatcctcaagagcacacctctcaacacacctttgaaacgccaatgagttgccataacgaacttttgtgccaattctttgtttgtctaatgaaaaggcaaacctttagtagattgaaattccaaaatatttaaattatggggttttttcataaatatagaaaaacatagtagagtttatttttatatagcaaaaataaataatgcaaaaaatatgggattgaaaaataattaaagtttaaaatataggaaaaaaccaataaataaatttgataaaacttgctataataagtttcaccggaaaagtcactagaaaagtaattgtcaccgggaaagtcactggaaaagtcaccgccggaaaaggcgtatcatcgccgaaaaaggcatcgtcgccggactactcgttggaaaagtcactatcacaaaaaatgtcactagaggtagatgtttcagatataaataaaaataaaactagttctataacataatgaataaaaataaataacttaaaccgtttataattgaaatataaccaattctgtaacataatgaataaaaacaaataacaaaaaataactcaaaaaagttataattaaaacagaaccgattctataacagtgttataatgaataaaaacaaataacatggaataaatcaaatccgttataactaaaatagaatcaattatacaacataatgtgtaaagaccgcttagcttgaatttagaaattagtagatagttagggtttaattatgaaaattatttattaattctaaattattaatt

SEQ ID NO: 170804 - DNA, 816 bp, Cannabis sativa
ccacaaattttccctatggctcctgcttgtgtcgactctctaaactgtgtcacaagcccatctcccaaaatcaactctgcatcctctgatgactcactaacttttgacaaacttgataacacgaagtcttactcttaagacttaaagtcatcccaatcctctatctcccatcggcatatgctctctgaaccattcggcttatattgtcccatacaacaccagtgttcccattaatataaagcacacccataacacgccgcaaactagctcagtcttgatctcagcctacgcccctgcatattgtttatctgtagcttgcagtaatcatgcaagtcttcgcactgaacaacccatctattgtagtgtttccctctggattcacacaccaaaactgaacaagtaacgtgattcttcaaacatatgaattagtggactcccccacttcaacttgggaagaacttctctcttagaggaatacccctcaagatatagctcgcaagctaaccgcatattcgcatacggtccctccattccacatgtcactttgatgaagatgttcaactaatacctcggtcattctgactcttcgcccctcgacatttcaatgttgccttagtaccttagtcctgctgactttcaccttaggcaaacattgccatggtattatcttagaacctgagtcctgagactttcaccctagataattagcattgcctgtgtcctgagtcttcttgactttacatcctaaacaacaatcaatctccatgatactcatctcgatgcttgtaatgtgtttaggggttctagctaaacatt

SEQ ID NO: 170805 - DNA, 1589 bp, Cannabis sativa
cgtgtgttggtgtaattaatccttaaataaacgtggaataatatttataaggcagaacaataatatgttaccttgtactttaagctcatatctcgttctttacgtagacttttctttgatttttgtgccaagtatgtgaatagacaatgctctattcttgttgccccaataccatttttgaaccaaagagtgaagacattctaataaagttgctattggtgattctctaacttctttgagtgttgcatttacagattctgcgatgtttgatgtcattgttttgtatcacttgatttgactgtataaccttgtccacttactgtttccaacttcgttgaccatatagtctcttatgccgttatgaatattgtctaaatctctcatgtatttttcatattcagcagcatagtaagcttttgaagcaccattgaatgcatttctgagttcatctcccccttttttgaacttggtcttaatattttttagcaagtgctagcaacaaaccccatgcatgaggtttgggaagtttgtatttgctgctttcgcaatattttcatgtctgtctgaaataatgcactgcccttctctttcattgtatgattcttttatcttgctaaagaaccagttccatgaagtgtcattctcagagtctactattgcaaatgctagtgggaatatatgtctatttgcattttgtgcactagctattaataatgttccaccatgttcattttttaagaaagtgccatccgtgactattattggattgcagtgttgccaacctttaaaggaagcacctattgcgaagtataggtatttgaagtggcaattttcgtctgtgacaaggtttgtgattgtccctgtgattcaataaaccatttagtatattattcttttattagatatttataattttgttttaaaaacttgtttatagggtagtcaagcagtacctgggttgcattgttccatcatgtataagattcttggtatttcagagtacgattcgtgtggacagcgtcttgcatctacaatggctttttctctagccctccatactttttggtaagatatggagacattataatcatctgccatgtcatccactatttcatttggtgtgtagtctctctttgggtttacaaatttatttcttattacactaccaatcaggttgcttgttgcattaggatggtctacagatgtcacatctatttagcatgtatgagaatgttgaatctttctgattttgaacatgtttgtttttccatgttttgatgccaagaaactccatttgcaattttcatcgatgcaaattagcttatagtcaagtttggaggatctctttaccttgtagggctgattttttcttatggatgagtataggctgacaacattttgtagtgtttctttgtttgaaaaaacttgtcccagaaatatgttatcagcatgaggatctgagatcacctgacttgttgcttgctggcttgtttcaattgcattttcaacttgattgattacgaagtctgccatgttttgtgcatactctgtccttgtaggtatagcttgggtgatttgcattgtatgtt

SEQ ID NO: 170806 - DNA, 809 bp, Cannabis sativa
atccttggccattagatccttgaaatatcaatatcaagagagccatgaatcctagtagctatgataccatgagaaattttgatgcttgagttaggaagactcaaattccaaaaggaatgaccatttttataatatttaatcgttgatcatcacctaccaaaaaccacccttgtttcaaaatcaaagagaaattaagatcatagaacttcttaattacaaggccaccaaattccttaggtttacaaatagcatcctaacaaggaaaagctagaaatctacttttatcatagccccttatggccaccaaaattttctaacaactttatccaaatatgtacaaaccgacttagggagaaaaaatgaagatagatagggatgctagctcaaggcaattatttcgtaagtatttctttataggagaatttttaaaaatattttttcttatgttatatttataattttacggtttaaaatttttaattataaaaatacttttataaaattttaaaattataaaaatacattttgttcaacaaaaagtaaataaaatgactaaaaaaaacgtaaaatcaactctacgataactataaaataaaataaaaaaatctcatgacaattataatacaaccataaataaactataaaacaactaaaaaaacagtttattatttttattaaaaaagtatttttgtaaataaaaaaattcgagagtaaaaatgaaataatttatgtattaatatatttttgtaattttttttcaaatttttagtttattatataaattcttcgagataaattgaggaatagct

SEQ ID NO: 170807 - DNA, 929 bp, Cannabis sativa
aatctgattcgagctagtggttattttgagctgaacaattatgtctttccgattgattgcggtgatctcaaccagctcctaccactacattataaaagagctacctctgaggttgtaccacaaatggacacaaggtaaatctctttcttttttaatttatgtaatttatttaattttgcactccattatgaattacttaacttaattgttgctaatatttattaattttttaatttgtagtggtgattgtggaatgttttccatggagtacattgaacacagtatgttggaccgatcgtttgagcatgttaatgatgataacatgctcacctttagatataggtggtgtgtggacttattttaacaagacttgacatggtagttttttgtaaattgtttttcatctgtacacataatcttttgcaattatatattatacagtgaattgttaaatcgctcaaatgtcgaacctatatcgcatagccatcgcaaatcatataacagttataataacttacaataaacaacaatttactcgctaaaaatgtcgcacatatatcgcaaaagattagtacatcaaaattgcatagacagcataaaatgttgccaataaaatcgcaaaatatcgcacagaaattgcatgaaatcacaaagcaaaatataaaaaattactgcatcaacatcgcacgaagtcgtatacatgtcgcataaaatcgcacaggacagtcagttatgaaatatgacataaatcgcacttgaatcgcaaaatatcgcacacaaagtcgcagacacattaaaaaatatatccatgcaaattgttaaatattcaagctatagtcctgttaaataacaacctgtcatacaacacatatgcatctaaataatagagaaacaattcaaactcgagctttgcatgtagctctgttgtg

SEQ ID NO: 170808 - DNA, 859 bp, Cannabis sativa
ctccgtacgcttatctctttacctctcaatctctctcttcaaaactcgtttgaactcgttatcttctaaaatgataagtgttggtagttacgacttacaaacttaactaactcctcgtaaatgtatcttcacgttagcaatagtgcttccaggtgaaatgcaagcttttggaaaacacacactaaagggacttcctggataggaacagtgccagctggagtcgactatctgggacacccttccaagggggaacatctaaccatccagaactcttttttgggggaagctaggttggcttcccgtggagacttcttctgggtggacatgatagatatttgggaactcccttccggatgacaaatatcattccacgagacttctcccagatggataagttaggctaggaatgtcctttcagaagacatctaactttctataactagaactacttttggagatcttttcatttagagaaactataccaaaaattccacctagtttcttcaaattaaaaatattgagggttatgaagaaagaatttagccatcatggttggtgttccagaaatcatagtatactaacttctgagattgatcaagtccaagcaatgcttaaagttgtttactgttatgaccttagtcccaacatcagcaagattatcttttgttcttgttaattctattttgggcatctttaattgacaaacatattttattaatttcgactgtgtgttaatattggtttccttattttgtgtatttaacttttatattagtcaatctatctttggaatgaaagttgtctagctttcctatttatagaaattaaggtaaagatggtaagtttggttactcaattc

SEQ ID NO: 170809 - DNA, 507 bp, Cannabis sativa
ctgggtcgggactgtaggtctgggaaagagtcaccaaaagctcgtccattggcctagctgcttcaagaaataaacaaataaatgtcagaagggtcacgagaaattatgcacgcaagaacaaagcagtaaaactaatcctacccagaaaatctaattcagccctagcaaagtcctgcactataatgctggcttcgtcatccccaagaaaattgtccgaggggagaaaccagctggaagatagataggatgaatgatctagaaggataggtgcaggaggcccaaaccccatccgggaccggcctagaaaatgacctatgttggaaaaataaaagcccttggcatgatcaccccatcgggtagggggcatcctaaatctaaggagacgttcgtcaaactctataggcatacatcgagaataatcttgagcggacgagacatgatgaacaactaagggagacttaccggatccggacgtgttggcatcaggagccccagtgttgggaatcg

SEQ ID NO: 170810 - DNA, 662 bp, Cannabis sativa
taagctaagaaccacatgcagtggccactagcgatgcatattcaggtgtgtaccagattttgggcgcattcgagttttgagttttaagtttgggaaaatcaataatgaacccacccgtatgtgtgtcgggcttgactaggttttgggtggatgcgagtgggacaactgggttgggccttgtctacattattttattattcttattattatcttttttttacattttggttagcagagagctcagatttggagccaagcaaccaccaccgccggagtcgaggagatggcttagaaggcagcgacaacaatcattaataaaactgagacaaaaaaagcccaaaggtgtcaggtggtcattacctagctgcgtaggtgtgtggggaaggaaggaatgggagttggtttgctttgtttggatttagggtaaaatagatatgagagagagaggatttgttttgtttgaatttaaaaagagtgagagtattttttttaaagagtaatttgcggttaaatttcaattgcatttaatcttctaaatttaaattttggccagtggtaagtggtcagtggtcgagtcgctaccacccctaccataaccagaggtaggaggagtaggggctccaccagcaacctaagtcccctcgggactcctgggtgcactc

SEQ ID NO: 170811 - DNA, 707 bp, Cannabis sativa
tttcccttttgttgactctagcagtttgcctcttgagtatcaaagcttcttttccttgccccaatcttctattgatcatcaattttcatctcactcttctcctcctactgttactgattccattcatcaagacagatctgaaccaattcacactactgcttcatctcttcctccccgcagacctgttaggaacatcaccaagccatcttatttgaatgactatcactgttttctgtcttctaataatttgtctgttgcttctcaggacagtaggccagtcactgcatatcctctacaccaggtgcttgactactccaaactttcttcaaaattcaaggccctggtgtttgccatttcaaccatgcaggaacctgttagttttcagcaagcaaaaggaatcccagtctgggacaatgccatggactctgagatagaagctttggaaaagaatgagacatggattgtggttcctcttcccccagatcaacatgtcattggttgtaagtgggtttacaagataaaattgaatgctgatggttctattgagaggcacaaggctaggcttgttgccaaaggatatagccaactagaaggggtagattattttgaaacatttgcacctgttgcaaagcttgtgacagtaaagctaatcttggcccttgctgctattaaaggttggtttctacatcaacttgatgtgaacaatg

SEQ ID NO: 170812 - DNA, 834 bp, Cannabis sativa
tttggaaattatagaggtgtgcttcgaatacgatgagttgtgattgtatttatagacgatggaattacatatatatttatttatttgttaattttataaggataaaagacaaccacacataaatattaggggtatacaagataaagaaagaaacctagaatgaatgcgaaagtgtgaattgtcatcataattcagaactcttctcactggttataataattttttatattaataagccaaaataattaatttatgatataagtatatcatgattactataactactagtaataatttaaatattaacataacttagtaaaataaaatatttattacatcaattaaactttttttttaaaaaaaagaaaacataaataaaatggcacataatatttattatattattatttcacttcatgtttatttttatttatgttttttttagtttcataagagtggtatttggttagaggtaatcaaatggaatagaatggacataaaacaattttcattctattgttttgtttggttgctttttaaagtattgaatatatatatatcattccaatggattaactttaccaccattttactgaataactattccattttaaaataaaaagaagtattatttcaatgcaaaattgaaaaaaaaaatgatttttttatcaattttttatacacttaaattttattccattccattctcattctcattactattcttatatttttattcatcccaaccaaacgctactttctgttagtgtttgttattattatttgggaaaaaaacaaaaaaatacaaaaaaggaaaaaaaattacaaaaatac

SEQ ID NO: 170813 - DNA, 980 bp, Cannabis sativa
agcaagcctgtagggaagtataacaagtacaggggagggctcctcccctcatatgttttctgggttttctcgaggcagtttcaagtcttttgaccaattttctttttaggcttggacttaacatgtatatgcactaactatgaatacaacatatttatattctattatgtgaaaccacttctgcatttaggctcatcttctctctctctctctctctctctgaaactgaatttctcatttttatttgtttctctgcagttgatattatttctgctattgaatttgataaaagtggtgactttctggctactggtgaccgtgggggccgtgttgttctcttcgagaggactgatacaaaagatgtatgttctttctgtatacccttgcaggcattgttaattgtaagtactattgtagtttgtcttgatatgctttgatgtgtagcatggcgactccagaagggatttagagaggatggattaccctgttactaggcatcctgagtttcgttataaaacagagtttcagagccacgaacctgaggtataaacttttatcttttcttttctgccttttaagctgttccatatcttatatcatctcaagtttgactttgtggggcccaataatcacattgctttttctttatccttttgtcagttcgattatctcaagagtttggaaatagaagagaaaatcaacaaaataagatggtgccaaacagccaattcagctgtgtttctcctctctaccaatgacaagacaattaaattttggaaggtcagtgtaaactgtgcttaagcttcacagatctataaataaatataaaaagccttgcttaagcttgaaggaaatccagccataactgttttgactgtaagcaatgattccagttgtaaattataatgcatactacagacatgtactagttattatgtcatttgtgtactcttactcttattatcttctagaaaagggtc

SEQ ID NO: 170814 - DNA, 874 bp, Cannabis sativa
aaggggcataatttggtacatctcaaggttcgaggaataaaaatcctaattaccctaatattattatatacacatattcagatacataaaaaattattaaaactgaaaacaattgataaaatatgtttagagcaattaataaatagtatgctataaatttagaacatgaatagtgtatttaaagaatttttaaaatgaaaaaagagtatagagcatctgctatagtatattcttagtactaggggtgttcattggatcacatccaatggatttggacccaatcgatccaatccaattatttattagatattgaattttgtcatccgatcaaatccaatcgaattgattcatccgatccaatagatgtattgaattggatcggttctaactattggatgcattaattggttttttatttaattagattggatccatccaatctattttagctaccatttgagttaattcattaaaaagaaatatatatatatatataaaaacataatttaaaactttataatccaacatatatacataataaacattagtttaatccaacctaattcccatgttctcataataaaatcgctaaaaaataaaatttattcaatacacattgacaattttattagcgtttagaaagaaaaaactaatattttagatagatctatctaaggttttttttttttctttaatcgcatgtgttaagcgtatattaaatcaattaatatatatttttaaataaaatatattaaatataaaattataaatgtattttaaaaatatctaaatataactggatgaccattagatgataattggatcggtttggtcggttatccattggattggatgtcccatccaacaaccgatc

SEQ ID NO: 170815 - DNA, 551 bp, Cannabis sativa
tcaattttcaaaaaagatagttaacctatattaccattgtagtagaccaagatcttcatacaactatagtggtgctgttataagacatattaaggaaaatgaaatatatcatgaaagtcatgatattatatgacaaatcgatacagatataatttaattaatattaaattatgtaagttaaattagtggttttttttttctacaattcaaaagagttttttttattttgtattgttacagaattctatacaaaaatctctatagcaattaacggtgtaacttaaatcgtaaccaaaattcgtatagcaactcagaaatcacagtagaaactaccagaacaactaaaactataaattttaaacaaaaaataaaaattaatatatgagataactttcttaaattaaaatatataaaaaccaaatattaaattataccaattatgttgttatagattcacttatttacccttaagttgaataacaccactcatagggtttgacaaatatacccttacatcagatacaacaaagatcaagattaaagaacataaa

SEQ ID NO: 170816 - DNA, 709 bp, Cannabis sativa
aaaatttcaaatatataaaaaatgttaaattttttcattttgtattcaaataatcttcattctttcttttcattttaaaatagaaatcattctccgctaaaatgataaaaaatttatttcattgaaattacattctaatattttgaagcgcaactaaagaaatagaatcaatcagcatgttagtgctttatataaaatgtgagtgtcaggttaagatatcaagataagtcaatggcaagaatatatttaactaaattggtaatataattaatgatatatatagagagcattgttattggatatggtggtacctaatattttttataacgtggaattctatgatttgttagcgatattttttaaatgttattttcttatgttatatgtgactcgatacttaattacaccaataatagtatgacactgaaaagagtgttagacactactaataatactttttagccattcctatttctactagatagatgttacgtgacttaagttttagttatgatcttttttttttccaactatcaaatataattttaaaataaataatacttaatatagagtgataattgttgaatgaataataatagtttgagtaaagagaatgtataattgtgtaatattttcaagaaaaaaaatattgtgtaaaattttaagaaataaaaattaaactcaaaatgttaataaaatatattaaaag

SEQ ID NO: 170817 - DNA, 657 bp, Cannabis sativa
gtcttagaggttccgccctcctagaggcttgagttacagttgatcttcggaagccctttgaggaatatacctcgcttctggatgcaacacaccttctgggaccttgcatgagtggatcatatttatttttacaagagtttgtgattagtcttatttcatgttgatcacccctttatatagaaagtagatgatcaattaattacataatcaatcaaacaagaccgttataatcattaattatatttaaatgaaatataaaagtttacaaaataactgatacaagaacattacaatcaccagtgtttatacccttgacacgtcatccttttcgtacggggaaacgagtccatgtgtcagttaattacgagactatattgttacttagatggcaaaaatcatctgatagcagttatttttttttaaaaaaaaaataattttaaaaattaagctcaaaatattattttgtaccattttaaaaaatacagtgtctaatttgttaaagtttgatcaaaaaattttacaaaacacatgattaaaaatagtatttatccaataaataattacacatcctaaagtgtaaaattaatgtacaatttcaaattacattaatctttactaaagccaaaggaaaacctcatattttttaattaacacaaa

SEQ ID NO: 170818 - DNA, 510 bp, Cannabis sativa
atgatgaagaatcgttattataattaatattattaataattgtgttttttttttggtatgtgatctatcgataatttgctttcatttttgctttttttaataattgtaagaactaatattaattatttgctattatacatgttataactcatatgttacatgtgttatatatcagtatcataatgtttaacaataataattccaataataaagcatggtctaaaatatagaagtacctttggaagaatttgaactactacaaataaaccaattctatacaacatattatatgtagatgtgtgtgtatataatatgatctctcttgcaaaaaatgaagatataatatctcattaataataataataatataaaataacacatacatagtgtggtcacctttagtaagtagtagaggatcgttggacaatatatatatatatagggatataattttgtccgtgattatactttcacggaatgcattccgtgatatacgacagccgtcagatg

SEQ ID NO: 170819 - DNA, 607 bp, Cannabis sativa
aggttggagcttcacaaaccgctctaacatagagtctctatgcggcattataaacccctggttacccaccactggcacaggtgctaatggtaacacttgttcaacatgggcaaccgatgccggttgccttaatcgacacaactcttcttcttcacaaagtataatacctcgcatttctttgaacatctgctgccaatcagcatgaggattagcattaccaacccccgcattatcccccggattctacggaggtgcaagcggtgctggtggattggtttggtcaaccacaggctctacttgctcgccctatggtctagatgattgcgatgggtccatttactagtaaccctgtaattaacaaccccagcgagttaatcattaataccacacttaagcacttattgccttaaaccctaactcaactatttactccatataaataaacacttaatcatatagcattttaagcatggcatcacataagacataaatactctagatgctcacgtattgtctaaaataaaaagcggtaaataaatgatcacataagcagtaaagtatttactctcaacacttactgcaacatgagtcaagcttgtctctgacg

SEQ ID NO: 170820 - DNA, 831 bp, Cannabis sativa
acaggcttgggcctacgggtcttctgctccagtggagcttccaggcgaagagtcctcccagcggccgcctgggccttgatataggccagctcttgttccctcttgaagaggtacttctggtacttgtcctccgctgtggcgatgatgtctacccagagtgccctttctgctgtcagagtcctcgcattcgcgcagataactttggacaggttgaagtcatccaccgactggttctccgatattagtttagccttccgacagttctctgtcgtgaccaactcctcgacatcaagggccttcttatcgtacgtagagaaggtcttggcccattgaaggaaaatttgagtaggcgcggtcctcatatagggagggatcctaacccattccgtgagaagctccgggcaatccatggcctggaaaccagaagagaagaagaagcggtcgcgatactccttcacgtgcttctaatggttgaaaaggactgggccctcattcaaaggatgcgcccgaaggccataaaaactgtccttaaatttgtcccccttcttggggatggaaactagttcataaaaatacaaaatttctgttggactgggcgagccccagctccgggcagcgtaaaaaataaaaaggcctaaaagcaggcggtaggcttggggaatgagttggtacggcgtaaggccaacaaatacaaggaaatttataaaatagtccgaaggggaagcatggctccggacatcgggtgggtctggctccaagctctaaaacccccgtaattgtggttgggtgtctcctcgtccctaggcagccggtgataggtcccggaggtcg

SEQ ID NO: 170821 - DNA, 603 bp, Cannabis sativa
atggctagagctaatatatatagccaataataaatatttattatattatggttttctctaattaaaatagttaattaataattatttagtttcattaagcaatatatatcagttacaacagtttgaatggaccattaaaactataagtaggttccttttctaattcttaaaattggtttcattaagcataggaatagaattaatattgagcagatattatggcaacagaagatgaactagctgaatatagaacaaatagaacaagctcacattaatatgcataattaacaatcaattcaaaaaattggttaatcccatctccagatactaaatatacattaatattaagtgtaagcggtactcttagtgtagcaatcaaatattgacaataaaattgtgtcaaataataggtcaatctttggactaacgtattgctcacataaaataccttataattgtcacacatttattgccacaggtatgtttgaaatttagcaaaatattcacctacctttgagtcagttaatataagcatcaattacaaacacacaaccatcttaatatttaaataaattaatctacacaaaagaggtcactttggcg

SEQ ID NO: 170822 - DNA, 710 bp, Cannabis sativa
tatatttaactaaaccgtacgttataaattaagagttttatatagtaaatttatttcatgatgattgataataatagtcacatttcaaaagttttagagagacgtgcgggtaagaatcaatatatttgagccctacatatatagagttgttattcggcacgatatttttaaaaaattattatattagattatacaagattaaaatttaatatttaattgaaccactagcaatattgatatataaaaagatattaggcattactatactttttaacatttttaatatatatataagagacttgttaaaaaatattattggtgtttaacactcttagtatcatactgttattaatgtaataaaataacggacccatataacttaagaaaataaattttaaaagatatcgctaactaattaatcataaaatgatacttaatgctagtactagtacccaataagaatgttctatatatatatatataactactccctactactcttactcccaattaatatgaaactcatcgagttatctaaaaacattaattaaaactaattaataaccagggttactttaagtagctagtgcgccattactacaaaaacccccctttagagacggtttttaagcctttttagcgtcagtttttgcgaaattcgctaccgacgctgatcagggcgacgctaaagggtttatatgaaccgacgc

SEQ ID NO: 170823 - DNA, 1276 bp, Cannabis sativa
ttttcaatataagatagttccactacctctgttgtgttgacacaatcgatgaggacaatacgattaatgttcctagacaaaaagtcacggtaccttgttgtagtgggagggtttcaaggaacccatcttgttatgacttggaagacactggtgataaaaattcattgttagtttaaacaagtaatggatagtcagaataaaggaacaaagaagcaaagccaagagaactatggttaaaaccattcatatggagtaactaaaaaaattctattaaaaggacaagaagaaaaattttgataataagtctattcaattgacttaacaaaacttttcgatcctaatatcaatggtttgagaatatcaaaacctgtggcttgtggtatgcttggtaatttacttactttagtacaggcaacttactttagtaagatgttggagcatttttcaaagggctaattctaaagggagtcttttggctcctagacattgattttatttctctaaggaatagtttcaactattccaaaaaagataaaaatcatgaaaagaatttcttacagtgagaggtctcttgtatattttggaatgcattagaccagacacctgttgttgagtaggagttatgagtaagtatcggtttaatccaggaaaggaacattggaaagaaatcaaacaaatcttaagatcaaaacaatagctatatgctagttgataaaggtagtattttaatactcttagactacaccaaataaggtttgcgataatgctagaaaatctacttatgagatactaattactcttggggtggagcagtgatttttgaagaagtgtaaaaacctatctgaagtctctaactctaccagtgagattaaatattaaaatggccaagaaggctactagataactatttagcctatggaaagttctacatagtttttttggcgttattccagtcatggattaactactaatgttacttcctaactaacatatatatagttgtcaaatagtaaagaatccaatatcttaataagagtaaatctacagaaaggaattttaaaatatcaaggattttgtgactaaggagatgtaatagtggaaaaggtttttatttaattcaacctgtcagatcctaatacaaagaaaatactacatactacacttgatctggccatcaaagtgttaagatcaattgaaatgcacttttagttttatagtagtgcaagtgggagtttgttgtgattttataccctaaatagaactcatttcaatataa

SEQ ID NO: 170824 - DNA, 928 bp, Cannabis sativa
ttcctacccacgaatgcccaactccgcccattcatttctaccaaacctctctctcttttgggttttgcttactctactgtttttctgatgatgtagtcatatattatcggaatgagatgaatgtaagattgggcttcactgggatcaaaacatagaaatttaaattagaatagaaataagaacattaattgaatgaaataaaatttaaaatgtattaaaaaaaattgataaaagaattattaattttttttttctcctttcaaaaaaaagaaaaaaattcttatattgaaatagtctttttttcttttttaaaatggaatagttattctattaaaataatgtaaagaccattctattagaataatattgtaatactttaaaatacaaccaaacaaagaactgagatgaaaattattttctttctattctatttcatttcattatttttacttctcatagcttcttcaaagctagtgggttctgaactatcaacctcttctgcaatcataagtgtatatgcaatgaattccgcataaccaaaacgatcaggagcttttctctgtcttctctctctatctctagctaattgatagctgttgagttcctgctgatcttcattgtcttccctttcagttgcctcagttccatctggaacaacattagttggtgctgtaggagcaacatgctccacctcaatctggacgttctcatctaaaccagtttcactatctttacaagtgctcttagttttcatggccatttcatcttccttgaaaactacatctatactaatcaagcacttcctgaatccaggttctaaacaccacactcaatatcccttaaccgcttcagggtagcttagaaacatgcatctcaatgttctaggttgcaacttatcttgtctaacatgcacaaatgcagtacatcc

SEQ ID NO: 170825 - DNA, 576 bp, Cannabis sativa
ttaactcaaacgacaagtcccaatgcagtatgactatgggagcaaaaatcagcttctcccattctttacctcgagaattccattaaatagcatttcattccttcttaaaacatatcccattctttggcatcgatcacaggctttgacaaatgaatgggcatcctttaaaaatattggccaaaagaagccacattgaagaaagatggaggaaatagtcccatgaaatatattccccatacattaaatcactttaccttgagaattccattaaataacatttcattccttcttaaaatatattccattctttggcatcgatcacatgctttaaaaaatgaatgggcatccttaaaaaagttggccaaaagaagccacattgaagtttctttgctacgactcttgtcccagtaaaatgtcctccacattcaagattgtgataataatttaggatagagtagacatacatctcctagatatatgattaatacaatgcttataaaggataggctattctcaataatagttcttcacctctgaaaagaatttcttcaattgttgtcttgatatgtcaagagg

SEQ ID NO: 170826 - DNA, 714 bp, Cannabis sativa
  modified_base (475)..(475): a, c, t, g, unknown or other
gtcaacacctaaggcagcgaccaactccctcccttggaaaaagactaaaatgcccttgtagcctaaacttaggctaatttaagcttaggggtaaaatagttaaaaactataatcccgctcaaactcggtattctattttttccaatatacatcccattaagaaataaggttctaaacttacccatgtgattaaactagccatccatcgcattttccgttgtcgctgagcaaaaattgtaaaaattgtataattcacatataatttaaataatattcctagagtttaataaaatctccagaactgagaaattataactctagagcccaattctaacaatgggacccacaaataattaaagccactaataattataaaaatgccaataattagtgctaattgcctttactaattcaaattactaatgagatcattacaatttttccccattattaaaaaggatttcgtcctcgaaanctaacctgaatagctctggatatggagtcctcatgtcagactctaactctcaggtggcttactccaccttgttgttcctccagagcactttgaccaaagcaatggtcttgtttcgaagaactttctcctttctatcaaggatttgaactagttattcttcgtaggataagtctgattgtagttcaagggctttgtaactcaagacatgagtcggttctgaaatatatttcctcaacatt

SEQ ID NO: 170827 - DNA, 730 bp, Cannabis sativa
atttgtgaaattaaccctaaaaacatttatgtacatgtaccaaaacttgtacatcattattgcatatatacccaaaatcactactaaacttcactcatacatactatactttatttttgctcattgacgtacaagctttgctacatctataaatgcttcatcgataatcaattaaagcctcaacgctataaatatctttatactagtttttatttgtgatactcatacattaatataggtaacgttacagtataatatttgataaaatttttatttgttttggtatttagaaaaatattttagtttttttttttagtgttcgtgtatgttatggttattaaaaattacgctgtaaatctttaattttgaataaattacaatattaaaagtaaagatcaaaacgttatataccccacatacgtataaaaaaacaaacacatataataaaatattttaattttatttttaacactgtaaataaaaaaaataaattaaaaaactttcttaaatattagagacatgaacactcataaagttacataatagggtgtgcagaaagtcatccaattcaattacaactgaccgatctaatagaatcgaatatttaatcatataattggatcggatcggatgtaaattttaaaaatctaatcgaatcggatcaattgttgaatggaaattctgatctaatagataaccgaaccgaaccaatccaatgatcatctaatgg

SEQ ID NO: 170828 - DNA, 809 bp, Cannabis sativa
ttcttaaatagagcagatggctttatcaaattcaaagaagccatcacctaagcaaaggatccaaagggtggcaagaagttaccagacactgaagcacctggtactgaggtgcaaggcaatggaaaaaaggaggttcgaacagaggaaagagagccaacaatggtggcaagaaaggcaactctctcggaggaaaaaagcctaaaactgggggcaagcccttgcgagattatgagccttgcttcaccacctactccattctcttatttccaagagaggggatatatacaaccacttagtcaacagtgtcgtatcataaacctcttcctttctaagagtcagggaagaaggacatgaacaaattctgtcgttaccagaacaattacggttgtgatactaatgagtgtaatcagttgcaggataagatataatttctcataagacagaaacatgctactctttagcggtatgtacgacctgatgcttcagctaagggcaatgctccactttagcctgtgccaattgcaggcaggttggagattatgattggaggtcctcacttagccagaaattcaaggaaggccttagaaaggtatgcaagagcacttcgacatgaaccaagagctaaagtcttggaggtagcagaatgccctccaaagtctcagtgctacgaatgtgaaccgaccacctttggagaatcaaaatcttatcacgtcagctactctcacaacgatccactagttattgaggttcaaatagctactatgatggtggctagggtaatgattgacgacgaagcatcatcaaacatc

SEQ ID NO: 170829 - DNA, 858 bp, Cannabis sativa
ccttcattaatgtaccttgatcagacttttcatagtgcaagagagtttgcttcttgaggcgagctcacggggatgtagcccaagatctttggggtgaacctcgataaattttagtgtttgtgtttttgatctcttctccctattctttacacgtttttcttgttcttcctttaaattgtatttcttttatcaagaactgttgctttgatttttgttcctgatcaaacaaaataacgcattataataataaaataattcaataaataacaatgttaggtccttttttggcaatttagttgtcaaaatattttttaattaatgtgtatttttattgagcatttaaattatttttattacattgattttgtgcctctagttactcttttcttctaaggaaaaatttcttctcagctggtctctttttggtttaggaaacttcttgtaagagaatgcattctcttatggaaagttgtctgactttgggaaacataactttccctttttctacttgatgatttcggttttgcttttattagaacaaatcaaataaactttatttggcaggtttgaaatccaaatttgtgatcttggttcaatttggaaagtttcctttctggtcctgatctactgctgcaaaactcgattctgatgttacaaattaggaatttttttaagaaagttttgtattgctgggaaatcattgttgtgtctgtctctagggtttttatgttctataaatagggcctagagagcagccaaccaatttttatctattctagtctcatattttcatatctttctttgtaagaagagtgtttcatttataaaaacctagagtgttcaactaggttttggttt

SEQ ID NO: 170830 - DNA, 529 bp, Cannabis sativa
aacaaataccaaaatgaaacccaagggtagtttggttactttcaaaaccccgacaattcccgatacttctaatgcctaacaatgatgccccactaataaccttctcaaccatataaaatgtgactctctaatggcccaacgctgcgctccactgcaaactgtaatgcctgactttttaaacatactaatttgaaaataatctaattataatatatttatataacctcgtaaatctagatctcaagttttaaaaaaaaatcacttgttgaaaatacatatattgtatataaagttacatgatattttttttttacaaactacagggcaactacaaaaatatagctcaaaatgctgaaagaccgtaatcctccaagttgcactaccgcgatatgtacaatccttgtcaaggcccaactcactgctcctccatcttggctttacccttacttacacaagtagcaaactgatgagtcgaccgactcagtaagatatgcataaaacatacataaacaatgcaacaccggcttta

SEQ ID NO: 170831 - DNA, 901 bp, Cannabis sativa
tgtacttaaattatatatttgaatttgtctcaacgttaaaaattgaaattgttagaataaaagatttttatttaatttcattcaattttattattttagtaattgtttatatactaaatcatgctctacagattttgatatgtaacaaattatgtctctcgaattttgacatgtattaaattatagctcttgaacttttcgatttttttttactaaaattagacaaaaaaatccttaaattcaacaatctcaatagtaaatgttcaggggacatgatttgatacatgtcaaagttcggaagaaaaaaatcttaattagcctaaattaaatttttttgattaattaagacatcttgaactttgatatttattaaataattttttttctaaattttaataagtatcaaattgtgtctccaacctaaaaaattcagaaagtataatttaatttaatttaatacatgttgaaattaagagtattcatggaaattatactaagcatagtaaatagtttttctaacaaaggtatagttaatgtgtaaatttgtgtgtatcacctatattttttttgtgttttttaatatgcaagtcacgtcctaccataaaaaaatttagatcatattgtgtctatgcgaacatttttaaaggataattacgatatttttatgtcattcttaaatgggtaaatactattttagattctatattttataaatattatcgattggaccatccgttttgttaaatgataaaatagatcgtgtattttctaaaatgataaaaataagaccttaagtttaattttcaacgacttttttttttttttaatataaataacttgaagacaattcctaacacgaacagatacagaaaatataaacagttttgtcataaaaccttta

SEQ ID NO: 170832 - DNA, 897 bp, Cannabis sativa
tgatctttaattaattattattagcttagaatatagaaaattggatttaaatatcgaaagaatgaaaacaagaaatacaagtaggaatgacaaagaagcatctactttgtgataacccaccatgagcttaccttggagttaagaatacttaacttagggtaatctcaaggtgggaatcttctgtggagtcatctcgaaaagcgtacaagtgaggacaaagtacgctagatatattcatattaggatgcaaaatcagtagtcgttccaaagattaccaagagaaaaggatgtgttaataagtaaagatctacaaatatcgaaataagtacatgttaataagtagaaataaaaagtgctttaattgaatatctatcataaacgaatacttatcttgttaataagttagtcactagaccagtttagaaggtcacataggaggaacagaaagacacaattatgaactatgtattatgggatcttataatttcgaccgagtagtaatggttagacatactgagttaacatgctatctatcagtgcagacaatatatacgataaatgatggaattcatacgaaggaatagtctaatcttgcgaaatctcaaaattgatatccttggttatgatgttaagagttaatgaaggttattgaaaactatgggaattaaagtgaaaatagtatactattttattcttgaaagataggtaatctaagaagattaatggaatattagaaatctgctatgagcatatttgataaaggttagattatcttagaataatttttctctgacaaagtgtttgtctaaaagtgatgattatatgtaccatttgttaggtactttaataagtgtggtatgaaaaagatgttgggcacctgttcactagagtaacaca

SEQ ID NO: 170833 - DNA, 906 bp, Cannabis sativa
  modified_base (864)..(875): a, c, t, g, unknown or other
agtgcttttgtaacactttttatatcagggatccctggaacacagttttactgccgttataatgtccgtttttagtcttttatattagtcaagtttttaatactctcacaatttttaataaataattaatatagtagtattaatctagtttataaaattacacacgtggcgttcttatgtaatagggcgttataatgactatgaggaagaggaagaaggcttgatgaccctgatgacccagatgacttagaagacttggttaataacccataacacgtggaggaggatcccctgaaaggctccaaatttctacggcttagacaactaatctttgacaaggaggcaaaaatgaccgaataagaagaagccacatgccaaatacaaaacaccttgtttcaacttcaagctcttatggtaaccgatgtttaaatcttgaagcccctctaggaaagcaaactccagttgtcgaagtccaaattaatactgacatgagaccacctccatgaaagtttaactatctaggagttgggctatcttattctgtaaacgataaggggaaagtcaatgctagtgatcccataaaaaagggacttcaattcgaactggagcatttttagctgaaatatgtgtttttgtaattttctttgggtcagtgaatgcatctggtaattaatttgtaatattttacaaataaattattctttgaacttcaagttcacattaatttgtgcgaggatcaaattgagataatgattgtgcattccatataactttttttccagctgtttcttttcccctccccctaaagctgggaaacttgcctcatcaaaatgacgatcgacaaaactgttgggttttatgccnnnnnnnnnnnncatttcaatataatcaaatttactcattaat

SEQ ID NO: 170834 - DNA, 723 bp, Cannabis sativa
tttccagataagtcccgaagccaataaatccataccccataaaatgcttctccaagtgaaagaagggttgtgactaggggcagcagcaagaatagaagaatgggaaaaataacgagctttaaggatcctactgagaagagagttaggattgtccataatacgccaagcttgtttagctaacatagcttggttgaaatgaactaaagaaagaaaacccaaaccaccacagaatattgatttacaaagggacttccaggatttccaatgaattttcctagactctccattagaaccccaccagaatctggccatcgcagtctcaattcccttacaaagcttaacaggaagcctaaaacaagccatcgcataagcagggatagcttgaattacagctttcaaaagaacctccttacctgctctagagaaacatttagaataccaagttctaaggacagaggcaactttatccctaagaaacgaaaaagaatgaaactttgaacgagacagacattgaggaagacatagatattttgacacaaaaggcttatcttctaaattaagagtgtcaaagaacatggtacgaatctcctgaacaatattaggagaaaagagaatagaagatttggaaaaattaatggcttgacccgatgccctagaataaatgtaacgccctaatgctaaggcatgctacagtgcttttttaattattgtgcaatctttgct

SEQ ID NO: 170835 - DNA, 548 bp, Cannabis sativa
aagtaccaggtggtattggcgtctaacatgtttggtgagtaggttggccagagatttcagtggggtgaagttattgtgtgtaactccacccaagggacggtcaggcaagatctggccgtctaccatttggcccacaggttggacttttggtcgtggattagatggctaatcgttgtgagtttgcacagtatgcctagctacatacccttcttaattgcccaaaaggataatagatgcggtagccggttattgattgacgactttgtaggcctttcttatcagtacagtggtctgccttgtgcgattatcaatggctgcttgctgagcctttaaagtttccatctccctgaccctctattctataaactgacgtctttgctcgtcgaatgcacggtttatagcgacacggagatcctcctgatcatggtggaaagcgttattatgacctttcatgagtccaagggttgctcggaggttttggatttcagtatcatctccaactggcctctgaacattagtggtagacgggacctcagtgttgggagtgg

SEQ ID NO: 170836 - DNA, 956 bp, Cannabis sativa
agtttggtctgggtttagttcggtttgattctgtggtcgtgaatatcagttgggtttggtgggagttagagagagaggaagagagggtcgagagaaagagggaaggtataagaacgatattttgagatttaattaattttagggtattaaatttctatgcatttcaatatgttatactaaaagatcatggacaatttgaattgtcaaattttcctttcctttttaaatcttttaaaaaactatttgcacatattttacttttactattttcaatttcaaatgcaagcgggaagatttatatacaatattactctgcattttgtttttaaaaatgttccatcaacttctgtatcaacttctcacctaaggttgataaatttatatattttttaattttatttatctactctatttttgtgtggaggtattcattttcaacatgaaaaaacaaaattgaaggtaaattattttgttttgcttaatttattagaaaaaatattatattggtataaattgcaccatatttataatatatatatatattgttggaactttgtgaaatgaaggtaaattattttgttttgcttaatttattagaaaaatattatattggtataaattgcaccatatttataatatatatatattgttggaactttgtgaaatgttaaaaaatgatgtgtgtgagtaggagtctcacatgggatagaaaaatttcatttgaagtgtataactaatgcaagtttgagatatgagtttgggccccaaggggtatccaattttgcgcgcatgggtgaggactcacacaccggaccaccacacatgcgcgcgccgccgccgtccgtccgtctgacggagcgggtgtggtgtcaccttattttttggagaaaatttatttcttaaattattatttatttaattaattaaaacagttttctttttttaaataaaaacgt

SEQ ID NO: 170837 - DNA, 693 bp, Cannabis sativa
gagtcacccacccttacattaaaccattaccatgcacggtaggcacacacgcttcttcttctccaaaaccggcgacggagatggttctcttctccggcggagtcgcatcccagcgcagttggctcaattcatttcagccttcgggcttagcccaataggacccgaactcgactacacccgacccacaatagcttgaccagatacccgacgcacccgaacacccaaataccaggttcggttgtgcatttccaagattcgaagcccgaaaacccgaacctaaaaccccaaaaacccaaaaatccgacccgtgtgcacccctagaatatcccactaggaactcgatatccctacacttcagatcagcatagcttttctgtctgttttgtgaagcaagcatacgagatcaaatattttgaatggcttcacttgtcctctgaactacttcgggtccaatatacctcctctcaacggcttcatcccagtgaatagacgattgacattttctctcatataacatctcgtaaggtgacatgccaatggtactctaataactattattatacaagaactcaatcaagggtataaacttattccaaaaacctttaaaatctatcacacatgctcatgacataccttcaaatgtctgaatagatctacatcaaatagggataaatttactgtcctacccttcaa

SEQ ID NO: 170838 - DNA, 1354 bp, Cannabis sativa
gatgattactttttattcctacagatttttgataaaatgcctctatatgatctatgtattcaagcattattcttattgttgttgttgttgttccctttcttgaaatctcaattgtttatatattcttattatcaatggttaatatgaaatgtaataggtcaaagtcttgatataagcataaatgcatttcaccatatgtaacttgttttctctataatttttattggtatcactttgtagccataattttttttcctaactgtgttgttcttggtgggaaagatcttttctcattaatttaatttgtaaatataccgcaatactactaaaccgatcttagtacattatgatatgtattggacaaccagtttttttttctttattatctattgttttcatcagcctatagtagtgaagaggccttagttaattggaatattgggcttcttgatcaatgatacgagtgatataggttcatgatggatttactaatatgcattcttatattaatatttttcatgcataaaatcattgtttttaaaattaatttagacaaatgtgtgttagattttaaaattattggaatatcttatattaatattggccttaagtgtatgatttttaatatattcttataactaattttgcaaaatatttttgtgatcaggagatgaattccagtgcgacaagagtcaaggagaatgtcataaactaccatggctatgttaaatttgctcgtaatttatatttaataggctattgagtagtgttagaattgtataattaattaagtttaatgtaatatcaattgttttaagtttttgacaattattgtaatctcttttgataacttatagatattttctacagaatttgataccaagttcatgatctaataatgtacgttgattcattttattctttttatatgtaatgaaatgtggaatgcttgtaaaacaaattaaatatgaattgtggactaatcaatgggtgacatgtggattaattaatgtgttacatgttgacaaatcaaagtgtgacacatgtaccaactaatggatgacacatggacaagtaaaaatatgccacatactttccttacatggataccacataggatgacatgtcataatccacatcacttgtttaatcatcatcatctaatcaagtagtggggtccaccatattttctacctacaaatatagataagtgtaggggaagacttttctccacaatcttttatctacaaatacaaaatatttgtttatttgtaggtaaatatcattatctacatttcttcaatttttacctacactaataatttgtaggtaaaggacctattttcttgtagtg

SEQ ID NO: 170839 - DNA, 1829 bp, Cannabis sativa
cctccttgaatcaatcctcaacactacagtatcaatttgccgcctccttggagttggccttagtgtccaaaggaaatgaggatttgtgagctttcactttgtttaaatcactttttttatacttgaattgtacatgagtatccaatagactttggtttgtcataaaattctcttattaaaatatgttaatgaatgagcttgaccttttccaaggccaaaaatacaaaagaaaaagatagaaaaaaaaagtattagtgttattagtatagtaagatggccactaggtctttctttttgtcgtattattcacctactataaaataatttaaactttttttttccttttaattttacgtgaaaaatcaaattttattcttagattggattgtatttgattggatggatccaatcaatccaattaatattggattaaaaatattggatagatccaatccgatctaaaaaatattggatcaaaagtattagatgaatccgatccaatacagggattcatttattggatggaaccgatccaatccaatgtttcattggatcggttcggttcggttgagcctacagtattggattgaatcggttggagaaattcaatatccaatgtgtaattggatttgatctggatgggtccaaaaacattgaatgtgatccaatgaatagcttgctttagagtttagagttagagagggaggatgatatataaatatatgaagatcgagcaaatatattatatagtaatggcaatggtgggtggtgagtaatactagtacaatttacccaactactctcatgaattggtagatataaaaagagagcacatggggtgtattggtaatataagctatagtactagtgtagtgatactactacatgacatgacaaagctcacgtatagctttttctgtatagaaattaatcactgattcacaagtttcatttcataggaatggctgtaataattatgtagctaccaagtttacaactatagaatattatatcagtgaagatatgtatagtaaaagtaccctcattccttgcattcttttggttgttgatgataagattcgatgcattcgttgatgataatacaaatttttggtgtgtccaaaatttagtatttttgtaaaaattggttataaattaaaatagaaccgattttataacataatgaataaaaaaagtaacacgcaataattcaaatcaattattattaaaaaaatagaatcgattttataacataatgaataaaaataaataacatagaatataactcaaaccggttataattaaaatataaccggttttataacataataaataaaaataaacataaaataactcaaaccagttataattaaaataaaactcgctctataacatgttataatgaataaaaataaataacataaaataactaaaaccgattataattaaaatagaactggctctataacctaatgaataaaacaaaataacttaaatcggttataaattaaaataaaacagattctataacataatgaataaaaacatgtaacacataataattcaaacctgattataattacaaatagaatcaggtctataacataaagaataaaaataaataacacaaaataactcaaaccaattataattaaaaaaattaagagaaaattaattcttaaaacaccgaaatctaaaataaaaacaaaactagttttacaacaaactgagtaaaaacgaataacacataataactcataaattggttataatatattttttttttaaaaaaaaaaaaaaagtgagatcaattctaaaaatattgaggc

SEQ ID NO: 170840 - DNA, 571 bp, Cannabis sativa
cttgttatcacccaataagactgatccaccatctactttcttgaaactattgaacaggtctcttcttggtgtcatgtgaaatgagcaccctgagtcaagtatccatgaatcacctgattcttggctagacacaaccaagacatcagctgattcatagccatcagttaccacaccagcatctcctctgtctttacttttgtctctttgtagtttagctttcagtgccctacattcatccctgaaatggccctctttcttagagtagtagcattgtttccctgccttagaattggactttgacttgtgtgactgattagaacccttgtactgcttgttcttgtgatttgatatgtgaaatccacctttattttctctggtttctgatctgcctctgacaaataaaccttcaccatagccatttgatctatcttcatttcttttttgaatttctttggagttcagggcagattttacctctatcatagacaaagattcctttccataaagaattgtgtccacaaattgttcataactctttggtaatatgctaagcagtagtattccttgatct

SEQ ID NO: 170841 - DNA, 535 bp, Cannabis sativa
ttttatttattcatacaatgattccaattactttactaaaaataatcaaaaagtgatgttcaatgattgttattattaatagaaaattcttaccttgatcaattaaaaaaacaaagaaaacttagaacaagtggaataatttacaataattttttttaataatattccattttaacttatacatatatatttttcttttacagcaaatctttgaacttaccaattaatcacttagttattgtgaaaaagaaagaaaaaatcatatctttcactctttgtttaccagaatattaaataaaacacacattgttattgttaattttcagtttttgttaggaaatcactcattgttaattttgataattatttataaaaaaattgaaaattgaataatcctaaaacatatttgattgtgatacacttaaaagtatacatattattttatgcacaataatatgtaattaattacaattacacaattaaaaatgaattggtcccaacttaaatacgtataactaaatgtcaaaaaaaaaaa

SEQ ID NO: 170842 - DNA, 760 bp, Cannabis sativa
atggttccagatgatttcccacattatgtggcactacaagaggtgttagaggattaggattaggatttggaataggctgagctcgttgctttcccagttctcaaatttgttcaccttgctgtcggatggtctcttgcatcgcggcatataactcttcccaatttggttgtggtggaggattctcaccctcactaccaaccccaagcccagaaagctcgcggttacccctaccagatcgcctcgggtgcatgatttatacacctgcgatcataactttccatcatttagtatatttcagttcataatcaatgctaataagcatttctaaacatatgcatacgcattgctcattactatgcttttctaataattagcatatatcaaataagcaagtaattaggtaattaataagtaatttaacaactaacacttactgaaccatgagtcgaacgagtctaggcagccaatatacatatgaaccaatcttcaggatctttaaaccttggtcgctctgattcatgttgtaacgccctgtcccacatggacgctacgtttgtgcttttacaaattagttttaacctaacttattaacttaagaaaagtgcgatgggatttaaaacttttaattaaagataaaacataagttttataaaatataaccattgtcaagtacggggatctcctgtataaaacttttacactcgtttttaaaattagtattacaacatagggttacaattcaaaatacagccaaaagggt

SEQ ID NO: 170843 - DNA, 729 bp, Cannabis sativa
actgagcagattgcggtttagccccacctgcacctgcacacatgtagattcaacttaatatttttagtattatggttttataatatatacattgttttaatgttcagtatggcctatggccttttactttttgaacactacttattttcatccctaaggccttcatgttcgtactcttggcctataggcactttgtttttgaacattactattgtttggccctattactttctatcattgattgtgcgatcgactaggcagtctttaatcctggctatcttcttatggccttgacatgtaagtatctggatttattttttttttatgtcaagccaaagtattcctgctcttgacttagaggcaggtttagtagcttattctaagcgttaaaatttctctgcataagttctttatgctagtttgatgcattgtacagtgtgggtgcccccaagtgaacacgttgacttatggtatcttggtcacttgtaattcaccaagtttcatagaccttacttgatcaaaggaagtaatcttggtcatccatccatcttaagaattcgcgtctttactgagcgaatacattgtaattagcagcacatggttcttcagttgggccgacttggtagatggcctctcttagtctagccaactcgagatcttctcccaagtccacatgaggctcaccaatagcaggctcaccaatttctggtcctgtctctccagcatagt

SEQ ID NO: 170844 - DNA, 535 bp, Cannabis sativa
cctccaactgcctcctttatcaatattttttatgtatctttcatttcgtatatataatagcaattactcatgtggttctgcttttccatctccattgccaaaaaaaaacttcaaaaataggccataaattagttgctaacaaggctaaagggaaacatctagtcatcgacgatgatgacttcgattttgctccccccgtggctaaaggtggtcgtcgtccagtaaagaagaagtcgaatgtatctttgcctaaaaaaaattcttcttcgacggctagaagggaaagaagaagtcaactttaagacaattatgataaaactgtaatgtaacagttatatctattgcgaaccaactaaaataaaaccacaaaataactaataatttgttacgaaaaatatgaacaatacgcaagtgtacgtagtaaactcacacaggtggggtcgaaccacagggaattgaattgaataccaccaaactagatttatgattctatttgacagataaaaagaattttaataaagtttgaaataaagat

SEQ ID NO: 170845 - DNA, 571 bp, Cannabis sativa
atagtctagtaagttacatttgattaatatttaattaattattagaatgtgaaaggttaatagttaattcttagattatatagagttaatgttttgttttataatttattacaattacaattagaatgaaactattagaaagggaacgaattttgttaacatttgtattattatttttaaatgataaatctatatctatatatataatgtgaatggggtttaattttattccattaattactttaggtgttttcatcacttacatttagtaagttaagtagagttaaatttgaaaaatcagaaaaattagaaaaaaaaaaaaactaaaaaattaagaaaagataaattaggagaaaattcgaatattgaatttttaagctactacttaatcatgcttagagtttgctttatataaatatatatataattgttttaataaataataaaaagttgaaaaaaaagggtaaaaaaaagaaaaaaattactattaataataatttaaaagagaaagatataaaaaatatatattgttgaataataataaaatgtattataaatgatgtgaataata

SEQ ID NO: 170846 - DNA, 527 bp, Cannabis sativa
  modified_base (68)..(75): a, c, t, g, unknown or other
ttttttttttatttaaggatttattgtttatctcttcggcaaataatctttattattattattattannnnnnnnattattattattattattggacatatctatggtagtgatattgatttttttttttaataaaaaaaaaagcgttttataaatagaaaaaaattaaatttcataggatagtaaccagtattaacgaaatatctgttgtaccaaaaagaggaattttcataaatataggaattgagggtatggtttacttttttatggcataaataaataacactataagattaaggggtttttaattttttgacatttatgtgggtcttttttatgccatatttttgtaaaaaaaaaaaatagaaatcccatatttataaaacaacaataaatttgtcggaaaagtcaccggaaaagtcgtcggaaaatcaatgtaaaagtcaacgtcaccggaaaagtcaacgtcactggaaaagtcaacggaaaagtcaatgtcgccaaaaaagtcaatggaaaagtcaacg

SEQ ID NO: 170847 - DNA, 1075 bp, Cannabis sativa
atcttccttcttagccttctcgcactagggaaagacttcctcctcagactctcccaagaaactcgttgcatcgttcaatggtttcagcttctttcccatggagcattactttggctgcattaagttccttctggagttttcagcatgcatcggccttatcttttgcctccttcttggcagcttcaagcttggccttctgagtcctcttcacctctttggcttctttgattaggggagtgttctccaacttggcatcattccattgctaggtcacaaccttgtgctggcctatcaagttctggatctcgctctccatgtatttcctttttttcatgcccagccgttgggcgacgaaggaaatgaaatcaacaaataaaaatgcatgagtattttgaaggatgtttagaaaggaagtaagtaggtaagggtagaggaatttaccgagaggccatgaccgacactcctttcaaacacctcctctaggtccccgttattgattaagtctcattcatggggaaagagggccttgaaatgacgccaacaagatattccaaattctgcagtgtactccgggtcagtactcctagcctcgacaggtagagtttcgagggcttggcttaaagaggtggaagcttgagtaattttggaaataggcttgttggtatgtgggggggccggaggatgggtcggagcctgagcctcattttcagggatcttgagattagcagtctgggaagctcactacttattggtaatcatcttcctgggccttattaggggctccacgtcgacatctgatggagcctctgagatggtcaacctattcttttcctttatatgaaagataccctcgagattcatttctacgagataaaatagtatgttagcattcatttgaaaaatgagtaaagggggaaatcaggacataatctcctgcataagggatttatcataatcataagaagacgaaaaggaatgactataatatccaaaaaaatccctacaccccgtgatcctgaatatgtcataagagttaattggttctaaatcccaggtcgcatctaaatgacttggc

SEQ ID NO: 170848 - DNA, 670 bp, Cannabis sativa
cacagtgttttgactgtttggttaagtcggttgtcttgcaaaaattatttaattaaatcaaattcttttatctcaaaataataatacaggaaagtgattttttcatttttattttttaaatattttgttttttttttggtatttttaatggaaatttataaagtaatttatattgcaactaggaagaaacttaaatgtaactaaaattcacataccaatatacatagaaatcatcgcaacaatcaaaactataaatttaaaaaaattaaaaaataagtacattttacgtaattataatatttacacataatttacagattaccaaacaatatatattatatttgaatgatttattattattactattttgtttttggaatagtgcaaataattctaactttattgatatattatgtataaacatgttcaaaaaaattatgtaataaaaatttcagaatattaaaaaaatatattcaaaggaagatttatcttttattattactagtgaaaataactcgtgctacgcacgtggaacaaaatatttatgaaaaaaaatataattagtattcaatactactacaagatattatatatatcactgtataatataatatacatcgttatcgtattttaagcatataatattttttcgttctattatttttatatg

SEQ ID NO: 170849 - DNA, 1157 bp, Cannabis sativa
taagtagtgtcgccaaatattcaaagcgaacaccactactgcaagttccaaatcatgagttggacaacgctactcgtaatctttttgttgtcgtgaggcataagctataaccttgtttgcttgcattaacacacaacccaaaccttgtccggatgcatcacaacaccacaaacctctcttgatcagacggcaaggctaaaactggagttgtactcaatcgttgtttcaattcttagaagcttttctcacatttatctgaccacacaaactgttgatcttttctcgttaactcaaacaatggcatagaaatcttggagaattcttctacaaaatgccagtagtagcctgctaaaccgaggaaacttcatactgcaataactgttttcgatctaggcaagttcttcattgtttcaatcttccctgggtctaccataatcccatctttaccgaaaatatgtaccaaaaaagacacctgtgatagccaaaactcaaacttctttaattttgcatagattttatgatctttaagccgttgcagaaccatacaaagatgctactcatgttctgctttcgatcgagagtacacaagaatatcatcgataaacacaattataaagttatcaagaaaatccttgaataccctattcatgagatccataaaggtttctagagcatttgtcaacccaaacgacataactaggaattcataatgaccatacctagtacgaaaagttgtcttcggtatgtcttcttcccaaattatgagttgatgataaccagatcttaaatcaatcttggaaagcactgtcttaccctgaagttgatcaaatagatcatcaactctaggcaaagggtacttgtttttaattgttaacttgttcagctcccgatagtcaatacacattcaaagagtcccatccttcttctttacaaacaaaactagagctccccagggaaacacactaggtcgggtgaactctagatccagcatcccttggagttgtatctttagctcttttaattctgcaggagccatatggtagggtacctttgaaacaggtctgccccaggtatcaggtcaataataaaatctatctcccgctaaggtggtattcctggtaattcctcaagaaacacatccaggaattccttaacca

SEQ ID NO: 170850 - DNA, 724 bp, Cannabis sativa
cccccttctagtaagtgctagttctgctactgattatatgtctactttactttacttgttttaatttttacttctattttcatattctttaaggtatacctaattttatgaatgatatccccattagacctttagattaatgtaaattatatgctagacttaagtagagaatgagggtatattggacaacccactcaaaaaatgggtatactttaataaaatataatatgaatgtattttttattaatgaatacaaaagagaggtattttttaatttatctcaaaaaaattaagttaggatggtcccgtttagcttagcttctataagctttaattaagttcttagaattaaaaaaatccttctataggagtgtttggatagaaaatgaaatctcatttgtaatttaaattaaaatcattttagaagaagttaggctttgtgataacttttgagaagttattttaaaaattaaaataacttataccattcttaatttacttacaaaatatcttttttttttaatgatatccaaatactttgaaaaatattttttattaaaaaatcttcataattattcaaacggtaaaaataactcaaaacttatataaaacttatatttttcttatactattatacccaaaacaaaagggcattttacaaaaatactgcatttggggtaattgttttcaattttactgccacacggcagaattaacatttata

SEQ ID NO: 170851 - DNA, 547 bp, Cannabis sativa
aattctaccttaatccatataaaactgaaccttaacaatactagactacacttgaggggagtgatcctgttgaattagtcaggaccaatgttgagcaaatccaaacaatattggaatttgctcactggcaaaccttagttcctgcataagcagggttctcatcacttggcacatttttcaagatcaatttcaccatcctctatcttgtctcttatctaaaacattctgatatcaatgtgtttggatctctcatgatacacatgatttttgcttaggagaattgatgattgactgtctaaaaatacaattactttgcctttcatcatctgcagctctcctagaatttctttgatccatacatcttccttgaatgcctctgttgttgccatgaactctgcctctgtggtagagagagctacaactggttgtaattgagattttcaacttatgcaacatgtatgtagttggaaacagtagctagttagggatttttttgtaattctgtttgatgcataatctgcatcaacaaatccttcaagttccacct

SEQ ID NO: 170852 - DNA, 506 bp, Cannabis sativa
ggttggaagatgggtcttttctctttggttgagaggtgttactcaaatcaataatacaagctattccgatctatctaatgagttgttttagattaacaaaggggctgatctgagagattcaaagtcttatcgctcgattctggtggggatcaactaaagacaaacaccaaattcattggggcagctgggataaactttgcaaagataagtggtctgggggtatgtgattcagagatttggaggattttaaccaagccttacttgcgaagcaagggtggaagcttgttaccaacccggatagtttgttcgctcaagtgttgaaagccctctactacccgaattctggtttcttaaccgcttgccttgggaattattgctcaaatattttgagaggaatcatttggggccgtgagcttacagtaaagggctcaagctggcgtgtgacaaatggtaataaaataagaatcaatgaatatcggtggattcactacaagaaaagcaacttt

SEQ ID NO: 170853 - DNA, 1759 bp, Cannabis sativa
gttgtagggattgagccggtgacttattaagtgttaagctaaattcgctatgtgttgatcattctgcacggctcgttaagtattccattctggatatgccagcgaggcatccttctcggcatattgttctgaatagatgctccaagtagagtccacgtgtcaccattctcgtaatgccacgtcagagtgccaaatttaggataacatatggtaatagtaaaattatattatctaattcgattttattaatttttatttttattaaaaaatttaaaacttatataattaatctatatatagaattgtaaattactttattttttttttaaaaaaattgttattataaaaatgagtaaatatgatagtgtagggaaaaattaaagtgttctccataatgtattatttttatattccgatactttttaaattattgccattattaaatatcactcgttatcattatctatctcaccttatttttttactatattttactcgttattatcagcgtagttaacttgtagtcatcactactctccttctcaaatctcaatattagtcttagattctattttaaattttagactgtcatatcaccctctacgtctcagctttatataaatatgtaaatttatatagatatataaattattactcattcaatctaattatatatttatcaggtatttatatacattatgccatgtagatttttatatgtactaatattggaatatatatttcaaaagaagttagtgagataactacttagcttgtttttctggaattggatggttatttattgagcttgtattttttggagttgttgttgcaatagtattattttctaattagcattcatattaaattaaactactattttttttttaagaaagaagataaatatatcttatttttctagtaattatgttcaacaaaatacattcatatatatatatatatagagaatttagttagtgataaaaaaagtatgtgctcctttatttctattctatataaagtgtggctatgtaactgaattcttggtttatgaaaaattattgggtgactttttttttttaagttttatattcaaaaataatagtttttctattcaccgatatttttagtttaattagaatacactataacttaacagaatattcctaatcaattgtaatctcactaatataaagtgattgaatgtagaataacaaataaaaaagatacataaataaatacaagcatatcttaacattaaggataaataaataataaattaacaataaataattataaaatattaaaaaagtgtagtatgtatacctatttcgagggtgtaatttctagagttaagatacttcaatatgtggtgcatatatatatttttatatatacttatatagataattatatttattttttttaattataaatttaaaaattgaaggaaaaaatagaagattttaaagcattttataaactgaattaaaaaaaataaatagaaagtgaaataattttgagaatatatatacctatttagagtgattttatattgattaattaattatatatacttttttttaataaattactaatatatactttaaaaaaatagattaatatgtacggtttgaaagtaaaatttaaaattaaaaaatattaatttttaaataataattaagtattttggttttttaaattaaattattatttaaatttaataaaatatttaaaaaattagagaattaaggagaga

SEQ ID NO: 170854 - DNA, 507 bp, Cannabis sativa
ggttggttcttttttgattgaagactctggctccagcttgtttgttcactctcaaaatcctgtggaggagaatgtcaaatctccttcacaggagccatgagaggcgttgtctggaactgtaaaaggttagagcagacctctacagttcgagaactaaagtccctgatcagaacgcactctcctgattttgtttttttgactgaacttaaagtggaagttattcccctgagttacatgcttctttcttgcctagctagttctacgccgatcttgcgggagacctggactccacctcctcaagattgaataaaattgaattgtgatgttagagtgtgcttagagagtatgtgcactgctgttgtagcaaagaatcacctaggtggggtgattcgggttcacatgtctcggttggatttcttggatgcgttatgtggagaagttgcggcctgctatttggctatttcattggtgttggaattaggttctaagtatgttattgtgaagagt

SEQ ID NO: 170855 - DNA, 695 bp, Cannabis sativa
taaattagctgatattatcttttaaataaaacaaacttattttacctcatttatttcaaaataaggaaaaaaatcaagagaaaagcctttctctctcaatctcactctctctttttcggcccctagagaagctagtgtttgggtgggattttctgtatttcaagcaagtttcttcaaggattaagtgttcttaagctctaggtaaattcttgactttatcctcttaagtttcttgagttttaaggaattgatttatgcatgttttgagttgttgactgttgttgttgctgctggtgttttgtatgcatttctgtagttaaattatggttagaaatgttgagtttggcttgttttgatggctgatttattgtttgagcaagctttgagttttagaactcaagcttggctcattaatggtgaaattcgattttaagctttgattgttgttttattgcttggaaatgttttattggggtataatatgcaggtctggaaagttttgttgggtttggaaacgatttggttagggtttgaagctttttggtttttctgggtaaaactggttacctggattttttaatgcttgtaaaactgtttacccggattttgcagcaggaaattccaaaaattcagcttgtcgtttcgcgtcagtttcaggtttctagttagttgattccctgctagtttagggtatt

SEQ ID NO: 170856 - DNA, 617 bp, Cannabis sativa
cgtaggatcaaacccttatttgatcaaacgaagcaaccatcatgagtataaaataaggaaaaaggaaccacctttgcattatttcctccattttagaaagtttgaaaaaactcttaagcttcttcgtcaaggatcatcacttgttcgaggacttgcatgccatctctgtccttgacctttttctgcgagtttcttccgatttcatcttcttaaagcgatctttgcttcgttcgaatatttgcagacggaattaccagtcattgcccaaagtcataacttcaaccagtaagttgccttcttctttctcatgtttgttatattgagtggatttgttacttagtttgtttgtatcgttgtcatcccttttggttttggtagttttttttttctagggtttaaattgtatctaggttcatactagggttcaggccatatgtaggttgttttaagatctccaactcattaccttcaggtttgataaaattctctcaagtgattgggactaattttttcctgtagtaatgtcccacagtaatgtcccactctggttcaggaatatatcagccagaagtgttagagtttgagttccctacagaatcagccatctcgtataaacc

SEQ ID NO: 170857 - DNA, 704 bp, Cannabis sativa
ctctataagttatgtcaatatgggtaaaaattatcttatcatgaatattttatcaacaatagatgttgaatgtttgcatatacaataagttaacatgagatagcaaggatcatgatattagatttatcgagaattctcgacatatattttatttttggccaaaatattataacacagtctagacaagtttattcgcataaagtaaagtaagacatgtaggatgtgcaaataaatatttcgactaatgagaaaattgcatatatatatttatacacaaaataaattgttatgcaaagtttgcatagacatgagattgattgaaataaggcttaaatattgagaaaacataatcaggatttgattatagcctgaaatatattttatgaggatttataagcatcacataaatattgcaacaaaaagttatctatttgtagctcctaatatattgaaaatttgaaatatgccttatcaatgtaatacatgtactcttaataaattcaaagttgcgcgtactatatgacaaagatctttatataaaagaaagacatgtaagtaaattattatttgaaaaacacatatgattgtctatgcaatataaattcctaaaattatgcattttgatagactcttgaagagtttttgattatattataaatgattgaagaacaaactttgatttctttttgtatattgagaaatat

SEQ ID NO: 170858 - DNA, 717 bp, Cannabis sativa
gatgatgatgatgatgcagatttagggcttagagcttcaaagttcaaaggactgagatttagggcttttcaccaataagtaaacctcattattaaaaaataataataataaataatttttaaaaaattacttctaatatttttttaattttttttttctaaattatagagaaattctataatgtaccttaatgggaataaatcgatacatttctatctattttaatattcaaaataattttttagtcaaattttttctcatgtcatgtaaattatacttattttaagacatcctgcaaaattttgaaaaattcgaaaaagtttaacacgccaaaaattaagttcaagcagtgtgttatacgcgtgactattttattttatacccgtgtaaaatagactatttgaatatttttttatatattgtaaatttttctgaatttctctaaattttgtagaatatcttaaatagctataacgtacatgaatatgaaaaaaaaagactaaattttttttctgaatgccgaaataagtagagggtgcatcagtacatctcttttaaaggggtgcattgttgaatcaccatattttatattaatatgaatacttattttaattgagaaattctacaatgcacccccttaaaatggacacattgatgtacccttatatgttttagcacccgaaataatttttaagtcaaattttttctcatggtcat

SEQ ID NO: 170859 - DNA, 650 bp, Cannabis sativa
acattatttcacacactagccttccttcactgcttaattatattatagtatttagtaataattaaattaaagatgttaatgtttagtttcccaacagcacaacacaatttatcaacgtctaactaaagagataatataatacttcaatattttttagagggatatattaatgatgatgttgatcatgatattgtatatatattcaaaatacatacattaatacaatttgctttttgcacaaaatttattaaactaggtaaatcccttatatatttggaggctgttgagtcagagcacttgctatgaacagagagagagagagagagttgaccaaactcagaagtaacattactgccaatatttaatggtaaaaggtaaataatccttaaaatcccaaagaagcagccgtaaagcgcagagcagtgcgggaagcttactacaaaatggtaataaataaataaaataaaatgagatttataacaaaatatatatatattatatttatatgagtgtacgtggggtgtaaatgtaataaatgataatgaatgtgatttttggtgaatatatatatagggaccggatttcgtcccgttactgtacggacacggatttcaatccgtgatgtactgcagggccggccctaggcatag

SEQ ID NO: 170860 - DNA, 740 bp, Cannabis sativa
gtttgtgattcatctccttgattgactgagcttcgagtattggttccaccacgagccataaacatcaagacacagaaaacgagattgagctcacgaagatcgtggctctaataccatattacaaaatagagtatagagtaaggagagaaagaagatgatgcagaaagaattcattgtatttattaatcaatgagtgagccttatatagctcaagctcaatgctagtacaatggttgaagttagttacacagttaggacaacacacactcacatcctaactaacaaaactaacagttaactaactaaacaactgatactgtagctaactactagaacaatagctaattaactaacttcctactattaataatattagaaactaataaaaaaaagattttgtgcagtcagtctatagtgtcacactaatattagtagacactatatacaatgttatatttatgataatttctaaaatgtagttggaactaatttagtgtgaaatctcaacaaatttgatattttagtgattaaatggaataggctaagagcatctccaatcatgctctctaaacatattccttaactaaaatagggagtaagactttaaaaaatgagctccaaccatacaaaaaatgactctctagataagaagctttatactttttactaacttttttttaataatattttaataaaaaatatttttatttttattattttataaaattaatttatatata

SEQ ID NO: 170861 - DNA, 633 bp, Cannabis sativa
gtaaatattattttcaaaattctttttaaattagataaaattaaaaaaaaaatttaaaaaaataaaaatgttataaaatttgaaataatttttatattttttaaataatattaggtgtactaatataaatgtgccacgtgtacaaaagtgtacacataaaaagtctatgttggcagttaattgtagaaaatagatgacaccttaaatttgttaacaattcaataattttgattgagggatttaccattaaatttgagcttagataattaaatacaaataaaatgatagtttagatagtttaaccgcaaaaagctctaaattaaatagtttgaactttgggattttctcatatatatatatgggaatatgtaggagagtttactttttatggtataaataaataatacaaaaaaatatgggattaaaaaataattaaagtttaaaatatgggaaaaaaacaataaataaatttaataaaacttgtaataaatagtttttgccggaaaagtcatcggtatcgaaaaagtcgcagaaaaagttagtgtcactagaaaagtcacagtcaccggaaaatgtgacagtcaatagtcccgttatccgtaaggggaaataccgggtaagctgtgcaatccc

SEQ ID NO: 170862 - DNA, 653 bp, Cannabis sativa
agaaaagcgcgatcaggcttacctaaaaaatgtggcttatcagcagcaaaccgcacggtatttcaactccaaggtcaaggagaaagttttgcgagtaggagatttagtttttcaaaaagtaatgccaaacgcgaaaaaatctagcacatggggtcttcggagacaattgggaaggaccatatctcatcgcagaaaaaattggtaacgcaacataccgactcacagaactcgatggtactataatccaaaaagcctagaatggcgaaagcttaaaattttattatcaatagtattcgcattgtatcgtttgtactcactgtgtatttatacttagtcaatttatctgtataaatattctaagtatagggggtatataacccactcactttgtactattgattaatctatttcttaaagaagtatgaagtttttcaaagttttgaaaatttctactttaatatttattacaccaagctgtaattaaatcgcaatcgaaatgataaataaacgaaaaaatgcgagtatccgtgtactgcgaaaatgtcataacataaataaagatcctggaagggatgtcaatttgttcaaaagaaaaataagcataaatttgtctaagtaaaaattgcgagtacccttgtaccgcttaaaaaaaa

SEQ ID NO: 170863 - DNA, 751 bp, Cannabis sativa
aatgtatatacctatagcaagttagaatttgatcaacaccaaattattttgaaccttaaaaattaactcacatcctacaatataataaaatacaacaaattttgaattttaattatttaattacttactagttatagaaaaggtaacaagttactagttactaaattaatacattaatttttgaaaaaattatatatacatacatatataataaattatatctcacactaatacaattttaaaaactttatttcttaactaattaaatctctcctatctcattctcattcacaatacttatatatacacacatacatattacttagaatatatataatacaattaaaaaatttacataaataatatacacaattcatatatacaaacatgtattcaacaaaatacaatatatatatattatatatcaagttaataaatatttatcttataagcgtaatccaatgaccaattgcgacaaaaattcggccatcatgcacacacaacaacattatgttagtaaaatggaaaattcctaaaaaaaactttacaaaaataaaaataaagcaatgtacattaataaaatgaataaaaattatatttataccttaatagatgttgaaattcaacgttttctccactaaaatcggtagccagagtaactgtaacgcccgtattttatatttactaaacttggaagattaactttaatatattatatctttataactatatgggtcgggatcccgagtat

SEQ ID NO: 170864 - DNA, 513 bp, Cannabis sativa
tttattttgcttatatattatatatttctttaggcttagttattaaaatggagttatttgatatattacttatattttttttattttattagagtgagtcctagctttaagctaaatatccaaaagaagtgtttagtacttattgagaacaaaaaaacacaaaaagcattataacgttacgcaacaacattgtataacgtaacgtaatgtaagtaattaacatcctaataatactacttcagtttagtataaaagcattttttttcctcttttaagaagaaaaaaataaaataggaaaattactgtaaatatctcaaattatagcactatataagtgtaggaatattcttggtgaaattccaagattgccctacaccaactcaagtttacagttagaaacgacagggacaaatttgtcccagaacaattcaattttaaaacccaatcaacgacaaagaaaccttggtcgtttctttcctgcacgacaacgaagcttgtcgttttcactcacac

SEQ ID NO: 170865 - DNA, 692 bp, Cannabis sativa
aaaacatttagcaaaccaacatctaaggatagaagcaaccttatctttaagaaaagtgaaggagtgatatttagatctagagagacattgagggagacctaagtatttattaataaaaagtctatcttctaagttaaaagtatgaaagaaaagattttttatctcttgcaaagtattaggagaaaagagaatagaggactttgagaaattgatagcctgacccaaagccctagagtaaatactaaaaataacttgaagagcacgacatgaactactatcagcagaacaaaaaataagactatcatcagcaaaaacaggtgagagatcaaaggagcactcctagagatagcaattcctttaagaagaccagcatcctgcctatccctaagaagggaagataatccctcagcacaaagaataaaaagataaggagttaagggatctccttgcctaaggcccctggaaggcttaatagaccatttaacaactccatttatcaaaaaagaaagactagtagtagaaatacatttcataatcaaattgacaaaattaatagggaaattaaaatgaaacataacactttctaaaatctgccactcaacccgatcaaaagccttggccatgtcaagtttaagagcagcccaaccattcttcccatttttcctagatgcgatggcatgaacaacctcatg

SEQ ID NO: 170866 - DNA, 527 bp, Cannabis sativa
atgcgagagtcatgttgagtttttataaagcaagctttggcttccgtgggggaaagctaaagttgcataaaaatgcaaaagatgacttcgcttaaaagagaccaaagggtgaaacatcatccgacatgtgacatacttcaaacagtccttctcttctgggaaggagggttgaagacgtgtcgtacccctagttatcttttatgcacaaagatcagcgtgcatgcgagtcatgttgaaattttatgaagcaagctttggcttccgtgagggaaggctaaagttgcataaaaattcaagccatgactgcgcttaaaaaaaagacgaaagggtaaaacatcattgggcgtgtgacagacttcaagcagtccttctcttcctggaaggagggttgaagacgtgtcgtagccccagtgatctttcatgcacgaagaacaacgtacgtgcgattgtcatgttgtatttttatgaagcaagctttggcttttgtgagggaaggctaaatgtaacgtccccgcttcaagcctcca

SEQ ID NO: 170867 - DNA, 1412 bp, Cannabis sativa
tgttaattttccaggcaaatgaaaaacaatgttttgagagatgttaattttccctcagtccaaagacaagggtagcccactgtaaaatgaaaaccccatccaaaaaaatttaaaacacatactaaacacaggttagacttagtattcccattcctgagtaagaaaacctgtttaccaaacaaccattatttaatatcatcgtaattggaaagtgtgttttcttaaaacaaaaggattatcattaagaaatcattctcataatcttagatgggtcgaatttaaaattaatatactcttatggtatgaatttgacataggtgaaattgtgttttgcactcatttttaatattttgaatgtgaaattttttcttaacacttaattttgataacttgatttatctttttgtactactacatttcttttttttgtgaaaattgttgttataacttgatactttcaacttttttcttatctctttttcttttagagttagtgacagttaaaatgataatttattttttaaaagttaataaataattacattaatagtagaaatggtaatatataattaacatataaagatctactattgaacattgtgtcaattaaaaaaaaatcttattatcatattttaataaaatatgtcaaaaaattaaactaaatatatgtatctaaactacataaaacaacaaatatacaataaaataaaattatctgaaagaaactaaaaatatacactataaaaaaaatacacatgaataaaattagattttgcatgggaatctctcaaaatagactaagactgaactctgaacgagtatatttatataattaatttttcatgctacttatatgctcgctattttctttaagtattcgtttttttctgtttaagtatattcgccactctaccaaactactcactgttctttttgtgagtgttcttatttacatgaatatactatcacttattttggtgttaacttaatttctttgacaacaacactcctcgtatatcagaccaaaacagatggccaacagtacaacactagtggcttagttacgtaccctgtatttggtgaattcggccatattatttcactaatatataattcaactaaaataaatatccatacctgtatagtaccaataatatgcctatggcacacggcaaagtaaaagcagcaccacatatgtttcgtctaaagaagtaaacaataataatcagatatatataatgtcttgtatcaagtttcaacaaattagtcgtattacgtatccattactcactactgtaatattaacacaacatttctgcatcaccatatgcaatatctatatcagaaacaactatatcgttgatcgtgcattctttcttagctctctatctgtaatcacattcaaaaggtaa

SEQ ID NO: 170868 - DNA, 530 bp, Cannabis sativa
gaagaaaaaacagcaagggaataataacaatgctgccaaacaggaagttagtaacagtgagaaaccaatggatagtgtcaaggaatttgaaacgaatgttactgatgctaatcattctgatatatctgctactaatattactatacctactggtgatagtaaaggggataggggagaatttcctgatggtgtaggggccttgaaacatatggatatacagcctaataatgagcagtgggagactcctaaaaggaaaggtactaagtatgtcattaggccgcaacaagaagcaactaccagtaatgactatgaagcattagaggatgcagaggggatgttggctactgatattagaaacttgtcaaatggatagtctcaatcttttaggttggaatgttagggggctgaataatgtggagaagcagcgtgaagtgtttgatcattgtaagataaataaggtgggttttggggctctttttgagactaagatccatcatgatagagttagcaaacttatgactaataatccg

SEQ ID NO: 170869 - DNA, 728 bp, Cannabis sativa
  modified_base (129)..(137): a, c, t, g, unknown or other
  modified_base (666)..(669): a, c, t, g, unknown or other
  modified_base (696)..(696): a, c, t, g, unknown or other
atactattttgaatcttgtatattgcaaaagttactagttggactctctgttttgttaaatgacaaaataaactctacatttttcaaaatggtaaaaatagaaccctgaactcaattttcaataatttnnnnnnnnnatataactaactttaagataatttataccacgaagagatacaataaatataactagatttgtcataatatttctaaatgagattattattaagttttattttgataaaaaaaaattaattcatggacctatttgtacatttttagaaaatacaagatatattttgtcattaaataaaacagatggtccaattggtaacttttacaaaatataggattcaaaatagtatttaccctatattataaatgcttaatttaataaataaataaagcaaaagaaataattatttgaccatataaaatttgatttttgttaaggagttggttgggtcaacccctggaattggtcaacccgataaacttgtgacttgtcaatttgccaacttatctcggattcaggttcaggtccatttttttttacctgaaatgcgcaaacccaaaacctataaacttgaaattcaatcaacttgcttgatgttcagccctataattatgtaaggatatgattttatcccgtgatgtactttcacnnnntgtattccgtggtacattagatgggtntcagggtacattaaatgagtgtcagggtacgt

SEQ ID NO: 170870 - DNA, 878 bp, Cannabis sativa
ccttatgtgataatttaatgactcgtgatttaaaatgtaataactccaatgatgaaagttatgagagttattggtacaataaagaagggtcattagttgaatacaaggaagagaatgagcctacaattgaagatcaagatccttttaaagtggtattaactcaaaatttggctacatcagattcttacttgataatgaatatcgtgtagtgaatgaaatcatagaagagaatgaattcatccatgatcaggaactaattgaatatgaaatcacaagtaaggtatggatagccaagtggagagtaagcaacaagaagaagggttgttacatgaaagtgtagatactgtgacattggaggatgaggaagcacatggcatcgttgattcgacttcatcaatgatattgactaataaactacaaatggatccatatattttataaacaccatattatatcctctacgagctacgaaaggcttctctccaagctcatcatccaaagtcttatgttgttggtgctgattttagttcaaactcatcacttgccaagcttgaagacaagtacaacaataattttcaagttgtcttgcatgacgcttattatggacgtcaactgcttgtgatgtggcgctcatgtaagtttcctttccctttttctttaatgtcacattagggaccatgtgtcactttagtttggggggtgacttaaatttttatttttagttttttgtttttaagtttttacttttttagtgtttagtttttattgttttgagtcgattcgcttaatatgagtcaatttgaaagtaggtagatagcatgatttaaattttttttttttttttttgaaaaaatctgtgcttggtgatattgcattct

SEQ ID NO: 170871 - DNA, 715 bp, Cannabis sativa
tttagggcataaatcccaacacatagccccacccataaccctatccccgtgacccgcacggtactgagtctagaacgttcatatgatagtactattgaccataatatcagcctatacttggtacgctagtaatactctcggcgtaccgatgtgatactatcagatagtacaaaagccaacatacatatctaatgtaatcgaacaggcttaactaacatgcacactaaacatgtatatatatatatgcatactgttatacaaatcttacctcgtttctgaattcaagtgtgccagccaacctgagtggaacaactgctcggcgaattgcaggctcctaaatcacatcaatcataacataggtaagtgacatgctaaatcactttttggggactcaaacttgaaactaaaagtttccctattgataaacaatatggcaataccctaaccataaaaaagggaaaaactagggttcccaaaattgccccaaccggtagaccggttcccaaacggaattccggttctgcggggtttcctggggaccaactggaattttggttcctacaggtcccctaaactcgaattccggttcagtgtaggaaacgctcaaaattttataattatttaataactaaaatagattattaaataatattttcatttaaaataattattaattagacatacaaagtctcttaatcaataattaaacctagaa

SEQ ID NO: 170872 - DNA, 2210 bp, Cannabis sativa
ttgcagggtaattggcattggataaattgctataaagcattatgatggcactgtttgaatgctgcctgaagtaagacacataccaaagttgagaagaaacctgatctcactaggaacccttgaagataaaggctacaattataaatcttgcaatggccagatgagaattgcaaaggggtctcttaccatcatgaagggtgaaaagaagaatgtcttatacattctgcaaggaaaaacaggaatggcttgtgaagccagtattttgcaacaccaagaaactgagatagaaatgtggcattaaagaatgggtcacatgagtgagcaagggatcaaagaattgaccaagcaagggctcctaggaaatttcgaacctaattcagtaccattctgtgaagcatgtgtgttgggaaagcatcatagattgaagttcatggcaggcaatcattgctctaagaggccgttggaatatgtccatgtgtgggtttatctacttaaaactaagaatgaatgcctaaaaaaattcagagaatggaaaactgaagtagaaaaccagtatgaaaagaaattgaaagttcttaggacagataatggtttagaattcatcaatactgaatttggcttgctgtgttttgagtttgtacttgttaggcataggactgttaagcatacacctcagcaaaatggtgttgctgagagaatgaataggactttgttgaataaagtaagatatttattgattagttttggtctaggaaaaatgtattggggagaggctcttattactgcatgctatttgattaataggagtcccagtagattcataaatctgaaaaccccatatgaaaaattgcatggcactacacctaacttgaatcacttaaatatctttggctgcattgcatatgcacacataaaaatgtttctctcttggatatcctaagggtgttaaaggatgtaggccatgttatattaaaaatagaaagcctacgattattatatctagggatgtagtctttaatgagcatgatttcatgcacttgatagccaagaaagacaaagactctgatgttgcaggtacaaacagggatgacctagctgagttagagattaattttgacaggatggaagtctcaaaatgaatcaccacacacaccataagtaaggacatcaactgaggtggtgttaggttatttttaagttaatttttggtgtatttttaatttagttctactcttatttggagcaattttacgctttttatcttttattcttacagatttaaaacagaaaaagattagaaaatatcaaaggaataagattgaaaaaaaataaaaaaaaatctcacacaaaagatgatatataaaatagagaaaattatacaagaaaataaagctaaaacttcaagcctgaatttgactatgttttgattagattccagaaaaagtcaaaacataaaagttctatagatctctcttttatctttccggaacatcttgaatcgtccaattccaatcaatatcgagagagttatggccaaaatactattagtcgacgcagcagaaaactcacctcatcttctaatcctaagcagaataggttttttaatcctaaggagaatagagatacaagcaccaattcaagagcaacacagctccgcaacactcgagaaacacaccagagaaacagtctcagtttctaaactcctacctgaatacaccctctgttcttaacctcttcaagaacatggtttcacagcttagaaaactaagcactcactctctaaactctctcttaattctcaccttacataagtgaaaagtgtagcctatttataggtacaactcacagctagaaaataggtgcaaaatcagcaccaactaactaactaacataacagaaagttagttaagttagttaagtgtaagtgagttagttttaagttggtttagatgatcaacttctacaataacaatagaactacatatggcttgtaccataaaaaaaaactgtcggtttctaagatcacgtgtggccattaattttctttgatccaactcaaagttttgcggatcccaattacctcaacataatttaattgagttatttgctagatataccaaaaaaaatatatatatatatatatatgcaattatatttaaaaaaatttacaccaaaaatctaaaatgataaatttattacataaataccta

SEQ ID NO: 170873 - DNA, 684 bp, Cannabis sativa
tgtttggggagagctctccattttaatggccatttttttttttgtataaaagtgatgagtctcaaatcctcaacagggctccatggacttctttccacttggctcttattataacaaggtgctctgcctcttcccatatctcactaatataatgtaatatatatatgtatgtatgtatatgggtatatgtatatgcccaagagactataagagtacgtaaaagaagaaattttgtttatatttattcattcattcatgatcaatatatatgtgagagtgaatctctatttttatatggagattttggagagagaggaagaagtattattatgttgttatccttataagctcaagactcatgcctcaaaatggggtacctactttaatgtaataaataggaaaaaaatagtttctgttttttatgttttaattccttctcggcagataggtctttcgagaaagagttgtgcagtgctaaggctaatgaagaaggagaaaatagttagtgttatgaggagtagagtggtgaggttttggggacttttggccatggttgtgaaaattgattgtgatgaaatgttattgttgtcttttgtctaatatttatgagagatgtatatagccaaatgtttatgttgtttttttttttttaattgatttgagtatatttaaaatatatattta

SEQ ID NO: 170874 - DNA, 872 bp, Cannabis sativa
tatatacaatatattgtgtcattgattcgatctacaaatgagatgttttctcaatttattttctttttttagatttttattttgtgtgcgatgatttttcaatttctaatatatttttttttcaacctttaaagatgtaaagatcgcttaattttagtatgagaattaacaaataattatagtttaatttagaattagacttttaactatgatttatgaatttatggagatatatttgaattctaggtgtgttatttatgttttatatgaaatttcatattttttatattttatgcccagtaacagtgaaacgtgacatttggccgatagagtcattttttttatgatttagtaacttagtaatagtagggaaatttagatagacattgagaatgtcagaaatatttgagatattagattttaccaaaatgccattaagtggcaaagatactttttggcttaggcaagggtaatttggtcttttgccttgaattgatctttgtcttttagtgacttagaagattggtatcagataataatatgatttattaggtttaatattagataaaacctaagatttattttacaaaatgaaagttagaaataaactctctttctccaaaacacactctctctctccttctctatcccttaggaagaccagcagcaagtaaaggttttagctcaaattgttgggagtttaagcagtaattctcttggaactttagcaattcaactcaaggtaagcctctttattctcttctccttgaatttttatgtttgggagttgggttttgtgcttgaaattgagtttaaggttgttgtaggtattgtttggaatcacttgggtattctgaagttaaattgaggtt

SEQ ID NO: 170875 - DNA, 618 bp, Cannabis sativa
ccattcgtttatgtcggatcagtttaggggtctaagatccagattatttcagtgtctagggctagagatttactgcacaatggatgtgtaggatttttagcaattgtgattgactccagcagacctgaaacatttgggcctaaggtagtcagagtttttagagaatttctcgatgtatttcccaaggagttgccaggattaccgccacaatgagaaatagatttcataattgatttggcacctggagttgaacctgtttcaaaagctccatataggatggctccagcagaacttaaggaactaaagttacaacttcaagggatgcttgacttagggtttacccgatccaatgtatcgccatggggagctccgattctgtttgtgaaaaagaaggatggttcccttagaatgtgtgttgattatcgggaactgaacaagctgatgattacaaacaaatatcttgttgcctagaatcgatgatttgttcgatcaacttcaaggaaagactgtgttttctaagattaacctgtgatttggttatcatcagctcagaattggagaagaagatatactgaagactgcatttcaaactagatatgggcactatgagtttctggt

SEQ ID NO: 170876 - DNA, 703 bp, Cannabis sativa
ttctcaaaccaaggaccacgaatttaaatgaagaaaatctaagagaattttaaaattaatgacagaaaataataggttttccttttgattcaatttgtcagacaagagaaagtcttaggtcatcatctgaataaaaaacctttatgttctatttatagggattcattaggtttagggttaaagctaaatgggatgagatgaaagatcaaatggcttaaaacaaaccaatcatggccgaagtcctataaagcccatgagttaattttttaccattatttttcttccttaatgaagcaaacattttttcttcagtattgtcattttttttgctttagttatttaaatactaattctatttatttaataattataactaattatcaaataaaattactatttaaatatatttattaattagaccttctaaggtcttttaattaatacataaaccttaaattctcttttattcttaattgtgccattcattggtaaaattcacaaataagacatagtttttatttagaatcctaattgattaaataaatcaattgattgagactacaaaacaatattatcgcaattagtacggggatcatgagcctatgtatccaagctcccaataagtagttttagaatttattaagtaaattatctatcttattaattctcctgactctactatagatttggaattatactcctg

SEQ ID NO: 170877 - DNA, 1085 bp, Cannabis sativa
  modified_base (1049)..(1060): a, c, t, g, unknown or other
agagagagagagagagagccaacccagaggctatggctcattggaccaacgtgggcccaatgggcctaggcctcctccagttttggcccattactttgccagaatgcttcttgggtacttacaaggaaaaatttacaaaaaataaagttttaaaattataaaaatactcaaaaataatttaacaaacaacatgaaaataatcataaaacaagaaaaatataactacaaagtaacaaaaaaaataacaaaatattgacataattacaataagtaaaataatatcaatttctcaatatgtttttatattacgaattgttttagttggttttgataacataatttatctttttgtactattacattaattttttcaatgaattcgttgttacaattttattcgtttattttttttctctttttctttttgaatcaatgatagttaaacaattataaattgaaaaacaactaaaaaaatcacaaaataaatacacatatatacaataaacatattgtctcaaataaactgaaaatttacacgataaaaaatacacataaattaaacaaaaaaaaaatacataaaaacaataaaaaaaataatgataaaagtattgtaggcgcgactaaaaatggggtaagttgaaaaatgtctcttttattaatcaattaaccaaatttaccttattttttttagttgaaacatacctctttttatatgtattgtacccaaaatgccctgacacaagacagtcacatagagagtatcttgaagtgacagaagcaaaattggtacaatatttaaaaaaagaggtatgagtaatagactttaataaagaaagtaaaaataaaagaggataatataaaaagggtatagagtctaatttcttctgtaaaatatacataattttcatatacaaactccatatcatgaaaaagatatctaaaatttttatattttgactttctccaaaatataattaggacatagtaaaatttaagcttgaaattttagctttattttcttgtaaaattttaggctaattagtaatttnnnnnnnnnnnntttaacatgtactaaatcgtgcccc

SEQ ID NO: 170878 - DNA, 786 bp, Cannabis sativa
ttcctagcatacacaaaagtaagtagaggcctatcagtgtgttggcttgttggatcagattcagaacgtttgattagattaaggtgacaagtacatagtctgatttagtacaaaacaaatgcaaatatgggacaaagtaaagcagtcaattactcactctaaaactatttctactatgagtcttctcttgtcatatgagtaaatgatttatgcaactaaaattgtacaacaaaacataatttactattaagttaatttaaatttttatctcaactttaacatgtatataataataatattatttattactattgagtgaaaattattatgtggataaagaataattttaaattattttttaatttggtggtaaacatcttactttatgagataataaaagatggattttgaaaagttacatcttttattggattataagagataatcatctcatatttaagataaggaaaagtgaattatgagagttacacttttataaaacttgtattatcataaacaagaacaattaagatcatagtgatccaaacttggaagagtaaatttagactcaaaataaagtgaatcaatgtggattcaaaaaaaatatgaaaagataattagcttgttgattggaagttcttctgcgtcaacgattatcatagtgtgatttagatcactctctcaaaaaaaaaatatatgaaaagataacaaaattggagaagcaattttgaatcttaattaatcaaagttgtgaacaaaattgatgagaattttgttaactttggt

SEQ ID NO: 170879 - DNA, 591 bp, Cannabis sativa
ttaatgttgaacaatgtcaaaaggtaatgacacaaaataaatttttcatttttttttttggcctaattagcaaacttaataagagggtaagacgacggtgtatattaaaatttaaatttagaaagatgttttgatttgaatgtaacaaaagttatctttttttcaaccaaagaccgaaaaataggaaggagaaacataaggcaccttattgatcgcatactctaatatcaagatgagtgtaacccggcaatacacaaacaaacaccgattacactccaatcgagtgcaaaatacttctagggttttcattaaggaacgagaaaaccaaaaaaatcattgtcaatatcactatagtctatttggattaatttgactttttaacgataaatattagaaattaaataaaagataatattacaaaagatgtttgatcacaaaataacattttctcttaatacattttttataatatacttatttttaatatatatatataatttttttcgttccacattttccttataaactatatatttttttaaaaaaaatggcattttaagctaattttttaatatatatatatttttaatt

SEQ ID NO: 170880 - DNA, 894 bp, Cannabis sativa
tgagtccatatgaggaatggtggcaactgatttctaacgttattatgtataaaaataggtggcagtggggtctatatatgttagtagtaagtggggtctgttagaggtagtgagctacaaagactcatgagaatcacatgcaactccctttatgttcattcttaaaatattatcaacgtgtccataagtatatacggactgtttagccagtccgtatttttttaaaaaaaagttttgtattttcttttttgtttaattttcgttaataagataaaaatgtaaaatttgtaaaatttactgtagccatagtcttgttaaaattattcaaaatgccactcactaataagaaagtaataatatgtgattttttgttgaattgggtaaatatctcttatttaattaatattacaattgtttttttaatttaaagaaagagaaaaatgaagagaaaaaaaagaaaagaaaagaaagggagttaacatgtaaaagagactaaacataagcaataaatatatttttgtaattaaagaactttttgaaaagtaaaattaaaaaacagattttataaaagtttaaaaaaccaaacataaataaaaatgtaaaaaagataccaaatgtgacatatagtgtaaaaatccctaaatgtaatagttcaggggattcttaataagccgtatattttaaaggccaaaattaatattgtcaaaaattcaagagagaaaattgctaattatccactaggtaatatggtcgcacttcacgcggctattttaattcttttaatataaattggaaaataaaaatttattaatataataaataataattaaaaaaaatatttaatatattataatttgatgttatattatccaattatattttatttataagaaa

SEQ ID NO: 170881 - DNA, 1138 bp, Cannabis sativa
tgagtttgggtctagtttcggcactgagtctaggtatgacttgggatctaggtttggaacccgattcaggtctaggtcttggttggagtctggcacctggtccggttacagttctgggtctaggtttaattccgattacggttccaggtctaagtccaagttctggttacagttccagtcccgttcccgggtctcggtctacttctgatttcagttcaaatttttggtcacaggttacgaatttcggtccatgtttgggtttgggactggttttggtccgagtcttggttcgggtcctggtcttgttctagttcgggtcccgagttttgggtcgggtcctaagtttaggattgggtgcgagttcggggttgtgtcccgatagtcaagtccttgtttccgggtctagggttgggtcttgtctctcgagtttggggtcaagttttgggtcttcatcccagttctaggtgcctagtttctagtctaagtcctcaatcatgatcccgatcctttgtcaaatttgtgtccatgttcgggtttgggccacaagtcccccatctaggtctagatcttaggtcctggtctaggtccaagttcaagttcgggtttgaatctcaagtttgggtccgagtctaggtcccaatacgggttcaggtattagtttgggtcttggtccagaatgagtccaagtccctatttgggtctaggtcggggtcccaaaccgggtcccagtcaaggtctaggtcacgaactaggtttttgtgtgggttttggtctgggtttaggtcttgagtttggttctaggtttgggtctggatctaggtctcggtcggtgtcctgggttacaatctcggtttggctatgggtctgggcccgtgtctaggtttgggtttagggtttagggtttagtatttagggcttagggcttagggtttaggggtaagtgtaaagagtttagaatttaggttttaaggtttaggattcagagtttaatggtccgcttccagatccggttccaatttcgggtcatagggtacgattgaaggttcgggtgtgcgtttgggtctgagtcctggtttaggtctaggtccgtgttttggttcaggtctgagtcttagtcccaaatccaaacacaaaccac

SEQ ID NO: 170882 - DNA, 782 bp, Cannabis sativa
gaaattgattccttgaccttaaattaagactttttgccactacaccaaacaatatttattatactttcttattatttaatattttatctatatactaataattttttttacagtttcaggaccctaagcgttcaaggccccgaggcacatgcctagctgggtctatcctcagggtcggccctgtctataattcatacttttttgtctaaagcatgtcaactcgcataacttattacctattaagttctctttatttgctaatactgcattattctcatatactaattcacatatatattttattgcaagataattcatactactcttcttcttttaagttgcaaaatgttgaagtaaaatgcttttttctttctttcttccttcttttggtattatttcactaaaaaagatatatttgtatgtatagataccattccattattgttgttttaaatgatagaaattactttttatgtatgtacaaaaatatttccatgtaattataaaatatttgaatactgaaattataaaatttgcaagttcaaaatacttttgctctgatgtaggctatctttgcataagaagtactcatagtaaaactaatttaataatatttaaacacaaaatgatattttaaataataaaatatattattaatatctttataattatttaatcgacaaaattggtaatttttaaattatataaataatcatgacatttttacaaaagtacatgtaatataatttagtaacatttttaaaatgtcactaaaattattt

SEQ ID NO: 170883 - DNA, 927 bp, Cannabis sativa
  modified_base (83)..(110): a, c, t, g, unknown or other
tcattaaattaaagccgtctatttgttataaggggaaaaaaaatgtaaaaatgtgtactaatatatagagtaaatactatttnnnnnnnnnnnnnnnnnnnnnnnnnnnnattggattctatgttttattaaataataaattggactttttattttctaaaattgtataaataagaccctaaattgatattttgtcgaaataaaatttagtaataatccaatctaaagatgttatgataaatctaattacattttatgtatctcttcaagttaaaaattatcttaaagttggttatattaaacaataaatttgttaaaaattgagttcaaggtcttatttttatcattttggaaaatatagggtctattttgtcatttaacaaaacttaaagtccaattagtaacttttgtaaaacatagagtctaaaatggtatttacccgctaatatataattatggataaatattattttggactgtgcgttttgcgccactatagattcgaaatcgcactcttaattatatagaacgctctatatgtaccaagatatacatacgttatgaaattatccattgctacaatccaaatagtcaaagatcctctatagatgatctaggggtgaaaatcaatcggttatggtcgatttttacaagtttataaccgaccagtcgattacagttttttattttatgaaaatcgtaaccgaccttttaaaaattataacagtataaaactgaccgtacgatttttggcagttttggacggtttattgcggtttttgacggttttttgcaattttttggtttaaccattttttatttcaaaaaccgaaaccaaccgccatctcaaaaaaatcgaaaacgaaaccgaccgccaaattcggtgatgacgtggaaccgaaaattcggttacggtctggtcggttt

SEQ ID NO: 170884 - DNA, 810 bp, Cannabis sativa
ataaattttccaaaacaacaacatcaacatcaactaagcagaagtaatcatatcaacattcaaaattgttaaaacaaaaaactttaaacacaaaatcaaatcttcaaaccaataaaacaatcattaaatttatgtattatattataccatgaggttgatttttggaaaatgatctcattctgtggtaatcttgcttataagtaccgttagctcttcttctccaaaaacccattgaaaagctttcactgaagaaattgaaaaatgggtaagattgatcgtatcgtgggactattatggatgctccgaggtctattaatgtttgttcgtcttatgattttgtgttttgggtttatgggtatttatagagatcagactcaaagattattagtttccttttttgattaggattagataacaaatatataatataatttatttaaatgataaattgttttgaaaatgagtttatgggtatttatagagatcggacttattagtttccttttttgattaggattagataacaaatatataatataatttatttaaatgataaattgttttgaaaatgataacaaatatataatataaaatatttatgtaaataaagttttatagaagtgaaaatttaaaaagaaaacgtaaaaacggaaaaataattggaatagttggtataatgggtaattttcgttaaatttatttaatattataataataataattattattatcttcttttttaaaatacgaatttaattccaaggattagaaaaaaaatatatatttttaaaggagagggatttaaattta

SEQ ID NO: 170885 - DNA, 689 bp, Cannabis sativa
ttttttttttttttttaaaagtagcatttagtttctaaaattaagaatattgagttttaaaataataagaaaaaataaatataatgcatctggaccctccacgtgtccatatatatgagttaacgaagtggtagtgtcggatgtaatataattgtaacattgggtatttttgccttcaaaaataaaaataaggtatttaagtgtatggaatctaaaacattaagtatttatgccgcaatttaccaaatataaatttatgaaataaaaaatacaaaaaaataatcataaaataaattttacattttttagtaattataacaataatatttgtcataaaatcttcacttttctatatattttaaaatagcaaatgatatttttagtgtcaacactactaatttatttataatatacacgttaaatattatattataaattatattacttaacataaatacaatatatatatatacaaattataaaaattggacaacaatgcgaaacacaacttagttacctaattatactataattgaaagattacaagttacaactaaataaagataaaaaaaaataaatcaaaatactaaaaagtattaatgctaacaagggaaaggtaatgtgaaatattaccttgtttgttttgagtctttagccttggaatgttattcccttagtattataactac

SEQ ID NO: 170886 - DNA, 560 bp, Cannabis sativa
aaaaaagcaaaaaatataactttagataataccaataaaaaattaaaatgaaaaaaataaatactcaataatattaattaaatactcatttttaaatatagattttagaattatatctatgaagctaataaaaaattaaaacataagaaaattaaagagaaacaaataatgctaattagagagatcttagagtgacatgtattttattttaaagtgacatgtaacaaataatatagatcttatagatctaagaaacaaacagcgtttcgcgtgcggttgtattttatttagtaataattaaattaaaaaattatattaaatcttgtatttcaaattttgatattttttttaatagtatgagtaactattctattaaacttttattttttttactcttaataagataaaaaataaaatatatattataaaatcttagttattttaattaactagaactaaataaatgttaattttttaattaattaatttattatagatatatattattatacgggaaggtttcaatggttacttttctattgtaaccatcatggttacat

SEQ ID NO: 170887 - DNA, 700 bp, Cannabis sativa
attttacccttctaattacttcttatcctttactattgataattcactagtgaaagtataatttagatccaatctaaatttgtgcacaattttttagttctagaattaacacttaaaggaaccaacattccatccgttgagaaagttaggattctataattgtagatcatgttcccaaccatccacattattagattcccaaaatagaagttgtgagaattatcttctctgagaaactctaatgagtgaattaaaaaaattaataacatgaacatgatttaggccaatctaccattaatcatcattatgatatgaatcaggtctttatagtaaacgacatgtttgataaagacaacttaattacatattggtccttgtcatgtataatctctattatatacaacactttcacttagatgtcatgttatatcagtaatcttaatcgagattatggacatcaatgaaccgtactagcaaccattgattaaagattcataaactttaatatgttgctgactgttttattcatggctaagtgatcttaattctccgtacaatacaagtcacatcctcaagtatgaataaggaatttttcgatgtatatataaattattcaatattaataatttaacattcaagcatatataaaaatgttcaactcttatttataaacataaatatctttacaagcttttcaagg

SEQ ID NO: 170888 - DNA, 632 bp, Cannabis sativa
gaggttcttcgaactgtcttccgctggtcggaagcggagaagaagtctaaggaggaggagcttgccgctgaggttgagaagtacaaggctgaggccgagcagcagagagctaaggttcaggagaacaagggagaggccaagcaacagagagctgaggtggcaaggctcggagacaaggtaaaagccttagagacagcaggtcttgagattttttatgacttctgaaaggctaatcccaaagcaaactttgattacttgggcgattccaaagacatgtttcttgagtattgcacttcttaggtggcttatggagaatccgaggcggccacttttgcctctggccaggacgttgacatgccccccgctcagacagcagatcctccagctcctatcggcctagaagacccgtataaagagcctaggactccagtcgtgtgaatacttctctttttatctatttctttttttatcagtctggccataaggccttttttaagacaaagtgaccgaccaagcggtttttaaaattggaattatttttatttttcaaacaacaggctgaccgggtagcctttaatcccaattttacgtgcttttgttatctttaatgaatttcatcctttgtttataat

SEQ ID NO: 170889 - DNA, 665 bp, Cannabis sativa
tctctctctctctctcttgtttcacatgcccacactattcaaagtgtgtatgagatcaaaaatcttaatctcattacaatgtctcatgagttgagtacaccctttaatacctaaatcagttcatcttataagatctagcccactctattcctaagtgttgagactggcttagaagatcaaggtgtggatttttcaatcaagttcttagattgggtgttcaattattatacgaaaagaaacaaggatatcctgatatgcatcaagaggtaattgaatttctttcagtagttagatttatctatatacattatgttgagatccttgagcttatggctcatattggttaaaaattattttatcaaaattttgcttccgcttttataactctgatatggaccataaaaaccaataatacatggttacattcatcgacgacttctcaaggtacgtatgggttttctttatgaaagaaaaatttgaaactttttcaaaatttaaagggtttaaataaatagtagaaggaaaagttgggaagaaaatttgatgcctcctgttgacttcacttttagccaacgacaatgagtttttttgataagcgataaacgatatgtcgtaatgaatatataataaagcaataataagacacaataaacaagatcaagtat

SEQ ID NO: 170890 - DNA, 657 bp, Cannabis sativa
ctccaggcttcttttgtctcgtttacttctaaccgttgacctttgaagcggctcaaatacttggagggcgaggtccaaaaattatcatcctaatgtggggctgtgactaagcaacatgatgacgcctagtaagaaatcacctgcctcaaacaagaagtcacaaagataagggaagaagccgagaagaaggcaaaggaggaagccgagaagaccttaaaggcccaagctgatgaatttgagaagaagctcgctgagaaggagatcgagactacagaacgatgcaacaaagttggcctttgtactgtatatcgggcctggatggcgaatcctaatatggatacaagcttcctagaggagaaggaagaggagactttggctttttgcaagaagtccagggcaggggaggaagatgttgatgctgaggaagaagaagataatccaaccaaatcacccaccatgtagacttggtttttatttatcttcccccctttttttaaatgtcctttcgaccgagacaatgatttgccccttgtggcattttttacaaagaaaaatttgcggagttggatggccaactttgccttttattttatcttttaatgcctcctgcttttatgtttgaactttgacttatgcttgtttttgttggaaattatt

SEQ ID NO: 170891 - DNA, 695 bp, Cannabis sativa
aaaccaaatgtaagtcattttcttaaaacactccttgaagacgagatgccatatggtcaaccaggaaccaaggaaccggaagttcgccacaggaataagggaaatctggggacacaacctggggtacatgggtcatcgttaagggatcgccaacagtctctccaagctcataggaaaggagctcgcacaaatcccaatagggggaacaagacaaatcaaacccaagggagaagagtagggcgtgaagaggtgagtgttactgcaaggcgcacgataaatcataatcgattaatgtgaggaggagagaatactcatcgcaacgatgatcaaaaaggaaaagtacggtctatgggtggaacaagatccgccagtcgtcatggccaatcggacttacgagaacgcttgaactagaaaaaacctgatcttcgccaacaacttggtccaaagcaaggggattcgatccatttgcgaatagacgagttggagaataagttcaggagacaccaagtcggggagccaagaagacaatcaggatgtgattctgttgaagaattcgagtcggaagcttcagggtcaaagaggaaagacgactctaggaggtcgtccaaagataagaaacaaaagaagcacggcaaatacgtacccatttatactatctataccgagcttaatgaaactcgggaaagtatctacct

SEQ ID NO: 170892 - DNA, 618 bp, Cannabis sativa
ggccccagaccacgaccccagacccgatccagatcctccccagccctggccccggccgtgggcccgacctcggcccgagactctagacccagacctggacctatacccaaactcagactcgcacatgcacctagacatagaccccgaatgcaaacccagacgccgaccttggacctagaccctagacctagacccctacccgcacctggacatggacccatatgccgaccctagactcagacctcggacttggtcctcggccccagaccctggcccggatctcagatctcgaacctagacctagacttggaccctgactcaaaatgcgaacccagtccccctcagaatgtggacctaaaccccgaccttagacctggaccctagacccatccccagatccgatgtcggggtccgagtttgggtccaagtctggggtccaggttggggttcatggttactctatggtctggggtccaggttctatggtctgggcttcggggtccgattttgggtctcggtccaaggtttaggtcttggttggggtcgagtccgactcatataaaagcaaaaagcaaatatgaaagataaaatttctagaacacatttttatttttaaaa

SEQ ID NO: 170893 - DNA, 845 bp, Cannabis sativa
aatttcattaatgtaaataaatagaaaaaaatatggaaaaattacaagagtttattttttcatggtataaataaataatactatagggttatgaattttttttttatttttttttacatttatatggggctttttatggcatatttttgtaaaaaaaatagaaatcccatatttgtaaaacaataataagtttcgccggaaaagtcactagcgccgaaaaaatcgtcgaaaaagtcactggtaccggaaaacgtagtgtcgtgaaaaaaatcgctggaaaagtcactagaaaagtcatcgtcacctaaaaagtcaccgaaaaaatcaccgtcactggaaaagtcaccagaagtagatgtctcaaatataaacaaaaatagagtcagttttataacataacgaataaaaataaataacacaaaataactcaaacctgttataactgaaatataactggttctgtaacataatgaataaaaataaataacacaaaataactgaatccagttataattaaaatagaatcgattctataacagtattataatgaataaaaacaaataatacgaaataactcaaatcggttataactaaaatagagccggttatataaaatgggtatttttggggtaaatatggtatgtgtgtaattatttggtgcgttagagcatgttgaatggattttttgtttgagttattttatttaaatagtttttgtgtgtgactttttatcttagttgctttatgaaaccagtttttttatctcaaaattttaactagttgataaatataaccggttttcttatattatatttgagttattgtgtgttattctttgtgtttat

SEQ ID NO: 170894 - DNA, 926 bp, Cannabis sativa
  modified_base (886)..(892): a, c, t, g, unknown or other
aaaaacttttcaccccagccactaaagatctgacaactcagctaccataatccttatcaattatacttttgagactaatatcaaggcctatcagaagatttttattcggtttctgtctttaaattgtataaatgtcaatgaggtttggcataaaagaagaccttattacgccccttctccagggtggtgtgtgttgtgcaaatctaatggagaaagtgcttataatttattttttcattgctgtttctccctggagctatgttttaaagtcctgaaggaatttggcatggaatgggttataccttctcaaggcatagatattctgtccatgtttatagaaggtgataaaagaaggcagctgctatggaaggtggtgaccgtggctgaattctgggctttgtggctggagtgaaataagagaattttttttgcgataaagaagaatctggacagatgttgtgggagaagatcagagtctgggtggctgtgtgattgtttgaaaaagagtggaaagatatttagtatagatcctgtttggaattggaagtgtaatttgtaacctgtttattttgtttcgttttttggaaaatgttatacatattttcctgttttttgttagttttataggtagtacatttttgtattccaatctgccagcaatgtcttttggaaaatgttatagctacgcatacatattggtagcactgctgccagccatacgtttgttactaggaacgtttattttgcgttttttacttttctctgttctttgggtgatatgattttttattttttgaattgggtggtatgatttttgtacacactgtaacttaaattattctcttcattactaatacaattagtgttttatatatatatatatatnnnnnnnaggtgattgttacgtgccaagccacgtagtgtta

SEQ ID NO: 170895 - DNA, 577 bp, Cannabis sativa
tttgattaagtttcttattatttgttctgttgagaatcgtagggttccatctcaaaaccaatttttgtgatgagtggagtagctcatgttctttatatatggctcaatatttttacatttaatctatgtcggacaatattgttcaatatgctcattctttatttctcttcctcttttatcttatttcaattaaataaataattaaaatgtagtataagagcacaactattaagcacttaagtgcttgacaccactatgtaatgacactataattggttttttctataatttttattaatttaaaataagtgagactcaatattgaactgtactaataacaatattacacctcacaagtttactagacaccatgagtactctttagtatttttttaaaattatatataactcgatatttaattttacttataacgatattatattttagagagtggtagatattattaatatttttatgtaatataaatatatgaggtaaaataaaatatatatatttttttaaaaaaaataaagtagagaatttgttgagtagggatttttttctttttttttttgg

SEQ ID NO: 170896 - DNA, 608 bp, Cannabis sativa
aacttgttgatggaactctttggctacaaatcttgctttacattgttaaatgaacctttgcattttgtttgatcctcaagacccacttacaacctatacaagtttgattgtctggtagaggaacaagctcctaggttctgtttttctttaaaccaaacatttctgtagacattgcttcaaaccaatgaggctcttgcaaagctattttaacaaactttagttcatagatagccaacaatgaatttggtttcctgatccctgcctttaatcttgttgtcattggatgtgaagatgtatattgaacagttgagctagctgtaggtaatttgttagaaatagtaggtctttatgatttttagaaactgattaattagagcttatgaaaaatgaaaaacaataaataataaacaaatagttttttacgtggttcaggcgctaataatccctagtccatgagtccattgtattagccttgtcatcgagtgtttgagtattataactatttacaatattaactatgtattccttttatttctcttgaagaagaagaaagctctttaggaattttggcagaggttttgtaacccctcacatatgaaaaaataggg

SEQ ID NO: 170897 - DNA, 534 bp, Cannabis sativa
tgctcatatatatttgtcatataccaaataatttcattaaaaaattatcaattttgtcatttgaatttttgacaatactaatttttcttcctaaaatatatgacttgttaaaaattttccctcaacttttacatttaaagaaatttagtcattttgttaggttccatttcaatatttcatttaaatgctaatgtgtctttgtaaattaacaattttacccttctaaactttaacaaccatcaaatcatacctccttgaaataaaaatgtgaaaaattcaatatttttttagttgatcttaacaaattaatttagatattaaaaaaatcattttttttttgaaataaaatcatcatctttattagttgcaatccatagtgattacatgattaaaatctggagtaacatcactactcctgataaacacgttcagtaactaaatagaatgctcgagctaagaagtgagtaacactatttgcaaaacgtctaataaaattgacagaaacatctctcaaatcatttaacatcatcttac

SEQ ID NO: 170898 - DNA, 590 bp, Cannabis sativa
tcttaaaaaaaaatgaaaaaaattgtgtttaacaaattgaaagaaaaaagaaacttaatattgttagaaataataaagaacgaaagtttttgtcataagcatattgaaatattcgttaaaaataacaaaataagcacgttaaaatatgaatgtttttttttttgaaaatagcgtagatatattaaacaacaaataacttagacctcacggtcattataaaataagttacttggaatagaggatggatccaccatacccgccacattacagttaaaatcccatttagccacattatgggcagcacagttacaacttctaaaaataaatgaaaaattacaaccagtcaaaagggtcgagagctttttacaattagttacataattagtaataccccaattggaggacaatcccttcagagtattagttacggtctcagaattgctctcaatgatcacaaaagaaagcttccctctaaccgctgattccagggccaacaggcaagccacagcttctccaataagcggatcagaaaaactgaggatattgcttgctacccataaaattgactccttatgatccctagccaaagc

SEQ ID NO: 170899 - DNA, 1204 bp, Cannabis sativa
tttaaaattataagaatcaatttttagaattttaaaatataaatcaatcaatcaatttatacaacaaagttattctagaatatttgataagttatcctttctcttgttaattttcatgagttcaattttgacaccttcatttgataattttatactatttattttttttttgcctattttattttatttttttttttaattttcttaaaaagtttttatctcctctttatcattctcaatagggggtgtccatccaatcttctctgaggaactttaatgagtgaatcaaataaattaataacatgaatatgagttcatgattactcaaaatttaggccgatatactattgatcatcatattaggtctttatagtaaatgatgagtctgatcaggacaacttcattcatattggtcattgtcatatataatctcaattatatacaacaccttcacttggatgtcatactacattagtaatgtgaatctagattacttgcaccaaataacgagcatcaatgaatcgtactatagcaaccactgattaaagattctcactttaatatgttattgactgttttattcatggttgagtgatcttagttctccatacaatacaagtcacatcctcatgtatgaaaaataaatttcctgatatttatatataaattattcaatcttcaatattaataattcaataagtatatataaacttgttcagctcttatttataaatcataatgtctttacaggtttttcagggcataaatgctatcatgtaccacatcaaatattttttggcctatccaaatccgatccaatcatacattggatgttagattttaccattcgatcttatctatttaatttcagtcatccaatcaattaatactttatgtagtacaactatcaatatatattaacaaataaaaatataagactttccaccacaataattacaaactttaaaaaaattataatacaagaattattccatattaataaatgttaaaattctaaattattgtttagaaaaaaaaattcaaattattcaattaatttagaagcttaaattaaaaataaataataataaaaaatcatgtattttcaaatgattgaactcatgccattatacttgatgtaagataattttacgacttacaccatgattatatttttggttgtattgattattgtaggattaaa

SEQ ID NO: 170900 - DNA, 601 bp, Cannabis sativa
acaggggtcaaggtcggccagtgaaatggtggatgataagcttcatcgtcgagagggaaataactcggatcaccagttaaggcacctaaatacggctcggtgataaaggaggtagtgtagtctataataaaaatatgtggataatattgtatattagtacttgacatttattttaaaataagtacttagtattaaataagtgtcgtcattttgttttctaacattgaataaaatattaattattattttaattatattttttatttttgtttattttatttattgaaaatgatgtgagagtaaaatttatttctaaattttgagagaaaaagaaatttgcgataaaaggaggaatgagttttgagattttcttaaattaccagttctaagaaatatgaggttgaagtacttcgtttttcttaattagaaaaatttcaacttaaattatgtaatgttttattaagttttaagtatatataataatttctccattaaaaaaaggggaaatttgaatttctatacatgcattaggggataattttttccctaaacttaaaataggggtattggtaaaataggataacatttatctaattcccac

SEQ ID NO: 170901 - DNA, 532 bp, Cannabis sativa
aaccttagttttctttcttggctgtggtgcataagaaaagagaagaactagtgttcatggtgtgattggtgttattggtgtgattggtgtgatagagattgacttttctattggtaagagtttaatttattttattagtacttttgtttgattcctagtttctatttgtgtgtatatatatgtataaaaggaagatgttatgttattttattattattttgtttgattcttaatttctatttgtgtgtatatatatatgtatgaaaggaagatgttatgttattttattattattttgtttgattctaagatggtactcaccttttttatttgtgtgtgtatgtacatatatatatatacgtataaatggatatttgtgttttgggttatatatacatttacatgcattttttttttggcttctcccagttatgtgtttttataaatacttggttttatttttggattttgactgttactgtgtatttatataatggctcatgtgacttttgagttgtagggatatatatat

SEQ ID NO: 170902 - DNA, 942 bp, Cannabis sativa
acgaccactgcagatgcccttaggcctataatgtttgacaacatgttattatttaaagaaatttaaaaaaattatatgaaagttaagaagatgcagtagtctatatgtaataaattataacaaaaggagttagagaatacaaaatatatttatcttcaatttttttattattattatcattaaacttttttagcttagatgatagagaatacaaaattcttaagaaaaaaaaaaaaaagaaagagagagagagagagagaaggaatacaaaatggctttgccttaaaatagtgaattattacttgataattaattaattaattaaagagtttatatatttcggatggtatacgataaggacgatacttcttattcaaccaaaccaccgttgtctttgcttccaaaataagctatcatatacataataacaacaacaacaacaaattagaattatatgtgtcgaaaataatgaaacacaataactatagatgttatgatttcgttgattatattttttgcattagtttattgtaaaagttgaattcaagttatattaaaaaaacttattaaagaaagttaaacagctcggagtattattttttttataagatttgaattatcaatcaacaaaataaaaaatctattataatttacaaaacacaaagtttaatttatatatatttatatatatttatatatacctcgttatttgaaagcttgaagattcgatactcaaagtaaatgcgagttcgtgtcattccagagattcttactttcaccacaaatttatccccactctagccaaccacaaaatcataataattaatttaatacgattgtaacatcttccatttatgtactttcactactacaaaattgggctttagaggcggtttttaagggctttcagcgtcggtattggcgaaattcgctaccgacgct

SEQ ID NO: 170903 - DNA, 558 bp, Cannabis sativa
gccgatctgccaaaccccaaagtctggtcatcagattcctcacacgtgtggcttacgcgccgctcgtttcttctgccacctaccccacgcatcgacgcgtgaaggcgcgtgtgacagaggtttcggcagcgattcgtctccgattcgtttttcaaccccccttaagcctactcacatttgtctcaggttatagtttggtatttctccctacttcgtatttgggtgttctttacttatttttcattattcaattcaaccttgtctcgttcgatatttgtttccgaaattatgacagagacgaaatcaaatccaaaaccactagttgtttctgatgtgattcttgtgttgtctaaaatcacggactgtgaattgattggttcgaattatttagaataaagtaaggcaatacgactttatctaaggagtattgacaaaaaatgatcacttgactgatggtcctcccaaagaaaaaaatgattcaaggaaagtgtggctccgtgaggatgctcgcttgttccttcaaattcgaaattctatcgataatgaggtaattagttt

SEQ ID NO: 170904 - DNA, 538 bp, Cannabis sativa
gcagttatagtttcacactaaagactaaagagatagtggcacaactacactaaattttttttctaaatttttaatattgaaataatgtgtttataattaaatttttatatttatataaatattatgatgttatatttatattttttttaatattatatttatataaatttaaatttttatatttatataaatattatgatgttatatttatattttttttaatattatatttatataaattgatttagaaacggtggtagagggaaatccttggacgtttaatagagttcagtatgtttttcagaagttaagaaggggagatgattcgaaaagggtagtgttaaacaatctcggcatctgggtgcaaatcggcctccaatcgaggtttaaatttgcgagtgttgtggagaagttgggtaattttattggtacgtatgttaaggctcaccctaagaattttcagaatgtgtggatagattatatacgtgttcgggttacgttggacatcactgtgttggaatttattttaccagaatct

SEQ ID NO: 170905 - DNA, 778 bp, Cannabis sativa
ttttcaagttgatgaagttcaaaaatatgattttttgtagagaatgaatgtgtctagacatcataaaataaacaattataattatatttatatacataagtgactaaagaattgaattaccaaatcaatattggtatatagtacctgttgcaataattccactggttgttatacttgcatcttttatgagtgaattcactctcatgctacattgaaagatcatgtatgctttgaaaaaagcatactttgaaaaaagattattggacttgtatgcttacttggttaacatgaaataaggattggttacagtgaaatggcattgagagatgtgattgtgaatttggcaaagcttgactaaaggagtcttcaaaagtaaattgcttatttccaataagattggcctgaacataaaacataaattatttatgtaaagacaaatattgtaaaaatgctacttagaaaaaaaaaaacaaaaaagaaaaaattacctcatgtgtaggtaacttttggtgttgtatttgttttttcttttttgtagctttctcaagagcacttttaggtcttgtagatttatcacgaaattttccttttaatttcactcctttgatattgttgatatcttcatctcttccggaaaattgattctcattcttttgggaacatacttggtgatcatttgaactagtatttccaatttcaatttttttcaaaccttccaaaatatttttaaaaccactgatagcataatcatagttttttttcatcccaagatgccttt

SEQ ID NO: 170906 - DNA, 756 bp, Cannabis sativa
gtatatatatcttcaattttttaccaataaaataattaaaattcgaagacaaaagtaaagagaaaaagaaagaaaataattgtgaatctttgtctatggttttcaaaataactgaacacataaaccctaaagacataaataaccgaaaataaaagtgttcaatagtctaaccccatatcaaatactgaaaatcctaaaacataatctataaatccttataatctcatatctgacaccctcattttttttttcctcatatctctcaacgaaaaaatgtacactattattttttctcatttttatttgaaatattctactacttttctcacctaaaaacacatacatacattataatattaatttattaattttgagggacattacttattattagttttctgaaaaggcccaacgttattcatatgatacttataaaaaaatgttttattaatttgtctgcgtagacgtgaaacatgcatggtatggttatataatttgaattaatttttttagtctgcgtagtgaattattataattattcttgaataaatgatcaactaattaaaaattaggaaatcaccaaattaacatactatttttttaattttttttttaaatttactgtttgggttggttcggtagtttttcggtgctttttatgtggatttgttatgtgaattttagttacgatttagattgcactgtttagttgctgaggatttctatgtagaattctgtaaaagtgcaaaaaaaaaa

SEQ ID NO: 170907 - DNA, 592 bp, Cannabis sativa
tttttttttttaatttaataataagtatacacacaatcacattgtatttaaaaagtcttatttgttttttgtatttaatttttttaaaaaaagacatataaagtttttattcatataataatagattatatgtaataatttatacacacatgacacacaaatgaattttttttttttttcataacaataaaattaaaagttcacattgatttttattcaccatttcttcttcaaaaaaatatgtacttaaaagtttcatattgtattaaatttattctccattttcattaaaaaaaaaatgtatactttaaaatttcacattatatcaaatttattaaatacaaaataaatatatatataaatattttgactctacaatttgaaaggtggttactaaagaataaataacatataagactagaattataaagtatttagtctttgttaatacatgttatatacatgctattagtttaacttgtattaaagaggtttaaaataaacttctatgcggtatcttttaataaaattaaagtccatcttaattttttttcttaacatatataattttcatttacgtgtacaattgagt

SEQ ID NO: 170908 - DNA, 691 bp, Cannabis sativa
tgcgtaaagaagtacttcaggcttttgttgtggtataaacttcacatttcttctcgtagagatagtgcctccatatttttagcgcaaaaactactggtgccaactccagaacatgtgttgggtacgtccgttcatactccttaagttgtcttgatgcatacgctactattttgtcatttcgcatcagcacgcatccaagcccttgtttcgatgcatcacaatacaccacaaacttatccttgttattgagaacacataatacaggggctgttattagtttgtccttaagtgtttggaatctatcctcactcttgtctaaccaggaaaacttttgcgtcttttaagtcaagttggttagaggagttgctatcttggaaaatccttcaacgaagcgtttgtagtaaccaactagctagagccaagaagcttcttacttcacttgcagtcttaggtgttggccagctcttgaccgcttcgatctttggaggatccacctggactccttctttggaaactatatgatcttctctaaccagaattcacatttcttgaatttggcgtatagttggttctccttaagtcggtttatagtcatcctcaggtattcctcatgttcctccacagttttggagtagataagaatgtcatcaatgaatacaacaacaaacttatttaggtactccttgaacac

SEQ ID NO: 170909 - DNA, 636 bp, Cannabis sativa
  modified_base (564)..(587): a, c, t, g, unknown or other
aagtggttaaattttgttgtgattttagttagtctgagtattattgcattaggaaaaattgtagtaagaaacaagttgagagattaaaagaaattatatatgttgtggatgtgatatctttcttctcacattaatgtattcattgatattgcttgtgaagaaatgtgaaaatcatactctaaatcatgcctttttaaaatgttctattaattaatttgcttttccaatttttcctgaaatctaaatgaggcatgttttagctagatgtaacatttagacaattcaacttattttatgcaacatgattattgcctgtgcaaggtcttataggatataggtaccatatgaaataatactaatatgtatatgtaaaatatattttttagaaaaaaactagaaagggccatgatcctcctaacagataagtagattcgtctctggatgacatgtggcctaccacttttcaataggttacaaatattgagttgtgtactcctcatgcaccaattcgaactcaaaggtctttccactcattaatatactatgggctcgtttggaacgccnnnnnnnnnnnnnnnnnnnnnnnntatattgaattggattatatatcatatttttatataatactatgttaaa

SEQ ID NO: 170910 - DNA, 561 bp, Cannabis sativa
  modified_base (296)..(297): a, c, t, g, unknown or other
gattagggacactcttggaaatcttgatgacaaacttgtaaaagctagcttcgaacaatgatcttaaactcattagagtagggaaacttcattgaaaaataaatcacatgagttgtaaaatcttgctaacaggatgcaatctaatgtcatttgcgtcctgcaatatattttaaaaacttgttatcctttctctaaaagcttgaagggacattagtattttaactgcacataaaaaattatatattagtgggaggaaacataaaataataattattataaataaatattcttaaaannttttataatatattttcactataaattaataatcaaattgaaaattagtaacaatatttgttctatataaaaggaggaacttatcttgtcaaatgtaattgatgccggccgaaaattctgaacacaaactacttcaattaatttataaacttgaataatgagtatattgatgtgagataaagtagaaaaaaatattgaccaaaactattgttttttaaaacaaaaaataatattttgttgttctcaagattttttttttttttt

SEQ ID NO: 170911 - DNA, 526 bp, Cannabis sativa
aacaccaccccaaactaagaaaaaaagttgccaaacaactgttccaatcactccaaaccatgtctaaaactccatccaaaacaccaccccaaaccacgaaaaacaaaggccagcctgatctcaacaaatcacccaaaacagatctcaaacaacatccaaaataaggataggagaacaccacaaaccatatcccaaacaccttctaaaacaccccaaaacagccatacagtagcccaaacaccaccatgcaccagattcagaaatgtatctcgaacaccacgccaaactaggaaaagagtaagagaaacaccaccccaaaccagatctcaaagtgtgtcccaaagaccaccctaaaccaaaaagagagtaagagaaacaccatccaaaacaccaaccaggagggaaaaaaaccaatcagtagaagatccaaattttgtggaatgctccagaaacccaagatccataattagttgaagaaggaacaactgaccctagccaatggtgggggtcagtcaatgatttatgc

SEQ ID NO: 170912 - DNA, 690 bp, Cannabis sativa
atgttgtggtggaaaaaattctggtctctctccattccgtctaaggttcatatctttctttggagagcaatccaagactgtttgccggtccttgatatcttgcatacaagacatatcagtgacaccgacttctgcccattatgccaccgtgagaaagagactatactgcatgctctcttccattgtaagcgaccaaggaaattctggcgtttatccacctttgctgttagaaatctccttcaaacacatgttccactcaaatatattttaatccatgtctccacgatctggtctaacttggaactagaacaatttgcttgcattttatggagtctttggacagaaagaaacaaggagcgccatggttcaaaaactcaactgactgagttgttgcttttcaaggctatgacctatcttgatgattttcattcagcccgaggtgcaaacaacacacaacagcggacaatgtcgaagcatcagtctcctgccccaccacatgctgcgataccatcttcaactgttccaaaatggttgaatccgacttcaagaagactgaaactcaatacggatgcggctgtaaacaaagctactcaaattactggttttggtgctatactaagaaacagtagtggtgattgtatcgatgctatgtcaaggccttttccaggctgttttaaaccagaaattatg

SEQ ID NO: 170913 - DNA, 776 bp, Cannabis sativa
gaaaactagagccaattccagtcattatcctttttagttggcatacacaactaatcataaactcaaaaattaagatcatttcactttattatactcatcttttcttatcaattaaaggtcaaatttatgaagaaaataagaaagaaaaacagtctgcaccataagaccactcatatatattaaggctagctcaaaaaattataactatttctctgtcatgattatattgtctataatcataatcaataacaaattaaatatataattaatgaatcaaatacaatatatagctaaagaaatatagcactttctattgatgattggccatgtgaccataacaatttgataaaggtaaagaggggaccattgaccataagatatttattggattgggttcgtataattcaatgagtgctgaaggacacatatgaatatcaatgagtttattattatatccatattgcaagtaagtggccgaccacaacacttaaaaacacaacaaaaagactagtctttttattctttattattttaaggtgtctaaacgtgtatgcttgccatgtggggatgatgacaaaagctgctatatttcatccaattctaatagctttttttttaataagaaaaatgcagttattagttataccataacttctagagagagtcttctaaacctaaaaaagaacaaaacagagatcatcattccattttttttttgtttggcttccattgccaattatttgtagccacataattaataaaaaaatatgatttgt

SEQ ID NO: 170914 - DNA, 588 bp, Cannabis sativa
tctctctctctctctctccatcgaaaccagttagggtttgggacttttctacattaatcaaggaatcttagcaagtttttggtggatttaaactcaaggtaatgttctagctttttcttgttgagtatcttatggttgaagttaggtgttcatggtttttctttgagttaggtgttgtatttgttgttggtgtttgtttatgttttgtcaagttaattttaggttaattatgttgatttgaagtggaattgagggttgttctgatgtttgagcaagctttgagtttaagaactcaagctttgctctttaatggtaatttttgattctgagtatgttgtgatgttttgttgccttgaatatgttcattagggtataaatagtaggtctggatagtttggtgagaattggggttgatttgaggttgtagtgaatttttgtaagtttcctgcactgaacccgtcgaccgattcagggggacctatacgaaccagtcgactggttggtctccaggaaaccatgtagaactggaattctggttgggaaaccagtcttccggttggggcatttatgggaaccctagtttttccc

SEQ ID NO: 170915 - DNA, 663 bp, Cannabis sativa
cctgctctttttgttgatgctgccgtgagtactaacgcaccagccacaggtattgggatggttttcatgcagggcctgtctcatattcaaaaatctgcaaggattttcaaaccaggggcctcttctccaatttttgctgaaactcaagctcttcatgaagggctccaattgtgtataacttccaatttgaccccaagatttattttttctgattgtcttaaccttgtctctaaggtgaatggtaattggcacgactactcttccaatgtctactcttatccaacagatcagaaccttcctctccagattccctgaagctcctttgctgcatgtttcccgtcagcgcaacggcaatgcccactcccttgcgaagttagctctcaggttgcgagatgaagactaggcggctttatcttagcctcctctctaggctgtattggttcatttgcgttttcttgtatcagccttttgtttctcaaaaaaaaaaaataataataaaataaaataaaattgacttgacttaaaatttgtttatttaataaatcaaacgtaaaatctttaaatacatatctttatatattaaaagtgtctatctcacggcaattcttagtttaacgatgttgttttgtttcctccgttaactttaacagaatattcccaatt

SEQ ID NO: 170916 - DNA, 1737 bp, Cannabis sativa
catttctctaaaatcactcgttaaataatttacaatgatttttgtacttgttcggtctcatcggattattttatttaccgcctatatacataggcctctattagatttaggattagatttttagattgatcttcatgcacttaaaagtaatgatatttccattacatagtacgatcctgtaaaaaaaaccacaacaatggaatggttaagcatattggatgcccaaaatggcagaatatttaagaaaaaaacacttagatatttaaatgtttgagttgtaataatttaaatattttaaagtcctaaaataaataagtaaacaacacttccaatgcacttttaaaagggatttatcgatacattcttattttaacatatgagagaatttttttagttcaattttttttcagtcatatacgttgtaattatttaagatatcttgtaaaattttaagggatttaaaaaaatataacatgccgaaaaatagttaaaacagtatatatgttgcacgcgagactcttttattttatacgcctgtgaaatagattgtatgaaccttattttcggcatgttaaattattgggagcttggttacataggtcatcatctctacattatctggaataatactactttgtagattcaattaattgatttaataagtcaaatataattctataatgagactatgtcttatttgagaatgtttactaagtttggacaaatttgagaagaagagaaagatagaagtttatttgttaattaagacactttgtgagtctaattgataaatatatttaaataatagggagatttgcggcaaaagtacttaaaaagtttactatgatgcagattaatctccaacctaaaaaaatagcggcaatagtcatcaaggtcacatattttgtaagtccattagtcctaaatatggcagatccgttaagttcttcataactgacacgtgttgaatcattattggtccaaataataattttaataaaaaataattaaaattaaaaaattaaaagtatattttaaatataatttcttttttttttctctttcctcttctacctctagccacacccgacccctcttcttcaattcttcttctttttttctcaaactcaattctcccatagccatggaagaagtgtggaaagacaagcatttaagccccgaccccaactccaaagccccaaatctctctctatctcggggctcgatgtttatcaccgccgacgaagtctcaccattaaaaatggaggccaccacgggcctcgacgtcgttctctggaggcaaggccaccatggcctttgagtttcaaaccacgagctctgaaattcccgtagctccctttgtcgttcagtcgccgtcaaaagctcgttagagtaaaaaaatctgagatccattgagtaaaacggctttcaaaaacatattctactcgtaaagatcttttagatctggtctatagtttgtacaagcttcaccttcgacggtagatggccaccgtacgcggtagaactctggttagctcggagaccgagtgtggctggagatagaggtgggtcggggtcaaggtgtggctagaggaagaagacaagttaaggtggtgaggttggaggaagaaaatgattatgggtagtgggtaggggtgttcattgaatcacatccaatctttttaggtctatccagatccgatccaatcatatatatatattggatgttagatttta

SEQ ID NO: 170917 - DNA, 722 bp, Cannabis sativa
cattactattttccattgacttctatctatcttaatatactcaactcaactccaatagagtcaaataatagtgtttatcctattggtaatgtcaatcaagaaagcttagatttttccaaggttgtagaaattgaaatgcacaaataactagatgttaccttttgtggtgcttctttaaattttttttttacaacaatttctctggtttttttatttataattttttgtacaatttttttgttggtgaattagttttttttttttttgaaagaaagaatgtcattcaattaaagcaaatcagctgttacaggaggaccaataaaaataggacaagcatttgtccacacatgaactcctaaaggactacagacttagctagtgcgtgggccacaccattcgcatcacgcgaaatggcacagcaagaaccaccaccaacagccgctaaaagagaaataatctcctcaacaataggcttaaacataagaatattattcggacaattaatccaagcacccgtctccacccgcaccaaagtgaaccccagcctgttagcccaaggaagactcgctcggagagccataagctcggccaccaccacttggaagtcccccacggcgcccaaagcccaagccgcccacaccaccccctcaccaccacgaatcacaccgccaaatcccacaaaccccctccccggagtgaccgccgcatccaccgacaacaca

SEQ ID NO: 170918 - DNA, 762 bp, Cannabis sativa
attgatgatcttcagtggtctcctaatgggatgaggatcgtttcttgtggtgatgggaaaggaaaataattgattcgtgcttttatgttagtatactttctcaagttttgttcattgtttaatggttagtgtaaggtgtttagttagctgagatgaatttcttacgaattactattattaatcagattgtgaaaaaaaaattggttttggattaatagttcataaatggttgatttgatcttccatgtgatttgaatatttggtaatatttttatgtatatatatatatataacattctctgatattattgaggctcttattatggacatggaaatggtgatcaagacattgagattgcctagccatttctatttggtacaaatgttcattaaaagtgataatatagaaaaggtttatgcccttagtattaagaattagacccacattgctaatatgtagaaataaattgtgatatataagatgaaagggctactcctcccattgccaattggttttgggatggaacctcattcatcttatttcttaaattctaacatggtattagagccacttatgatccgttgtgagcccaaattgccaccggtccaaaaaagccgtttgtgatccgttgtgagccaaagtgtcgccggtccaaacaaataattccgctgtctcccctttaacctccatttgggacctttcggccaatgtgtgccaatttccagtgttggggtctttgacctgtttcaaaatctacaaat

SEQ ID NO: 170919 - DNA, 1134 bp, Cannabis sativa
ggccattgaaatactgtctgttgtcgtagggaaggctggttcggaatttgcccaggtgtttgggactacctgctggtgccaactcaaggctctcctcccccatgattgggatataataaatcttgcgaatccgcaagagacgctttcgaggaacttgcattatgccctcatggtaaatttgttgtattaatccatactattttttctttcttttttctccctgtttcttatattcatttgctcgtaattctccagacttcttttctttctttttcctcccattggtgaaccttgcattgactcaaatacctagagggtgaggtccaaaagtcactagcccaacgcgaggtcgtgattaaacaatggaacgacgcttagcaggaaatcacccatctcaaacaggaagccaagaggtcgaaaaaaagccttgaagaagccgagaaggccagaaagaccaagactgatgaatgcaatgaacttaagaaggtgctcgcagaaaaagaggctgaactcaaagggaaagaggtcgaactcgaagggaaagaggtcgaaaccacagagcgatgcaacaaggtcggccttcgtaccgtttatcgagccttgatggcaaatcccaacatgggcacaagcttcttggaggaggatgaagagaaaactttggcttattgtgaaaagtctaggaaggaggaggaagaggccgaggcagtggaagaagaagatctatccaagtctcccacaatgtaggcttggtttttatttatctctttattttttcttttgtgtaaggaaatggccttagggccgagacaatagtttgccccttgtggcactttttgtaaagacaaatttgcgaagttgaatggccaactttgcttttttttaatgcctcgtctttatgtttgaacttcgatatgtagttgtttgcttgcatttcattcacaatttaaacaatgatattttgatcatgcacaaagttagttttttaggggtttccatcgctcgctcatatatcccttggacattaagtagttaatagcctactttacgtatgagcaatttatcatctgaaatgcactcgatttgcgagcagtcattgattctgcctcgacataatcagtggtaatttgtttcaag

SEQ ID NO: 170920 - DNA, 932 bp, Cannabis sativa
tagtgtccagtgacaaagttttggtctgacaacggcataggaacagcagtaggaagtcagagatttttgaatttttttgaatatgttggttaggttgaaaattgcaaagtggtgaaagtaacccagcaaaggaaaggtgctggcttttataggccagaaggggtgcgaggcagctatgatcagacaccatcgtacggtgagaatttgtagcgattcgaattctgtgatccaacggatggggtgaataggcgtaaagaggagaaagcacggttgaaacatttgagtatctccctgacaccagcattaatgcaaaggtctatcaatagacgggaagcgaatcgttgcctgcaaaaggaagtaaaaaaaaataaatcaatgaatgatgatgatcataaatgtgacccacgcgccagtgccatgtgccactatatttattaaggatcggaggccacatacaagtctcatttatctgttactaaataagacttgggggtaaatgttacctcggatttttcccaaaatacgtggctgcggcagcatatgacacgtggacaaaaagggcacctcaccggagaattagctgagttgtatgcagacggacaagtgtagttcggggagtgagcccccggagaagtacgtaaagcatgtccttcctctccgggagctagatatataataaagcatctccaggagaaggaaaatatattcgaacagtcacctcacatttaatgcaacatgagaaaagcgtctaggaacacccataagaggatgtgtcagacaacgtaagcctcgtttacgacgattacacgctaatcaaagaggctagtgatgactccattataaagaatcacatcaatcaaggaaggacaaagattaatctcacctaatccctacgatacctacgacataggttatgcatgccctattttgta

SEQ ID NO: 170921 - DNA, 1540 bp, Cannabis sativa
ctaaaatgtaagttttttacttaataaaaaatcgaaaagaatcatactattaattattttttctaaatgtgtctttttttttttacataaaaaaaaacagaaaaaataaaaagcaaaaatatggtgatattcataattttttctaattaaacataaatattatagtaaaagataattatttgaaaaaaaatgtagtatctacaaatttttattttgttttttttttacttttttataactcaaaataagtatataagtatcattaaattttatgtcaaatataacagataaattaaataaataaataaataaaatctatttttatgaggtgtcttacaaatatttagagatatttcatactcatttgaaatggttactttgttagactcacaatttgtttcggtatcaaagagagtttttcaatctatttgtttttcatgatcgtgtacgttgtatattttaagagcacctgtaaatttttagaaaatttcgagtagtttataatgtcaaaaataagatctaaatattttattgcacgcacgactgttcgttcttacacacatattaaataactttttgaaccttattttccgcattgtaaaatattcaaaaaattttgaaattcacaggtaatcctatatagctataacatacacaatcatgaaaaaaaaatgaactaaaaatcttttctggatgccaaaacagatatagagtctactagaacacccttttaggggtgtacagtagattttagtagaattcatcatacaaaattaatgtagaaaaagaaaaatattttgaaaataattgtacccccttaaaatattattttgatagacccccttctctgttttgtcatctatgagagtttttaaattattatttttcttaatcatgtacaatgtagttacttagaactacttgtaaattttcatgaaattttgaatagtttacagtgccgtaaataaaattcaaacagttgattgctacatctataagaaaaaacagttgctcatgcaataaaatatttgaactttattgttaacattgtaaattatttataattttttgaaaatttacaagtggtctattgaaaaatcaaaaatatttttggatgccgaaataaaggttctactgagaggagtacactagtttttattagatcaacttatctttttttaaactatcatgaaaatatttttattttaaaagaaaaaaaaatcaactaactatttaaaataaaaataaatttactaattattttttaattaaaaaggaaaaagaaaaaaatttaggaaaaaaaattaactaaagtgaaaaaaaaaaattaaagaaaagaatcagtattaaaatattattaaaatttggagaggttgtaaccatatagtaataatatattattatatagtaataatatatataactctcgtgcataaaattatctctcaaattttatgctaattaatatattatgtatgttactatcatctcatataacatatactcatcataatatatattatctccacataatatatat

SEQ ID NO: 170922 - DNA, 1181 bp, Cannabis sativa
  modified_base (808)..(811): a, c, t, g, unknown or other
agaaaaaatgacagaagtgtccccctctttctagactagaagaaatttgttcttaggatagtaaaatatgattctaattctaataacaaaaattatatgtatttaagtttgagttttattagacatttgatgctacgtttttattttatgggatattttatgtgtttagtgttataagatatcatttatccttggtatttttggttactccaaaaaaattattttaattaaataatataagagatttaacacaattatacaacaatatctacttaattataaaaacatcttagaaaaaatattataacataatgataaactttattatgtatatacctaatttttcaaatttgtaactgacattctcatcaaatttattcaaaaaaatttgtaactcacaaactaaagaatcttaataacaaaataaatgttacatttaaatatatgaacattattagtagttactatgcctaaaaaaattataaaatggaaagagcttggttagaatttatatcggaaatatttaatattattattattatttttttttaatataaattccaattgagtatatatcatatatttataccttgagatattaaatgaaaacctagtattacatgactatcattttatactatgatgtattatcttttattgtatatattaacatgtattaggtttttttttattatttttattaacatatattagaaaaagatttttattttaaccaaataatttaaaatgtatacaatttcttatagatatatttatatatatgtaattattacttattttgttcatnnnntaaattgggtgaaatacatactaacaagtagttattttggttcatgtctattgacatggtttatcgtttttgtcttgtctggtgcttggtgagttttgtttcattttgttttcagtgaggtagtgaatgcaaggtgttgtcttgttgttgttggagtgagcgtgtgaagtatactggttggtctttgtctatttttactgttcgggttctggacggaaatgacttcttctagccgtcattcggaagcgatggaggatacgatacggttcaatattgaagaagaggatctggaagcagtcatagtgacagcgggggaaagagaagaaggtatagacgatcgatggtgtttggtggggagattactatcaaa

SEQ ID NO: 170923 - DNA, 566 bp, Cannabis sativa
acaaaaaacatactttctcataataattaaagggtacatataatagaacttttcatgggctgcctttccaaagaactggtcatacagaaggtggattgtttgatcggtaatcaccgagtcaccataggtcctcaaatccttgtaaaacttccactgtcgaagaagctttccgagacggctccatttctctgttcggtatatcctcagagaaaatgtagatgaatagattttcattgatcgttcatgccttttgcaaaccatttttgtatgttttttgttttttttttcctcttataatttgttcccattgttgaaaaaaaaaaaagaaaggaaatgtattgatagcagagaaagagagataaagtcgtgagatattttttattaaaaaaaaattattaaattaaaaacaaggaaacacagttagtttagttagtttttagagagatctgttaaatgtgtaggtgtaattttagttgaggtggcaaaatattactggttgggacaggagtgggacaagaactggggacaggtaatttggctccggagccaaatcacctgtacctagt

SEQ ID NO: 170924 - DNA, 684 bp, Cannabis sativa
gatgaagagctcaactgtggaggtacccaatccgtgggagaaagatcttatgaaacgaaaagttatcgcctgagacgtcgtctagaagaggcgcagcatcaaaacgctgagttagaataagaggcagcttcagccaaggcggcgcaggggacgaacgctcaaaatcaacctgaacctggagtgagaagaccacgaggcagacctcgtggctcacaaaccaagagacaggaaaaggcccaggatgaattacccgaggaaaatgacacacctcttgagaatcaggatgagcagccagaaaggagacaacaggaaactgatgaacgagaaatccctcatgaaaatgaggatgatcttggaactcagccgggagaacagagatcacctactaggaatcgccaaacgttcttcccaattccatagagcggggacttgtatgtaccctgatgggggaaatacgacaaactgctctcgggaggaaagagcagagtgtgaagaagcaagtgtgactttgaggagatatataacccatagtcgatcaactcaaagaggagaaagtactcaacgagccaatgatcaggaaattatggggacaagtaaatccacgagcctcttaaagacaaagtctatcagtgggacgcggtctatgagtaaaacgagatctgccagcaattactcccaaccaga

SEQ ID NO: 170925 - DNA, 636 bp, Cannabis sativa
tagaagagagcattgtcatgttttaagccaaaaagatggcagtggtcgcctataggggtttcacagtaccattgggtgaattatctcacttgtatttgacaccttgatgttggaaatatactttggccaaagaaattccttctcattcggtgtggtcaatatttgtaaagctgtaattttctttcagttttgacattatagacttcgttttaaatttattaaaagaacatttagaagtaactaatactacatgtttctgtctagacccgataatttagaacttaggccttatatgtaccttgtttaagataataacagagtctgtactgataaaattaaaaaaaaaaattataattttacaaacattaggtacttataccactaaaaataaacattagattttatgtcatttacaaacttaacactttaagtacttgtgctgctataaaaatatcaagttgcttcatttgcttttttcataattttcaatataatatatatcgtatacaatagttgttcacttttgaaatttaacactaggagacataaatttaaagaacattagcacacattaattaaaagggtgatttggtacaactctatctgattaattatctgattaattttgttttataa

SEQ ID NO: 170926 - DNA, 599 bp, Cannabis sativa
tgttattatgccttgcatgagccccagtgcatctcgcagattttggagtcagtgtcgcctctagctagcctttgagtattagtagtggacgggatctcagtgttgggagtggtttaatcagttgctgtactggggtttccaatctcctgtacgcctggtgtgatcccagccagaggggaagtcactccatggcctacaataggaggttgtgtattaacctacttggggtttgtccctggtggttttctcgtgtttctaggagtttgcacgttgggatctgtcaccattgggtcgccttgatcagcaaggccttcccttcgagtttgtacaaccatcctatttacctgtcaaaattaagacaaaggcttgtgttttttctctcaatgaaagcaccaaaatgttgaccttgcttctagccaacgattgtgagtcaaaaatagagcgattaaataagataagtaaaagaaagcaaaaatagtaaaataaagtgaacactatattttgaagaggttcggccccgtaattatagtaataacctactccccttgtatttgtattgacttgagagaaggaatgaagtgttcttcctcttgaaagct

SEQ ID NO: 170927 - DNA, 734 bp, Cannabis sativa
taaatgtgttgtaacaaaattatttacatcttgtgtatctctttttgctaggaattatctttaagttggttatttttttaaaaaaaataatctaaaattgagctataaaaaatatagagttcattttattatttaataaaatagaagtctaattagtaactttcgcaaaatatacaatctaaaattgtatcaacccataaatatataattattcaataattaagacaactaatacaaatattaataaatcctaataaaaatactgactctagttatgtagttttagtacagttatatattgttgtctcttccattggaccatttgtgtttgtcacattgggcatgttttaaaatatggtaagtcatacaagatggaacagtaacatagtatttagggacattgattaatttgatcaactctttctattagcaggctaaggcaactgaaactgtatcagaaaatacgaaaaactagatcttaaatgtttgtgaattgagattgaaaagaaaaaaatagttttggagttatgatgagcttgtgaaaattcttcaggagatagcatcaaggcaattgtaagtttgtttttcaagtattttcatatttgctggcattaaaaaatgagtggcatgggagaacttttaaggcaaataagctatcagagcacatgactaaccaaccacatgaggcatactcctatttcaaatagcactaattttacatctaaattaaaaca

SEQ ID NO: 170928 - DNA, 901 bp, Cannabis sativa
aggactttttaatctcattagatggattgctacgatataagggcaaggtttgtgtaccagccgatgaaggtatcagacaagagattctagacgagtctcataccacaccatattccttacacccgggaacgactaagatgtatcacgatgtaaaatccctatattggtggctaggtatgaaaggtgacattgtggagtatgtgtcaaaatgcttaacttgccagcaagtcaaggcacaacatcagagaccagcgagattacttcagcttttgaagattcctgagtggaaatgggaggaaataaccatagacttcgtggttggattaccaagaacagtagggttttataattctatcgaggtaattgtggatcgatatagaaagttagctcactttttaccattgcgaactacgtatacggtggatcagtacgatgatctatatgtcaaggaaatagttaggcttcatggtgctccaaagtcgattgtttcagatcaagatccaaagtttacatctaagttttgagagagtttgcaacgagcaatgggtacaaaactaaagttcagtacaacttttcatcctcatgctgatggtcagtctgagaagactatttagatacttgaggatatgctatgggcgtgtgtattagactttgagggttcttggaacaagtatcttcctctgatcgagtttttgtataacaatagttatcaaagtactattggcatggtaccgtacgaaattctttatggaagaaagtttcgttcactcgttcattaggatgaagccggcaaacggaggtaaatgaaaataaattgaaatctgtcaagggtgtaattgaattgaaattctggattatatgcataagtgaattttttttcataatcatgttattgaagcta

SEQ ID NO: 170929 - DNA, 554 bp, Cannabis sativa
ggacccaaaccaggacctagacacagactatgactcaaaccccgatagagaccaggacaaagactgagacttggactcgaatcagaacttgggattctgaacccaaacttaaacctagacccagaccaagacctaggacccaaacctggatgggggacctgaacccaacaccaagactcgggacccaagcttcacaactaggatcgagactctagaccaaaccccaaacttggacccaaaactaggacccggactggacctgggacccgaagtggaacaagattaggaactaagaccaagatctagatttggaccaggggcttagacctgaatcgtagtcagtattttggatctgggacatggacctagactcgaactcggaccttgacctggccccagaaccagactcggacttaaacccagacacggacctggcccctgacccagaaaccaactcggacccgtaccctgtgacccaaacagaaagcagaaccggaagcagactgggaccctagaacgggaccaggactaggtgttggaattatttaaccagg

SEQ ID NO: 170930 - DNA, 636 bp, Cannabis sativa
ccgcctaccgcttggcccataggtaaaacctatgaccggggattgggcggttgactgttcagggtttgaaaagcgttcacggctggatctttgtctgactcgcccagagggatgatggttgcaggtttctgatttgtagcttgataggctcttcatatcagcacgatggcctgtcttgttcggtcatcaatggctgcttgctgagccctcaacgtttccatatctttatccctccattcactaacagatgcctttgctcttcaaatgcaagattcaccacagcacggagctcctgttggtcatgatgcagggtattagtatgaccttgcatgagtccaagagcagcacgaaggttttggatctcagtgtcatctatagcggttgttcgaacatttgttactggcagaattccagtattgggaataccgtgattagctgctgaactggtatttctagtctcttgcacactaggcacgattcccctcaaccgagtcgtcacaccttgacctatggttggcggttatttaggattcatggctggtggaacccctccattccctggattttgtagtgcgggatctactgccggtggatttgctggatcaaccacgtctctacgagtctgtaccaccattg

SEQ ID NO: 170931 - DNA, 888 bp, Cannabis sativa
  modified_base (858)..(863): a, c, t, g, unknown or other
caaagcctgtagtaggaagcttcatgaagaagactataaattacttttttgagttgatgtacaagtgatttgtagttgcttttaagtttgtttttgtgtgtgtgtgttttaaattaatacaatttgttgattcataataatttttcatattaaatcagggttgttatttgttatttagttgttcaaccaaaaaaaaagtagtatatatttagttttccataagtacgtatgtttttgagttgatgttcaagtgttttatagttgcttttttatttttatttttgtgattattagtgtctatatttttttttgagtttaagcagtgtgttgacgtctatttaatttgcatatttttgtattatttttacattgcttttaggttgtggataatatttattgatgtttaattgttttgcttatttaattagaaaaattattgtgtagttgtattcctgtaattttttggttgaccaaaacattcatttaaaaacaatttttattttttataattttgatacaaaataataataataaataaaattatactatttaaaattaaaataaatatttttaaatataaataataataaaaacacacctcgtcactaataaaataataaattataataatatttttaaactagaaataataataataaatgaaattttctattcaaatatttttcgaccacataacacatctggcaactatcttattcctagattctacaaatttaagcaaaataaatatattttgaaaatgaaatatcaaatgaaatcatactaaatgagtttgagtaaagctagaggcataaaaaaatgtcaaactgatataaaataatataaaatagatgagannnnnnaagaagaagatgaagagagaaagag

SEQ ID NO: 170932 - DNA, 612 bp, Cannabis sativa
agtcaagagagatttgtgaatgtgtaatccatagtccatagtgccactaaggtatcgaaggatatgtttgacagcttaccaatgtggttgtaagggggttttcatgaactaacagaccttatttacactaaaagagagttcaggccgagtgattaataggtattgtaaggcccccacaatcgacctataaagttgaggatcgtcaaatggttcatgaccatgagcagacaattttaaaccactcactattatagttggaagaggtttagcatcctccatttgggctttgataagaagatcacgaatgtattttgactggaatagatgaagcccgtgtgatctgaacttcaatgccaagaaagtatgttaagttgccaagatccttaagtgagaattgagaattcagtgagttgatgatatattggtgatgagattagaatcactccctgtgataactatatcatcaacgtataccaagatgaatgtggtggaggaggcactactacaaaattcactattcacgtcggtcaacgcgactgttcatcgcgttgaccgacgtgaatagtaccatatttaatatattcgtcatttgtaaaatgacgcaaataataa

SEQ ID NO: 170933 - DNA, 1409 bp, Cannabis sativa
ccggcccgactgacattcctagccacatggatgatctcgtagaatgcttcgaagtagtctggagatatggaatgaagcttaacccaaagaagtgcacttttagggtcaagtcagggaaattcctaagattcatcgtcagccaaaggggaatagaggcaaatcccgaaaaaattcaagccttgctaaacatgccttctcccaagaagcacaaagatgtgcaaagcttgaccgaaaaggttgccgccttaagccgattcatttcccgatcaactgacgagtgcatcccttttttcaacattttaaagaaatggcaaaaatttgaatggactgaagaatacaaggaggcattcagaaaactaaaagagcacatggccaaaccaccgattctatcaaagccagttcccagagaggatctgttattgtacttggccgtctccgagaatgctgtcattgcagccctagtttgggaagaagacaaagttcaacatcctgtgtactacgtcagcaagcgtatgataggggccgagatacggtacccattgattgagaagtttattttctgcctcctgatggcttcaaggaagttaagaccctagttccaggctcaccccatcaaggtgctagcaaaccatccgcttcggcaagtcttacagaacccagaagcgtcaggaagactcctcaaatgggccatggaattaagccagttcgacatacactacgtaccgtgtatttctataaaggggcaagccgtagctgacttcataatggagtgcaatgaagcagaagctagtgcaagcgtgccagtaccacaaactccggcatggaaggtattcgttgacggagcgtcaaatgagaacggatccagtgccgagatagctatgatatctccaaacggactctggcttcaggcaaccctacgttttgaattcccagcttctaacaatgaagctgaatatgaagccctgatggcgaggttaaagttggcgaaaaccgtgggagccacaagagtagaagtcttagctattcgcaactagtggtaaaccaagtctcgggagaatatcaaatgcgtggagagaaaatggctgcatacatagccattgtccaggaactgctcaatgagttcacgaaatacaaagtggaaagaatccccagagaaaagaatgctcacgcagactgtttggctaagttggcatcagacagcgagattgagagattgggggtggtgcccgttgagcgcctctcggaaccgagtatcaaagttaaagttacggtggttacaatcgagcaagagccaaattagatggaccctatcatcaaatacataaccaaaggtgagttgcctcaagaaagggccctatccagaaggctacagtatcaggcacattgatatgtgatgatggatgatattc

SEQ ID NO: 170934 - DNA, 538 bp, Cannabis sativa
gaccaagatcggttctagtcaactttagtgaacccactagtagtcaagccgggatgatcaaggaatgcataacggatagtacatgccttcctaaaatgcccccagtcattatggaaacggactttcaatgatgattgatacccgatagtgataatttgcaaacaacgagtaactttgaccaagatcggttctagtcaacaatagtgaatccactagtactcacgacgggatgatcggggaatgcataacggatcgtacacgccttcctaaaatgcccctagtagttatggaaacagactttcaatgatgattgatacccgatagtgatgatttgcaagcaacgagtaactttgaccaagattggttctagtcaactatactgaatccactagtagtcacgccgagatgatcggggaatgcataacagatcttacatgcctttctaaaacgcccccattcattatggaaatggaatttcaatgacgattgatacccgatagtgatgatttgcaagcaacgagtaactttgaccaagatc

SEQ ID NO: 170935 - DNA, 1010 bp, Cannabis sativa
acctccctttcttcctggaggctgttcacttcttgggataaggaggtcatggcagcctcaagttgatcagatgcctccaaatctttggtcagctcggccaccttcttctcagcagcaagaagcttttcgttgacttcacccaattccagtcggacggctccaagctcaaccctggcttcatcagcatccttcttggccaagtccacttccgccctcatggtgttggacattgcaatgttcttggaggcagctgacttagctcaggaataagtgtaagccatcttcagactagtttgcacaaggaaaaaacattagaatctaaaccaagaaggataaaaggaaactgtcaagaaagactcaccctcgtaaactctttcaggaatcctcccatcaacagctctagggaaagctcgttgtcagctacggccagctgctcattcacatcagggaccgaccgattcatgtagttggtgagcatatcttttcctctcttagtctctagatgcagtgatggaggtggggtaggatcccggatctgctcaaatccactcttggccagcttggattcgccctttgactatttgggcctgtttgagcttcctcctcgagagtctttggacttagtagctttcagggcagaatggtccatcacggttagctcctcagaaagatcgataaccacttcggccggtaccttttccctagacggggtcgtctcatacccctagatttcttggccagaggagataagctcgcgcttcttttcccaactctcttcctcagagcttcgagcatcttctgagacatgtctgcacgaaataaaagtaacatggttaaaaaaagcactagaagtatgaaagcataataatcaaggaaattaaaggaaagacggagtatcttgcgaagcgtttgcccgaacaagacctgatggctcatcatcacctgacaattctcttatctcttccaggacggctttttcctttcctactacaggagtggatggccgagca

SEQ ID NO: 170936 - DNA, 541 bp, Cannabis sativa
acgatcctttctttaaattctggagttttgttcgaaactctaggatttttgatgacacttgaagagtatagtgtttctccagggtacaccagatctgtcttgccgaattgcacccaaccattctgatgagaaggctctcattcatggaagacagcaaccatgacacaaggagttgatcttgaatctcccaattcaagaactctggattgaatctttgagcagttcgatctgtgtctgaaagaaattgaggtggaggtgcaacatcttgaatgaatttctgaagctgatgtcctctaatggcagccattacttgttgtttccaaaggagaaagttatgatcattaagcttcacggataaggtgtgactgaagtaaattggactgcgattgttctctggttcacgagttctattccacggagttgcagatggattggaagtcgattgagggacctgtggattggagccattaccagaaccattaacagcaacgtttgctgtcaatggtggaaaaggctctgataccatgtttgatctggtatt

SEQ ID NO: 170937 - DNA, 546 bp, Cannabis sativa
aagccttaagtgtctcgcccggctactgttttgtattagtaagagaagacgcttcgggtcgcctatctcttagtgcctagaactatttcttgaagtccttagacaactgttcctaagaggtgattgaatgatgggcaaatttgttgaaccagctgctcgctgccccaactaccgaggaagggaataaaatatagcataaattatttgttacattgctcgctcgcatgatagtgttgaaattattcaagtgcgtgagtggatctatagtcccattgtatgacaagacgtgagggttcttgaatccctgggggaattcaacactcataatatttggatggaaaggcttgggttcctcgtccaagtcgtagccaggcagtttttccaaattccccatcttggtacctcgtgaacttgtcctccaacttgttgattcgcaattagatatgatcctttccttttgattgagttgttgatgaaggtcaggtttttttggttcaattgattacgaagatctggctattatggatcatagttactcacggacct

SEQ ID NO: 170938 - DNA, 1116 bp, Cannabis sativa
acctaattggttatgctcactctacttttttttttaaaacaaaaaatgtcttaataattcatttaaaatatttttaaaaaatatgtatttatcctataatatttgcggcataaatattataagtttttagttttatacacttaaatatgacatattttttttttcaacggatttaattctttaagttacatttctgttacttccgtcactacttatctgttaaatcatattctaacataggggtatttgcacataaatagttgatattttaaattttatgcatttatataccacatgttttttcttttagcggattaaatacttaaagttacgtttacgatacttttggcattactagttcgttaaattctattaaaatagactaagttgacacgtgtcaacatattaatggtccactcatatattctcaataaaaaattattaaataattttaaaatttgttaaactgtaaagaaaacattaaaaaaaatgtatttttttgttaagtatttttcaataaaaaacttattaaataatgttgactcaaaaatttagacagagatttccaagctacactcactcgctagattggcgagaatgaaatatttgttaagtataaataaagagagacacaataatttatagtaattcacaccctatatcgcgatagtaatgaagctacgtctacttcgagttttaatttctcacgagatagtattaaagaaaaatggctaagtgttttagctctaatttctagagagagatgttctgaccttttgggtagttttctgaatgtgaaaaataagctagaggagctctcattttacaaatgaaggaggttcttgaaaattaaaaaaaaaaaaatcaaaatacgaaaagatctaaattggttaattttgaccgtagatgatgagctaacggtcaaaattaatttcgagtaagctgaagcttatttccataactcccttggaggttttgagattgataactttagaattgtaattgaagtgtgagacacgacttgatagagtattgaagtagcttcgaaatgcaagtagttagactgatatttgcaacataacaagttgcaactcaaaaattagtttgactagctaa

SEQ ID NO: 170939 - DNA, 1302 bp, Cannabis sativa
tataggtttcatgagcatacatgactagaacaaagctgctgtttttaaaaatatatgggcaattgcatcaaagaaagataacttataggtaaagtgggtgcataatgtctatatcaacaaagactcttggtgggattatgaggccccaattcaaagtagtttgtattggaagaaactagttgagctcaaaaattaatggaaagatcagatcaacccaactcagttagttgctggaaactacaaaatatctgatgtatacaatcagatgacagcaggaaatcaagtgtgtcactggagtaaacaggtgtggtcgagaatgaacataccaaagcatagctttttactttggctagctgtgcaagacaggttaaaaactaggcaaaggcttgtcaaattttagattgcaatagatacacaatgcattctttgcaatgaatctgatgaaacaaccaagcatttatttttctgctgcaagttctctaaggagtgtcttgatcaagttaaggcatggcttggctgaggagctaaaaccagatcactgcaagagatcattagatggataaatagagtcaagaaatccaagttcaggaaggttgtatatgcggctgctactgcatcattagtctatcatatttggaaaaccaagcattgcattttatggcagggatacaacactcaaatgcagcatatgattcaagaagtgaaatggcaaataaaaactaggatcacttgtgtgatgcctaaaacagtagctcaaatagattatgacaggtttgactctttgtaattagcatgtagatataattgtatagacattttacagacattttacagacctttgatggtcttttgattgtattgaaagtttgttagagcaatgaaatttctgattcaccaaaaaaaacagtggaaatacgatggacggtcattttagtcacatggatacaatactatatcaattatttgaagaggcattattattgagtgttttggaatatcagtgtttatcagagtaatgcaattggactattttacccttagagttttaaagcttacttagagtgtaagtaaggccaacagggtaaatttctacctttgattaagtttgttattatctttcctttggttaattaattagaatgttagagatttgtgttagaaagggttagaagaatgagaaagttacttaattgatgataggaataaagagacgacaaacaaaaatacaaaattcaaactcatctctcttaaaccttctctctctctcggcttccattagaacccaatgaaccagacctaatt

SEQ ID NO: 170940 - DNA, 880 bp, Cannabis sativa
ttggacagaggacatgtccatgtttgctgattaacaaccctgagttctctctttacactcgtgaggatcagcttctgatgagctcgcttttgtcttccttgtcaccatcgatcctcagtcaggtggtgcgatgcaagactagcaatgaagtaaggatggctcgagtaagagctggtatcatcaagccaaagtctatattgagcctaagatagttgcagatgctttaaaggattcctctctggtatggtgttatggtcctatttgtactattttaaaaaatacaaggtctattttgtcatttaacgaaatagatggtccaatctataacttttgcaaaatatacaatccaaaatagtatttacctatttatatatacgtaatttgtagaacatgtttaatcgtaatgatgaagctctatttataagttggttgttatgcattacgggcctaattaggcctacaatcacgacctaattagacctaattatagctttaaatgagagtctaaaatgccattgaagataatgtatctgtgcatttacctgtgcaaaatgcacccgttcgaaaacttccaagtaaatgtacttagataaatattcaaagataattccgtggggagaaaatataacatttgaaggagatgaatgtccaaatatgcctagaagaatacaaaaagggagataacataagaaaatttccatgtggtcatatgtttcacccagaatgtatgcatgatatattaaccagtagatttaataagtgtcttaattgtagatttatatttgcttagtcatcttatataaattttaaaataaatgtaatttagttcaaattaaaaaaatatagtatatatatattttttctttcttaatagtataat

SEQ ID NO: 170941 - DNA, 899 bp, Cannabis sativa
ttaagagagcactgccacaatttttgccaaaaaaagtggcagtggtcgcataagggggctatggacccttggataaattttctcactcatatttgatatatggatggtaaaaatataattttgccaaagaaactcccccttctatatggtggctgaccactgccaccacttgtgccaaaaatgcagcaatggtcgaccaagtggtttccacaccacttggtggcttttctcacttggttttaacatgttatggatgaaaaaatatttttgacaaaaaatctcattcctattccttgtggttgaccactaccaaaatttgtgcctcaaagatggcagtggtcggctaggattgtcttttggtaagaaatagtttctttcacttgtgttgcactccttggtgttgagggaacacattttgacaagtttcctttggttcttaatgagtggcgagcactaccattttcttgtgacaatgttctctaaaaactagagagcactgccatcttcatgtggcagtggttgcacaggctctattgcatgggattcttgtacaattttgaatttatgttcaagtctaagcctttttaagcctaaatgagttaagtccttgttaatttccttatcggattgaggtctctagggtgaaaatatttgtgcaggcccataaaccctagttcgggcacacttgggtgtgtgagtcccaacactaaatgattgattaatgttctcgagtcctctagaggtgtcatggggccctcaagaagaatgtcttaagttatttgacatttataagtcttggtcaaagtcacaagattgatatttttttattttttgaaaattgggtataataagaatcaacaatatagacaaactatattgtttacaaaaaaaaaaaaaaa

SEQ ID NO: 170942 - DNA, 553 bp, Cannabis sativa
gtggtggtgacacccccccccccccccccccccctctttaaccaaaaaaaagtgcccctattctcaaagtttcagtagtcattacaatggtccaaagtccaaacataaatcttaaaactattaaaattatttataatagtaatacagaattccaacaaaagtgctttgaaacttagcaaaataaatcaatatttctatctaatggaaattaagctcattaatgtcctaaccacgtaaaattttttatcttcttttgttgtaaatcatattttaagctcaatctatttcttaattggtttttaaaatctcaataaatagatatttatattataaatttctaagtgaacctttttttactcgttgctgaaatttaagaattattgtgtacacattattttattttttgatacttattgttatacctgaaattcggctacacttcagaaggtgatacttgtcaattagtggaatatgaaccacttaatataataacgttatatcatttaatgcaaaaagtaataactcattaaatatagaattaatagagtatatt

SEQ ID NO: 170943 - DNA, 745 bp, Cannabis sativa
agattttactaattggttctaaaatggttgacttttgtaaatgtatgatttaaggaaaaatgtaattgaatctagtattatttagggggtttaaagattaaatagtaatagttgtgactgattatgttcaaggtatgatttatgaaaatgtttaaagaattttaggtattatttaagaggattaaagatttaaatggtaatagatgtgatggcctaatgtttaattaggatggattttgatctatctatttgcaaataggggaagttgtaaaaattatgagtaatcagtctctaaggatataatatgaaaatttattaagtaaatagagtagcataaataatttggagggctctaatattagttatataatcaaaaaaataaggaaaaagtaaactataatactcaaattgaatggtgattatattagtagattcattttacttcaatttcaaaaaattacaagtgacaataaatatgagttttatgatagataccataatattatttagtgtataaattataaatgtggagattttaaaatcaatgggaggtggggacattaatagtgaattgggaatattttgtttattttattatttaaaaatattgaaataaatgggcattaaaggataatgaagtattgagttttttttttttataaaaatcctaagatctattaattaataaattcgttcaaaacaatagaacgcacttcagaggcacaatcctccaactgaagcacac

SEQ ID NO: 170944 - DNA, 903 bp, Cannabis sativa
ccagtggagagttaaatcctactaaaatatactgattctgattttcaattagacaaagatagtcgaaagtcgacatctgggtcaagatttactcttggtggaggagctgtagtctggagaagcattgagcaaaccagtattgcagaaaccatggaagctaaatataaagcagcttgtgaagcatctaaggaagttatatacaactctggaaatagttctagaagtaaaaaaactcctaatgcatactgtgacaatagtggagcggtggctaactccaaggaaccaatgagccacaagagaggcaagcatattgagaggaagtaccatctactaaagaatatagtagagagaggtgatgtgacggtcttgaagatcgcatcagaacataacctagtagatctatttaaaatgatgctaccaacatattagtaatatgggactaagggagatgcctaattcgcttttagggcaagtgagagattgttagggtttatgtcctgaaaaacctgtaaagacattttctaattattaaataaagagttgaacatttaatatatgtatgaatgttaagttattaatatttattattaaataatttatattaaatatcaaaaaaattcttattcatatatgaggttgtggcttgtagctgtatagagaactaagatcacttagctatgaataaaaaaattcagcaacataccaaagttatggaatctttaatcaacggttgctagtacggttcactgatgcccgaccttcagtgcaggtaatcttggtttagattacggatgtagtaaggcatcaatgtgaaggtactgtatataatagagattatatatgaaaatgcccgatatgaataaaactatctttattaatatgtcgtttattataaagatctaa

SEQ ID NO: 170945 - DNA, 525 bp, Cannabis sativa
  modified_base (192)..(200): a, c, t, g, unknown or other
aataatttttcagttaattttttttaatggttatataaattataattatttaagaaatcttgtaaaattttaaaaaatttagaaaaatttaacatgccaaaattacgttaaaatagtgtgtcacatgcgtgactattttattatatacacgtgtaaaatagactgtttgaatattgttttctatattgtaannnnnnnnnaatttctcaaaattttgtaagatattttaaatagctataacgtacataaatatgaaaaaaattatactaaaatattcttctaaatatcgaaataagtaaaaggtgcatcaatacatcccttttaatggggtgtattgtagaattactctataatattttcaatccctgttgtttttcataaaactgtaactaaaaaaacttgtagaaaaaaaattgtgaaaatgtacaaaaaaaaatagtaaaaatgtgaagaaaaaaaaatacaattttaaatattttgtgtaaaaattcaaaaaataaataaagttttacccacagaagcatg

SEQ ID NO: 170946 - DNA, 653 bp, Cannabis sativa
ttgatgtgacacttccaaacaaggattagattgcattttgatactgtcaaggagagttattgcatgtgtttctaagcgattaaggaagtgtgagtaatagtattccagttataatattgaattgatagcagtggcttctaccttgggagtttggtgcttttacctgtttggcaaaagtacgaagtttatatgaatcataggagcctcaatattttatcatttagaaaggatttaattaggaggcagcgacgatggttagagctgattgaagattataacagtatgattccctacctttcagggaagaaaattagtagtggatactttaaaccaaagaggtctaggaactgtctagcaaaagtttgtaaacaaaaagatctcatcaaaggttgctataaatgtaaccagaataaggattgagttcatgattagagaacttgttaatattacattgtagtttaatctgttggaaagaaatcgagtggcccagcagagtgaccctaaaatttagaattacaaggaaaggcttggaactagattgacagaggactttttgattctgtttgaaggaattttataatataaagacaaggttggtgtatcagtctgataaggatattgaatagaaggttctaaatgagtttcatactaca

SEQ ID NO: 170947 - DNA, 741 bp, Cannabis sativa
ttgaaaagagctcttcaaaagatctcaccattggtatttttcattccacacatcatctagaacaaaaggaaacccagccaaacaaagtgtcccggtgattgtatctgacaattttgttgttattaagataacaaaaattattttggaaaaattgttggaaaaagatatgaaacaaagaaatttcttctcgttctcgatgatttgtggaaggaaaaatatgaacggtattttttttgaaaatttctttttaatctgatgcaaaagaaagtaagataattgtgacaatcacattgaatattaagacaaatgttcaaacttatgagtttaaaaccatgtcttatgatgaatgttggcttttatttgaagaacatactttcgataatgtaagttttgataaatttcttgaaattgttaagaagtgcaaggtttcctttagctgtaaaatcgatggctggtcttttacgatatctgccgagacatgtactacaaagtgatgtatgggggttaccaaactgtcttgctttgtggttgagctatcgatttctttccccttatttgaagccttgtttttcttatctatcaaaatatgtcccaaaaattacgaatttggtgatgttgatagaaaaagaataattttaatatggatgacagaaggtcatttgcagcctcaaatatgtatgttattcatattgttgtattgaaaattatgctgagttacagactattatatgtgttgcatag

SEQ ID NO: 170948 - DNA, 1419 bp, Cannabis sativa
caacatatcgatgtaggcttagccaatatagggccagacggtgaggtccgattatggaattgacactcaattttgtgatgggcccgatgggttccgatattgtttcggtgttgtgtctgatggtttatagatttatggcatttttaagaatttgtatcacttttttgtgagatttttgttttaaattgtaatttttttttaatgtatgtgacaagttcaactgttaaatgcatttgttatgtataatggtgtttgggagcttgagggtagagattgagtttataaccgggccgaaaatttgacatttgacatggatacgaatgtaagctactcaggtttggttgatcttttgtatgaagaactcgatgttgacaaactgtagtatgaattgaaattagaagtaaattacaagtacatgaaaggcttaatgtatcgcctcgaagttattagaaatgataagcgtgcaaggttctttttgtctacacttacgaagaagccagatgaatttactcccttgtttgtgactatattaaagaagaatatttttattgatcctagtcccacaccaagttctgttaaggacactcgtagcgaggttgggagttctgttccaaaaacaaatccacaggttgtgactatgatgccgagtgttgatattgtagcacaaatgcccttcattgatagttttttgatggtctagaccctgaatgctatgttgagggcaatgatgacgtaagagaagaccaagatacagaggttcctactattgtagctttaaacttgactccactatcgtaccaaataccacccaggccattgacacagaaaagaataccccgtagagaaaatcgccaaacacctgatactagtagtagtcgtccaaccagtaatgctagaggaaccactgatggtagaggtcctagtgattctagaagaaccagtgaagctagatggaccattgactatacatgtcctagtaatgctagagagactaatgatgctagtggtcctagtgatgctagagggaccaatgacactggatttagcgatccattttcttcttcaacaagttacaatgaattcaaggagaaaatgtttataagagaagacatcgaggatcatagtcattatatatctatgggtgacacaccaggcagggagttatatgtaggaaactttttttagagacaaagagcatttaaagatagttgttggcttgtatgcaatgaagaaagagtttgactacttcgttaggaagtctgatactgctatttggtacgttacatgtaaggaaccagattgtgggtggagattaagagcgaagaagaacgtactttcgaacatgtttgaggttagtacatttcataatgtacatacatgttcccttgatcttcgaggaaaagataaccgtcaagcatc

SEQ ID NO: 170949 - DNA, 515 bp, Cannabis sativa
  modified_base (468)..(468): a, c, t, g, unknown or other
tatttccaaaataattagaatgaaacatgttttgtattgtaacacatttagatagaatgttatcttttattctacaaaaatagcaaataggaatgaatcgtcttcgattccctttgaaattgtctttcttactgtgttgcttttttctgtatcaataatgtatgttgctgaatcaacagaatcctgcaaagtagagatagaacgtcctaaaaataaaatcttttgatctaacaaatttggtatttgatttagattaaaccttaacaaaacccaaactagcatgacttgtttgacaagaattttgaatcttttcagaaatgttggaacctggatttagcatttttacatttcttttaagattttcaagttccttagttaaagaaataattttaaaattttttgaattcaattcagattcacaacatttatttttctcttcaaactctctgttatagtgagatttctctnacctagaaactcgagaccagactcttatttaaaggacacgtgtattc

SEQ ID NO: 170950 - DNA, 593 bp, Cannabis sativa
atatatatttatatatataatgtggataggaaagttgtcaaaactaaaaaagtaaaaaaaataaaaaataaaaaacagtatacatacacagtatagaaaaatacagtaaaaatgtaatatttttattacaacaataaaattaaaataaaataggaataaatagtatggggtggaaattttcctaaatataaccggtttctttatgttatacttgagttttcttttactgaaatatattatatttgagttattgtgtgttattctttatgtttatttattttgttatggaaccgattcttttcatatttatgcctcaatattttttgaaattgatccccataatttttttaaaaaaattataatcgattttatgagatattatgtgttatgatgtattttgttgtgaaactagttttaatttctttgtaatttatatttcagtgttttaggaactgattttctctacgttttttaattgtaatggtttgagttattgcgtgttacttgtttgtattcattatattatataactggatctattttagttataaccggtttgagttatttcatgttatttgttttattcattataa

SEQ ID NO: 170951 - DNA, 753 bp, Cannabis sativa
tgatggcttggctgtatattgcagtagtgttaaaaatcttaccaaatatgggtccattaatcttttgaatttattgttgtcattttcaggttttaatatttttatattatttatcaataatataatgtatagattatatatgtgtaacaaattaatatgtaacatatgataattgtcatctttttataatatttgagggagttacttgttactatgagtaacctccaccattatcaccaacattaagagtgtaaaaggtgttacacatcttaatttgaaatttttaatgctataggagttatggtgtgtgcatgagttacatctctataggagttatggtgtgcatgagttacatctctttattgagtccataacatccatggaggttatgacttatgaatttgaatttcaaatggtgatatcctaaacactatataaagaggtttaaaatactcatattgaagagaagttttgtgtataatgagaaaaaatgcataaatccaagttgtatagatggtagcatagaaagaattgttcttaaaaatgtaaaagacttgtaagttaatcatttcgaagaggaatctcctggatgtaattggctcggtttaattaatagaagttatcttttttgaagaaaaaattaataaaatatttcaaatagaaatattaaatacataattttataaaaatattaagggtaaataccattttagaccctctgttttataaaagttaccaattggaccctgtgtt

SEQ ID NO: 170952 - DNA, 528 bp, Cannabis sativa
gaggatcacatatgtaatcgtgtaagtgatttggcttgctggtttgtcggccatatttggttgtataattgttgctggaatgtgctatgttagatggagcagatgaaagggatttttgaattttatgggcatcagggtgtggggttgtaggagcagtagtagcagatgtatcaatggtgtgaggaggagcagtattaggtgctgcaatatttgttgcagcagagttttgtgcatcaggtattgctgcagtagaagggtcaggtactgcaatgggagaaggaagtggagatgtttgatctgctgtgctgctgtattggtgaggaaaaaatcgagcaatgtctctgttgggactattgccgtgatatggataaatgttttcatagaatataacatctctacagtgaaaaatgcgatttgtttgtatgtcaagtagagtataggctttcatattttcaggatatcctatgaaggtacatgctttggatctaggagagaatttatgatcatgagtgatgttggatgcatatg

SEQ ID NO: 170953 - DNA, 694 bp, Cannabis sativa
tataattagtataattaattttattctttgtaatgtaattatttaatattttatgatgtttaagtctttaagagacgatctgatttcctcccaaagtattttaaaaacttgttaaaagtgtttttaaagtaagattaagtacaatgtatatctatctatcatctttaaatatgaaattataaataaaattctttacagtagtttttaaaattaattaatacaatacaaaaaactgctacttatagtgacaattttttagttacaacataatttttttgtgattgtgacttttagtcacaacaaaatgttactattgaataaaacatagagtttagttacaagttgtcatataaaaacttctacttttggtgacaactttttagcacaacataatttttttggactaaatgtgactttaagttacaacaaaatgttacttgtgactaaatcatagtatttagatacaagttgtcactaatttatttttagtcacaacaagtacttgttgtgactaaataatatatttagttgacaacaaattataatttttgtcatgactaatacctttagcttcggaccttttagtcacaatacaagaattgtgaaaaggctaattacgattttcgcccctgaactttgacatgtaccaaatcatgctccctgaacttttaaggtcgttaaaaatgccccctga

SEQ ID NO: 170954 - DNA, 593 bp, Cannabis sativa
gtatccttttctctagggaagaaagttaagaggaggtggtgttggtctctaggaaaacctataggctaaataagtaaatagtgtcccccaaaatctagtaacaaaaaatttcatcttccaacaccactgtaggggtcaaatccacaaaccaatgtttacccttgtaacaggcagtcctccctacttccacttacagcattacgaaaagaaacagacaaaaaatgcggtgtaatgaaagctaccccttttaccagttttttactcgtcttggggtatcatgccttcctctgcttcttccccgtagttagcacactgagcccctcctccgttagcatgtcctgctccaggaggtcctccaaaagtttccttttcgaaacccggttttagagaaggtgaagataacttagctttttgcatcattgtttcatggaaactccgtactggtcgtgaagccctgtctgggctacgacttcgttcacgattgcgactactccagcctactgggcttcgactgcgactacgggcccgatcatacccattctggtaaccacgatcaaccctggccaaccaaaaaaaggataaaccatcagtct

SEQ ID NO: 170955 - DNA, 785 bp, Cannabis sativa
ttagtctttattttttaaaatttacattttctctttctatatatacattgtgtaattattctttttcgtaaattgcactatgctctttttggtagaaaagaagatggttctattctattttattttatgctgttaagattgttacttgttagtctttattttttaaaatttatgttttctctttctatatatacaatgtgtaattattctttttcgtaaattttactatgctctttttggtagaaaagaaagaacaacaaaacacttgaacttcaaattttatatattatgagagcaagcttaatggcttaaaaagtatctgtgtggcttgaactctatgaattgggtgttgtttttgatagagaacaacaacatgttgagttgcttggtagagaaaaaatgataacattcatgaaaaatacaatgtatagctctcatatcatgactcttttcttcactacattaatcaatcatcaccattactatttttcaatagtcattttagccctcgtattttcttttcttcactatattaaaatgcccgcaataccgtttctctatatattcatgtatacgattgagcattcgatttcgatttgttgtcgattgatccatttgagcttcggaatggtcggtttagttgaactattgggttgacacgattgagctgtctatatttaattcaaaatcgatttcttgttgattggattgtggattgggtaaatttgataccaaactgacatagtaatgtttttcttgcaggcagagatgactctgaagcaact

SEQ ID NO: 170956 - DNA, 539 bp, Cannabis sativa
cctggacctagacctggactcgaattcagacccagaccttggactcgaacctcaaacccaaaccctaaacccaaactcagaccccgaactcggacctcggatcttatgacagtcattagtcccgtgatccataaagggaaataccaggtaagctgtgcaatcccacacaacctggggaaggtcaagtgggatgattttgagactgcttaagtatggaactacacaattgaagaggaattaaatggattgattggtactacctctatcaacaaggtacatattgatttttggtagcccatcacgaaaaaactctacggctaagcgtgcttgacctggggtaatttcaagatgggtgaccttctaagaagtttttccaagaagtgtgtgagtgagggcaaagcacgctagaaacacgcatgttggtttgtaggtcagtcgtcatcccatgaagcagccaaagtgagctacctgtgtataagagccatcattccgtgggtgtaagggcactatggaggcttgaagtggggacattgcaaatg

SEQ ID NO: 170957 - DNA, 507 bp, Cannabis sativa
gaattagaaaatataattaagaccttaattacttctttgtttttagctcattctctataagtataatagagtattctttacgatttcaattcatttattagcttatgattattataattatattgttgtcgagtaagtttaccatagtgtagtgtctttgtgtgtaatttatgtctataatatatcattacaggacaaaacaacgcaatataaagttacctatttcaaacattttttaggaaaaccatacccaatgtttttttttttttttttggaacaaatattcattaccttttttcaaaatcctttgccagaatacttaattctataaaattaatattatttcaaaaaaaaaaaaattaataacttgtgtttaaattttagtcaattataaaggatcatgatcacataatcacgtgtaacttgtgaacagtttatagatattatatttttattttaatttatttttcatttcttatagtagtactaatacataatttttctata

SEQ ID NO: 170958 - DNA, 503 bp, Cannabis sativa
tgccacaaaaataggcatgcatggaaaagacaaggccaagagtttaaacatgggaaagtgtgaagtcattacacgatttaccacattgattgacagaaagttaataactaacgatgaatcaatcgaagagactgaagggtgaccatgcatagttgttgaacgaaaaaaagggggctcattattcttattattattattataaatcaattattaaataataataatattttgataacaaaaaaaggggtcagtcaaaatgagagtaaaagtaggagatattctctccactctcaccacttatatgttaagtgggtggttagtaaaaaaaaataaaaagaaagagtctctataaaagggaagagaagcagcataatggagatttatttatttatttgttttggcaattttagaagtaaacgtaaaagtgaaacaggagagaaaataagaaagagagaaggctttgtgcataaaattttcatctgcaagagtttctacacagtaag

SEQ ID NO: 170959 - DNA, 689 bp, Cannabis sativa
atatggtcgtaatttgcgagatgtgtgaatgaggcataatgcaagtttttcaaaagggggatatcttgattctacccccagtaaccttttactaacatagtaaacaggttgctggtattttccctcttctcgcactaaggctgcactatggcatgctccgagacagctaaataaaggtataaaatttctccagttattggtttggccaaaactggaggtgttgataaatgtttctttattcctttaaaatcttcctcgcattcttctgtccattcaaatatcttattgcctcgtaaaacattaaaaatggatgacattaactgttgattttgagatgaatctatttaatgatgccattcttcttgtcaaagctttaacttatttcgtctttgttggtgagggcatcttgattagggccttgatttttttgggttagtttcaattcctcttgcatttactatgaagctaagaaattttcctgaggaaaccccaaaagagcatttcatcagattaagcttcatatatattttctaagtatctcaaagcattctacaaggtccttagtgtgatctttactttttattgaattcaccagcatatcatcaacgtagactttcatatttcgtccaaatttgcttctcgaacatgccattcaccagtcgttgatattgttggaatatcttttacca

SEQ ID NO: 170960 - DNA, 1078 bp, Cannabis sativa
cagatggccaaagaaaatcctgtggcacccacttctacagttccaaccgaccagagcactaaaatccttactgccaagaatattgagccttcgacccccacaaacctaactaatccgtacaaggagcctgggacccctgccgtgtgaaacattttttctcttttatattattattttctttatttgttcggcccatgggcgtttattagagacaaaaatgaacagccaagcggttttttaacttgggttatatttttcattttaagacaactaactgactgggtagcctttaatcccgcgtttaccgtgctttgttatctttttcaatgaatacttcccttgtttttatatttatctatgcaaactgttatgtttttttgagcttgttatttgcttttaccaatgcttcgtatgggtgtagttggcccccaagtgattgagcagacttatgactcttggtcacttacatttcacaagtatggtttttgtctgttcagatatttggatttgagcagacctttgtgcgcatttaatggtaaatttataactttttaataggatcgacacaattagaatttaaatagacatctttattctttcaatggtcgggatagttttttgttaccgtagtaacgtacattcatgaaagctattgtatgatctaatccaatcttgagctaaatttaaacataaaataattccacttataaaaagaaaatgtacttttaaaagtggtcatccgacctgagtacttgatcatttcatcagaacccttaggcgggatccgcctagaaggccatttacttaaaagtaaatcttctttctttgtgtacttacagtggccagccgacctggtacactcactgataatactttcttaaatgttccccattacaataccttgggactagaacgaggttcatgttttcgtcataccgcccaagcttgtatgcccttgactctagaacttcgacctcctaatacagtccttcccaattttgtccgagcccaccagtcatgttgtctttcgtgttcaagaatacccttctgaggaccatatctcccacacaaaaaaatt

SEQ ID NO: 170961 - DNA, 1564 bp, Cannabis sativa
  modified_base (949)..(949): a, c, t, g, unknown or other
taactaactctgactaatgctaacaagttgaaaaccccaaaccagttgctaacatctcgcagcgccaactttgtgaagtggcagtccatgaatagatggttatggatctccttttcctgatcacaaacctggcagagattggattgaataggaaggaaaaatatggtaatcttaacaagaaaaaagttaacaaaatgagaatctcccttgttatcctaattttccacacagccgccacaaggctatacttggatgacatgtgaaaatcatttcaatacctggatgggctatacttgcctaatattttgtcatgctcaaatcagttaagtctacgccttcagcatgcagtatccgaacaagttacgtacgcgatgttcagagcgaaacatttatatctaatgaagtataatcctccgtgaagaaggacatgagagatacagattttttaagatgttttccttaaatatctctacaatagtagcataattaaattcctatgtttaaaggatttagttgatgccagagattctagagatttaacatttagtttcccttttctttcccatttattttgagtaacttattttatgtatttttcctataaatagggaattcatttctattagggtttatgtcctgaaaagtctgtaaagacatttatgattattaattaacgagttgaatattttgatatatgcttgaatgttaagttattaatatttattattgaataatttatgttaaatatcagaaaaatctttattcatatatgaggttgtggcttgtaattgtacagaaactaaaactacttagctatgaataaaacagtcagcaacatactaaaattatggaatttttaattaatagttgctagtacggttcactgatacccgttcttcggtgcaagtaatctcagttcagattacgaatgtagtatgacatcaaagtnaaggtgttgtatataataaagattatatatgacaatgaccgatatgaataaagctgtctttattaacatatcgtttactataaagaactaattcatatcataatgatgatcaatagtagatcggcctaaatcctgagttatcatgaactcctattcatgttattaatttctttgattcacttgttaaagtttcttagggaagatgattcttacaacttttattttgggaatctaataatgtggatggctagaaacatgatttacaattatggaatcctgactttcctaatgaattggttccctttaagtgttaattctagattacatgggatctaaattatacttctactagtgaattattagaactaaaggataaagaagtaattagaagggtaaaacagtaatttaatcaaaactaattacgaaccaacacatggaaggctaatcacttaaattgattatatcaacggacactgcagtcaaacttagtaaatataattctataattactaagagttcaatttcatatttatagtagtgtaatcataaaattaataaacaaggattatttggttgacgagactcaataaataatctagtttattggagcttaga

SEQ ID NO: 170962 - DNA, 595 bp, Cannabis sativa
atggacctttggttttataattagttttgagaatgttttataatttaatgaataaaattattgttgaaaattttataaaacacaaacgtttgtattcttagtattatatttataatttaattggttgattgattatattaaattaaaataatatgaaaaaaaatagaaaaaaaaaaactataaattaattaaaaaaatagaaaattagatatagtaattaaaataagatgttgagaatgtcacctctttttttacagctatataaatataatataaatagatataaattatatgatttaaattactaaaaatgaaaaggcactcttaatctttttaaataaaaaaatgactataaatatgtgataattattaagtggatgattaatgaaaaactaataatcataatattattatcatcatataatttatcatcagtcaatatcaatatataatagaaggaataagagagataattagagcactctaattaagtttaaattattgaaagttgtattttttagtgaatcacctctaatcatgtaaaatacgtataaaataaaaaaaataataaactaaaataaacttataaataata

SEQ ID NO: 170963 - DNA, 607 bp, Cannabis sativa
gaaatgtcaatggatagtcgaagcttcgcctccttagtatatggattgctgcatctatatgctgcatataaaggttagaggaagcagttagacaacaaaatatattaattgtagattagttgacttataaaatgtagtaaaattatagattagtttacttacatcatgtgtaagtcattcatgtagtgtcaacaacttccaaaagaacaatggaccgtaatcaccacttttcaaatcctgaagccgatggttgggaatgagtccagaacaccacttttggaaagtatccaacaatcgctcatccggtgacgccaagggatcaaacatcaaagaaggtctctgtttcttcttatctccgtgtagtcattaaaccatacgggggatttctcttcctctttccacacttaacccttgcaggtcatgcctctatcgtcaaaatttcaccctgtgactcgttgtcatctatatagataacacctgcaccgataggggtagttggagctccctcataaggatcatactcgtcaggaaagacctcctcatcttcacccatagcagatggtgagggtgatgcagctggtactgggggtgatgcagttggtagtgg

SEQ ID NO: 170964 - DNA, 1174 bp, Cannabis sativa
aaaagcgtcgggtttttgtcatacttggcatagtgcttggtcagtgtatacccgaacatgatgagcttggaagtagggccttaacttccttgttgctaagattaggcagtaagtaagcttttctatcaatgggtactgtccttgagtttcaacgagtcttttgctgatataatagattggatgttggacattttttttctctgatcagcacgacactcacaacatattctataacacctaagtataatcctaattcttctccgtctagaggtttttgagagtacaagaggttttgcaagttgtctttttagttcttgaaaggccttctcgtattcctttggccattcaaatttcttattacctcgtaggatgttgaagaaaggaacacacttgtttgttgactttgaaacaaatctactgagtgcggctatccgaccagttaagctttggacttctttagttattgttggcggtttcatatccaggagggcttgaattttctttgaattggcttcgatacctcgggcattaccaataaaactaagaaagttacccgagctgactctaaaggagtactttaagggattaagtttcatgttgcattttttgaggattttgaagcattcatccaggtcatctatatgccccaagccttcttggatttgacgagcacatcatccacatatacctccgtattttgtctgatctggtctttaaacattcgattcaccaacctttggtaggtagctctagcattctgtagaccaaacgacatgactttgtaacagtacagacctaaatctgttcggaaacttgtatgttcttggtctggtagatgcattctgatttgattataccccgaataggcgtcaataaagcttaggatctcgtgcccggctattgcatccacaagttaatctcttcttagaagtgaaaaacagtctttggggcacaccttgttaagatcggtaaaatcaatacatactcaccattttttgttgggcttgggtaccagtacgggattagctacccaagctggatagaaagcttcaatgatgatcttgttcttacgtagcttttctacctcttcttttaatgattgtgctcgttctttgtctaataatcttctttttgttgaacgggacataagtttagatcaatgtttagggcgtga

SEQ ID NO: 170965 - DNA, 915 bp, Cannabis sativa
ggttttatttttgtgattaaattactttgccattttgataatttccctttatttttcagcaaactaatttttaactaattagtctttattttttgtccctaccataccagaaagaggtatgggaaaatggatatattgttgccacagctagttgattttcattcttactcttatattagctaaatttctagtgcaaagtccacatgaataatatcaatatattatattgtcattacagatacgagtaagtcaatgtggataaatttgccaatgtcaactcttttggtttgcgcattaagcattctttttaatgaggtacgtacttcaaataatatcaagagttatgaaagttaggaatagaaaaaccttttctaatcacacatatagaggataggcttgtgtattgtaagcataaatttttactaagttatgaaggttgggcttgtatattgaaagtattgttaaaatatttgtaatatagacactttatgtaatgttatccatgtaattgtcttaatttgaatttatcttttagtaattctaactttatattattattaagttaataatgtatatgttttttacatggatatatgatattaacttatcttttatatcttttatatatggacaaaatattattagtttatttatgattttttttaataattggaaagttttaccttggaaaatgttctgtgtacacataagtgtcaatttataatcgacgcaaaaactacttgttgtgtcggttaaagattgatgcatatcttgttgtgtcacttcaaaattgacgcaaaatgttttaattttttttaatgtgttgcgtcggttataaaatgacgaaaatagttttttatgtcattttataaccgacgcaaataaattacaatttgcgtctacggcttatacgtc

SEQ ID NO: 170966 - DNA, 505 bp, Cannabis sativa
ataacataactatatacaccaatgccttctctcaaagtatttacttttttaatttttacaattaatcatgattgacattcaagacaaaaccatcctacagagtaattcaaagatcccatgaactattcatatctatgatgatatcattataattcaaattattagtctcactaaggcataatcatttaaaaaaatcaaagcatggcctgcagattttcatttaagacagataacaaaactaacaaaaggattacttacaaataatggtgacatcttgctgcattcattaattaaatagcaagaccaataccatacaccaggaagttttgcttacacctgcaaactgtagtacaaccttgtgaataatagccgacatagttgaaaatcatccactataatatgagttattaggggctattttttgtggctcctaatattgtcgtccctaaaacacaattttctagttgtgatactattattagtgtcaaacaccacaaagtaaaaa

SEQ ID NO: 170967 - DNA, 1142 bp, Cannabis sativa
  modified_base (273)..(275): a, c, t, g, unknown or other
  modified_base (763)..(763): a, c, t, g, unknown or other
aaagatcgataatgaagacgaatcttatccattgcacttacgtcttagtcatataggctattgatagacttcacaggttaaccaaaggtggtccattgaaaaatatcaccttaggagaattaccagtttgtgaatcttgcctagaaggcaaaatgacaaaatattctttctctgcaatgggagagtggggcaaagaccactaggaatagtgcattcagatctttgtggacccacagaatgtcaaagccagaggtggttatgagtactttgtcnnnttcattgacgattactctagatatggtcatatttaccttatgcacaagaaatcaaaaataattgagaagtttcggaaatttcaagcattggctcaaaaccaattgggtaaaactttaaagatcttgcatactgataggggtggagagtatatggatatacagttcaaagataatttaagtgaacttggaattgaatcccaactgaatgcccctagcactccacaacaaagtggagttgcagaaagaagaaatcacacgcttttggaaatagttaggtacatgcttagctattcaactctgcctatgtccttctggggatatatggattttaaatgttgttccatctaagtcagtccttaagacacctttagaattatggaatggttgtatacccaatttacgccattacagaatctaggcgtgccctgctcatgtcttaagaaagaaagatggcaaactagaaaaagcaaactgaggtttgcatgttngttggaaattctaaggagactaggagtggactattttatattcgcaaggatgataaagtgtttgtttctacaaacgcaactttccttgaagatgactatattaagaattttaacctgcaaagcaaagcagtattggaggaaattctttcaaatataactccaaccaatgttctatcatcttctactcaaataggggatgatcccactctcttggttgaataaatatgatttgatacaaccaataaatctaccaataatgttcttgttcaaaaggtcacggctcctcgtcatagtgggagagtctctagaaaactagctcgttatggctttaatggtaaaattcatatggtcgttggtgacggtattgatgacgacccat

SEQ ID NO: 170968 - DNA, 543 bp, Cannabis sativa
tatatttaactataaaataaactgcggttgtattttgttcaacaataattaaattataaaattatattatgtttttaattttttaattttttatgcatttttgttagtatgagtaacttttttgttatttttttatttgattagagatccttacataaaattgagatttttttaaaagtaatttgcagcataaatacctaagtttgatttataactgtaaataaatacttaaatttatttttttagcagtaataattattacttaagttataattctagaacttctgtaggtacctgactgttagttaagtaaattaacacgtggcaattcttgactggtccaagtcattaatttttttttttaaaaaaaaaaatagtttaaatataccaataaaaaataacacatggataatgacttgacatttaacaattaggaacccacggagttccagaattataacttaggtattattactgcaaaaaattaaacttagatatttatttacaactgggagttaaatttaggtatttatgccgcaaatt

SEQ ID NO: 170969 - DNA, 590 bp, Cannabis sativa
gatgtaattttggatcctaatattttctagtccaataaataatgataaactagtcttgtcctatactatatgttcaagtaattaaatatacacactcaagcaactgataattttagggaatatgtttctgcctcaaacataatttctatatcttctgatcagttgcaaacctaatctttatggttgtcttttcttttggttttttttttttttaaaaaagtttttctctttccatgactaccctgctgtcaatttatcatataactaatattatttctttcctttctgtcaccattctctcttatttctattatgaaaaataagatttttttttatttctttttatgaatatatagtattaattatcttttccaatatgatcttcacatattcttgtcaataatgatatataaaaaatgaaatatatagcgaatatatatgttcaagtagttgttataaacactcaacacacttgaactggaaaacaaagaaggtcctaattataataatgtagggcctctttctcacatataatattcaacacacttgaactgttagactatatatatagtgtatgtaatatagcatat

SEQ ID NO: 170970 - DNA, 1053 bp, Cannabis sativa
ctgtggttgacgatggccatgaaatatttgtgttcctcttttgtgctttgtttgtatttttcttatgtttttcatttttttcacatgtgttcttttgatatttattttcttctatctagttgtaatggagagattttgatggttgttgacaaggctaagaagaactcctcattctttcttaccttgatttctctcaagtattgaaatcagtacattctgatttttttttttttttggataaatgaattgttcatgcctaatgttatatgaatatttgttgaatcataaattattgtatagtgtttcaatttaaaattttggttcagtaattttagtatcactattttgctctctatggtttatgtattcagatttagtaatgataatatttttctttgtattttttattttcctttaggtttattaggtccctaataatggaaaaaaaagttcatcaatctatggcaaagaagctcatccgagtaagcttccaagttccagtttttagatttggtgtttaaaaatgttatatttcaagtcttgaatgttacccattttgatctacaatttttgtgaacactaaaattttatttctattgttgaattattgatgtattttgtagttttatgctttattcttttttatttaatataaaaggaaaataaaattaaaacaaatttgatacaccatacattttttttctttttttttaaaaaaaaaaaaatgatatagtgacgcactataagtgtggccattgttaagaaaattattgaaaaaaaagaaaaaaagtagatacagtgacactctacaggtgtggttgttatctttagagtctgacaatgtgagattctaaatgtctatagtgacgcgcggtgagagagtctaaaaggttttagtgacatgcactgaagtgtcactaaatattacttttcctaacacctacattagtgacacgcagttgagtgtcactaaaaatctttagagtctcttaaaatgagtcactgaaccccatttttgtagtagtggacgaagacctctatggttaagaccaa

SEQ ID NO: 170971 - DNA, 906 bp, Cannabis sativa
tttatttgcatttttggtttctgcctaagagggaaatctgcattttttgggtttttgtattttgagagttttgaaaatacatgctcgtaggaaacatacatagggctatatttttttgtgtaaaactgggaaatccaagaagaaaatagacctgaaatttgcatagtcgtgaactttaggaagaatgtttgaataatcgcacctttcctatctgtttatttcttgaatacacgcgggtattcagatgaacactttgaatactcgcatgcctgctttccttaggtttcacagagactttatcacttctagtccttgtttagaacctaggattttatattctctatatattttgtcgtggggacattggttaagtcttttgaatggtgggtgtatcgcaatattccaatgctcatacgtgcgatcgtatgttccttgaggtactgcgatacacccaaccatttccgacatacgccagtgttccaatataagcgtattctttggctaccagatttgctcgaaacagtgggtgtttccaagtaacttcagggtcatgctcaaaaatgcatgctccttgggtcactgggaaaccctcagccgtttttgaggtacatcgctagctggagatgcgtgacacattcgcatgttgtgattggttaggttcctcgaaacgatgggtgtttcctagtcacttcagggtcatgctcgaaaacgcatgtcacttaggttactggcatacacccaatcattttttgagatatccttctattcgcacaccagacatttcacgtcttggtgggctgctggttttcgcaagaattcaaatcagccttctaagacgattttacattttatatgcgggtgaggtcactaactttgttttcgcacattcaccatgctgaaaagatc

SEQ ID NO: 170972 - DNA, 685 bp, Cannabis sativa
ctcctaatcatggtaaagagtgtttgtatggtcttacatttaccctaaggaatctcccaggttttgcaactcagtatcatcattgatcaccactcaaggatttctaacagatggatctccaatacctgggccagtctctccattataagtactagtggttctagtttcctgtgtgcctaaagtgaacccagccagaggagttgtcactgttgagattttatgccctattaaataaaatctaatttcattataatcttatttactttcaataaagatcaaaaatcatttattgaccttgtcatatgccttctttatatttttttacacatgattatttatttaatatataagtttttttaaatcctgaacatatagttattcataattataatgatgtcatcacggttgaaagtaattgtgattatatgcttcaaattagttagttccactatttataagtgcactgaatttatactaatgtgacaataatcattgatgggatttacttacacttggataagtagaatatctttttcaaggcattagtaaagtaaactaggatcagatgcatcgactatataccagactggaccgatattaacaataaaaaatatattataaacttaccgtcatatcttttctaagtcaatatcacttagtggatcatagatcattttatctcaat

SEQ ID NO: 170973 - DNA, 546 bp, Cannabis sativa
aggtataacacatatgtacatatatatttttggtatgaaagcataaaatttaattattcatctaaactaaataaaaataataattaatttgattgggtgttggatgtattatatttttggacactaaatccaacatccgatctgatttaattggatattcaaaaataacatccaatctgatccgatcacaattggatatttaatatttggcagtagattgtgattgaatcagtcggttataattagatttgatcgatttatgcacaaccctactcgtgactaagccaaacaagtggttctagaaggtaatcacatttagttgaaaagttttgctcattaaataattttaaatttctccaatccaatgcacaccacacaataaaaaaaaaaaatgtgtattataacctcacaaaaaattattcaattaaaataaaataaaacaaaactataaaaataatatgtgaaggattgaacaaatgtcacttaactagaattaggagaacttaccaaatgtgctacagtaacttagttttataaataaaattc

SEQ ID NO: 170974 - DNA, 606 bp, Cannabis sativa
atagttgtgtgaattttgaatttttctaagaagataaattataaagaaaaaagagtaaaagacaaagaaaaaaaaaattaaagtatatatttttttattaaaccaattttgataaattttgttagagtattgttatgagttataagtaaggaaaataaaatttgacatttaattatactaatagtaaaataatacacagaaaattagtagacactaatgctttagcaattcttatctttttttaggcacattttcaatatgttggtaaatgttttgacttttataaaattaagcttttttttgttagataatattaaactatttttaagtttaccttgttcttcttttcttttttggtttgtttgaacctaaatattagaaagtgaaattttttgaagttcattttttttttttttgacatattttgaagttcattttcatgttctcattaaatttaaaatacaaacaagaagtagtaaatgaaagtttactgtgaaactctttacatggtgataatatttgtagcatttaaatatttctataaaagaagtttgaggataataataacttaattttagtggtgcacactttctacttaaaaaaaaa

SEQ ID NO: 170975 - DNA, 748 bp, Cannabis sativa
  modified_base (93)..(98): a, c, t, g, unknown or other
  modified_base (183)..(185): a, c, t, g, unknown or other
  modified_base (216)..(220): a, c, t, g, unknown or other
tcgctcgaactcgttgtactcaaacatgaatttttcttgataactttttttttaatataaccaaattgaagaaaatttctaacacgaacagannnnnnaaatgtaaacagttttgtcataaaacctttaggtcggattattattaaattttattttaacaaaaaatcagtttagggtcctatnnntaccattttgaaaaatacagggtctattttnnnnnttaacaaaacaaaaggtccaattgataatttttacaaaacagagggtctaaaatagtatttaccctaaatatttaggtatttacaagaaactttaattatgtacaagactatcatcaaattacttgaattttgtaaattctcacatttttaagaaaataaaaacagcaccaatgatcattagcctaatcaaccgtgtcatgaagtatatataataagcaaacaactataacattattctttcttgttttgcaatatagtcattatgtacctagccaaagaaacaaagccaacaaacgtttcatactgaaaataatagaatttagaaagaaattaagggaagcgatcggagttgttgaaaatttagtgtttgtattgaataggcatcaaagcattgaacatgctattgaggttatttttcccgaagcatgtcactgttcatgctacaaacatacttctatgaatgtcacccacaagttcaagactgatgtatgtaacacgcaaatatggctggccgcttacgcatggtc

SEQ ID NO: 170976 - DNA, 557 bp, Cannabis sativa
gccaggatttgagcacaagctgaccgaccaaaggtgactttcaaactaaggaggggtccgatcgaccaagaaaacctaaccccagtaagaaaaagttgtgcataggctggccaccacctacgaaggttggccaacacttgccaaagttgacaggaacatggtcaactagaccctggcatgagcatggccgaccagaccccaacctgcatgcattgtatggccagctagcctgcacctggtaggcttttggtgtgtagccttcatctgtggacaacaagctaaactgcgagttgggccttgacagctcacgaaaataccatgaaaatatcagcaactttcctattttaagggataatttaataatttaaaccttattaattaattatgtaaatataactttatttacttatttttaagggatattagggatgtaatctctactatataaagagcattatcctaaccgtaattccctaagtctgaagtcttaagtcgcaagccctaagccctaaactctaagtctgatactcaactcatcattctctctctctctctct

SEQ ID NO: 170977 - DNA, 597 bp, Cannabis sativa
aagaattgagttccaaattagttagcgatttttcttattgaatttgtgaccatattgattttagtttctaaaatattcggcttgttaaaagttcttcttaaattattacatttaaagaaatttagtccttctgttaagtttcgtctcattattccgtttaaataataacgtgtctttgtcaattagcaatttaattccttaaaccttaacaactattaaatcgtacccctcataataaaaatgagaaagattcaatattttcttagtaatcttaaaaaattaatttagatttttaaaaaaattattttgaatgattaagaaattaaaattttaaaactaattatgggatataaaaaattatttacttttaattagaaaatccatttagatattaaaaaaatatattaaaattttaatttgtaaaaatatattaaaaactaaattttacataaacaaacttgaatatattttatttttatcaaaaaaatatagattattttaagtaaatgtaacatttttttttgtttaatttataactttttttcaaaataattttatattttttattgaatttttaattatttttttatttgttaa

SEQ ID NO: 170978 - DNA, 834 bp, Cannabis sativa
ttcaactgacattattacacatattgcgtcggttattaggaaaataacacacgccaacacacgtgttagcaaaccgtgcacctatggtgtcggttatttcctaatgactgacgccatagatgatgtgtataatcagagattcatcctctccacttcggccttttttcctcatacacgataatagtagccatagcatcaccctagcccacgccaatgacccataaaaaaccatcaatctccctcatttattcaccattttacctcatttttgttttaaaatcttctattttctatacctaaacctatattgtaaaaaagttcggattttttcccctccatcactataaccgaatttgttttaaaaaaaaagtggtggtataactccagccaccgattttggtggagaaaacattgaatctcaacatccattaaggtacaaatatgttttctatttattttattaatgtagattgttttattttcgttcttgtagtttttttgggagatttttctattttattaatattatgttgttgtgtgtgcatggtggccaaatttttatcgcaattggttgccgaattacgtttataaggtaaatatttattaacttgatatataatatatttgtatgtattttgtgttttattgaatatgtgtttttatattgtgtatatattgttaattgtgtaaattgtataattgtattgtatatattctatgtaatatatttatatgtatatatatatttattgtgaatgagaataaagtatgagggatttaattagtttagaaataacgcttttaaaattgtgttagtgtgatatataattgatt

SEQ ID NO: 170979 - DNA, 791 bp, Cannabis sativa
cccagtaccctagtagttcaaatttgggcggcaaaagatctaacaataacgatagacaaggcaatgaaaaaaagggaaagttcacaggcaaaaccgaacatacccctagagaaaatccttccaagttcattgctttctctatcttgactaacgacctagagacaatctacatggtgactcagtctgtagtcccataagctcccatgaaaaggacataagcaagcaggaaatgtccaaattttgttgttttcatggagactatggccatgacactaatgagtgcaacaacctgaagcgagaaattgaattcctgctaagaaaaaataatccgcacgtgaaaaaatatgtcaaggccgaccagaatcaaagggccgcccaaacagacaacaaccaagacctgttactacctacaccagtggactgacatttacaagttatcattgggggcccacatattgctggagattcaggcaaagctcgggagagctatgcctgaactttacaacatgaaccaaaggaagtggttctggccgtagaagaaaggaagccaaaaataccacgggtaggggaacccattataacattcactaaagacgatgatgtcaatgttcgcttcccgcacaatgatccattagtcatggaggtacagatagcaaataaaacagtgcctcagactatgatagataatggagcgtcagcaaatatttttttcaaaacaccgtatgagaagatggggctccaactcaaagatctaatcccatgtacctagctagtgttgggttttgtgccct

SEQ ID NO: 170980 - DNA, 895 bp, Cannabis sativa
gaaacaaacttggccctcctgtagtgtgcagtcgtgaccaagtccctaacattcaacccctccttgtcgtatgtggagaaaaccttagggtgttgaaggaaaagttgagtggggacggtgcggtgcatcggcattcggtagaaccctgacccactcgataagcatctccgggtgctcaatggcttggaagccggatgagaagaagaatcgatgacggtatttcttaacatttttctggaaattaaaaggaatcgaaccctcattagcaggatgggcccggagtgtgaaaaaaccatttttgagtttgtctcccttcttgggaacagatagaagtttataaaaatacaaaatttcaaccgggctgggcggagcccaacctctggaaacataaaaaataaataagcctgagagcaggcgataagcttggcgggtgagttggtaaggcgcaaggccaacaaaaactaagaaatttatgaaataatcctgaagcggtagcattgccccgaacataagatgagtctgactccacgctctaaaaccaccgtagttacggttgggtgtctcttcatctctgggaagacggtgaaagactccaaatgtagaaggcttgatcccgaccactgtgacaatcttctctagttgatgggcgcaagttagagttgagtgcaactcatcaacctcccacccggtggatcggcaagtgtatttctcctggaccacaggtcccttcatcacctcctccaaggtggggccagggtgttagatcctttgcttgagaatttcgctccagttgtggggacagacatgccttgagattagtaagattctgaaaaagagaaatccagcagttagcccccaaaccaaaccctaacataaaaggagggaatgggggtcc

SEQ ID NO: 170981 - DNA, 589 bp, Cannabis sativa
tatttggcactttaagatgttcaacacaatacaaatatgatacttaataattggttagtagttttttataatattcactacattaaaatttgtgagacccgatattgaaaggcaccaataacggtataccaccattcggagtgtttaacatctcccttagtatttttcttatcattccaatggatattgtataatttaagctaaaaatgaaccaatattatatttcacccaaattttataatagtgcttcaatgcacttagagtaaagttattcttttttgatagaaaggtgtataaaaaattaataaaagcattaaatctttattgaaagtatataaaaatacaattaaatgtataaataaaatgtaaaaaataattaattgcattaataagtgacaatagagtaaataaaaaaaaaaatatgtattgtgtgtaaaattttactcatgttatattttgtaccatattttgcacaacagttagtatgtgctaaatttaaactactttatacactactattagggcttgtttggaacgtcgtattaggtcgtattgtattatattttattgtattgaattgaattatata

SEQ ID NO: 170982 - DNA, 887 bp, Cannabis sativa
ttttctggtttattctgtagctacaaagttgtattctatagctacagaattactgtttcaacaataatttttttatttcgcatttaattgagaaattaattaaataataaattatttgttgacctaaaaaagtggccacccgacatcgtggtcgtattaatttgatgttttccacgtgttacacaattagaactcaaaagtaaagaaaataaggatttttatagaggtttgactcctttagttagcgagtaatgacctactccccttttagttttattcataccgagtgataagactatttagatctcaagaagtgggatctaatatagctccctcaaaagttacaaagtagaaatcaaagatggcaaatgtcaagtgttgagagatgctatagtgggcgtgtgagagagagtggagtgagaatgctatcaggcttatagcttgacggcttgaatgagacttaatgacttagagggttaggcttagacttagttgcttagggttttctagggttgagttaatgctccttatataggagagcttagaccgtaatttacaaataaagtaagtagatatttacatattaaattgattaaatataaaagactaaaatgcccctcaaatataggtatttttgatctactttattgggttgttaaggcccaatttgcagtctaggttgtactccacgtgtaaggttgtgcaccgatatcctaccagatcaaatcgtggccagccaggcagccacagggagtaagctgcctggtcttatgctatccagtggttggccaaccatagggctagccaggggtggccgggcagccctcttgtaacaccctattccataggagcgccacatgtgtgattttataaactagtttaatact

SEQ ID NO: 170983 - DNA, 663 bp, Cannabis sativa
cttaacttgcttaggtagtgacccaaacctttgcatattccaagttgaaagacactttccacagtaatcatgcgactcccaaagtcctaacgggtcagccacatctaacgtacatttttgccaagcatcaatcacaatagaacgacattcctcttccttaagccaatgtggttcaaagcgaaagtgccgcttaacttgctcctgattgcgtaccacaacattctctagtttagcgactataggacgatgatcaaaacaaagaaaatcaccatgggacacttggattgaaagatagaactcagaccaagcatgattacacacaaattgatctacctattcttggacatgtgaagtgccttgtctttcattgatccaagtgaaggtcggcccttcgtacgctaaattcatctaacatacaatcatcaaagagctttttgaaattcactcatcgccaaaccatcacggttcatcccaccctttttttctttcatagataatatttcattgaagtccccccacaaatccagagtagattaaagaactactttatacaacaaagaagtagccaagactctttgcagaggtgagtttttgggttgccaaaaaatctcgtgaatcaccacaactcactccctggacattgtactgttggaatttatttta

SEQ ID NO: 170984 - DNA, 582 bp, Cannabis sativa
taaaatctccaaatcaacaagtttttatttcccatatattattacatcactttaaaaacataacacaagcaaaagaaggtacgtaatacatacataccctttattcaaaaaaactaaaaagaagaaaggtaaatttcccttgatgatgcatatacatacattgtttgtttgattctatatatatgactagtgattaattaaggaaaaagctctattagtgacttcaaactaaacaagggtgtaattttatagcgagtgaaaccagcttggaagatgagtgtttcccactctttttggcttctctctttcccagttgcgaaaagaatcattactaacaaatcgaatgaaagcttagcttccaatacttcattctcatcttcatcgctatttatcacaatatctattatcattacctttcctcctttattgtaacaaatagcttctttacattttttcagtattgtcacacattcctcatcactacaaccacgtaaaacagactacacatatatataaatacatcagtattatcacaaaataaaaataattatattaaccttttaatcgcaacataatattttt

SEQ ID NO: 170985 - DNA, 865 bp, Cannabis sativa
aatatgcttataaataaggcaaaatgtcctaataaaaaacttttagcatttttgttgtttagtgagttctgagcaagaacatctttctctctcaagtccttcgaagaatttctagaaagtgccgatcagcatcatccaagcaacctcaaagcttcgaacagtgagtaagtttctcatctttttctcctataatgcttgaatcttctattttctgggtttccattgtagaaaattcaatagtcttgacttgttctagggaaaactgtagagaatctaggtttagaaatatgaaattttgactgcaatagatcatataactcggctattgtggcatttcgactttaacttcacgatattcgattctcactttgcccattcgaggtttagtgaagattaacccttaattcgaggttttgaaattctgggttatgaacctaaatcacatgaaattttcctctttttaatattttgattggacctggtcggtatactttgcttgttttttgttcgacatctcggccaaatacttatcttgtgtcttatttttggtagatgaaccctggtgagttttggagaggagaacaacatatcgactaggatcttctccaacttttgtacgaggaccaacctagtctttgtgctagtctgtcttcctcaagtgacagactttctaattcaagttttgaggactgggaagtaagtagtgagggtacaccttcgctagaacatgagatcgcaggtgaaagctacaggcgtttcatttgggaactcaagaaggggtggagacgatacttgcagtccaactgggcatatatcgtccgaccagacgtagctgacaccattcccgtgttgggttttatgccct

SEQ ID NO: 170986 - DNA, 683 bp, Cannabis sativa
aagtagaaaaaaaataaacagactgtgaaacctctacttacagagcgatcgatgtcgattacatggaaaatttctctgaaggcagtccaaacctaaaagaaaattactaaaaacaaactaagcataaattagaccaataattgaagttaattatcgaacaacataatcttgaaactttattttcttagctatcaccaagagaaataatgtgggtgggaagatattatagatagcttcacaagagaaaaaaaatacctgttgtttgaattatctatagtaaaattgttgccaaccaagttactgcatcaaaaaggtgaagtataaatatgcagtaaaacaagcatcaacgtaacacaaaagtactaaatcatatgggtgtcatttttatggatgaaaatgaaccaaaaattaaagtgaaaaaagaaaaaattaatatttcttgaaaggcatacatctgtaaattctgttgatcgttaacccaagaaggaatgcttcctgcaaaattattgtatgatagatctctgcaagcataagatatagtacatcagtgttaattttagagtgattaccatgaatccttctaaacatactgaaatattatatatgttaacttacattttgagaagagatggactgtttttccaaggcaaggtaccatttagactattgtttccaagaaacct

SEQ ID NO: 170987 - DNA, 1045 bp, Cannabis sativa
  modified_base (1003)..(1019): a, c, t, g, unknown or other
aaatttagtattaaaaataatataaaatttaatatctactgacaagacccactacaaaaaatcttaattttagtcacaacaaaacttgtgattaaaagtaaaaaaattgtcactaattataaattattatttctatagtatgactaaaaggtccatgactaaaactattagtcacaaaaattacaatttattgtgactaaacatgtttttagccacaatacttgttgtgactaaaattaaattagttacaatttgtaactaaatactatgatttagtcacaagtaacattttattgtgactaaaagtcacatttatttataaaaaaattatattgtgactaaaaatttgtcactaaaagtatcatttttttctagtaacctttaatttatttgtatttagtataataataataatttacttgagttgttgttcgtacacttattaagaatgtttattatacattttgaaaattaaatattaatattgttcaggggaagaaaatacctacagttaaaaaagtgtcaatagagataattaagtgaaagaaatgagaaaagagaagagaaggtagaaaatattatttaattatttattataaataaatttatttatttatttaatattattaaaaaaatatgataaataatctactacaacccaaatattatctctattattatacacttatttatttattaccatctaatctattatctatggctataaaaatattcatcccatcaaaacaaaacaataatcattaccatagatatatcctataattataatataataattaattattaagtaaaaataggtcttagatgatggcatttgttattatactaaatagaatgtgtaaaaaagagtgaaaaaaaatagtttccttaacatttctttaaaaaaaatactaactaataataatactttttaataattctttttgggtgagaccagttattaaggtatataccaagtgctcgtttggaacgccgtattagnnnnnnnnnnnnnnnnntatattgaattggattatatatcata

SEQ ID NO: 170988 - DNA, 768 bp, Cannabis sativa
catctatatttaatagactgggaatggctcatgatctgagagatgatctcaacaaaaggagagggttagacgaacagtacgtctcgccagtcactaagcctggggcccgtgctcaaaatccagctcaaagagatcctgacgtgactctggtcgaccaagagaccgaacaagttaatccatccgcgcaagcacagttggatgaactaagaaacatgttccaaggtcttgtcggatagaagaacaatgacctcgagttggaccgagcacgtggatccccttttgctctagagatcaatgttctaaaattgccccacaagttcaagatgccgacctggaagatgtatactgggaaggaaaatcccttgtcacatcttaaatattttgaaatgcaaatggacctacaaggagtacgaggagatgtatgttgcagcgtttttcctgccacactctcagattctgtccagcaatggtatttcaagtttacacctggaaggttcaactcttggaaggctttctcctcggaattccatgcacaattctcttcttctcgccaactcctattgcatttagaggacctgctcgaagtaaagcaaaggccaagagaacctctctgagcttacatcagcagattcatgacggaggcgacaaaagttgcatgattaaccaaagaagggaaattaaccgcgatactgaggaaaatctgcttgtttagtgagacgcaaatacttggagattattcgtggatggcgctgttgggttttatgccct

SEQ ID NO: 170989 - DNA, 674 bp, Cannabis sativa
  modified_base (92)..(93): a, c, t, g, unknown or other
tagttattcatgattatagtgttcaacacagtggagaatgatcatgattatatgcttcaaactatttagtcccacgatttatcagtgcactnnatttacactgatgtgataatcaacgatgtggctcacttacacttgtataaatggaatgttctttccagggcattgacaaagtaaacttacatcggatttatcgggtatacatcagactgaatcaatattgatagtgaaaatgatatcataaacataccattatattttttctaaatcaatgtcacttagttgatcttaggtcaattgatctcaatcttaagatggctaagctccttgcgttttgacttgttcgttacagcttacctgtagtgcaattgagtaggatcgttaatcatagatgtggaatctatagcttctattagaagtaaaacgatagtttccttagaacttgacttaacgcgataaatgatagagcgcctattttagtaattatattagtttggtggaatatcattcacaagtttctaagtattttaaggataaaatatattaaaggataaaatggtaaatttgtccctactcaatgtaaaccgtctataaaggatcattaattgttttcattgtaacaatggattatttatagcgtatctatatttggtatatagagtgttctatgtaat

SEQ ID NO: 170990 - DNA, 612 bp, Cannabis sativa
atggaatgaaaaattgtatcaatctaaaaattaattttttttattctctcgtacatttttcttattttttttacacatcaaaatttaacttccgaacatatatagttcggaatataacattagtaaaagtaataataatggtggttttaaaacgatacgaggatcatagaagaagatcagactttatgagagagtacattttccctgggggatgtctaccttcattaactagagtaacatctgccatgactgcttcatccagattctggtatatctatctgtatagattacatttacatcatcaatattatataattggtttttggtcactttatatactgattgtactaattatatatccttataataatccaagtgtagtgtggagcacattgaaaacattggaattcattactaccaaacgctgaagatttggagaaagaatttcctagaaaaccaaaggttagtaaattaataaccatgtaataaaatgtgtattaaaattatcaatctagctaatcattaatttatgtgtgttttgacagtaaaatccaggcccttggattcaatgacaagtttattaggacttgggagtactattttgattattgt

SEQ ID NO: 170991 - DNA, 563 bp, Cannabis sativa
aaaaaattgcacttgtcttggggagaaattttggagttgaaacttttaaggcgcaagttgaatcgcgttaattggattaatattgagggagttatgaccattttaatgaaggttgtttaggacccaacgccctggttgacacctagcgcccaggttgacattctgacgtctacctgaacaccgagtaggtgaaaaaacgtctcaaacttgtattttttgatgcctaagtgatatgttgacatcactttgttaatttcttagttttgaggaagttgttcaccaattctaagagattctgtttttttgtgaaattgggtagactcaaaacttcatgattttgttgatattccactttgttgatagagtgaaatatcaaagtgtgaatttgacttgtcacaagtcgtagctctcatttactataaaaaacaattagatgcttaagacggaattgaaatcatataagcagagcccagcgcaccatgccatacatcaacctgggcgctgggtgctctttggggtgcttcctgagttcttggggcttgttttgatacttctatggcatt

SEQ ID NO: 170992 - DNA, 1077 bp, Cannabis sativa
ttatcattaattgccagtatccccaaaatgaaaaataacaatttaatactagtaaaaaggaatagtaatgtgaaacattacttgtttgttttgaagatttaatatgataatatttttcctttagtaatataattacacttaaaaaaagtaatattgataccttaaaaagggtaaaattggattattcccttccattatattaatttgaataaacaaataaatttaaataccattaatattttgatttattataaaaaaaaatatgacgatatatatttagtctgtaagatcgattttatatttttaactaagttatttctatgttattagtaataatatatatatatgcattatactaaattttgtacaaatggtgtacataaatgacataacgaataaaaaaataatatagtgataaaatatataaaaatattcattttaattaataataaatacaataaaatttaatatttactaattaataaatgtattgctttaatgaataattttttttatttttatgtgtaattaacattaaacaaatataataaaaaaaatatttttatttttattttttaaaataatacataaaattcgtgtactcaaccaaatattataatttaattaacggggatatgattacatattatcttatacaactaaacacaatttacacatttcttacaatcatattctccttcataatatttcctataatcaaattattttgaatatttcattccaaacgccgttttatagaagtttggaaaagcatatcatttttattttatgtgaatttcttttttctttttgaaagcactattattattttaattgtacacttgtcatttccttaactaaggttcttttttttcttaatttttcttacagtaacatttgcacgtgtcaaaatttttaatccctataaatgttatatactattttaggaaaaataatacaatttagattaagggttcttttcaatattatacttaaaattgattttatttataaaaatacctttaagaaaattatttgcacaaataccgattgccacgtcagcataaataccgaaat

SEQ ID NO: 170993 - DNA, 537 bp, Cannabis sativa
agcccaaaacaagttgctgatttttgaccaataaccctttgcaatgtcagttataaaataattgcgaagtgccttgccaatcgaatgaaggacagtctaaaagaagtcatatctgaaaaccaaagtgcatttatccggggtcatctaattcaggataatgctatcttgggttttgaaagtctccagtgcatgaaaaaaggtagatttgggactggaaaaaagatggccctcaaactggatatgtcaaaagcgtatgatagagtgggttggtggttccttgaagcaatgatgatttgtttgggttatgaccaacattgggtgaacaaagttatgaattgcatcacttcggtctccttctcagtccttattaatggtgaagtctgcggccaaattcagcctaactgcgggattcgtcaaggagacccactctcgccttacatgttccttctttgttcggaaggcctttcttgccttatccaagaagcggagagggctgataggattcacgagctcaagtttggaaaagagggtataaaa

SEQ ID NO: 170994 - DNA, 618 bp, Cannabis sativa
agaatgtcccaagtgagcatcaaagaaagatgtggttgagaaatatcgatgcttgagtaatcggctcaacaaggaattcggcatttcaaaaattctccaggcttgttttgccaatagcgcttggttgaaatggacaaaagatcgaaaacccatacctccttcgtgtttggatttgcataaagagttccaccttttccaatggattttagttccattttgatttgtgccccaccaaaaattggccatcatactttccaattggctgcaaaatttcttggtaagtttaaaacaacttatagcgtaggtaggaatcgattgaaccacagctttgagcaacacttctttgccccctaccgaaaatattttttcattccatgcatgaagaagtttccaaaccctctctttgatatggctgaatagttcttgcttatctctaccagaataagatgacaatcccaagtaccgttcatgacattctgtgataggcatattcaacgtttgagcaaagaaattttgggtcacatcagctgtgtttggagagaaggacatcacggatttgttattgtttaacatctgacctgatgcatgctgatgttggaagttattttaccaggaact

SEQ ID NO: 170995 - DNA, 1214 bp, Cannabis sativa
tcttctcggatctttaccacttctggatcaattgactgagcagctttaattttgtctaacaaatttgattgcaatgtcaaattattaagttttccactacaaactcaataccagatctgaccaaatcatctactaggtgaggtgaaatctagatcatactagtcacttgcacgggaccctttctactaagggcatcagccaccacattggcctttccgggatggtaaaggattcacatttgtaatccttaaccaactccaaccaacgtctctgcctcatattcaaatctttctaggtaaagaaatatttgaggtttttgtgatcggtataaatttcacacttctctccgtagagataatgccaccaaatctttaaagcaaaaactattgcggcaagttctagatcgtgagttgggtatcactattcatattcctttaactaacgggagacataagggattactcgatcggcctgcatcaaaacacagcccagaccctgtctggatgcatcatagtaaaccatgaacttctctttatcagatggtagggctcataccgaagctgtgattaatctctatttctaatcctaaaaactttcttcacacttatctgtccacaggaactgctgattctttttagtgagttcggttaagggtgttgagatcttagaaaatccctcaacaaattgacattaataaccagccaaaccaaaaaaacttctgacttctgtaactgcctttggtcttggccaatctttgacagattcatttctcccttgctccaccttgattccatccttactgacaatgtgtctaagaaaggacacatgagatagctaaaactcacactttttgaacttggcatacaatttatgttctcgtaatcgctgcagaaccatctggagatgtttttcatattctgcttttgaatgagagtacacaaggatgtcgtcgataaatataataacacagatatcaaggaaattcttgaataccctattcatcagatccataaaagctgttggagcgttggttagtccaaaaggcataactagaaactcatagtgcccatacctagtacagaaagcaatctttggaatgcctcctctcagattctcaactgatgatagcccgatcagagatcaatcttagagaagattttcttcccctgaagctgatcgaacaggtcgttgatcctaggtaagggatatttatt

SEQ ID NO: 170996 - DNA, 1254 bp, Cannabis sativa
gtagcatttgataccattatattatttttagattttttttactgaaaaaaaaaataatattctcgccataccatgacatgaatccatccattcctgaactggaccatgaatccagacctgcggatccccgatttgaacctagacctagactcgaacttaaaccttaacccaaatctggatccgaaccctgaaccctgaaatacgaacccaaacctagacccgactcgaaccctggaccccaggctcaaaacccagacctgagctaggccctaggtcggggttcgaggttcgcgtcctggttcgagtcaagctagggtctgggttgagattcggggttcagggtctaagtccggtgtccaggatccgagtcaaattccaatgcgagtctagggtccgagtctaggtctagagtccgagtttcatggtctagttatgtgagcaaaaatataaaatgtaatatgttagaaaaaaaaatatttttaaaaattaaaaattacattttgatgttttccattttttaattttttaaaactcaagtgtatttttaaaaaatttgaccaagccgcccctattagtttttaaaagttatttttttctgtttttaaaaattaaaaacagtttctaagttatgaagctaaataacccctaagtttctttcatttatttattttatttttttgaaaaaatcatgcaattcaatcaactaaaataatagcatgaagtccaatcgaaacataaaaaacataaaaaatacaatcagatgaagaaaaaaaattcagcatcacagttaaccttaagaacatccaatattaagtttcatctatcgcttagaagtcacaacagtaggaactgttacaataagttcattcaaccttgtagcttgagcacccaactattgtgcaaagtacgtagctatactattaacaactccctccagtcgcaaacaacttgttattcctaatcactaacaacgatttgatcgaagaacaaaaaaaactaacaacaaaacaaaaccatatcacacagacaaaactaaaacattcataaccatgccacaaaacataataaactagagtaaatgtcattttagatcctgtgttttacaaaaattatcaattgaaccatctattttgttaaataacaaaatgaaccatatcttttctaaaattgtataattaggaacctaaactaattttttgttaaaataaaacttaataataatctaatctagagatgttatgacaaaattgatta

SEQ ID NO: 170997 - DNA, 1055 bp, Cannabis sativa
  modified_base (56)..(56): a, c, t, g, unknown or other
  modified_base (355)..(355): a, c, t, g, unknown or other
  modified_base (454)..(464): a, c, t, g, unknown or other
cccctaatcactttagaataactaccaaacagcaaacttaagttaacagttctagnttttcttaagttcatgatcaagacatccttgaatctagtattgatgtacactaagtatatgtccattccatcattctgaggttttcctatctctagggtatttctctagaaggacttaggcagctgctagtaactaatcatagacctcacattttcatcaatatgtgactctaaaattctggaaaggtaagtttggatacaattcgaagttcaatttaatgatcattgaactgcataacgaaatatttctccactcctattagttcacaagatctttgaccacttaccttaatggtttnaccatttctagaaattcatgaaatttctcaaatatttcaaatttctttgcataaggtatattctagagagatcgtctaagaatttaacgataactcatnnnnnnnnnnnaatgtacatccatatgttcaaatacagatgatcctacttccaagtggatattggcatgtttttatctttgcacataatgatcttgtcaaaattactatgaacaaattgaaattccatagatgtattattgtggttgtggtctctgatgattcgaaggttttgttacaacaaagagttcttagaataattcaagtggattctggtcacagaatataaaactcataatcaatacatttaaaatacagtttggatcgattcatagaaaatagatattaaaaaattgtaaaagttatactgtattgtctaatgtatttaggaaactgaaatttaaaatttttatttggcgtcaaaaatttaaagtcaaggacttaaatttatactaaatatttcttgagtaattattctagcttagaattcttttaattacttattcaactctaggtttaaatagctttactaagcatatataagaaggagatgtttctaagatagaggaataatatcattacgggatagaatatctagaatatagtcatctgcgtcactcatctttataaaagaaaatagatcgagtgacatcataagcagatg

SEQ ID NO: 170998 - DNA, 754 bp, Cannabis sativa
aataagttagtgctaggacattaattattactaagtgctcaacttgaaaaaaatatatatataaaaatttatatattcttacttccaaatccattattaataaattaacaacatgttgaagttgctcaactcattaaataatttcaatatacatatataaatataaatatttaataataataataaatgttttcacgaagatcgtcatttatttggtcaaaatattgaagatgagctcaccaatttttatttaaaaaagactagtacataataaatacaaagtacttttcttgcactaattaaaaattttatcttttaaattatatttttcaaattttttaacattaaaaattttgagattgttggattaaaaaatttaaaaatataatttatcacatgttaaaatttcgaaaaataaaaattcttatgaagtttttctatattagatattatttctacaatatgttttttctattttattttttaagaatattgtgtctctaattaattagtgctaaacgtcattgcctagttaatggaggccgttttagtcaaatgccacaaagtctttggaattataattttgtctttacttataaacttaattattttcttcaaaaaaaaaaaaaaaaacttaattatcatatggaaagacagccaccctttcttttcttttttactcaataatttataaatatatttatagaaataaataaaatatttctatatattaatatttcatatggaattatat

SEQ ID NO: 170999 - DNA, 512 bp, Cannabis sativa
acacaaccattctttctaggagtccaaatcttattctctctatcccaaacaaaatatttaggaaattctctatatagcatttttttggcttctttgattgtagaattcattctaaaaaactctgtaagcattgatcttgtaaaaatatctttgtcaataattttggagggattgtctttttttctgtaagtaatcatttgggtgtctttaagatgcagttgcaatgatatcacagatggataaatctcaatcaaaataaatccatatattctccatattgcttcaagaggagaaatccatctagcagactggtagattgtaatctcatcaataatttccaacttattattacaagcaacagcaaaattaactcgatcatgacctttgtaaacatatttgtataaatatttcacagctttgattgttgagcaaatttccacattaatatgacaattaaatttagctagtaaataaggatcgtatggaacaacccatctattgtctaaccaatg

SEQ ID NO: 171000 - DNA, 605 bp, Cannabis sativa
agagaccaatgccacctccctaatagaagcgactattaccagcgacggtggagaacttgaggcgtctcgaattggagaatttgaggcgtctcgaattggagaattaaacttccaagatcgtcgccttctatttttcgtctcaacgcttccaagtatcactctcaaggttcattcacacgtactctctaattctagcttcttaatgtggttgatttttgaaaattagcgatttactttttacagacattagttttctttttctaatcataattgtatcaatttcgtgattgattgatgtggcaaagttttctgatttggcattgcttcttattgatgaaaattatgttttagaaatcttcaattaaataactcagttattttgcaagtttttgtttctagattgattaattttacagtatattatatattgtttatatttatactaagtgaatcatcttagattatttatctgataatgaatttatttgattgtttctcttgatgctaaatagtcaaaagtaagatatttggtaaaaagtatcattattacttcaatttggtttggtgaaaactcttttattggctcatatcgttttacatctctt

SEQ ID NO: 171001 - DNA, 625 bp, Cannabis sativa
cctcttggaagattcatgagcttaaactttcgctgctgcccggcttgtgtgacgtctgatgagactcatcagcatgttatctttgattgtgttagaatttgatgataagaagaatggggttccatctcaaaaccaattggcaataggaggagtagcccattcatcttatatatcacaatttatttccatacattagcaatgtagaactaactcttaatacaccctcctcacgtttgggccttgaaagtgtgggtataacgaacgacctttaagagaccacaggaccgaacatggcatttgaaagcatcccacaaggccaaatatcgggaaatttgtgggtgtacacgttggaaaatttgtggattttgaaacaggtcaaagacctcaactctataatttgacacacattggccgaaaggtccaaatagaggttaaaggggagatagcagatcacaagtggctctgataccatgttagaatttgaggataagaagaatttggctccatgtcaaaaccaattggcaatgggaggagcagcccattcatattatatatcacaatttattttcacacattagcaatgtaggactaactcttaatagattgtgtttacacaaaaatggtg

SEQ ID NO: 171002 - DNA, 612 bp, Cannabis sativa
ccatttctttatctctccattcagtcaacatatgcctttgttcatcgaatgcgagatttactacaggacgcacagagattttgtaattgagtggcgtctccaatggtcgtctgggcgttggttccaggcagaacagtcgtattatggatgccctagttgggtgcggaactgttattccaagtctcttacacacaaggcgcaattccattaataggaactgtttcaccattccccacgcttcctggctgtaccggtttaacagcaggtggaacccttgaactccctgggttctacgatgtaggatccagcgtctgtgaatttgctggatcagttagacctctacgagtttgcaccattgtattagttgttggatgttgagcgattcatgatcctccacacaacgaaagcaccaaaatgttgacttctcttttagccaacgacaatgagtccattttataagcgataaacgatatatagtaatagatatatgataaagcaataataagacacagggattttatagaggtttagctccgagacgttcgttaatagcctaatcctcgttccttgtattgacttaagatcaaggagaaagatgttgggttttatgcc

SEQ ID NO: 171003 - DNA, 802 bp, Cannabis sativa
  modified_base (666)..(668): a, c, t, g, unknown or other
ttgaaatgagtgccatgactattacaagaactaaatgcaagaaattcgagaaagcagtgatatacgtataacccagttgcaggcaaagggagagattgtgaagcaaatccttggcctccgccatgtgaggctcaagagaccccacactcaaaaatgcattggagaagaaaacatgcttattaggactagacgccacaacccccatccccattttgcaatcatcaatatgaatcccagcatccacaaataagttcacctcacctaaaacaagatctatttcggtggacatacctatcgtcccttgtgcaggaagagtatcatgggacgaaagcccacccctgttagcctcctaatatctccaaaggtaattaacacccaagaactgaccatatcatcagctagaagtttgtggtcatgaacaaaagtattacgcttgtgccaaattcatcaactaagggtaatgaactcctccaattcttatttactcaaaatatccaaatagttttttttttatttcttaatcaatatttttgattctgaccagacctggaccccgatccctgagactgggactcaaacccaaaccccgaacccgaactcagaccccggccccaaacccggacctagacctggatgttgggatttattttaccaagatctagattnnntaacatgtatgtttcattaacaccctaaatatgaattctttaatatgatgaaattaaacacataagagtttagaaaatcttacactgatgcagcgaaacaataatgacttctttcgctcagatctctaaccctt

SEQ ID NO: 171004 - DNA, 631 bp, Cannabis sativa
actcagcaagatcgttccacattttagtagccaaatcgaagtacattatgctttgtgcaatctcagaagaaacagaattaatcaaccaagacatgaccatattgttacaccttaaccaagaattgagatagatgttaccaggttctgggcgaggaagagatccattgataaatgcgatcttgttcatggcagtgagcgccatggcgattcctcgtttccagggttggtaattggtgtcgttgaggacagtggagacaagcaccaggccgggatgatcgccgttgctgaggtagaaagggttggagtgatcatcagcgaccgatcgagaagtaagggcttggttagtgttgtcgtcaacaatggtggaacgagcttggggaaatgggtttgtagtctgagatggaaccctaatttgtggattacgggtggaatttgcttgaggatttggagctggtataggatcggaagtgacctctgcagcttggttgtcgatcgacgatggaggagcgccatcttgggatctagttgaaggcctggccattgaagcggtgggcagtatgtcgtctgataccatatgagaagaaacaaagaaagaacagagaaaaccagagcaattgtattattacagttc

SEQ ID NO: 171005 - DNA, 738 bp, Cannabis sativa
gttagcaggattaagaatagctgaggcactgaaagtcaagaacattaagtgcttcaatgattcacagttaatagtagatcaagtctcgggagagtaccaagcaaatggccatgaagatggcctaatatttagagaaagtttggaggaacttggaaaagttcgattttttcaaaatagaacatattccaagagaacaaaactctaatgtagatgccttagtgaaactggcatctcaatttgatcttgacaagttgaacttagtcctagtagaggtactggacgagccaagtatatgtgaaaggaaagatgttgacatgatagatacaaggcctacatagatgacaccaatcgtcaagtatctattaaatgcaaaacttcctacagattagaatgaggcacgaaagctcttatattttattcctcactatacaatggtcgaaggaaaattgtacaaaagaggatattgtatacctctattgcgatgtgtgttaccaacagaagctaatgaaataatcagagaaattcatgaaggtaggtttctgtggagatcatgcaggttggaaaggcttgtctaaaaagataatccgtcaaggataatactggccaactattaataaagacaaacacaaatttgttaagagatacgacaagggccaacaactctctcatatacctcgagtaccacccaccgagttaagaatgatgacctcgccatatccatttgcaatatgggggatt

SEQ ID NO: 171006 - DNA, 660 bp, Cannabis sativa
tgaaaattaattaaaaaattggataagagtaattaattaatgtattagtgatgaagattatgatgatgatggtagctatagctagctagctaggatatatctatatatatatagctgtacttaattatgtggtttaattgtctgctatgttatatatatatacatgtattatatatagaagctttacagcttagtaaagtgttataataattaaagtccgaacatatataatgtatgattatatgtgttttgggttgtagagtgagatcaataatcttgttaattcagttggtcagatgattaattaatcaaaagttagttcctttacaaactgtcctggtagtatatatatatatatatcatgtattattataatgtatatataaatatgaaggtgtgtaactatatataatggaattgaaatatctatatatgcgtacgtgcgtgggagttataattattgtgatgagtacttctgcttgtgttatcatcattatcattagttacttatccaaaaaaaaaaatctccaattacataattattttgtaattatttgattaaacaaacaaactaacagtacttcaaattttataactactctaaattacattcaattttaattaccgattgccttttttcaaacaaactcactaattact

SEQ ID NO: 171007 - DNA, 806 bp, Cannabis sativa
ctttcaaaatgaccgttaggttggttaacaatgataatgaaagaagaagagcaaaagaaaaaaaaaataagtggggattctgctgggttagttagtcaatgtggtgggaccaagttagatttagaaattggaatgggcaggctctcaatactttattatttcacatgactcttttcttagatattggtacacaagaaaactattaacatgggagaaaaggcacaagaaaacccaacaaatgaaacaatatagcaatatcattaatgacttaagatccttatgttcaagtagaagaagataagttgtcaaaagaaaaggtatagaagaagagataacattaaagaaaaatattatattttttgaaaacaaaaccgatcagtaaaagaaatatttatatgaaatgaaatcgtcaatatgctgtcattcatgatcaaatgcaatgtacaaaaatgtcattgtgttaagggtcctaaggctactaacagttagttagtcagttatttctgttactggagtttagttctggttgtaacaacttttctgttgcttttcttgtttgcacgtggtgcattcctttgtatataagacatggccgaccagagggtggggcagccggggtcgaggccccaggccccataattttggaggtcccgaaaaattaaaattaatattatatacataaaaataaaaatacaatatatgtatacatttcaatgcattacctaaaatgcaaatatctattataatactaataaataaatcaaatgattgcaattaataaagttgatgatctttcttaaaaaaaa

SEQ ID NO: 171008 - DNA, 1063 bp, Cannabis sativa
tcattatttgttagcaaataggtctaaacatacctactatagtcatcaactattgaaagaaaatattacttaccgaagtgagtaggcaccttgtatggcccccaaagatcagcatgcacatattcgagtatattcttagttgtgtgccttgccggagtgaacttcagcttatgttgtttctctaaaatacaagcttcacaaaatggtaaggaaaaagaatttaaattttcaactataccttatttgtgcagttctttgaggccttgttcactgatatgtccaagtcagtgatgccacagttgcatacccaattctagccctttcaccatgcttgcttctacgattgggatagtttctccttggagaacatataaatcattgatcttttcacctttcatcactaccaaagaacctttggtgatcctaaagttttcgtacatggacttgtatctgtatccttcatcttcaagcacacccagagatatgaggtttcgtctaagttccaggatgtgccttatgttcgttagcaccttgattttgccatcatattgtttgatggcaacctttccaattccaatgaccctgcatgaatgatcatttcctattagaactttacttccatcaactaatttataatcaaaaaatgattcttgacttggacacatgtgataagtgcatccggagtcgagaatccactccttgttcattgaggactccaagctggagaatcattctccatccatggagcagacatcattatccttcgtaattgcagcagaatccttcccgtggtgatgatgtcggttgtccttcctatctccattgtgagatttgttgaagccttgttgctccttgtacttcttacaaaatctttgtaagtgtccaaaccttctacagaagtaacatttttgagtttccgtctctctggaatttgatcttgattgagagtgatggtgtttactcttcgaacttactttctcaggtgatctttatctttccagatacacttcttttttcttggattccttctccaattgtagcttaaaatctttcgacttacgtg

SEQ ID NO: 171009 - DNA, 658 bp, Cannabis sativa
tactctataaaaaatattctaacagatccttttattaggacactaaaaaactaaaccgcgcttcgcgcagtgttatccaacttttttaatcttttatttacatattttttatatttattaagtgatataatctaaaatataacattttgatgtgtgtattacaaacaaagtaatattattgaaattagacacataattttctatttttatgatatatatagaaagatgacaatttgtggcaaatattaaaaactgtggaactaaaaaaaaaattacatgtgtatttttaataaaataaatgaaaaaaaaaaagaataagatttctaaatttgatagaataggcttgtgattgatgatgtagttatttttaagagactatttagactctttttttctttattagaaagaaacaatttaacaaatattatgaaaaaatttacatttgattttgtggtattggtggaataggaatgtcatctctccccaaaagtgaatttggcatgacaactataaataaataaatagactaattaagtaagacactttttttaatattaagattttgacaaaataataaataaatttttttaactaattaagtaagattagattaaataataaaaatattttattcaaccaccacataaagttaaaaaaa

SEQ ID NO: 171010 - DNA, 1051 bp, Cannabis sativa
tctaggccctggaacccaaacctagataaaaattcgggactcgaacccaaactaggactagtcctagacctgtgaatccaaagtcaggcctagacccggacccgaaacctaccctgcacccaaataaggaaggaacctggacatgaacccataccaagaccaaacctgaaccgagactcgaacccaaaatcagacccaaactccggacccgaactcagacccatatccagaatcagacccaaacctaggcgtgcgcccggacacgaactcgaacccaaacagggatcaaaacccaggacttagactcgaaactaaattgggacacagattgagatcgaaacctaggactcggacttgaacctagacctagacctaggaccctaacccacacccaaagactgatccgaacgtagaccgagatccggacccaaacccaaactcggacttggactcgaacccccacccgactcgattccaaactcaaactcctaatcgcaattggaactggaactagactaggactatgactaggaccaggactaggacccagactggaacccaaacccaaactgagacccaaacccaaaccctgactaggacccaaacctagacaaaaaccgggacctagatccagaatcaggacaaggacctgggcaacggaactaggactgggacccaagacccgaccccagaccaggacatgaacctaggacccagctcgtgacccggcacccgaaaaggaaccagaccagcacctgagatcgagatccagatcaggacccaaggcttggaccgaacccaaagtcggtgtttagatttgggacccagcccccgaaccgaatccaaagcaggacccgaacccgaacccagtcccagacccaaacttggacccgaattcataccctgtcatctgaaattggaaccaaaactagaagtagagcaggacccgagaaatggactgaaacaaggacttgtacctggacttggaaccgtaatcggacgtggacctaaactcagaactataaccagactaggacctaaactccaccct

SEQ ID NO: 171011 - DNA, 516 bp, Cannabis sativa
aaccataggaacaagcaaatttttcaaaataacaaaactgccctgaagaattggattccgtgggctgtggattatgttgctcatgccctggagaggaagcacatgaaactgaatgtgaagacggagaaggagaggaagacttggcaggctcccccgactggtgcttaccttctgaactgtgatgcagccttgaagaaagagcaaaatggttatgctacagctgctgtcatcagggacgagaagggtcacttgatagctgctgaagcctgttttcaactaggttgtgttaatgttttgatgccagagtgcttagccatcaagctgggagtgaggcttgttcaatgtatgaattctaaacctttcatagtcaatttggacaaccaatctgcagttaaccagattctttctaaaagagctcctagagccgattggggtcaacctattcaggaaattttgtcatctaatcttctcaatgggtgtatgggaattcggtttgtcaatagggactgtaataag

SEQ ID NO: 171012 - DNA, 579 bp, Cannabis sativa
tattttatttttcttaaaattattctccaagcgttatatcctaagttaaattcaaaagatagttgtgccaagtggagcttttataatcaatttttatgaatgatagaacttaatacacatattttaatataatattctgtagaagaacaaaccagtagagcaacaagaaagattagaaagcaaagaaagaaagaaaaagctaaatagcagtagagagaattttagacatagtccaataaaaaataatctcattaattacaagaatgagttagctcatcctttatatacacaaagaaaacacgaaaaaagatcaacagcaaacaatagaaaagaaccaactacttactaactaaccacctaaactaacttaacaaacttaagagacatcactcaaaatcccccctcaaacgaaaaggtgtatcagacatcttgactttgtggcatgtttggtttgttatcatgggaatgataatgaaatcaaattatccattacaatgtttgttttgcttttaaaggtgatgtaatgggattacattgtaaacataattacattaaacaaggaaatccccattacattag

SEQ ID NO: 171013 - DNA, 681 bp, Cannabis sativa
taaatattctcctgtaccagtttatcttgtacattttctgtctgtttttaactcaaatatcctaactgaaacttgtatattgatatttgcagttgaaaattttcagattttgatttgtagctcacttttctgatgagtggcagtagcagctgatcagttggctaggttggaagatattatagatgcaaagaagatagatacactttacaaagattttgaacataaacatgactaataatttttgttctcccctcgaagatcagagaggaaaacatgaatttctgattgaggtgattatttgtaacttcaattttttttttctttggtcttggagtttcattttcttatgtttcttccgttatatatttttttttcatgactcttgaaatgttcccttcattggatctgaaagttataaactggcacatttttcattctcttctcagtccagatatatagtttttttcttatttcttgaagctcatattaaaacagaacataatgctttatatatattcttcagagcttattttttctggcatttgtctttgtattattacagatgactggtcacttggctacacttcaatttctggaggggaagacttttgcattgggggtcatcgcttgaatgtcgttttttctccgaatggaactctgctacaattgtgagtattggcc

SEQ ID NO: 171014 - DNA, 939 bp, Cannabis sativa
  modified_base (884)..(885): a, c, t, g, unknown or other
gtaagataaattccaacattttaggctttctttcttctatggccagaatcacttcttcttgttcgtgctgttctgtttgggtgtacttctcccgagctttgcccgaatctccaactatgtgtgggcctccaacaatgacttggagatgcccatctactggtggaggtagcaagtcttagctataatcacctctctgattttgatcggccttgacatacttctgtaaatgcgggttatttttccttatcaggaattaaatttccctcttcagattgttgcattcattggtgtcgtggtcgtagtctccatgaaatcgacaaaacttggtcatgtctctcttgctaacatcttttttcatgggcgtgggctttttgtacggggctaatgactgagtggccatgtaacactttctatatcctcagtcaaaatggtaaacgcagtgtacttggcttgattctccaggggagcttgttcgtcctttttcccattcccttgcctattattgttgctggaacatttaccatttgaacttgaattgctcgagtaatggggtagttgggcggatgttccagtggaaggagcttttggctaggttgctcaccttctgctcgttgaataacttcttcaagtttgattaagcctttagcacggtcgagaaaatcgctcattgagtctaccggaccgtttttccttacgtctttccaaagttcaccaaggacttcaatgccccccagtatcgtggacaactttccgtcttcagttacttgtgaaaccttggtcgcctccgtcatgaatttattgatgtaggctcggagaggctcgaatggtctttgcttgacttcgatcaggtctcctaggtgcaacggaagttggcgagaggaggnnaattgtgcatggaactctgaggagaaagcttcccatgagttgaattttctgttg

SEQ ID NO: 171015 - DNA, 545 bp, Cannabis sativa
taaaatctgatgccttttacaatagatttgggtcctttttatagtgcaaatttgctcctcaaatatggtattttcatgtaccatttagtgggataaatggcacaaaaagctgaacacaatggagaaaatgggaccatgcgtgtaaggaaatgttggagagaatgggggacgatgggacaggtggcgtgagctagttacttccgtcagatggaatgacgttggcaaagaaagagacacgttattgttgttgcattctttgtggtagtcatatgagatagtcaactaaaaacttagttgatatggactatttctccacattaggcattaactaatgggccttcaaaagataacgtgcaaacatccagcaccatcttttcatgtgaaatagatattgggcttttgatcaatcatccaattgggttgaggttctattataatactttgctcaaatctgaaaaataacacaaatttaaaataaattaaatatttccaactaaaataaatttattattaaaaccacagaatacttaatttatattaattat

SEQ ID NO: 171016 - DNA, 1408 bp, Cannabis sativa
aggagtgggaaggtatatatatggagaaagagaagagacgatttaaagatgactgattgagccggtggcactgaccggtcatagccgttacgttacgagtgaaaggattcttccaggcaaagggggcagttactactagcatacagctgtcaaactgacacgcgtttcttttgcttaacactcctttttataacatacacgtataataatacctcaacatataaattaattaattcaacttattaataaacatacaaataaaaaagctttgcctactgttccaactgtacgcatagtgatatccattgggcctaccctggacgatccaacgtactaaacttcatcacaggttaatgattggattattaaaaaatataaatatcaacgatgatcattaattgagctaatactccaaacaaacatttaaatgttattctattgtttccggtggaaattgctttttgagtgaaactttaacgaactttattatagcaaatattttaatggttaagaaaagccgttttagaagttaaaatcgatttgggtaaggtttgaaatttcaaaccaaacgtggtatttgttaggaaattggatgggggaggttataacttatataacttattgtacggttgagatggagggaaaatagaaatacattggatgagtggatgggagcggaggactttgaccaaaagccaggctggatagcatttgaaaggggaagaaggaaaaggatatttatttgtttttgcgtagtgggaaaaggacgcacggaagtgctgagctggtccactaaacgacaaaatagagtagcagaatcgggggacgaacggcactccaattctgtcagtacagcctgtaaaaaccgaaaaatgaaaacccaggcccacctcacacttgagtgccaatccttgacggcttactctccacctccacgtggcgctcacgctcccccatcctctcttgaactgccaaaaccgactccaccgtcttagacccacctatattaaccattttagtacctattccactgtcccatcctcacttttttttttttaaatttagcttaaccttttcccattttatcttcctatgatttacgtaatagttttttttttacattaatttttgttattgtactgtgtgctaatatataattataaattttaatacgaaatttaataataataatataaattatttaatataaaaaatttgttaattaaaattaataataaattattaaaacagtataatagtaaatataaaaatatagtatttattgtggtaattttatatcatgctacatttaaattattttttattatgtaactgttgactgaagttttcgacaactaataaaatattataaagttatagagctctaagaaaattagagaaggatttt

SEQ ID NO: 171017 - DNA, 809 bp, Cannabis sativa
ctgcactctttttcccttggcctagtttttgtcctattaggttttctggtgttgagaatcatgaggttccatgttaaaactaattggtggtaagtggagtagcccatgttcttatatattgctcaatactctaccatttattccatgtgggacaatgtccacaatattctccctcaagatggtggctttttttctcaccaatcttgaaccgtatcaaagtggacatgatcactatctgtatagatgcggattggataggatcacatgcccgcaagggatatggctctaataccatatggcaagatttttaatgagacaattattatggacatccaaggggaagtgttatgaaatattatatatatggatgtctatatcacccaaatcaattataccataaatattattgtatttccctttatttcattgatttagttttctattattctagtcatatttttatataaataggggttcaccccatcggaaaaactactgagaaattctcattcagattctttttctctctttttctttttcttcttttcatcttatctattttatattggcactgtttggcttagcttctataaacttttttatagcttttagaattaaaaaaaaaattcttatacaggtgtttggataaaaaaataaaaagtcatttttagaagaagctaggatttgtagcttcctccaaaataatttttaaaagttattttaaaaattaaaataatttacataatttctaatttactcacaatgatatctaaacattttgaaaaacactttttataaaaaaaaaaaaa

SEQ ID NO: 171018 - DNA, 736 bp, Cannabis sativa
aaaaatgtaaataacagtataaatatccaaagctattgcacattctttagctaaattggctctcactttaaatgattctcgagtcttgtggtcgggtcttctacctaacttactttagtttctcatgcttgtaatgactaatggtcgccggaactctttggatttatgtattttttttaatggaattattcatttttctcaaaaaaaaaaataataattagatttgaatggaaacatgaagtatcagtttcttccaattcttctattcaaaacaaaatatgtactgacaaaattaaacaaaaattacagttttacaaacattaaatacttatgtcgctgaaaaatatcaatgagtttatgtcgcttacaaactcaaaattttaggtacttatgccacaaaaaaaattgcatacaactcttacagcaaaaattgtagctgatgacaataaaggacttcttcataagattaagaaatatagggctcgtttgataggtcatattatattaaataatatttagaaaaggtccggggttgaggacttgaaccccggccccaaaccaagaactagaccccaagcccagacttgaacccaaccttagatcctaaccctggccctgacctcacatccaacactaggggtgttcattagatcatatcaaatgtttttaggtctattcaaatccgatctaattatatattggatgttagattttaccatccgatcaaatccaatca

SEQ ID NO: 171019 - DNA, 522 bp, Cannabis sativa
gttagactaaaaaagaaattataaccctccttcaatattgatcttttttctttttttttttcctttttgtttactttttctttttctgacattattatcttcttcatttattattattacttcttttatctttttctcttaatttattatttctctttgtttttttttttttacttttcctctaatatttacatatcgctcttacttaacactatctccgagaaaagacgatcaatattaaaagtaatttttttgttcctttttatattttataataaaaaataataaaatcttaagtttaataaattttaacatatcaagtaacatcataacttaccataaagtattctgttattttgtatttaaaagttatgatatagtataccaataacaaatttatttaatacaaaaatttgatatgttaataaaaaatttataaagttaccaaatagtatcttaaacataatagaattagttacattataaaattttatatatatgttaattttaaagttgactgat

SEQ ID NO: 171020 - DNA, 540 bp, Cannabis sativa
catgtttgatgaatattataaataaatttaaaaattattaccatatgggctccttgtactcaatttgtaacatgactataaaaaaaaccatctcttataattttttttaatttagtatatactaatatcattaattactataattcattcatccattcctttataatatagatgtatcaaaattatcaacctaatttatcatgatttataaattatcataacaattattaagttttgaatttacatctagcatattaaaatatatatgtatataaaaaaacaaaatacaacatattatgtgtgtgatctgttcgatgccacccgcaacctcctcgctcgaatgtcgcgttgtcaataccgctggatatcacgccgtttgaactccggagctcacaatcttgctgcttgggctgctgataatagtagcttcaagttcttttcttcaagggaagtggcaccctttgttgccactatgaaccatggctgttaagccttttgtttttcttcaataaagctttgttttcatcaaaaaaaaaaaaa

SEQ ID NO: 171021 - DNA, 578 bp, Cannabis sativa
ttaaaatactttaaggatttttttatttgaaataattgacaaagattaaaaaatacaaaaatatgtgtaaataaataataacaatcaactacatattttgatcactaatttgggaagattatgtttatcaatcacccacatataaaataaataatacgaattttgaataaacaataataaaatatatattttataagtttaacattcacattattctcatatcactaaaagtatatatgaaaaatatatagttaaggagttttattattcctaattctttttttgaaaggaaaagccttattattctaataaaatatgatattaataaattagtatagttttaattatttaaatacaaattaaaataaaaaattataaaaaaaatactttttataagagaaaaatatttaaatgattttttaataattatttttaacttgataaagattgaaagataaaaaaaaaatgtaatttgaattcaattttttattaaaaaattataactaattgggtaagattaagttcatcaatcacccatatagaaaataaattacactaactttgtgacaaaccaaaat

SEQ ID NO: 171022 - DNA, 555 bp, Cannabis sativa
ataatttttaaaattaaaaaaaatgcataaaaaataaaaactaaaactttaattaggtgtacgtgcaatacacgtaacaataacttagtagtgtggtaaaagtaaccacaccaactttatttttattttactatcagtcattaaattgaaatttcatttttaaaaattaatattttttaaattgacagttagttatagttaaattttaaaagtatacattaatagataaggcccattaataaataatctatatatatattatttgatcatttttatactacgacatgccattagtaatttacgaccaaacttcttgaattttgaagtttggtacaatcaatctcttagactgggaaatttaaggctatatattccaaccttcacaattatttttctctatacttcttccgtccatttagtctgttaagtgccaaagttgactgtcactgtctacattaaaaaaatatatcaaatatttcaaaatcaggaaaaaaaaataattttaaaaaaataattattttgttctcctttttctttttcctttctttccttttt

SEQ ID NO: 171023 - DNA, 599 bp, Cannabis sativa
acccaattgccattcgaatctttaggctttgaaatgaatttattttatcttctattagttgcaaaagcatgaaaaaatttattgttgttatcaccttcttgcaaccataattgcttcgatcgttgacgccaaaaaatctcacgttgggtataagcttcattcagattgttccttgccggtttataattttccaccgaggtatcatctctccccaacttccacctttccacttcatttttacattgttgattagctgaaaaatgagagctaagtggaatttttgggctgaagacaaatcaggcagacgaagcccagttgtgcctcaggcgcatgcgtgacacgccggaccatggcgccgtgtgttgcacacgcgcgtgggtcgggcttgggggaaaaggagcagttgctcctggtgtcttctgccgcacgaacccaaaggtgccacatgtcacctatgtcggctgggagaggattttgggctcatttggacttttgtcttttgtgatgttattggatataaaactaccaatttttatagtttttgggccacatttttgacaaatttttattctttttcttttacaaatgctattcttttc

SEQ ID NO: 171024 - DNA, 538 bp, Cannabis sativa
tggaaagagtgctttggtcatgatatttgtagtacaagaaaaatatcttttagctaccatgcttttagctaccaaattttattggtagcaaaatgtagcttattgctaccaaattttagtagtaaaatttcttagtagccaataccaaacaaataagaccaaatatttctactgccaaattatttagtaggcaattgtgatttttagctaccaataaattttggtagcaaaatttttgtgtttagctaccaatttaactaccatatttcttaatagcaaaagatctttgtattttttgctaccaattttactaccaattgtgtttagtagcaaaataatattttcagctactaatttttgctaccatatgcattttttagtagaaacatatttcttctcgcaatcaatactcagcaattattttttcttgtataaaaatattatttaccacttttgtattttatatttaataaaatataatattttgttacctactaattcatttattagagtaaaaatataattattatttataaaa

SEQ ID NO: 171025 - DNA, 964 bp, Cannabis sativa
tgagagaaaaagagagacgattgatagagagatgcggtgatgggcgtcgccagagatgggacttttagtgcacaaaaacagagagagggagagacgggcatcaaaagagggtcagggtgttagggttctcggactagaggaaggtgacatcgccggggttctcgaactggaggaagaagatggtcgtcgggattctcaggctggagggggcttggggttcggactggagtggggttcggactggagggggcttgaggttcttgatcgaacgaagtagagagggagagagagtgtactggtaggttagaagttttagggttttgatttaggaagagatgaatttatactcttatcttattttcttttttaattattttttttgaatataataacttttttaattattttttaatataaatatttatttatatggaaattaatttttttagtaccatatttttgctatttttatagtgacgcgcaaaatgtgtatggatatatgtatacctacactcatagcgcgtcactatatcttaatattaaaattaattatttttaataaatttaaatgtatgatatagtgacacgctaagcaagttgccacatgcttctccaatcactcttggcatgactctataggttagcttttttaataaaaaataaatcaaaaaaatatggatattactttttagtgacacttcaaatttttagtgacccacattataggagactaatatttaaaatttagagcctaattgtgtgtgtcactaaaaattactcctaactatttagtgacatgcacttttgtgcgagtcactatatagtgtcactaaaaggccaaattgttgtagtgttctagcggttctacagtaagggtaattatgaatcatctcttcatattctaccctactcccaaccgttagatttcctaatccttggacttcttgtcactggactttgtgta

SEQ ID NO: 171026 - DNA, 694 bp, Cannabis sativa
aatcatgtaatcactatggattgcgattaataaagatgatgaattatttcaaaaaaaaaaatcaaaaaagataaagttttaataattagataaataaaatatttagtgtgattttatattatagataaataaataaatctgagatttgatattttattctcattttcattaatttatattttttttggaaattacattgtatacccattttattatatttatttttatttttaccttcattttcatattctttaaaatataaatgatgtttctattatacctcttaaattaatataaataggcaactcacttataagagtgagtagattttaatgatatataatatgagggtattattaattaatagataaaaaaagggaaacttacaaaaatattagaatttgagttaacttttacaaaaatactgtcacacgaaaatcttttcaaaaatactgtatttttataaaacaccagtaaaacacaaaacagaacaattaaaaacaatagtgtaacaattaaaaaataacagtgaaaacttaacacagcacacagtataaaaattacatggtatttttgaaaaaagttctgctaagtgaaaaagttggaaatttgtattcatcaacttattctaaattttttgggataagttaaaaaatacctcttttttttgtatctattaaataaaaataccatt

SEQ ID NO: 171027 - DNA, 896 bp, Cannabis sativa
ctctattcggaactacgagatcaccctaagaatgctttcagcatccaagaccgacaataaaatcttgttcaataagtgaaatgctttagttgtttgctttcaaattgaaccgtaaaagttggagaaaagaaattagagtcctataaagaagagttgagtaatttgtggcataaatatctaagtttaacttccagttacaaataaataactaagtttaatttttagcagtaataatacctaagttataattctagaacttttgtaggtacctgactattaattgttaagtaaattgcgacgtgataatttctaattggtcaagtcattaaatttttatttttttaaaaaaataattaaaatataccaataaaaaaatgacatgtagataatgatataatattttaacggttaggtacctacagagttccaaaaatataactaaggtattattaacgtcaaaaattaaacttaagtatttatttacaactagagttaaacttaggtatttatgccgtaaattactcaaaagagttcttgattattttgtagctagagattccaaaaccacaaaaatacaccacatttcacttttttattttagttttcttatattataagctctaaccacaactcattcattgattcttcgtgactcaaatggtgatatccttgctgctatggttaaaccaatgaaagggtgtgttaaaacagaggaaatggaggctttagcaatcgcatggggtctcaaattgctactgacactcagactcagtgttgattttgttgagacagattctttaatggttgtaactggtttaaaatctcaatttaagggtctctctgctttttatgttttacttaatgatattacatttctgttatccaatttcccacga

SEQ ID NO: 171028 - DNA, 578 bp, Cannabis sativa
ccaaaagattacaatgcaccaatttttcctctgattcaacattcgtcgacctaaaaaactcaggcagtgtataattcaccaattcagagaccggcagtagcaacaaaacaagatcagcaccgaaaaaacacaaaagctccacttacatcagtaaatgaaaacataaactcaaagcaccaatcaacttggacacacagatttcaatcaacaattaagccaaatttcgatcgttcctgtcaacaccgatcataagaaatacatgtacatttatatataatgctatatacataatatatatatatatatatatataaatttgaaagaaaaaaaaatacactgaatatgtgcatttgcaatttaatcttaaaaaatatatatatataaaataaatttcataccaaaactatatcatcttgcattccttcataatgaaatgctgttaattaaatctacattgagactatgaattttcacaaacaaaatacaaatataaactgaaaatgaaatattatgatacttttaattttagacatacacactagaaatgaaaaaattactgaataatatgaatctaaaac

SEQ ID NO: 171029 - DNA, 739 bp, Cannabis sativa
tataaagactttaataatttataatgtgtttagatggcaacttttgggaggtttgggaaaatttgaagttgaattacgtaaagctgaatataatattcttgtatcatgagcagaactttcccacccgacttatgcatatataaattgcatatcaaaattacatattgccatgacattttgagtcggtaccccttttctaccaacaaatggtacttgaacttcatgtagatttaagacattcacatgtacaccgtctattgcaccaatacagttctagaaaaagaatactggattataaagttatactctagctaaagaaaaaattattaaaaaaatatataattttaaagtatgacttaccttaaaatgaggcatatatctagaatctttcaatgtctcttcaagaacatctataaattctaggtctggtggttttaatacatctaaactcatatgacataaaacatctaaaaccttattgaaatatcgactaactgtctcgcctgagtgctagaatcgctcttgtgttaaccggtttccagcaccgtgacctaatgtaaataaaaacatgcctaatatttcaagagcacacatcttctttgaactttcaaatccataattagcttccaattcattacataatttaatgaaaacatctttctccatcctaaacattctataacatctactttcatttccttgtaatatttccatcaaccacatatgaccagtttgagaa

SEQ ID NO: 171030 - DNA, 561 bp, Cannabis sativa
accggctcttccgatcttgagtaccttttggtaaaatattaaaatggtcaaatattatttttaccttttataatttttttttttcaattttattgtgttctattttttttaattagaattacagtagatctatctaagatttgggaccaagcaaattatattctaattgagaagttataactaaataaaagttacactagaaaaaaaattaaaatataaaaaaatataaatgtaacaataataacaataaacacttattaatactatttcataatagaattattttttttagagtaaatataatgttcatgtattataatttgaaataaaattattaattttacgtaaataaatttacaaaatatatgcatatattttattaagatgtaattatactttattaatacaggacttaaaaaatgtacaactttagaggttattcttatttataactgacctaaattgagacttgattattatgagatacttacataaggcatcatttttttataaaaaatattacatatttatgtttaaagaatttttttttttttatatttt

SEQ ID NO: 171031 - DNA, 672 bp, Cannabis sativa
acagggtgaaattttgatgatagaagcacggcctgcaggggttgagtgtgggaagaggaagagaaatccccctatatggtttaatgactacacggagataaagaagaaacagaggcctcctttgacgtttgatcccttggcgccactggatgagcgattgttggatattttccgaaagtagtgttctggactcattcccaaccaccggcttcgggatttgaaaagtggtgattacggtccatcgttcttttggaagctgttgacactgcaggaatggattacagatgacgtaagtaaattaatctataattttactacattttataagtcaactaatctatcattaatatattttgttgtctaactgcttcctctaacatttatatgcagcatatagatgcattagtccatatgctgaggaggcgacgattcgactttcattgacatttcgcaaaaaggtatcattctctccacatatgttaccagtctcatcggcagtgcatggacaaattacaagggtcccatgacaaactttgtttgggaggattatatcctggagtactgcagaggtgatcatcaagtattgttttagtaagctttgaaatttttaactatgattacaagtttattatggtttgttaattgtttagcttttctccataattacaggac

SEQ ID NO: 171032 - DNA, 1486 bp, Cannabis sativa
  modified_base (1221)..(1236): a, c, t, g, unknown or other
ctctctctctctctctccatagaaaccagcaggggttgtggagtttttagcttgattctgagtgtgttagcaagtttctagtgaatccaattcaaggtataatccctagctttaatctttgtcatttatctagctcaagttagttttcttgcatgatttttaggtttaaggttctgtgatattaatagttgtttgattttgtattctgatgatatcttgaggttatttaagctgttctaagttgtttttggtggttcatttggtgtttaagcaaggtttgagtttatgaactcaagctttgctctctaatggcaattttttattctggttgtgttgtgatgttttattgccttgattatgttcattagggtgtaaatagtaggtctggaggtttggtaaagtttgggattgaattgacggtgtagtaaatttttgagtgtttcctacactaaaccgggcgatcggttaagggggacctgtaggaaccgatcgacaagttggtccacaagaaaacccccataactggaattctggttggggaatcggtcttccgagtggggcatttttgggaaccctagtttttcctatttttacgatatttagtgtattgccatgttattcatcgatataaaaacttttagtttcaaggttaggtccccaaaaagtgatttagcgtgtcactcactagtttaacgaataatgtgatttaggggcctgtaattcgtcgagcaattgttccactcaggttggctggcacacctaaattcgaaaaaacgaggtaagattagtataatgatatgcatttgtgtttacacgtttagcgtacatgttatttatgcatgttagattacattgatagcggtatcaatatacgtagagttatattggatgttaatagatgtatgtttggctcagatactaatcgatgctgtcacatcggtatggctagagtatgaccagcatactgagtataggctgacattatggttgatagtattgtcgtacgaacgttcttgactcagcaccgtattggacacagggatatggttatggttgggtgtatgggcgcctgattataatccgagttattaatatgttattgtttatgcttttctcactgagtctgtcaactcacaaatattgtttgcatgtgtaggtaagggcaagggtaaggttgagcagccgtgagagcgagtagatggagattgtacatgtcggggnnnnnnnnnnnnnnnngtacggtctttgggacagctgggcttattttgtatagtcgctaggcgacaaacttttgtaatatgcacagtgaaacttttgaaaaaatatttttgtaaaactggatcccagttcattataagtatgttattttgataattacaaatagttaaataattttttaattattcacgatttttaataaactcgttgattagcaacgagctacacagttaagttaaaaaatcacattaacacgcctaagctagta

SEQ ID NO: 171033 - DNA, 1042 bp, Cannabis sativa
agaatagataaagactttggttcaaacttttatgcttacaccttagaggaggatcgtgccaacctccaagaagccttgtcttccctagatgctaacctgtggcaagatgtcgttgatgataaaatggactcacttattacgaacaaaacctggcattatacaaatctatctcctggttgcaaaactatagggtgtaagtggattttgaaaaagaaattgaaacctgatggatctgttgacaaacacaaagctcatttagtagcaaagagttttagacaaagagagaatgtagatttctttgatactttttcacctgtcattagaataacatccattagagttttaatttcacttgctgccatgcacaatttagttgtgcaccaaatggatgctaggacaacattccttaatggtgaattagaagaagaaatatacatggatcaaacttaagggttcgtgatcccaggccaggaacataaggtttgcaagttagataaatctctgtatggtcttaagtagacacctaagcaatggcatgagaaatttgacaatttagttatctcacatggctttaaagtgcatgaaagtgacaaatgcatttacaataaatctgagaatgacatttgcactattatatgtctatatgtggatgatctgcttatatttagttcaaatatccatgatgtggatgttgtgaaatcattattatgtgctaactttgatatgaaggaccttagagaagctgatgtaatccttggtattaagattgctaggtctgaaaagagaatttctttcatcaatctcattatattgagaagatttttaagaaatatatttactttgactgtaaaccggcctgcacaccatatgatccaactgtaaagttatttaagagcactagtgatggtatgagacaatctgaatatgcgagtatcattggcagctttgatatgccactgattgtacgagacccaacattacctatgtcgtgggattattatgcaggtttaccagtaggcctagtatagagcattggcatgct

SEQ ID NO: 171034 - DNA, 951 bp, Cannabis sativa
gtggtgacaagatctgtcctcgaacacgtatcaagagattatttacagaatcaagaatcagacaagtcttaggatcctaacattaaatttttagaaaattttaagctctaataccaattgaaagaactacttgtcaattttcaagattcttattaccgagttgtttatcactggattgattaatttcaaatcttgcattcaagaattggattgagaataaagcagtaaagcacacaatgatttacaagcttcatctgcactgagaacacatcttagccgacaagtgcttgggtttcctgaaccagggtaatcacttcaactaaatccaaaagattcgtattacaatatccagttcactttaggaatttaatacaatctttacagcaattagtaatgaattaccaacaacaatcaagaatcttgattgtaagaacacaatcacttgtgcaactactgagtttttcttcgacacttctcttcaatctgaaatcccttcagatttgatgacgaagatgacactgaaatcccttcagtttgaactcagcaacgtcaggctctgatctgtctgcaatagatctccatcttcaagctcaacaatcagacctgtaaaatcaacaacaagaaaagcaagatacaactcagactctcacgatgaacctgaactaatcaaagatatcaattcaatagatgattagtttacagaacgaaaaagactatttatacgcaatagttcagccttcctaacacaaactaacaccaaccgttaagtcgtaacagactcacacggactataacagtaagcaggtgtgcagatataaagactaaaatcaccatatacgactagactttctattaaaataatctgtcaaaataacgacaacttacatctatattctcttaaaccaacaaaaattattacatagccacattttatatctttatatattaaaa

SEQ ID NO: 171035 - DNA, 707 bp, Cannabis sativa
tctaaatgaaaagatctccataagttgtactgattatgaaagttcgttgtctttcaaaaatgtgttcccggatagctaacttgtccatccagaaaaagtttcgtggaatgatagttaccatcaagaagggtgctcccggatgactatcatgaccactccgggtgtggtcttcaagaaaactagcctccctctacaaaggagttttagatggctagttgttcttcctgtaagggtgttccaaatagtcgactccaattggctcttttcctatccggaagccccttcagtacttgcttttgtcctttgtccaagaagcgcatgtctcatccgtaagcaccttgtcttgtactgacatggagtttctgttacaaagagtttgttaaagttgttaagttgtaactaacttaacaacttaacggttgtagccactatcttagtatcgctatcctaagcgtataaatactaccaaaacttaaacacactggattgacgagtttgagagagaaagagattgagaggttcatagaaaagagagaaagattatgtttggattttgtatgaagaatcttttgtagatgaagaaaattcttgaacaagagtgtgagagttgtaacactttgaagagatacaatagagaatctttctcaactatattgtgttcgttcttgcttaatcaataaagagaatttggtagtgttctaaaatta

SEQ ID NO: 171036 - DNA, 938 bp, Cannabis sativa
gttacatgaaaaatttaattatcaattttatattataaatgttattgttagtcatataaatgttgttatgaaagccaattttaatattgaaaaatgcaggtggggaaaattgcaaagaaatttgcaattttcccctacctacaacaatgcgtcactttatagtcgacacaaaaagtaaaaaaaaaaaaattgcgtaacattatgtgtcgagttttaaccgatgctatattctaattagcttcggttataatttgaagctacgttttttgcttcattccaaaacagacgctaatatagcgtactttttgcttcagttctcaaccgaagcaaaaaataatttgcgtctgttcagaagcgaagtaaataagttgactatttgcgtctgctgttattacgtcgggttacacaaccgaagcaaaaagtttttgtgtcattttacaactgaagcaaaaagtcatttttgtagtagtgcattaattactttactagattcaaggcaaggttagttaccaaggggttcactcagaaagaaggcatcgattacaatgagattttctctcccgtggttaagcaagcttcaattagagccatgatggcaaaggcagcaagcatggacctagagatttgataaatggatgtaagaacaactttcttgcatggtgagttagaagagaaaatctatatgcaacagcctgagggctttgacaatgggaacccaaatgaagtatgcttactcaagaagtctctttatggcctcaatcaagcaagcacctaggcaatggaacttaaggtttgacacttatatattaaatattacatacatttaaagtaagtatgattcatgtgtgtatttcaataatcaaacctatttgctactctatgttgatgatatactgatctttagcaaagaaaaatcagagattgacaagctgaaaagg

SEQ ID NO: 171037 - DNA, 573 bp, Cannabis sativa
  modified_base (183)..(202): a, c, t, g, unknown or other
tgtatatatatgtttgtatatcattcctacatatcatcattctatttatagtagtatactacaactacttcaatgaatatgttgatcatattaattattttatttaatgagaaaagataaagaaaccacaccacgtgaaatgtgtctaggcatccaaagacgataataataataataataatnnnnnnnnnnnnnnnnnnnntaataataataataataaggtgtttattcatttttacacttaaaaacagtttttttgtctttttacggaatcttacatagaaactcctattgtaactagcgctgcaacttaaactgtaataaaaaatcgtatagcaaagaaactattaattagaaactcaaaacgtaaatttggaaaaaaaaaaaaaaaagttaaaacaacagtatatggagttcattagatatatataattgaatctactggtaattacaactgaaatttagaaatggaaatgagaatcttgaataaaaaattgagtggaaataatcgcacaattaaagaagaattttattttagtattattattggtataatttattattaattaaata

SEQ ID NO: 171038 - DNA, 677 bp, Cannabis sativa
atggaagaaaaaaagtgagatttatacatttaatagagaagaatatagcttttttttttttttcaaaaaaagttgttttacaacaaaattttaagaaaatatggagaaaataatataaaataactggttacctctaattattctaaggtaactttgttactctaaacaattttttttaatatttattattattattattttatataaattttcccataaatttttctccaatgatctacttggcgacttattactcaattaaattgcttggaagaattttttagcaatgcctctttcaattgctcataatctcatatgactcgtgtaagtactaataatctcttttttacattgttgatttaccaataattattcaattatcaatacatagtttgaactttgagattcaattttctttactattttctcctgtgattgtgtgatgagccttcaacattggatctctagttttatttttgtgctattcaaattggctaattaattgctctttttatacaccatttattctctcttccttattagccttgtttggtacttatcatttacaagctttgttcatgcaatgtaaatatatttcctttagggcccgtttggtacgcaggattggactggattggactgaaaaagattggactggactggacaagattggatta

SEQ ID NO: 171039 - DNA, 775 bp, Cannabis sativa
  modified_base (77)..(79): a, c, t, g, unknown or other
agtttagctgtgtaaagtatcaaagaactatgtagtatctactatctacctcacattaaaagaaaaaaaaaaaaaannnaaaaagaagaagaaagaactgaattattgagaatgattttttgagggattttttatttttacacttcaaaacatatatatatatatatatttacatttttacagaattctacataaaaatctctattacaactagcagagcaacctaaatcgaaaccaaaaattatataacaacccacatagaaaccaccgaagaaaccactttagaaacctgaaccgtaaattttaataataaaataaaaaaaataatctatggggtacttcccttttttttattgacataaaattattgagactgattttgtttgccttaatttcagaaaatatcattttggctcacggaagtttttgatttcactagcatgtcatcgatgtaaacctccatattcttctccaatatatttttaaacattttgaagaattcttcaacccaaatggcatgaccttatagcagtagattctttcgtcagtttgaaagcttatgtgctattgatcagccacatgtatcttaatttgattgtagcctgagtatgcatccatgaaggttaatagttcataccccgaggttgcatcgaccatctgatcaatgcacaaaagtagaaaaaagtcttttagacaagctttggtcagatctgtgaaatctatacacatttctccatgtcccattaggcttttgttttggaatttattttaccag

SEQ ID NO: 171040 - DNA, 591 bp, Cannabis sativa
gttggatgaacagaaaatttgtaagagtttggtgattatgctttttttttcaatatataaccacattgaattgcggtacgactccgcaaacgcaaatccagcaactttttttttctacaatctcaaattctggtttttgaattttcgtgattttgatttattttcgttgtttatagggttagggtttgtttgtatttttgttgttgttggagatggggcaacagtctttgattacagcttcgttgctcgaggtacggtggttctcgctgagcacacagagtttacaggaaattttaccagcatcgcttctcaatgtctacagaagcttccggcttcgaataataagtttacttaaaattgtgacggtcataccttcaattacctcgtcgaaaatggcttcagtgagttcaaataatgttatatgtatgatctgagttgatatgtgaattttgtgtttctgaattgaatctttttatccgaatctgaatgtttgtttgtgttattattatcaaatttggttatttgattagctttctttctttacaatccatgcctgataatctttgatttggatataaatatatatatata

SEQ ID NO: 171041 - DNA, 627 bp, Cannabis sativa
tttacaattttaaaataactaaaaagtatctcatacaatatgaagtaaaaataaaaaaaaaaatataaaagtaactaattagttaatttttttttttttttaaaaaaaaagataacgaaaagtgtatttttgatatgttgaattactacagacactagtaattttttgatagcatgataatttgttcattagtttataaaaagttaccaaaatatactttaaataattataagatatataatatgatctaaatgtaactaatttggcatattaagattttcaaaataaattttagaaataatcaaaaatgtatctcaaataatataacataaaataagtttttataattgataaaaaattattgactacctatcctacatagcttttttgctaaataaattatatatgaaaactgtctgaattatataagtatctctgttatcttatattgtaatttattggtttctaagtttgaaaataatacaaaaattagctaaaatataaatttaagtttcaattaattaattaaaataaagttgcttgtataaatgtaattgtactattttattgatataataggtaattaattggtttattttgattttagaaataatgacaaaatatata

SEQ ID NO: 171042 - DNA, 903 bp, Cannabis sativa
actttaggcagaaagtcccattttcccagtcctttaatcttcctactagggtgttccacatgggccttattaccttcagcgttgccttgctctgtttccttgtactttttgttgaactgagtcgctttgggggcattctttaatgagttttttacaacatttacccatgtatgttgatttgttgcattccacgccaacttttcacctccctgctgccttggaagcgcttgatggttctcaaacttccttctcgtgactccgtcttgaagactttctggctttcttttgagtacaccaaagagacattcgtataggtcagaccatcctttagcttctacttcttctggaataatcaccattttaactctattattcttcaaggttgaaatctttaggaaagctcccttagagttatcgaaacattctataaataaacttccactactgtttctgaagaatcttttgaaagcaatcctttgctgtccgactttctttttcagttcctccagtattccaatcatccagtctgctgcatcgattgttacacctatctcgtacccaaaaagtcttgttctctcgcaaattctaaccgatcctccatcttttgacagggtgatcataaacgccttgtgtttagtgtgaaaactccaatatttttggagtttctgatcacgaattggataagatagattttcccagccaacaccagtggggtgagggccttttttcttcccaaaaccagtgcagttttggtgttttccatgaccagaagggccatggtaacccccagcatgcatcaccaagtttctcagaaagaggagagagaagagagcataggggagtcaaagagttttttgatagcatattctacagctatgtattctgcttccatggtagaatctg

SEQ ID NO: 171043 - DNA, 1843 bp, Cannabis sativa
  modified_base (941)..(947): a, c, t, g, unknown or other
gaatatacaacccagttcaataggttagccaggttggccatgggaattgtgccaatcgactttagtaagaaagaaaagtatatggatgggttaaatatcgaaatcaaacatgacctcatgatcaccactgatgataacaccacctatgctggtatggtgggaaaggcactgcaagctcagggtgcagttgagtgcatctcggagtcccgtgggacataggttgttggtagagccactactcctcctacctctggctatggtaggggtggtagtgactcgaccgccaatcagaagagaaaggaaccatctgcacccagtggtttaaactagaacaagaggtttcaagggaaccaggatcgtgacaaccgttagggtggttccaaaaccttatacacttacccggaatgtcctaactgtaagaagaatcacctaggtgagtgtaaagggtgaggatgtttatagtgttgtttgcctagacactataagagagattgtccacagctcaagaaagaagaacaaaagataatttcaaagcccgttccggcaagggtgtttgctcttacttaggcctatgcagaagctagcccctctgttgttacaagtcatctctcgatcaacaactcttatttctctatattgtttgactctagggccactcattcatatatggcggccataatttttgataaattaggtaaactgtttgattgttatgataaggggtttggaaccctaccgcctagcaaagaattagttatctccaaaaggtgggttaggtctatgctgatcaaaattgaggatagagagttgagtgatgatttagtggaattgggtttagtagattttgatatcatccttggaatggatttcttgtccaactatcagctagtattgactgtaagcggaagatagggatcttccaacccgagggcgaggaaccnnnnnnnttgtgggatcagttcagggatcctaattctaatgatcttggtattgaaagccaaagatttattacaagaaggttgcttagggtttctggcagtggtggtggacaccacacgacttgaatcattttggccagaagacatcatggtagttcaagaattcttagatgtgttttcacataaacttctgggcttaccaccgcagcgagaaatagactttgtgatcgacttagcacccagagcggagccagtttttaaagaactatataggatggatcctgcagaacttaaagaattaaagatgcaactccaagggatgcttggcttagggttttctcgacctagtgtatcgccttcgggagctctggtgttgtttgttaaaaagaaatatgggacgctacgaatgtgtattgattatcaagagctaaataagttgactatcaagaatatatatcctttacctaggatcaatgacctgtttgatcagcttcaggggaaaacagtcttctctaagattgatctccaatcgggttatcatcagttgagaatccaagaggaggacattccaaagaatgctttccacactaggtatgggcactatgaatttttggttatgtcttttggactaaccaacgctctgacagcttttatggatctgatgaatagggtattcaaggatttcctcgatatatgtgttatagtatttatcgacaacatccttgcgtactctcaatcagaagcgaagcatgagaaacatttttggatgttatgcatcgattacgagaacataaacttgttatgtttaaaaagtgtgaattttggctatctcaggtgtcttttcttggtcacattctcagtaaggatgggatcaaggttgatctaggaaaaattgaatccatcag

SEQ ID NO: 171044 - DNA, 590 bp, Cannabis sativa
taaatacttattgaaaaaaatatacacataacaaataattatgttttattataaatatcttttataattaaatctatatatacctaattatatttttaaaatagacaactctaaatctaattatatttataagtccttctctctttctcctttcctccaatcattttttttttgttttttgaaagaaagtatgttatttattcaaatcaaatcagttgttacaagagcactaataaatctaggacaggcatctgtccacaaatgacccccactaaaactagtaacagacttagctagtgcgtgggccacaccattcgcatcacgcgaaatggcacagcaagaaccaccagcagcagctaaaagagaaataatctcctcaacaattggtttaaacataagaatatgatcaggacaattaatccaagaacacacaacagaggaatccgtctccacacgcgtcaaagaaaaccccaaccgagccgcccgcatcagaccctcacgtaaagccaggagttccgccacctgttaggctatttttagcctatgttttggatccaatttatgtgcgtttttagctgtgttgggacgga

SEQ ID NO: 171045 - DNA, 670 bp, Cannabis sativa
ctacacgctaaacccctaaactctataccatgtaccctgaacccgtaataactaaaccatgaacccaaaaccttaaactctataccatataccctaaactataaaccctaaaccatacaccctcaaaaagcctaaacccgaaaccatcaacccttaaccctaaacccttaccgctatatcctgaagcctaaacccttaaccataaaccctaaactctaagtcataaaaactaaacactgagccctaaaccctaatccaataaaacttaaaccctaaacccaaaacactaaacactaaacttataccctaaactgtaaaccctaaatcctaaaacctaaagaaaccctaaacccaatacactataccctaaacccaaaaacctaaattctaaaccctaaaccctaaacaatatgccataaactctaatcctctaaacactaaactctaaacactaaaaccctaaactccataccctaaaccctaaaccctcaactaaaaaccctaaaccctaaacgctaaaccttaaaccctaaacctaaccccaaaccataaaccctaaacccttaaacctaaactctcagccctcaccttatcccctaaacactatacccgaaaccctaaaccgtaaaccatcctcactaaaccctaaaccctaataaactctaaacct

SEQ ID NO: 171046 - DNA, 609 bp, Cannabis sativa
  modified_base (313)..(319): a, c, t, g, unknown or other
atctccaatggtaaaattttagaagatgcttggtgaggttgacatattatgtggcaaaatattgagatgctataccattggagagaagatgatgtcattctagaaatttgcatggatgctatgttgtaacatcaatgctattcattaatctttaataaaaaattgaagctaaaaagttattgttgctaaaaattaagataaatattaaataataatgtgtgaaatcataattatagcatttttaaagagtgctatacattggagtgtttttaaaaaagaacgccaaaaatgatgtggaagagagataaaatannnnnnnatatttttagatgatgtgtaaatttttagcatatttaagaatgcttgcggtgaaaagcttaggtggcaaaatataaggatgctataccattgaaaataaatgaatgttattcttgaaatttgcattaatgccacacaatggcactatgttttcttaagagaataaaaaattaaaggcgcaatatatagatatatataatagtgttatattatttattatataatataatgtttaagattaaaattgtgatatgttatatatattattacatataatataattgggaatta

SEQ ID NO: 171047 - DNA, 623 bp, Cannabis sativa
ctcttccgatcttaaatgaataaaacctaactcattacttcaactaagtaataaatggacagctgtcaagcttccaaacagccaccacttctcacaaataaaaagaccaaaatgcccttataacttataacttaagtaattttaagcctaggggtaaaatggtcaaaaaaactataaccccgctcaaacccgatattctatttatctcacaaaagattctagccttacccaagtgactcaaacagcaatccatcgcattttctgtcgtcgccgagcaaaatcataaaaattacctaatgcatatataacttaaataatacctctagagtttagtaaaatctctcaaattgagaaattataactctaatgtccatttctaaaaatgggacccgactcataataaaatcatgcatataaaaatgtcaataattaatgaagcaaatcagagaaaatgatttgtattttttgatgattaaatttagtatatacaaagggtatatataatacaatgtgaacacttaaaacactagagtaaataaaaaaatattaaatgtaaatttacacctaatttacagctagcttgatttcctacactccccttcaagctagatatatactaaaca

SEQ ID NO: 171048 - DNA, 669 bp, Cannabis sativa
tttagctttagcaatcgcctcctgggtacatatattagaaaagtgatccttgttcaactccttgagagaaattttcatactcttaagtttagctacaatccgaaacattaaggtccccttgtattgtatctgccactgttgctgaataatttcagcatatctaggatgcaattcccacatagaaaaatacttgaaaggcttccttccactaataacactgttgtggaaatttagaactgctggggtatggtcaaaaatactctcattcagaaagataacttcagcagtaggatatgcttccagccattcttgattagctaaagcacgatcgatcttagaatagattctgtcatctccaaattgcttattgcaccacgtgtaaaaaatcccgctgaatttaatatcatccaatctacaatgagcaatacaatcaatgaattgcgtagaagtggagtacctcactcgcttgccaattctctcttcctttgataaaatgtattaaaatcccccattacaatccacggcttcaaggtagataagctttgaagatcatgccataatttcttccttccttcttcatcattaaaggcatatatgaatgttacataaaatgactccttcatatccacagttgaaactttcaagtgaaccaattgactagaacaactt

SEQ ID NO: 171049 - DNA, 1378 bp, Cannabis sativa
  modified_base (316)..(322): a, c, t, g, unknown or other
attatataggggtgccttgtaaacaattataataatattatttaatagttattaaattatattgtgggggcgtgtgtctctaattaattattgtagtgtttataaaatagtcgatttaattcaatccgattattaatttggaaagtacggatatttgtacttatgcagattagattgaattggagaatttaaaatacgcacttgtatgaattggatattgactgacatttaaaaataggggtaagttgtaaaatactacttttattaatcaattaatcaaatttaccactaattttatatttaattgaaacatgcnnnnnnntatatgtattgtacccaaaatattctgatataagagaatcacatagagagtatcttgaagttacaggggcaaaattagtacaatattaaaaaaaataggtaaaaatgatagactttaaaaattagggtaaaaataaaatagaacaatataaaaagggtatagagtgtaatttcctcttaaaaataaccgatccaataatccacacatatttataaaaaaaattcaaaaattatatatacaattaaaatttattgtaaagaaaatagtaagttaaaaatctaatacatataatagacatatatttcaaaatttaatagattaaatgtttattccattcttatatataatttttttttcgacacataattttaaaaaaattaaacatttctttagacgaaaataatttttttctaccctttaaatttgtcatttgtcattttatttattttaatttgttattggagaacaaataatttattttattttgttgcttgatatgtgaaaaaaaatatattttttcagatatataaaataatttaatattgaaaagtaacctatctaaaataaccgatctaatccatacttttgtggatctaatccatattgaaaagtaacctatctaatccatacttttgtggattagatttgattggatttgaactattgggcgaattggattggatccaaaatataaaatccgcacatagcgcaaatcagatatactacgaacgaaacaatacgaattagatgaatgaatatttctactagcggttttatatttttttttttttgaacattattatgcattagtattgtttcacactataaggtgacactttgtatataggtaatagtttattataataattattaaattaaaatatgtaaataattattataagacatatggtacatctaaatagtttatcttgccaatatatggtttaggaataattacataagacactattttttgtaaaatatttacatttttacgtttaaagaatgttttttttttatatttttacggtttttcagaaaataacacgaaaataa

SEQ ID NO: 171050 - DNA, 1111 bp, Cannabis sativa
attctgattgttgtcgggttgggcaaccctttggtcttatgcacttatccaagttgtctagctccctcatatgaaattcaaactctatttctgtgtaagctttttcttctgtaaagaatggacctttgaaatgctttgaattttttttttcaaatttgacaagagatggaagatgcagtagccatgtgttatttctgagaatacttttcttattgctttgatgatgctttcatgtcggtcagagattagacattgatcttcttgaacctcgaatgcttctttgatttttatgaagaactactctcaggctttgtcattctcaaaatcaataatatagtatgtaagggaaaatatttttgattctgcatcttgtgtgttatcaatgagcaatgtgcctccatacgcggcctttaggaatgtgtcatcaacaatcatgattggcttgtagtttggccaacctttcagagtagcattcaatgcaacaaatgcatattagaaactatcatttttttgcttctctatgtcaattattattcttatattttgagcagttatttatcagtaacagtaatatttagaaactgttattcaaccattgagcaacccaaaaacaacttttctagtttaattaaatatatttcaaaaaattaattttatggtacttgggtttgtcttttgtagcatgtacaggtatcttggcaagaaattgtatgattctttagcatttctatgtagctgactttatgctcgttctctagtatgacatgccttcatgtaatttatttttgttccatatttgttttctatttctctctttatatttgtaggactgcactttattttcaagttcaaaaattttgattttacgaaatttgctatcaactttgtagttgcttgtcgttgatttctgaatcttattggaactgcacatgtgtgttattcttgataactccttattatgaatgtttctgtatttctatttttttgaagcctttaaactctatttgcaatttgagtccgaacaaacaatattgtattctctaaagccaaggccggccattaacctgtgcaaacagagctaatgcacaaggcccaatataatttttcagaa

SEQ ID NO: 171051 - DNA, 533 bp, Cannabis sativa
  modified_base (332)..(332): a, c, t, g, unknown or other
gctagtggtcctagtgttgctacagggacaaatgatactgaatttagcgatccattttcttctgcaacaagttacggtaaattcaaggagaagatgtttacacgagaagacatcaaggatcatagtcattatatatccatgggtggcacaccaggcggggagttacatctaagaaagttttttagagacaaagagcatttatagatggttgttagcttgtatgcaatgaagaaagggttcgactactttgttaggaagtctggtactgctttttggtacgttacatgtaaggatacagattgtgggtggagattaagagcgaagaagaacgnactttctaacatgtttgaggtgactacatttcaaaatatacattacatttcaaaatatacatacatgtttccttgatcttcgaggaaaagattactgtcacgcatcacttttgatagttgcccatctaattaaggataagtttgcaattgatgactcggatcatttggcctctgatataaggaaagatatgcacaaggatt

SEQ ID NO: 171052 - DNA, 514 bp, Cannabis sativa
  modified_base (451)..(455): a, c, t, g, unknown or other
gtcgggtaataaaggttcagatttataaacacaaaatatatagaagttgctgggttgggagtgaccagttaaaagtaagataattacatttattttatttaaaaaaaatgttttatgccttattattttaaaattaagaaaaaatataataactatattattttcaatgattttgtagtggccagctgataatatattgtattataatgaataacttttactcaaagtcttgaatcttgatccacatggagatggaagtctactttttctcaatccttcttatcatatattttatttttctaagatatcacaaaatcattttccaatgtgggtgagtgacacttttgctcttgctctgttaaataatataggtacgtgtccattttcttctttaatatagttccttcatcatctatgataagtgtgcctacatatctattctatataaagnnnnnctatataactgaattcttacgtttatgagaaattcatggataacttttttttaaaataa

SEQ ID NO: 171053 - DNA, 732 bp, Cannabis sativa
tagttagggtgttacatatggccattttgtatattggccctttgaaaatttggaaggggttttatttttggtaaatatgggaaaaatattagactttactaacataaagaaataatgtaaaatgattaagaaaattaaaaaataaacaaaattttaaatatagaaaatcaaacaaaaaatcacaaataagtttgataatattttgaagaataaatatcgccagaaaaatcgtcagaattttcatcgtcatcggagttagatgctagagttggacatcataatataagaaaaaaaatggttatatttaccagctagtttaaatctgagacaaagaaattgcttccgcaaagcaacttgttgaccttgaattcatagtagttcactccccatgtcgcgatggtaatagagctatgtctaattcgaattttcattctcacgagatgagattacagaaatatggctaagtatttaagctctaatttttagagagagatgctttgacctgcgtgtacttttttgaatatgaaaaatgatctaaagaagctcttcttttataggtgaaggaggtccttgaaaataggaataaaataatgaaaaaaatacaagttggctattttttaatgtcaggcttgggatagaaatcgagcttaagattctggccattggtctgccaagccctgaaaactccgtcgtcaaaacgcttcttgcaatgttggcaggtaattggggcca

SEQ ID NO: 171054 - DNA, 568 bp, Cannabis sativa
aaaaaaaaaaaagaaaagaaacacaacaacagtcaacagatataggaggctcaactaaagttgtgctgtgtgtttaaaataatttttataagaaaatatgtaaaatgtttagttgtgtagagtaatatataataaattatattccttttaattgaattatattatttaattgagtatatgaatcttatttattattttaaaaaattaaaatgaaaataaaaaataatttttttgttataatctatttaaatgtttttttttttgaagaaatttaatgttaattacaaataataacaaaataattatttattaaaaaaatatattcattaattagaaaatattaattttcattgtattaattaaattaaaataaatatttttttatatattttatcattatgttatttatttttattcgttatttgatttatgtacaccatccgcataaaatttataaaaaaaacgcttatatatattattgctaataacataaaaataacttagtttcaaaaaaaataaaaataaaaaaatagatctacaaacgaaatatatatcataatatatatat

SEQ ID NO: 171055 - DNA, 574 bp, Cannabis sativa
tttttttttttttttaatagtaattaattatagtggtagttagatcaggattaggtatgttttttatacatattttctcgataaaaaaaattgaaataagagatatttctatagaaagccaaaatagtagacataataattgttaggaaaattctacacacccatttaaaagtaatgcgagtaacaattttttttttatttcataataactacaatatatataaaaatagataaatatatattttaaataataatataagttatgtacaatgaacacttaaaaaaaactacttaaatttttgggtttttaaggtcgggtccgatgggcccatcagacagcatcggataggaatcaagcccatcggacccgaccttaaaaaccaaaaatttaagtgttttgtgccatcagatgggaatcggactagcatcgggccccatcggacccaaccctttaaaaacccaaaaaaaattgacatttgacagaaaactcataccattttcaaccctattaactaacaaatctcttcctaaatctaatcctgactaacaaatttcacacaaaattgcaacatat

SEQ ID NO: 171056 - DNA, 576 bp, Cannabis sativa
atatatatatttagtttgaatgcatacatatattaagatttttgttgtgttatttttctaagattatctatgtttttcaagttaacataacatgttgatgtctaataacttttcatattaaaataggattgttatctaattttttgctcatgttatttagttgtttaactatgtaaaaaaattaaatgaatatatgtttactttttatgggtatatatgttttttaaattaatgcactagtattttgtagttgcttttacttttttttttaagattatttatcagttgtttttaaaatttcttttgagttaatgcaatgtgttgtaaactaattaatttatgtattaatatgaagttgttatctagttattttatttcttcatatttaattgttcaatcaagagaaaaatagtttatgttttagttttttatggttcatactttttgttgtttgttggtttctttcatattttctacactattagttgatgtacaattaatttttatattataatagaattgttatattgtgttgtttattcattgctataggttgtttaacaaagagaaaaatga

SEQ ID NO: 171057 - DNA, 569 bp, Cannabis sativa
  modified_base (540)..(541): a, c, t, g, unknown or other
cccaataaaaataaaaataggcatcactccatctattatatttttatataatattttgttaaattttaatgtatactaaatagtatatatacaatatatagttttatataaaaatattatataaaatataattcgatataatacggtgtaccaaacaaactttttaccttataatattcaaatgttcaaattattttataaataaaatacataattattaatttattagaatgtagtgtttaaatattcattttcttattaaaaaataactacatcattataggtgcctttgataatatttttttaagggtaaatagcggcatatgtatccaaaattttatgtttgtaaacgacataaactcaatatttatttttagcgatataaatactcaatatttgtaaaattgtaattttctttcagtttagactctattttgaatttattaaaaaaacatttggaagtaaataatactcaatatttctatctagacccaataatcaagaatttaggccttatatatgccctgtttaagacaatannagattctgtactgacaaaattagaaaaa

SEQ ID NO: 171058 - DNA, 880 bp, Cannabis sativa
aacaacaaacaatacacaactaaaaagattaaggtgagagagagagcaaacacagtgagaattttacaaggttcacccctgaaattggggctacgtccttggtgagctgcctcagagaagatcagccataatccactatcaagatcgatgattacatcaagtttcaaagctccaagacacatgaatcgtctggtagctcattcttcaactcaggtatgtacaaatctctcgaaactctcttcttttcttctctctcaggattaaatagatcttctttttctctctttctctctctaactatatctctattcttctttgaatacgaggtaagctaatactggatatgggtcattctctccatctctttctggtttctgagaagtgtttttgaagctgtaagtatttctgagtttagatccatctatttatagttgctgtagctgagtaggttagttaggattaactaactaattcttgatcttggcgtctaaccgttagattttttaggattgtggtaactaactatttttgattttattaactgttacaggttgacttacatggggaattaacccaacatcttgatttttacaaggtttggtagaagaaagccacctacgtccttggtctttaaagctacaaacctagctttgagttccactatcaagacaagttaacgggcttgattaacccttacacataggaatttttcaccaaggtgtttccaaatctcttacaatagttttgtactgtcgaggactatcaacctcaaacacaaattgttgtagtgctaatctcactctaaacaagttgtttacaataccggtgccaatctcacatcaacacaatatagaaatgtgtttatgattacaaacaaatt

SEQ ID NO: 171059 - DNA, 512 bp, Cannabis sativa
  modified_base (302)..(302): a, c, t, g, unknown or other
ggtatcttaggtatggcaaaaaaaatctatttattcggatcgggttgaagctccaatccgacaaatcaattctgattaaaaatatttagatacttattgaattttgaatttgatctgacacgcctatttttttttttcaatatattaaaaaaaaataatctgagatctgagtctctaaatctattttatataaaatgtgactatgtaacaaaatttttagtttaatggtattttttttattctctacgttaactttaatagaatatactattatataacataatattctttattaattttanaatattattatatatatttaaaaggaattattacatagaaaatataaattgacattttattttttaaaaatacccttcatcatcacttacacaatcagacgatggttgcagggtggttgctacgtggttgcacagtagttgcatcagacgaatcaaacgatggttgtaggatggttgctagatggttggccgaaggttgcatcagacgaa

SEQ ID NO: 171060 - DNA, 1441 bp, Cannabis sativa
  modified_base (518)..(524): a, c, t, g, unknown or other
  modified_base (679)..(683): a, c, t, g, unknown or other
ttaatgtataaattttacattatattatactatagtaaaaaatattttactacaatttaaatgtaaaatttgaagaaaaaaaaatatgataatttgtctaaaaactctaataatgtgaattgtttatacttttctcaaattgtaattcttgggttgtctattaaaatactttatagagaaattagagcaaatgactcccaattatagcattatgtaagtaaatgtccttatttcaaaacttgttgacaaatgaaccttttacgctatttattatttatattgtcttttgcgatataaaatatattaataatttttctttcatatttttttttagaattagaagcaaattacttaaaaattatggtatatttatataaattttgttaagatattttttttaagtgatgtcgatttttttaatattttatggattgttgtggattgttggtattaaattttgttgtacaatatatttctgttttgttgtatggtacattattattcttagatgatatttnnnnnnnattttgctatgtataatagtggttcatgattttgttagtataatataaatattctactgtatgtatataattttattgtcatgctacatatatttaattatcatttttatatattttaattgtatgatatattaattattttaaataatatttannnnntttctattttattatatacaatggttgtatataaatttattgtcattgtatatatattttaattgtaatatataatttagtaagtatatatatatattagtaatatattttttattattgttagtggttatattttggtgaatagtatatatattttttgttatacagtacatctttttttttaaaataatatttatgttctattttttattgtccttttgttgacgtaacatataattttattatcatgctatatttatttttatttttattttttgttattatatatatttctattataaggtatatatcttttgtaatatggtatataagttttattgtgtagtgtattattttattttagatcatgcatgtttagtttttagtttattatatataaaggtgatatataattttgtaaatattgtataattattttatggttgtatataattttattatatggtatataatttttttttaataatattattttattttattttttattgtatgtatatagcctttgctgtatgttatatggtttttgttgtgtatagtatgtcatttatttaagatgatatttagtttatattctattatatataatgattatatataaattttttgtatggtatacatatacttttagtagcatgatatatatattcgggtgaatattcaatggttacaataaaaatgtaaccatgatggttacattttcttataacctactataacaggtcactgataggtaa

SEQ ID NO: 171061 - DNA, 544 bp, Cannabis sativa
  modified_base (495)..(495): a, c, t, g, unknown or other
ctatgtgtcattccacacccatcatatacatacacatacgtatatatatacatactttttaatagtaaggtataaaatttactgtacacttttgattaatttaatgcgttaaaaaataaagtttaaataattacttaacatttatataagaaaaaaattaattaaaaattttatctctaaattttgagatgtaccaaatcatgtcttttaaattttttaggccgttaaaatattgttctgaactgttgagattgttagattaaagaatttttgtttaatttcattcaattttactaatataacagttgtctatattttaaattgtggctcccaaactttgatatttataaaatcatgtcctaagtttaacatgtaccgaattatatttcctaaattttcatccacatcaaactttttttagtaacattttaaaaaaatttacgaataattttaagactaattagcaatttttcccctcgaattttgacatgtacnaaatcatgccccctgaacttttttcgccgttaaaatttttccctgaact

SEQ ID NO: 171062 - DNA, 1141 bp, Cannabis sativa
gcatttccgtctgaaccattggagctttgatcagcactggcaaaaccagagacgaggcgagtacatcatcatcttcgagggttgatgttgatgaggatgactggatcatcattagaaaagaacatcatattttttttctgtctttaagcatgaatgctttgttaaggaagaagaaggatatcaacgagagtagcaagagtgagagagagaaaacttaaggttttttttttttttagtttttttaattattaattaatttttttaaaaaataaaatatgtattttttttttataagaatctaattttttaaaggaataagagcttgatataatttttatttttcaaactttagtttttaaaataacttttataatttttaaataattaaattaggtgtaccaatataaatgtgacacatgtttaaaattgtattcataaccagctatgttggcagataacaaaagtaaatagatgacaccttaaatttgctaactactcaatagtttggcaggttttaccgttaaaatttgagcttagaaggttaaatacaagtgaaatattagtttggagggtttaactgcaaaaaaaactctttttaatattgaataatttatatatataaatatcaaaaaatttcttattcatatatgaggtcatgacttttattatacgaagaattgagatcacttagccatgaataaaacagtcagtaacatattaaagttttggaatctttaatcaacagttgctagtgcggttcactgatgtccattattcgatgcaagcaatcttaattcagattgctgatgtagtatgacatctaagtgaaggtattttatattataaagattatatattacaatgactgatatataattaagtttatctttatcaaagatgttgtttactataaagacctaattcatatcataaagatgatcattagtagattggcttgaatcctaagtaatcatgaactcatgttcatgttattagtttctttgatttagtcatgaaagtttctcagataagatgattcttacaacttttattttgggaatctaataatatcgatggttgggaacatgatctacaattatagaatcctgactttcttaatagatcgaatgttggttggttc

SEQ ID NO: 171063 - DNA, 887 bp, Cannabis sativa
tcctatttaattaagttgaaaaattatttaattattacaaaaaataaataattactatttcgccaattcaaaacagattttttcgaacaatattatacaactctttatccattcccttgattatgtttcaaggtgacaatttggtgaccatggacctataattttaagctcaaataaactaaattatttattgagtctcatcaaccaaacaatctttgttcattaattacatgattactccactataaatatggagttgaactcttagtaattatagaattatatttactaagttttactgcagtgtccattgatataattaattctagttattagcctttcatgtgttggttcgtaataagttttggtcaaattactattctacccttttaattacttctttattctttggtaccattaattcactaataaaagtataattcaaatctcatctgatttgcacgcaactttccaatactagaattaacacataaagggaaccaacatttgatccgttaggaaagttaggattctataattgtagatcatgttctcaaccatccacattattagattcccaaaacagaagctgtaagaatcaattttttctgagaaactttaacgagtgaatcaaacaaactaataacatgaacaaaagttcatgattactcaagatttaggccaatctaccattgatcatcgttatgatattaattaggtctttatagtaaacgacatgtttgataaagacaaatttattcatatcgatccttatcatatataatatttattatatacaacaccttcacttatatgtcatagtacataagtaatctaaactaagattacttgcaccgaagaacgggcattagtgaaccgtactagca

SEQ ID NO: 171064 - DNA, 675 bp, Cannabis sativa
aaaaactcctaaatctaaattaccatgtattattttcttaaaaaattaaacttaagagtaatttattttataatttatatgatatttgcatttgacgtattgaacttgtttattaagagctaaaacttatacttattaggttggatcggatttgtgttgtattgttatattttgattatattatcgtaagaattaggttaaattaaattaactaataattattatgtatgttggatttgtattttattgtgatgagaattaggttttaaattatgttatataaatatataataatatttagtttaatgatagctaaaaaaaatttgattaaaacacactaatatattaaaaatacaaaataacaaaaataaaatactaatactaaataaaataaaaataatataacactaaaaagaacaatataaataaaaataaatattaaataaaataatattttaataaacatttggtgtgatttaattttttaaaaaaatgtgtaatatttaattgatttcataaatattttattttactaaattattttaagatcttaaattcgtactagtaatcatgatacaattacatcataaattagttattttttattattaatgtaaataatataaaatacgagatctttaagcaaaatatatttacttagtgaaatatttaatg

SEQ ID NO: 171065 - DNA, 606 bp, Cannabis sativa
agaaataggcctttgtccactctgttggtggcttagcagctaaccaattgtatgcagcctgattaacttccttgatttctgccattttcctctcaaactctggtacagtggttgctctagcagctgcccacaacatctgcttcatcaacaaaccaggatggtccttcttaaaattggaatgaaggtgcctcacacaatgcctaacagctgaaccagtgaaaaccctcccaacagcattctccaaacctttctgcttgtcactcattagtgtgtacaaatctgtcctctcattgtctagatcttggtttagcagttcacaaaaccaagtccaggaatcagttgtttccttctcacatatagcataggcaatagggtagatggcattctcaggatctatcccaacagcaaccaacaacaaacccttgcaataacctttcaagaatgttccatctagacaaatcagaggcctacacccatttctgaacccatccttgcaagcttttaagcaaatgtacaccctttcaaacaccctttgatcaccttccaacttagtctggatcttggcagtactaccaggattggttagcagtatttgcttgcaatagt

SEQ ID NO: 171066 - DNA, 606 bp, Cannabis sativa
atatatatatatataaaaaagtaacatttatgaaagtagtagaaatgaaaaggacaagaacaacaactagtatatatacatagtttagaagcccaagaatatcatccaaaaccagtgccaatacagatcaacacaaactctcatctctcgtcaagacattcaaaccccaaagatcttaagtctctgcctttgccgttgccctaaccgcgagcagtaagactctctctttctctattttctctttatctcaatttttcttttaatttcaaatatttacagttgaagcctaagtctaagccctaatcgctgtcgacgaccacgattgaaggaaactccccgaccactctcgcagagtacaccaagcgacaacaagggtaaatcttttgactcattttgttcattcatactatatatatatatatatatatatatatgtaaacataaaaattaaacaaaaactaattttacacataaaaaaaacacagaaaataaacccatataatcaacgtagtactcaacttaaaaaaactcactttccactataaatataatatatatttcattaaacactgagaatagatcatatacctctcctcctactgtata

SEQ ID NO: 171067 - DNA, 630 bp, Cannabis sativa
ggggggctaggaatgacttggtttggaatcggaaagaggtacatcccgataatatagttgctttcgctaaaacttatcttcaccaatggttagaggctcggaaaactgatacaacataagctgaaactcagctcacggttggtaacgggcattggagttcaaatgatgttaacagtgtgaggattaatgtcgatgcaacaatatttgatggaggccgtagctatgggttggggatggttatcagagatgttaatggtatgttacttgaaggccgtaccactttagctcacaaccaggtcgatcctctacttgccgaagctataggagtttgagaagccctcagctggataaagaattcaaaaaggcaaatgtgtaaagtggaaactgattgcttatgtgttgtgcaagctttgcagagtccattatctatgttttctttatttggggaagtaataaaagactgtaaaaacttgcttgcaagtttgagaaatgtgtttgtttcttttgttaaacgatctgacaatgtagtggcgcataattttgctcaagctgctatattatatcctgatcgcctcttcagtatggagtctgttcctactgatttgttaccttgcttggtagctgaagttt

SEQ ID NO: 171068 - DNA, 1530 bp, Cannabis sativa
  modified_base (283)..(299): a, c, t, g, unknown or other
  modified_base (1151)..(1175): a, c, t, g, unknown or other
aaaaaaaaaaaaaaagaggtataatgataatgaaaaaagaaaaagatctatttatatagagcacttaaattacaaaaaatgaataagaccccataggcatagcaaaggtcacataattaaattagaagagaaaggaaaagtctctatagttagttaattaattattaaaaaatgaataaaaacatagcaaaggtcacatatcaaattggaagagagaaaaaaagtctatgtagttaataattaattattatttttattaattattttttcaaagaaaaataannnnnnnnnnnnnnnnnagaaatataaaatgaaaaaaaaaataaaatatgttaaaatcattaaaataatatatttttttttttttttgataaattactattaaattacaatgtacatagtacaataaaaacgttatcaaatagttattactataatcaacaaaaagtcacttataaattaattaaaaagttgttatgtaataaaaaataattaattagcataatatagaaagtttttttggctattacataatttttggttgttacataacaattaataacttgtgtgtttttttattggacagaatatgaaaacctcaaaaaattagaaaaatagaataaaaaagttatagaatgccacataaacttgtttgtgcatttctttatatatatactaggcaatgataccgcgcctcgcgcggttgtttaaaaactatttatttatgttgtaaaaaataaaatttaaatttaatatattaaaagaaaaaaaaaatattaattaattaatatgttaatattctataagaaaaaataaagtttataattttaatatgttaaaatatgtgaaaattttaatttttttaaaataaaattactttaaattaaataaaccacaaaataaataatctaaaattgacaaattttagagagtcaactcatcatctttgtaatttgcatttatatataaggagcattgaaaaataaaaacacaaaatctaataagtaaaataaatttagaaaaataggttaaaaaataaacataccgtcaaatatataaaacaatataatctctcatatatatatatatttatatgtatgagatcaattattaagtaaatatgttagaacaataacaataataataataannnnnnnnnnnnnnnnnnnnnnnnnaataataataataataagagttataaaaatgaaaaatcactattaataatgaataattaaaaaaaatactaatacaaatattaaattttaagaattaaaatgtaacaaataattaattatctttcattagcaaataacatgaaaaaatagagaaaattaaataaattaaaaataataaaataataaagaacataaaatacaatgtataaaaagaatgtcatgtgacctatgctgtgctttcttttttttaaatatatatatgtatatatttatatagataaatatgtaaaaaattattattattattaggaaaagaatataaattcttgactactttttatataaatatatatat

SEQ ID NO: 171069 - DNA, 508 bp, Cannabis sativa
ttatcctcatcctcagcagcaggctgggcctattcagcgctcggcatcgtggcaagctgggccacgtggggatcagtcgcagcaattctccgcatattccattttgtgcaggtcatcatcctatctctggaaaatgtttggttagtatgccaagcaacagttacagcggaagtggtaataggaatgccaaaggcaccggtacttggacggcccacagggatagtatcagttacgtctggctggaaaatgtatgtccagctggacggcaagtatcgtctccaccccttcctgagttcccaaatgaagcatccgtagccttcacctgcgatctggtcgggatagaaataatgttacacctcgagttctggggaaggtgtaccttcaatgctcacatcccagtcctcgaaagtcgaattagaaagtctgtcacttgatgaggacggactagcgcaaagacgaggttggtcctcgtacaagagttggagaagatcctggtcgatatgatgtt

SEQ ID NO: 171070 - DNA, 686 bp, Cannabis sativa
ttttactttcatcaatatgcaaaccacatttctagggaggtaagttttgatacaattcaaaaattcaacttaatgatctttgaactgcatacctatcaaatatttctctacccctatcagttcgtaagatctttaaccacttaccttaatgttttcaataatgctagaaatttaagaaatttctcaaacatttcaaatttctttgcataagataaaatctagagtgattgttaaaagaatttaatgataactcatatccacccctgaatgtacatccatattcaaatatagatgattctactttcaaatggatataggcatattttctctttatagagaatgatctggtccaaactactatgaacaagatgcaaatgacatagatataattattgtggttatgatcttttgatgaaaaaggtttagttataacaaagagtacttagaatagtccaattggatcctggtcacataatactaaactcatattcaatacattaacatatagtttggatccattgacagaaaatggatattaataacttgtgaaagtcatacaatattgtccaatatattctcaggaaacaaaaataaaaatttctgtttggaatctaaaatttaaagtcaaagatttaaatttataccaaatatacaatgagtgattattctctcttagaccaccacta

SEQ ID NO: 171071 - DNA, 1303 bp, Cannabis sativa
  modified_base (976)..(979): a, c, t, g, unknown or other
  modified_base (1243)..(1258): a, c, t, g, unknown or other
tatgtctgaaagtgtgtcctgatcgaggttcccttgtgtccgtgcgctcaggaaatgatccccactccgattttttccaaattttcaaaaaatcataactctcacaattttaatcaaaatttatttctgtaaaaaaagtaatttgcataattttcccaaactatctaaataaaataattccagatcgtaaatcaaattatttttcataaaaatttcgtaattctcaatcaatcatcaaatacataatcaacatgaacacatctaaatcatacattcatcattttaaatctatatttcatggaagtaaatcattaccatggctatgaggctagttgttagatgttattttatcaggttctagatttactaacatgtatgtttgattatattttataatataacatcttacacatgaattttctaaaataatgaaataaacacatataaagttctagaaaaccttagattggtggcagtagaatattatggctcctttcgttcagatctctaatccttgtttctttctgtcgtagagtattgccaagatctaaacctggatctcctttagtgatggaattcttcacaatcttccacaccattattgagtactgacccgatttgagtgggcaaggtactcttcactaggggtttgaaattatgaagagaaggagagaggaattttgaattctacatagagaggctctcaatattcagttgtctgacagagtagaaaactaagttattaggttatgagagctatcttattctttatataggatttcatctagggctaggatttaaattatatggaattaaaaaatataaaataatggcttaaaatacccttaagtggctagcctcatatgtggaacccaatagtttcaattttgctattttatttagggtaaatagctgcataagtactcaaagttttatgtttgtaagcagcataaacctaatgtttatttttagcggnnnnagtacccaatgtttgtaaaactataatttttctctaattttgtcagtacagactctgttattttcttaaacaaagcacatataaggcccagattctagatcattgggtctagatagaaatatataagttactttcaaatattcttttaataaattcaaaacagagtttgtactgacaaaactggaagaaaattacaattttacaaatattgggtgcttacgctgctaaaaataaatattgggtttatgccgcttacaaacttannnnnnnnnnnnnnnntgccactatttacccttttatttaagggcattttacataaatata

SEQ ID NO: 171072 - DNA, 838 bp, Cannabis sativa
ggacattccacatatcactgcgtaagtaaactttatcgttgatcatcacatcattgtaaattcagtgcactgataaattatgggactaaatagtttgaagcatatactcgtgattattttctaactgtgtagacaacaccataatcaaggaatgacaatatgttcgggatttgaaagaatttgcatattaaaaccataatcacaaaaactacatgtaaacctaaatggttttaatcttctattaatagtaaataaaattatattgaaatagattttatttagggcataacattccaacaatattgttgtgattggttagttttgaaacgctaatcaagttttttgcaatagatggaacatgaagtaaatcatttagaacaagaaaagtagagtttgtggtatttaatgaaccagtaccaacatgagcgattgcaagcttgctgccatcacccattatcatttgatctttaccatgatactctattttgttgatcatcttctcagattctggagtgagatgatttatagctccactatcagcatactaggcatcatcgtttagggtttgaggagtagcaaccaatgctatcatctgggagtttttatcttggccttgctgactgtcaccttgtggtggctggcccatgtaattatcattgtatctgaagtagcacacagatgttgactgacaaaacattccacaaagttggcaagttggtctcgagttgtccctgctattgttggggattattttatcatgatctagatttactaccatgtatgttgtttaacattctaaatatgaatcatctaaaataatagaatttaaatacatata

SEQ ID NO: 171073 - DNA, 629 bp, Cannabis sativa
  modified_base (478)..(486): a, c, t, g, unknown or other
aattttgtgttaaatctcaatcgtgggtatttttactctttagtatatttgctattattatttgtttagaaattatttgtgttcatttcaatatgtaacttattttattttatttaatatatatttaatcacactaacatttattctacttttcttttcaaatcacactaacataacatttatccaaatacaaaaagttagagttatatcttagtattatactttttctttttaacatgaatttgatttttgtacatatatatacagtagaaaataagttgtgattcaagttcagttgtattttatttaacaataatttatatatatatatagaaaagatatgaggtcatattttaatttttaattagatttataaatgaagaaatatgaggcggtgatatgttaccctacaattattttaaggtagtgtttggttggaaataatgaaatggaatggaatgaaaaagaaacaattttnnnnnnnnntgcatttaaaactattggaataccattcagatggaatggtctttccatcattgtggtggaatgactatctattttaaaattgaaagaaagaccattctaatgcaagatttgaaaaaatttaataattttttttatcacttttt

SEQ ID NO: 171074 - DNA, 774 bp, Cannabis sativa
aacattaatatcttcctataggtacgtacacgtaaagattgtcaattaaatagctaggatccgaaaagaacttcatagctattattgaaaagcctagctataaagccagtatgtatagttgtcactaattaataggaggatagaacgttaggcatccaatgaattctggttttagattgtaaattatattaatttttctgactaaattatggtaaaattccaatagtatcatttcgctgttaattaatcctcattatttatttattaacagtaaagtttctaaatttaagtttttgttaacacttagttctttctattattttttgacagttaaatgacaagttggatctcatgtatataggatattattcacgtagacaagtgtaaacatgacatgacactatactattggtacacataaataaatatttaaaataaaataaaaatatattaatttaaaaacataaaaacaattctttttcttttttttctactattttttttccatattattttctccttcttcattcttctcccaaaattgaccactaacaccatccacaaccatccaaaccgcaaaccaccacaagtgtctaccaccaccaaaacctcttttgaagatcacaaatccaacataataacagaatcatatatcacaattgaaacacaattctgttggattatattctaccaggatctagatttactaacaagtatgtttttaacatcttaaatatgaatctctaaaatgatgaaaattaaacacatataaag

SEQ ID NO: 171075 - DNA, 829 bp, Cannabis sativa
gggaaggcccccgctctttcccagcctctacccagagaggcctctcggccgcggcttgagccttaatataagctaactcttgttccctcctaaagagttatttctggtacccgtcctccgctgaggcgataatgtccgccctggagtgccttttcagcatctggggtgtgaatattggggcaaagaaccttggataggttgaagtcatccaccgattggctctctgtgatgagcttagccttcctgcagtgcaccgttgagactaagtccccacattaagaccgtccttgtcgtgtgtggaaaagaccttagcgtgctgaaggaagagttgggtaggagcagtgcggtgcatcagaggaatcctgacccactccgtgagcagttctgggcattccacggcttggaaaccgggagaaaagaaaaatcagtgacgatactccttgacattcttttgataattataagggaccggaccctcattaccaggatgggcccgaagtgtgaaaaaaccgtctttaagtttatcccccttcttggggacagacacgagttcataaaaatacaagatttcggttgggctaggtgaagcccagcctcaggctacatagaaaataaacaagcctgaaagctggcggtatgcttgaggaatgagttggtaaggcgcaaggccaacaaaaactaaaaaatttatgaagtaatcttgaagtggaagcatggctccggacataagctgggtctggctccaagctccaaaaccaccatagttgtgattaggcgtttcttcatctcgaggcaggtggtgaaaaactcttgaagcggacggcttgat

SEQ ID NO: 171076 - DNA, 1016 bp, Cannabis sativa
ctaattaccataagtctactactcatgtctaatgcatgtaactgagtctcgaatgatgttgaccatggtacgattgaccataataccagcctatactcaatactccagtcgcactaatgtggtagcataaattcatactataagtacgattgaccataatatcaacctatactcaacactctagtcgtactgatgtggcagcttcaattcgttatattttgtattgcctaacatatatatgtctgtatcacagtgcaattttatgtacaccatacccttatatgttaatttgattggcattatttactatctgatacccactagtatcactagatatcaatatctaaatgtaactctatgtacatccatactgttgtctttagtataccaagtaaacgatatcataaaacttgttgttatcctaaagtttgcacatctgacatggcgcttacatgtggcatgatccaaccaacttttcgaccttgtaaaaaacttccaggaaaaattgtgcttggcaagtccatatgggagtgacatccctaagctacagatgagttttgtgaagcacctagcagaccaccaacctactagcaagatatgataaaaggcataccctgtaagggaagtcttacgagtgatgctacgaaagaagacaagtcttgtagaaggcctggccgggtagtgaatatgtcaaccataagagatattgttaggagcaacggacaaggatacaaaggcttgattttgtccttaacaagcatccacaaatatcttcaactgaatcctacaaatttgaatccaataaatctatccaagaataaaggaaatttaatagattgtaattgtaccctagaatatagggatatttattatttgtttactccttttacggagcccaatgtaacaactcttccctataaatagtgaaggcattcacaaggggaggggaccaaaaaaccaagagctaattcgtactcacatatctaagagcactttgttgaaagatattctctgta

SEQ ID NO: 171077 - DNA, 921 bp, Cannabis sativa
tccctaatattataacgttttcactctgttaacttaactccctatcatttaaattttagcatataatttggattatttacctcacatattaaaatttttgatttttttacttttttaccgtgggtaagaatttttttaaaaaataatgtgtaagttttgtacttgtattaaatttttactgttgttctacggttattttttagttgtttcactgttgtttttagttgttcttatttatgatccactttcgttttacaaaaatacagtaatatgaaaaaaaattcgtgttatagtatttttgtaaaaattaatccaaattctaatatttttgtaagtttctataatttcgtttttgataactaaattttatcatataattattaattggtttcctcaccaaaaaataaaaccaataacttttcaaataagaaaataataatctttaaaaaaaatataataaatgcataaaattaaatatataaatacattaattaatatttatattttgatatgttactaatgtaatatatttactctattaattaaaaatatatacacacaaatatatttataattttttaaatattttataaacactgtatatatagatttattaaatatttgatcagtattattaatgtttataatactattttttttttttttgtgacattagtagaggaggattcgaacttaggacctcctatttgtgatgagaagttagacttagaactatgcctatgaccacatttataatgatattattaatctagtgtcttcattactaaaaattaaaaataaaaaaaaatgtagtgtgtttattacaacggtaaataatattttggatcatgtgttttactaaaattactgattggatcctatgttttgttaaatgacaaaatggaccttgtattttccaaa

SEQ ID NO: 171078 - DNA, 888 bp, Cannabis sativa
catgttctatcgtttcttctcacagtggatgttgttccaacatgtcttctttcgaagcgttggaaaaatatatggcatttagtttctacgctctctttttctgatgataggatgcctaattttgaaaacttttgcaattatgttgacaattgtttggaacatcgcaagagaggtatggccaatgataattcagtcctaatcaaaagttttaagcttcagattatggattttgatccaagaaataatgctcactacattgataaatggttagattttgttgttgagaataaaatcaatgagttatatatttgcttgaacccagaggaggtagaagatgaagatgatgatgattatggggagctcttatattactgtttaccccaaacaatgctactcaacgcaagaaatatcactgttttggacttgcatgggatagaaatattggataatgctactaattatagaattaattttccatccttgaaatcattgaaaatggaaaatttcaggatgcacaatgctgtcttattcaattttgtgttgggttgtcctcttctcgagagattaatcttaattgagtatattaactcaggtgacaatctttgcttagtcagttcaaggctaaagtacatgaagcttaagggtgcaaataaagtccaacttctccaaattaaagcagaaaatattgagtatttggaaatagttgatgttccctttgacggaggagagttttctcttggcaagaatattccaaagggcaattttcattcatatacaagtaaatgtataatattacaaaaaaatatgaacaaaaccataattatataattttatactattttatgaatatttacaaataaataaatatgtttacaattttaacttgtt

SEQ ID NO: 171079 - DNA, 706 bp, Cannabis sativa
cattcacattcgatttgagcattctgttctgtttttcaggtcttttaaagggtactaaaatcattgttcctcatcataattaatttttttaattaagccttttttttttgttttctcattttttggaaattaatacgttctttttaggttgtcttgtgtaattctttgtaggaaaatgaagtttttttttttatatggtgtgagcttacaggttgtgctcacttacttgaaattaataacaaggagagtattgtctctgcccagaaatagaatatttttctttgcaagctgacagtgatggtggcgatttaaggtttctgagttcgtggctctagccgggattgaagaggcaatgtttggatttgataattttatttgttttttgttgttgtattgttcatactaatttttgagtttgtagtcatattttttttttcactgttattgtattttgtttatgtattttatttaaattatacttgtatttttttaatcacttattctgtattactgctattaattataatataattatttttgtgttattttttttggttattaatttagatgtatttatactacttaaataaaatcgaaatacatttatataatttgtaatttaaattgataattataaccatttaaattcttaatacaaatctatattaaatcaaattaaattttattttttttagaaaaatattta

SEQ ID NO: 171080 - DNA, 604 bp, Cannabis sativa
agtgccattgggtaaggtaacctgcttgtgagttgtcatattatgaagagaagaaaaacatgtaatatggcaacaaacatggtgagtagcaccactatctaaaatccaagatgtaggagaaaagggattgattttaccagtaatattgttgactgctggttggtctgatgtggaggcatcagtagcaggttggagttgttgggtcagcatggaaattagttgttggcattgtgcttgagtcaactgggagtcagttgttgacacttgatgagtttgaggacgagatgtggaaccagaatctggtttcttgtggttgttggattcagatcgtggttttccatatccaggtggaaaaccatggaggaaataacacttatccttgtaatgccctggtttttggcaatgagtatagtgagggcgaggccgtttgttctttgatgtttgatttgcagctggatcagtgctaagtgtggatgttgtggaagctgtagcagcaattggagggatgttgcgattacccaaagttctttgtctttcttggtggatcaccatagaaaagactttatttaacggtggacatggatcaataagcaagatttggtct

SEQ ID NO: 171081 - DNA, 674 bp, Cannabis sativa
ggcacgcggttggggagatgttaaaccgccgcaggctgcccaggaaggggaaaatatggttacagcaatgcaagccagaatcaacgagcaagacgaacaaatcagacgcctgaggcaccaaggtgcttatgcaatgcctgttccaaaaatgtaggtggctcttgcccctgctgtgcaggccgggctgactgctgcaatgaaccggatggaaccactgtatgaaaggttccgcaaacaggcacctccagtctttctgggaggtcccgatgtgatgaaattcgagcaatggctaacagttatttcaagaattctaaattttatgggcgtcactcgcaacgacagagtggcctgtgccacatttcagtttcaagaggattccctggtttagtgggacatggtgtccctgactcgtgatgttactactgttacctaggaagagttccaggagttgttcaacgcgaagtattacaatgaggcggtcagaaatattactactgttaccactgttacatgttgtcgaaattgttgggattttatgccttaaataaaacccatttcaatctaatctgacttgttatcaatgatagattagaagtcgtttatgtttacatgtagttttcatgtttatggtttaaaatatacaaaaatctggtaagtccagaacatatagtcat

SEQ ID NO: 171082 - DNA, 787 bp, Cannabis sativa
agaccgactgctcgttctttatctatctcttctgagcgttattgatttcccctgcaatatgcggccctcccaaaataaccaggatgtcctccccttccacaggaataggttgtaaccctggttgtttgggttattaggctgacgcgggtggttgtatcccttgccctgtcttttcacatactgtttaaaatggcctcaagcgatgagactctctatctcatctttgaattggcgacattcgccagttgtatgcccaatatctttatggaatttacaatatttgttaggatctcttttgctcctcgaactcataggctcgggtttgccgacggctaccttctgctcacgtgtgaggtaaatattttctcgagtttcattaagctcggtataaatagtatacactggcacgtatttgtcatgcttcttttgtttctttctatccttcgatggttccctaattccatcctttcttttcggaccagacacccctgagttatcaattctcgtcgaagcagtccctgttaaaacattgctgggtttacctcctgagcttgttttcaataatttcatttcctttcgggcttcttccctccggaaaaacacctaagccctctcgttgaacttagtgatgtttctaaccggacgttcttgtaaatcatcccataactcacccccggcggttaatggatcagtggagatccctgcctgaagggctataagttgcatgctatcatcaaagtttctaaccctagcggtagccatgctaaaacaacttaagtaagcctta

SEQ ID NO: 171083 - DNA, 3291 bp, Cannabis sativa
  modified_base (1557)..(1566): a, c, t, g, unknown or other
  modified_base (2780)..(2800): a, c, t, g, unknown or other
  modified_base (3080)..(3083): a, c, t, g, unknown or other
tggcgcgaggaggagaattgcgcaagggattacgaagagaaggttttccatgagctaaactttccaggagccaacttgaaataccattggtgagcggcttccgacagagtggcaggtaagattctgtaacatacatctcatcgtaccccttacaaatccatttgcatttcaaagtacttgagatgggaaaggggatattctctccctgtgtacattttccacgtcgacattttaaacttgtggggcagtggcaggagattgatctccggcgagaaaggagttccgcgtgctctgtctaactcaagatcattatttctttatccagccatgccgtgaaacatatttttcagttcgtctatctgagcctatagggctgggctgacctgctcgacattctggtcaactaggattacgtcaacatctttctgagcgggcatttgagtacgggctccgggctgcacaactgccgtaacataatgatcatttgttcccctccttctatttagatcattccttaggtcacagaagtgcctggttgccttagcgattgatttgcttggttgacgggtagaatggtaccaatgatctggttggagccatcaggtatgactcctcctgatgaacaatcggacaaggtctgctcgcctaccgctgggcccacgagcggaactcgtgaccagggattgggcgactgactattagaagtctaggaagtattcatcgttggatcttctttcgttaatcccataggaatgacgttcggcaattgctgacctacagtttggtaggctcttcgtatcagcacggtggcgtgccgactacgatcttaatctctgcatggtgaccccttaatgcctccatctctttatctctccatttgccgaacatacgcctttgttcatcgaacacgagatttactgcagcacgcagttcatcctgatcatgatgcacggtgttgttatgacccggcatgagtccgagcgcatcacggagattttgtaattcggcggcatctccaatagtcgtttgggcgttggtttcaagtgaaacattcgtattatggacgccttggttgggggcaaaactgttattcccaatcttttgcacaccaggcgcgattccatcaatatgaactgtttcaccattcccgacgcttgccagctgtccaggattaacagcagacggaacccttgtgctccctgggttctgcgatctaggatccaatgtctgtgaatttgccagatcagtcaggcctctacgagtttgcaacatcgtattggcggttaaatgtttaataaagagggattcgtgatcctcctctcaatgaaagcccaaaatgttgacttctcttttagccaacgacaatgagtctattttataagcgataaacgatttatagtaacagatatacgataaagcaatataaagacacaggaattttatagaggttcggccccgagcagttcggtaatagcctaatcttcattatttatattgacttaagatcgaggagaaagattctttttcttattgctcttacaacaatatctctgaatnnnnnnnnnntagataatagtatagtcttagctcaactgctttttcgaccctccccctgcccagtgaacatacatcactatttatagggctagaaggcttgggaaggaagagtttcccctctcgttacaatgtgtataaacagaaagatcgtaggatcaatgctgaatgcaaggatcgtgggattgaggctgaatacattgacagtgggatcgtgtgtatgccatatccacgtaaattggtccctgagttatagggattgtgctgatgacttatgatgtgaaagctgaattcgctatgtgttggttgctctgcgtggatcgctgaatatcttgctttgggcatgccagcgaggcatcatgcttggcctatcctcccgagcagatgttccaagttgactccatgtgtgaccattcatgtgatgccacgtcaaagtgcaaaaattgggataaccctactgatctacaaaattggcataatgggaaattggttaatcgtaaaagagatatcacttctaatcaaaacagggtcaaatctcttcattctactgctactacaatacaggatcattcccgtaatgtgctgggaatattttatcaggatctagatttactaacaagtatgttaaattaacatcctaaatatgaatatatctaaaaccaaaaaaaagtaaacacataagagtttagaaaaccttacacattgattgcagcagaatattatgactccttccgctcagatctctaacccttgttcctttctatcgcagagtattatcaagatctgagccatcatctctttctctcctccgggtttggttaccagtgtcttactcactatgattgagtacttgacttgttatgtgtgggcatggcactttcactaagggttcaaatatggtgaagaacaatgaaggaggtgaaatcactatggaaagaactctctgatatactagttgtttgacagagaaaactaggtttgatttggttgaaggcatcaagtggatgagtgagagcatcatgttccttttatagtgcttcaactagggctgaattatatggattaaaaaagaataaaatattgggcaaaaacctcttttctttacaattaagcccttgcttagtaaaaattcatcaataagacatagtccagtttttgaattataattgattaatgaaaattaattaactgagtttgcaagcaatattatctcaactagtgagggnnnnnnnnnnnnnnnnnnnnnagctttcaataagtagatatagaattcagtaagtaaattctctaacttattaattctcccttgcgccactatagatttggaattgaatatcactctcaattatatagaacgttctatatgtaccacaatatagatacgttatgattatctattgtgacaatcctaatagtcaaagatcatctatatatgatttacactgaatagggtcaaatttaccgttctacccctccatgtattttatcctttaaacagttagttacctataaatgatacttcagtnnnntaatataattactaaaatgaggccccaatcatttatctctactcaatcaagctcgaaggaatacatagtttcacttctaaatacttataggagcgatagattcgatatctatgatcaacgctcccactcattaaactaccatgttcccaagatgtaaatatccgccaaaaccatttgctagcttccatgaacaacttgaagaacataa

SEQ ID NO: 171084 - DNA, 636 bp, Cannabis sativa
cagatgtgtcagtctgccgctattaatgattaatagagaccgaccattagcggtggggcaataccgacggacccccgccgctaaaagtaaataccagcggattttgggtttaataccggcagaatttttcgcccctaattattagtattgttgtagtgtctttgtgccagtccgtcctcttcaagtgacgaactttccaattcaagccttgaagattgcgaggtgagtagtgaacattcttctactctagaacccgaaacgcaacactactattagtttgagcaaatcgttggagagggatacggtggcttcatttgggaattgaagaaaggttgtaggcgctatctgtgtatatgtaacggtaaaatctcgaagtcgatgcagtagtaatccagttagtatttaacggtaatatctaactaaaatttttaatttgcatagaaaagtaaacttaagggggttttgccaccaaaataaaaaataaaaggttaagtgtacaaaaattaaaacataaggggggttttgccacagaaaaaaaaaataaggggttaagtgtattaaaactaaaatgtaagggggttttgtaaaaaaaaaaaaaaaaaaaaaaaaaactgttttaaatgtaaaaataaaaaa

SEQ ID NO: 171085 - DNA, 626 bp, Cannabis sativa
gaatagcatgaatcatgagattcggtttctgaggatgcttagctagacgagcaagggtgagataaggaagaaggagctcagtgcattattttctacatgggtatgaatttcttttatgtttagagtaattattcaagataaatacttgtaataaatactaaatcatttttctcttatattttttgaatcttaaacagcaacttaaagtgatgaaggggctacttccacgcacagaagaggaggaatatgtgaggaccatctcttatgatggtgtggagatcttggttgaggttggtgtggatgccacacaggctgaggaggacatccaagatccaactattctcagaagacaagcagaaaaagcagcagaatatgtcaaaaatgctcctttgcccaaggtagagactcaggtaccattttttttttaactttttttatgaatattgtttgacattagttgtgattacttggttagttgtaatttatataggttttcagtcattattttatagtttattgtgttatcaatttttatcgatgcattgttgataagatatttgtaataccttagatttaagaaatggattagcaaaatcctaatgagataattatgaataattgaggaa

SEQ ID NO: 171086 - DNA, 1232 bp, Cannabis sativa
attagcgcgtcgagcactctctcccccttgagttgatcgactgtgggtccttgagcgccctgaggtcacatttgcttcttcacgccctgttcttccccctgagcgtggtttgttgtatttcccccactggggtttgtacgagccctctctctatttgttcgggaagaatgctggtggttcctcaccggtgacctccgttccccaaattgtgtcctgaggtcctcctcatttttacaaggaatttcctgttcattggtttctggtcgcctcccattctcatttctatgagagggttcaggatgatcatttggattttcagggggaacctcattctccccaagttgttcttcctgaacaatttcccgtctcctggttcatgagccacgaggtctacctcgtggtcttctcactccagggtcaagttgattttgagtgttactcccctacaccgccctagctgcggctgcatcatgctctaattcaacattcccccggtgtgcctcctccaggcggcgcctaaggtggcggttttccatctcataagtaccctctcccataggctgagcacctccacgattgggtccttcatctctcattcccggattttggccatttccatgctgagttctcctcgaacgcgtcgttcgtgtattgggaccaacgtcaggttgggtcctcctagaatgagtggtccgagtgttggggccaccctcaggttatgtcttcctggagcgagtggtctgttaagactgtgagttggaaggccttctggagcccatgggctcttttccaggacggtgatgagtttcttcatgtggtgtattaacgttttctgggttgttagccacgaaggagattgttttttacatgtaaggagggttttttctgttcttttacacgaaggctctcaattaaagcaccaaactgttaacgtagattttcgttaaccaaatttgaagttgaatagtgataaacttgcgctgaagaataaaaacagtagagaaataaaaagaaaagaatgaacacgaaggtttttttatgtagttttgcagttaaaattctgcatagtctacgagtcaatcttattagatttctggtattgatctagggccttttctcttatgatcattcttcgtcccttttttagtctaacttgcctctatttataattacatagtgaggcagttaattacagagttgactgtaatctttacaacaattatcccctgaaa

SEQ ID NO: 171087 - DNA, 503 bp, Cannabis sativa
ttctctctcctacttttgagagaactcatgcacgtacgatccttcaatggccttcttggccatgacaagtattggtcgtcccggcaccgtggccccactggtcatgggaagaaaaacatccatgaccccactggttttggaggtgagaagtgttctgagtctggtagtccaaggccacataggtattggagcttcagaactgaacacaaagtgttcatgctaacattatccaatgatggtggaatggtgagaatttgcgagaggactagaatagcaggattcgagatagctgtaacaattgatgcagctgcttggattctggaaaatttggaggagatacagaaaaaagatggaaggcagcggaactcattcaaaagatcctttcggaactatacaatcagctgcttcttggaggtcttccagaatacgaagggtgtatttcttaagatctctgtactgagaaacaacatggtaaagatggtgatcgtacctgaagaaaagga

SEQ ID NO: 171088 - DNA, 648 bp, Cannabis sativa
agagagagagagagagaggatatattcttcaaaaatccttacaagagaaaacatcaacaacatgagagggagatgaattcccccaccttcttaaaaatcaatcagtatcaaagaaactcttttgatagatatgaagaactaatacaaattaggaaaactgactcatgaaacacttttgattatctttgaaaaattgacgaagtaaccatacaaaaataaaatcaacgcaactgaaaatacacaacataaagaagaatatacctatacctattaagaaggagaaggacaaagcattactgttcacttgaaaggaacaatgggatctcaaaatcgaaaaagcaaaagcaatctctttgccaatacacgaagaaagagaaaaaaatgtaagctttgtaataaccgactgtggccttttccaagctttaagatggcaaatcaaccaaagtactatggaactgattttgcccataataataataataataataataataattacaaaaatacatgatttttttatttttatttttatttttaagcttcacacagtaaaaacaataattcatttttttttggactaattagtaatttttttccctaaattttgacatgtaccaaatcgtgtccctgaattttttttgccgttaa

SEQ ID NO: 171089 - DNA, 939 bp, Cannabis sativa
aaggaaaaaaataaaactggttgagccatgattcaaaattaaaatgacagtaagtaaacttgctagaattaatgctattgttgctagaaaaattctttcaaaaagtgtaatatggtaaaagtggcttgaataactaatccttcttatgctaatttttcccagatgttatagcattacctcagcattcctgccagtgataaaagaattttatgtgtttatgagaattttccaaaactcacaatttaagttctaccatctagattcacatattcctatatcaaaccagattagagaacactaattatgcttcaattcttaagttatgcaaggtaaatgaaatattcctattccacttacaaagaaaaacctaaatctaggatttcacttgctccattcaagttgaactactagatccagcccttctgaaaaaagatctagcttagcaaattgttattaatggccaagaaataacaatcaaaaaaaaaataagaactcactttaatgaacaaaggcataaatgttaaaatatgcttaaaaagttttatcatacccaacataggagttcatagccactcaagctttaagaaaattagctcatgttcaacacaaaaattacaatccaaatttaaaattattcatccatggttactgcctctcttttacaactatcaagtttctagaaattaatgacaagaaagaaaagaaaagggaaatagaagaaaagggaaaagaaatgcaaacaatagggcttttgtccttctctttctcttgcacttgggtaccccttctcttttcttctctctgtgttttctgcaattactcctctctaaaaatggtagttgtcttcttcatgatgatggaggtgtacttcatctcttttcttctttgttgggtctttagggtacaaaatgatatactaaaaatagaagcccaatcttt

SEQ ID NO: 171090 - DNA, 530 bp, Cannabis sativa
  modified_base (468)..(487): a, c, t, g, unknown or other
tatattgcagaaaaaatggcagcaactccaccagtttttaatttttgttccttgattttttttttccaatacaactttaaattaaaaataattttaatgtgtgacacataaataaacagagaattgaagaaaagtggagtgtgtgcaaaggaaacttgcagacccaaaaactttaatttaaaccctacttttccggcaagggaaactcgccacttttcattgtgacttcgcatacccagaaggggaaatccagggggcgaagtgtttgtgtggggtttaaactgtaaaccctaggtaggacctcaagaaactgtaaatcgtttggagatttggtgagatgagagagagaaagaggggtgggagggtttaaattaattctctgtttaaactgtaaaccctaggtaggaccagaatgtagaagaagaaagaagaaagaagaaaaagagaagaagaaagaagaaagaagannnnnnnnnnnnnnnnnnnnaaaagtaaaaaaaaaaaaattaatttaaattctgattttaatt

SEQ ID NO: 171091 - DNA, 593 bp, Cannabis sativa
gattgaaattgttgaacctggaagaccaaaaaaataaagaacttgagagaaatctaagtggacagaaactttttttaagaaaaattaatagcaaaaattttagtttgatacatttaagcataataataagatctatgagaggagagatcttagaggttaagagaaaatatataaatatatatatatacttacagtgagagaaatggacgtgagcaagaaatattgaggagagagagtgaatcggcaggggttctactttagaaatttaggagttttacatagtttatacaatttaaaatttttgggtttagagagaaatgaagaagatgaactgatgaagaaaacaactatgtatatagctattaacccaaaaaattatgcgggaagtatttgttttcccgctcgtacaaaaatttcatctaccgccaataactacaattttttatttgtgtaacactattagccgcgggatctgcccctactaataaatacatccgctgctaataattttttaaaatattttattattagtggcggattggatcgccggtaataaatatttctccgctgctaatactatattattattaatt

SEQ ID NO: 171092 - DNA, 727 bp, Cannabis sativa
atatttattagaacaagtataatagtttgattttaaatctttttatgcaaaacaagatctcaattttattttaaaaatactacacataattaattttgtcatatttactaaatatgaccactaaggactttacaattaaaattctaattgaatagttttataatgctaaaaatacatattttaaactacatgtataaaagaagcagtgaagtgtgtaataaaatatttgaatcttattcagaagtttttaaaaacttacaaataatcttaaatagctataacatacatgatcatttaaataatagaataaaatatttttcttaataccaaaatagatgaaagaattactagaacaacctttttaaagtgctctattatgagattaggtaggcacattaactgtaaataaaaaaaaaatgagatagttaataaaagcaccaagttgaatataggaaaacaaaaatgcaaaatgagatgatgaataagatacctcagtgtaattgaatagaagtacaatgtaagatcggttgccaatttttaataatttttatacccttgcttctagatgaaggtataccagtcattggataccaaaaaatgtgcattcttcatcaatctaatggttaaaaagctattgaagttttacttacctcaaggggccgtttggtacgcaggattggattggattagacatgctaatttgtccaatccagtgtttgggcatgtt

SEQ ID NO: 171093 - DNA, 518 bp, Cannabis sativa
ttttttttttatggttttcttcttggttggctaataatctttgtaaaattttgtactctataaatttattcataagaagcatcatataattcacattgagcattgtattagaccaattgaataaacaagtttagtagggtgtatttgtgtgtattatattatattggtcatcatacatataattcatctttacaactttttatttataattctttttcacttacatatatttgtcatataatagaattttatgacacaatttgagactattttgttatatatatttttttgctaagacatggaatatatcattcacatagtgaaacaaaagtttgttggagtttttgctaactatttattttttttcaagaaaaataagccttcaaaatatcaatagcaactatatattaattttttttaagaaatatattattaatattaaaaattgaaaatatctagggaaatttgaatttctatgcatgcattaggggataatttttttcctaaactaatacttt

SEQ ID NO: 171094 - DNA, 1075 bp, Cannabis sativa
cataaaaaaacaagcacacgtacaactataatttatatattattttctgtacgctaaaaaagaaattgagttataatattcttatatattcttaagttatatatgaacaaaaataatacctctatctaaaacgatttacttctagcaaaaaaataaaaatataaaattttaattcatcacttacattcgagaaattgtaagaatttgaaaatagtttgagaatccgcacaaagcaacaccggtcatccaatatactaacccaatttgaatgagattgagtcgatttccactgaaattttttgaaattaattattacaataaattaattttatttttataaaatgttattattatttaaatatatatttagatttatatttatattgccttgttttgcatattgcaactataagaattgaaatcccaaatcctatgaggtagctagaaggtaagaatccatcttgagaattatttaaattaaaatcacccctacaaacaaatattatatgatagtattaataataataaatatataaatgaaatttattatatattaatttttttttaaaaataatataatcaaaacttacagtattcctctcccatgaacagtatccttgctaggcacaccattaatttcgttgctcgcaatggttccttgattcatatatattaagatgataataagacataagataatgagtaagctgcaaaacataaaaatgatatttttgatattaaaattagagattgaataacaatgattaagagataataatgaagataaatttaaaaataaaaatataattattacatatataataagaataaatttatagatataattaagtaattaattagtagaataaaaaaatcaatatttaaaacatatattataaagtcgctgtttttttcaatttttattaaattagtgaaatttcaaatttaaacaaagaattcgttaaatataataaatgttaaatttttttgaattcaaatatatacatgttaaataaatattttatcaaattaaatttatttgtgttcaaacaattttgatataaataattaattt

SEQ ID NO: 171095 - DNA, 569 bp, Cannabis sativa
ttaaaccaattaaatagctctaccgcatgaaacacattactctaataatcatctattagcattattcacataacacaagcaaagaaactttcaattggagcaaaatcttcattcaatttctattctcttgatttaaaggtaattaattaaaaaaaaaaaaaaaaaaaaaaaactcttacgttcaacgatgtaaagcaccttttgtaacattaatttgtaaaattaataaaacaaagaattctactaaaattgattaaaaatagagtttttcttcaaagactttttttttttttggtctaactcctaacactattttaagaaaattctacggcacactccatgtgcactcctttaaaaagaagtgaaccaattaccttttatttattttgacattagaaagaattttttagtatattttttttataatagtgtgtgttataattatttaaaacacattgtaaaattttaagaaattttaaaaaattaacacaccgaaaataggcttcaaacattatatttaggggtgttcattcaattcaatccgcactattttgttcatagtgtatccg

SEQ ID NO: 171096 - DNA, 688 bp, Cannabis sativa
ctgatttcgacggtcctactcaaatgctatagcaactaggggagaactctccgcattattattaccataccagtacacattacagtacagattttagaagaaaataatggacaatatttgaaatttttggcctttcttgcttgctatttataaattgcaaggtgttggttttattcggtgtcatcatactgtatagtttatttttccatacatatgtatttacttgtattgtaatttgtatgcatgtacaaggaagtgtacaatttgtaatggaactagtaagaaaaaaatcctttatgaaaggattctcatattttattcattatggtataaaatcaaaatcagagtttgatttttcagctaaaaagaaatgtgaatttagaaatggaagagtgactaattttcaatgccggccatgattactggtcacacttgtcttaacacatcattttttgtctttggaattctcattggactttaataaaataatagaaacttatctttaaaaatcctaattgtgaatggctaattaattgatagggccaatttctagaacggcctaactccaatctctatcaggaatttttctgcaaaggatggaacatctaactaatctccaccaccatcaacaaatatagacatacagccatcattcgttccaatccgcatttttttggtcaaacaacat

SEQ ID NO: 171097 - DNA, 505 bp, Cannabis sativa
gggcggacccacatataatcgagaaggatagtggcctctcctgaaaaaaaaaatggaaaaaaaatatatatacaatttagttagttacaacatatatttgtaataaaagataatatttataaacatgatattaactttggtgtaatggttaagctacttagcgtataagttagagaacaatgatcctaatcccattatttatataaaaaaaaaatgatcctaatcccattaaatgtttttttttcttttttaaatttacttttttgcctcccctcacttacaaaaaaaaaattacgcccccctcactttaaatcctaggtccgctactgaatttaggattgtacatcggtcggtatgggtggtttatcctatatattttctaacccaatttaaaatttggtttgcttaaatttaagtgcaacctgcctaattaaaaaatatatatatatgtaaaccgaccaacggtttgggcggattggtcggttaatccgcccgaaccggccaa

SEQ ID NO: 171098 - DNA, 572 bp, Cannabis sativa
  modified_base (521)..(541): a, c, t, g, unknown or other
aatcccctttatggctgacaatgaagaaataaccctcacagagaaactgcttacagtcctggaaaagagccaatgagtccctagggatccttcaacttatcatttgaacggaccataagcccaaggaaaacccagaatctaggaactatgcatgaagggtctaggatgaacaatgacagacctctttctaatccagttgatgaggatggcgcctatgacccagcaaggtacataccaatcgtcgagttagaaaactgccaccttaggcgccgattggaggaggcaaactggcgtaatactaaattagagcgtgtggcagctacggccagggcgcacaaataatacccaaaatcaacctgaccctggagagagaaaatcgcgaggccaacctcgagattcgcgaacttggggcaggaggcaacctaaaggaacccctagaattctcaggaaggacaacatggggaaactaggggataacaccttgaaggcaagatgccaaatgtgttgggttttgtgccctnnnnnnnnnnnnnnnnnnnnnaatcagatttactaataaagattagaaataa

SEQ ID NO: 171099 - DNA, 776 bp, Cannabis sativa
tgataaatataaacggtttctttacataatatttgagttattatttgtgcttatttattttgttatgaaactggttcttttcatatttatgcctcaatattttttaaaattaatctctatttttttaaaaaaaaaattataatcggtgttatgaggtattatgtgttatgaggttttttattgtagaattagttttatttttaatttatgtttcagtgtttaggaactgatttcccctttattttttaattgtaatcggtttgaattattgtgtgttacttatttgtattcattatgttctatttaagttataaccggttctaatttaattatgattagtttgagttattttgttttatttgtttttattctttatgttacagaatcggttatatttcaattataaccggttctatttttgtttatatttgagacatctacttctggtgactttttcagtaactttttccggcgacagtgacttttccaatgacgatgactttttcggcaatttttccagtgactttcccagcaacggtgatttttctaacgacttttcccgtgccaatagcttttccagtgacttctccggcgccgacaacttttcaggtgacttttccggcaaaacttattattgtttacaaatatgagatttctatttttctttaatgtaaaaatatggcataaaaaaactcatataaatgtaaaaaataaaaaaaaaatcgataaccccttaactttatttatttataccataaaaatgtaaactcttaaaa

SEQ ID NO: 171100 - DNA, 572 bp, Cannabis sativa
tatagtcaataacgggtatttgatcaccctcatcacttgataatttgcatcatcatcatcatcactttgatcaccctcaacaccatcatcatcatcatcatcataggttatagtcaatgattgatatgtgattgagttatgatcgacatggaggaaaggcgactataaaataaggatacagaggactggtttttggtcatgacgaggtgcttggaaacaaattccttgttcttgatgaaacccgagatcagcgaataacagaacttgttcacaaatttgagctgaaacacagaatccgcaggtaccaacaacataatctcctccaatatgtctattggcaaatcacaaaagcttgccatgatctgcattaaccataaatagactttcatatattaaaacaatatgtcctaaaatcacaccaagaattaaaacaaggcttactgtgaaagtttcaaactcttgaaagaaaaagactaataaggcatttatttaatcacacagctggtaatagaaattaatgttatataaattaacaattaacccaagatctatttgtatataacatagaacac

SEQ ID NO: 171101 - DNA, 1369 bp, Cannabis sativa
ttttttttttttttttaaaaaaaaaatagttttgaatttagtccttttttcttcttatcattttcaattttttattcaattaaactccattcttttcccacgatcaaaacccacacttcaagcaaaatattgagattttattccctaaataaaacctattttaatataatcttatttactattaatagtacattacagaacatatagttatttacaattacagtgataatactgattaagaataatattatggtcagtgatatttttgaatatagactgatgctaacaaaaccaaaaacaaactacaatgcaattgctatgaaactaggagtttaatgaattcttaaattttttgttaatgagtccacaaagttgttgactaacttcttctaaacagtaggtgtcaaaattattgtggttttctgcgtttttttctgtttgtgtatgttcattgttgtatcaaaactctcaatgactacattagtgtagtaattggtagttctctagctgctaagtttgtcgagtttagcgattcaacaatgttagaagtcatagttgtatacatgttgtgtttgatgtagtaccttgactatttgtggtatccaacttgttgtaaatagggtctaacatgcttgtccaagctgtcaagctcgctcatatggtattcaaatttctgtatgcttttgctgctacaaagaatggtttatcgagtttgttgatattcttcttgaaggttgcttaataggtggtatacatagtagccgcgagttatgttttgaaatacatgagcaataaccttaattatactctcatgtctgtctgagatcaagaactgttcttctctgaccccatatgcttccctcaattttgtaaaacactattcccatgagctgtcattttctgaatctacaatagagaatgctaggggaaaaatgtgtccatttgcatcttgtgtacaagctgggagcaatgtcccttcatatgttgattttaggaaagttccatcaaccaagattatgggtttgcacttgttccatatttttattgaagcatctagagctagaaataagtacatgaagttgttatcttcttgagtttgcatgtgtactatggttcctcaattagatttctacagcaagtgcaaaaaacttagcagcaggttgtatgattcttttgctttttctcgtaattcttactgtgcgtgctctttacttctccatgctttcatgtagttcattttttatgctatacttatcattcaattatactttgttgtcttgtggtgtttgagttgtttttatgttggtgaaccttggcttgatgtagtttctaattgttaacgcagattttcgttaacgatataagccta

SEQ ID NO: 171102 - DNA, 1268 bp, Cannabis sativa
tttctctgccaactttctttgcaattcttcaacttgttcctccaaactcattgttccaataacaaacactgacatactgtcaaatccaatattgttacattttgctaaatttcttaggaaattcttctcattatttacagatgaaacattgtgatatgagtcattggaacatttgtgagagctttcagattgaattgctaagaatttgggacactcataagctaaacattttcgtacatgctgtagttttgagcatactacttgtctcatgtactgttttggcttattccttaatgccccagttataacagtggtggttcttacggtatttagaccatgaagatattcccaccttccttcttctttttctcttgaagtccattcatttatgccattagaaaatgtgtacgagttcaattgtgaaaaattaaacccggtacttgcatcatttcttatggacttaggctttgatgtaaatcccttagcaggattactttgaaacaatgagatgtttctcacaaggtctgactcaattcctcctatttttactttaaaaggttttctagaaataaccggttctgccccagtatatttggtgtatgacccagtcgtactattatttagtagctttgtgatgcaaagtgatgaggtaggatctttagtggtattttgtattgaaaaatctagaccatggtttcctcctttgttgaattcaccatgcaaaaactgatatcaaccagattgattggaatataactgatcattatttgagtcagatattgttgcttaacctttgtggttctaataggaatgccactagattttgttgaatttgtttgaatggactcggaagagttcaacattgcaatagccttcgatgcttgagcaactcctctcttaatagctttagcatgtctcttctttagctctttgatgacttttccttttaaagcctatgcgttttgatgagctcctatgacctttattttccttagaacatcagtatgagtatagattccaatagaaaatgtcacaagaaagtcatccttcttcttttgccccaagttggtgtgtgcatgtgcaagcttgtggaaaaatactgttacttttggtgccattatttttcctgtaaaatagcacacttaattacaaaagtgtgatttattaattctcaacgtaattagagatgaaaaggagaatgggtcctactgggcgtgtcaaaaattatgttaagcaaaaattttacatttaaaatattaaaaataaat

SEQ ID NO: 171103 - DNA, 676 bp, Cannabis sativa
tcatagtcaatttttttttagatgaacattatgtaccgtacaaaattctaatataatccaacccacccttttctctaaaatataatcagggtcgacccaagcaatataggggcgttgggcaaaaaattaaaattaggctttttataaaaaaaaaaaaatctatatcaatcaatacttcataaattcaattttcaataataataatagaaattatagatactaaaataggcaagaattttagaatcatgtgtactggaactacaagattttatcatggttattttaagtgtgtatttactcttataataaaataattttttattattatgtgtattatactataatacattatcaaaaaaaatatgtttattatatcatatataaatggatgataaaaaaaggaggccttttaatatatgagatcttacaattgcccaagatgccatatgcttggtgtaacaccttactagtttaggcgtgttattgtaatttcatactctctgtgcaatccattgccaatcaacagatttgttagaaaaatgtgattaattaaaatttcacacaattaaattttaaattaaaataaataaaccttacataaaccgagatcctgttgtttaaaatttacaaccaatacaacaattgcagctattaccggcgggccaaatccgcccct

SEQ ID NO: 171104 - DNA, 883 bp, Cannabis sativa
ttttaaaaaaggactaaccagaatctgccacgtgtcattcatctaagaacaccaagttgagctgcatatgtgtcatttttaactggattttaaaataataataataattgtgatggtattattgggaaagataagttttttgtccaattttatccaaaactaaattaggttttttatttaaaaagaaagaaataaaaatagagcggggtcatgtgatgtgattcattgtgttgtgttaaatgctaataaactaaataattgaattgtcctttttacagttatggtggaataaaatatttaaaagcaataaataaataataaagattatcaaattgtaaatttgaatcctaggattctgaatttctgaatccactatccaacgtgtgatcaggaatccaacacgtgtatattttcttttctcttatattattcagaagtgtaatacactaatactgtacaaatacagtaatattatatataaaaaaaaaaagtaatatagcttttgaaaaaaataatttaaaaacttaaatctggacttttttggggagtcttttcttttatatatattcatcgaccatttagtcacacaaattaccacaaatagtaagtaatttgtgtgtccagtcactcactaaaatagctcatatatataatattaattaattaaaattaaacaatattttaacacgttaatttttaccgacaaaaattttgacagctaaatacacattaattgttgaaagactaaaatttacactattttttttttttttgaatcaactaaaatttacactattaattatagaggagtgctaagaaaactctctatcccactctcttttgcactctctttttaatttaatgacaaatgtcaaattttgag

SEQ ID NO: 171105 - DNA, 1117 bp, Cannabis sativa
taattcgggtcgatattaaaatggccacaaataattttagggtcaatccctatcatgtttgaatggctccaggcgaactgatcctggtttgccttaagaaaacttgttagttgccattttagtttttcatctagatttttccaatgaatacacactttgtgggaatttttggatctaaaaaaacttcttccaattcctcaattggttttaattttttcttttcatcttgaacttgaggatctatgtccttgacttgcttcttaccctcctcagttgtgactgccattagttgatgaccaacttttttattctgtagctctatgcagtagcattcacaagccagtagttggtcacctcgcaccacacctacacctgttagtgtttgaaattttagagataggtgtttaattgaactaactgcccctagttcaattagggcaggtcgaccagccagtatgttgtaggccgatggtaagtcgacaactagaaaattttgcattatggtagtggataaaggcgtctcacccaggattaatgggagttcaattattccttgactggagacactatcgcctataaatccacacagatttaccatgcaaggttttaactttgctctttctagtcccattttcttgagtgtgtgcttataaagaatattcactgaacttccattatccaccaacaccctttttattcttttgttggcgagctggattgtaattaatagcgggttgacatgaggatatctcacatgctttgcctcttccgccgagaacacaattggaggttcctcagtcttagctttcttagacaattctaaagcaaagactgactgctcattcttaacttccttgacatatcttttttgggcattgttactttctccagccagatgtggctctcgcgagataaccaaaatgccctctccttctagaggaggaggttgtaatctctggttgcctaggttattgggcgaatttggctggttttgtccattgccttatcgtttcacatactactggaagtaaccacgtgagatgaggctttctatcttgtctttcaattgacgacattcttttgtcttatgccctatgtccttgtgaaatttacaaaa

SEQ ID NO: 171106 - DNA, 823 bp, Cannabis sativa
caaaaaggtgatgactcagattctatctgtgaggatcgggagccatgcgccaggcacatcttggaggcagagctccccaaaaattttaagatgcccgcaatggaagcttataccaggaactcagacccaagcgatcacctgtctcggttcaaccgagtaatgacggtcatgagtgtcagcaatgacgccaaatgtttatgcttcccgctgacattaagtgggtccgcggaggaatggttcaagaagttagaaccaggatcagtggactgctggaacaagctgcaagttagtcttcggagatagtttgtcgccgcgagaaaggttaatcttgaggtcagtgccctgactaacatcaagcaactgcccacagaaacattgaaaaatttcataaagaggtttaaggaagaagcctcgaagaccaagaaagttgatgacggaaaacagcttgcacttcttcaagcaaggatccgtacagggactccattttggaatgaattacagtaagaagtagcctccaaccttcaagacttccagaagagagtccaaaagtacatcaccttagaagaggcccaaatagtggcttatgggggatactatccgatcggaatagcagggtatgcacccggagtccaactcccggaaaccctaccaatagctactccaccaatgagcgtcatacaattctccgctaccctaggatataatcagagccaggcattgacttctgcatcttctcattatgggaatccttctgggataaatggacaagtcccgtctcactccgctcctgctgcaagcctagcgggaccttctcaaggctctc

SEQ ID NO: 171107 - DNA, 581 bp, Cannabis sativa
tttgaagagcaccttgcaaggattaaccaccgaaaatttgaactaaaatagatgagaatcagccacttaatcttcaatgcaaagtggcaaaatttctttctctctctagctttctttctcttctttccctcttaatttttttctttttctgtggctgcctgttgctcgcgatacctacaaccactttcctttttttttttcttttaattgttccaaacaaaatttggccttaagcccttaaatggtacaagcccaacaataataggctgatccaacaaatctccccctccatctcagttggtgggctctactaagcccgctcttcgcctacaagctttgagcttctctttaggcaaaagtctttgtcaacatattagaaccatctcattggtgtgcactttttctaagtacatttctttcatctcaactacatcacaaatccaatgatatctaacatcaatatgcttagatcttgaatggaatattgaattcttagagaggtgaatggcactctaactgtcacagtagacaatgtatctttcttgttgcaagcttaactcttgtaggaactttttcatcca

SEQ ID NO: 171108 - DNA, 611 bp, Cannabis sativa
tataaaataattagcattgttatcacttcaacttttaataattcgacttgttaaaaatttttcttaaaatataatagttacataattatgctcttactcaaaatttagtatttttaccacttaaactttaacaaatataatttttttccctcttttattacaaaattttatttttaaaaattataatatttaattcgaaaaaaaataataaaaaatattaaaaacttgataaaaatattaaattaattacaaaatattaatttacttaaaaaaaaagttaaattattcttaaaagaatattttcaaattttattttatttataaacgcgtatcttgaaaaagtaaattaaaattattgagaatctaataaataatttaaataatctaagatttttttaaataaaaaattaaacttatttatatttataaactcatatcttaacaaataaaaaataattaaaaatttaataaaaatataatattattttgaaaaaaaaagttagaaataaactaaaaaaatataatgtttacataaaaaaaatctacatttttttagaaaaataaaataaactcaagtttgttcccgtaatatttagtttttacaaaaattg

SEQ ID NO: 171109 - DNA, 1259 bp, Cannabis sativa
tctccttttgcttcttttgcacctgctgtagctgtttttcttccctttctttctgaattttagcatgccgacaagttgctttggtatgtccaaatttagaacagctagagcacttcgctgggagccattcatattctatattctattcttgtagctatccatactcattaaagtaaggaatgaaccatggtggtgaatccgtgatttccatttccactaggactctagcaaattgtaatctcgttctggctttagtgtgttggtccgccattataggttttccaattatgctcacaagagcacttaaacttttggttccccaagattgaaggcctaaatcgtgcaatcttatccacaagggaaccgaatgaacaagattcaaagcatttaaatccattgttcaaggtcgaattattaccggttttttgtcgaattagattactcctacttccaacacttgatcacgggttgcttcatctcgaaatcttaccattattagccccattgccatcttagacacctactggatccccaaatgtcccagactcgtttgatgaagcctttgaaaatgggaacaggaggatttgatccaagaactttgcagattacagctgatttccaacaatttccctgttctctaacctcctccaaatcaacttgtgctatcttgattccattccttatcataggctctgtgaaaagaagcttttgatcccgattcattgcttttccatttgtgaatgtttcccaggtcttcttcgcagacatcggcaaatggtgcagggtttgaatgcctgctctgttcctcctcaacctccatcgcctagctagtggatctctgaatctcgctttgaccaacatcttcagaggacagaatatcttggtttttaactaagtctgcaattaggtttagtccctctgtcgaaccattctcgtcgacatcctaagattcctcacatcctgcttgcgaatcgtcgataggggatcgaatgactggcttgcgtcccacctttttcttcctcaccatgggagaagaaagcagagcaacgaaagctgttgtattttaactatatacttctttgttttcattttgggtatttttatgtttttgagcatgaactaatttcttttagttagaacatttaattaaccttagattgtgaattttgttgatgttttatgaatatttttagtaagaaagtttttttcattcaagaatgtctaatgtttgtctacgtacttttgtttgatcaccaatt

SEQ ID NO: 171110 - DNA, 509 bp, Cannabis sativa
ttcaatgtactcctgcaacacgtttcttattacaacacttttgacttttaatttcattcatttatttggcaacgatgaatgaatgaaaaacgacaacaaaaattgaccaaataaaaaccacattttttttatccaactaggcaaacttaatacaaaggtgctaggggtgaatatcgggcgggttgattgggtttcgggttcgtggctttcgggtttacgggtttaaaaaattatacttggacccaacttgtgaaatggttcaggttcgcgggtctacgggttcgagttggttgggtcaacaggttgactcagtcaacttgttaatttattattttttaaatagaaatcaaattttatgtagttttttttagggtttttttcaattctaacaaaaaaaaagtaataatattacaaaaatattttcaattggccaaatgaacaaatatatagctcaaataaaaaaaaattacacaaataccacttacacacactttcaactcaggatccat

SEQ ID NO: 171111 - DNA, 535 bp, Cannabis sativa
tagtattttacaccttttagaagtgtgttttgcgattgactagtgatatatattaatgagacctgatacttaattatatcaataacaatattaacagaaaaatgctaaacaccattaatacattttaatatttctcttttatttattatcaaagaaagtattaataacaaagtacaaacacataactttttctatttctattcactttactttattacttttttttgtttggaacaagtctttccttctttaccagtttacctcattgctttattatttatttttttctaaagaaaaaagaaaaagagtggcatatcgaagggaaattgctaagattttttgaagtaatttaatcaaaattaaactaatgtttaaaacgaactcaacaatcttacaaaaatttcataataagttattagcggtaaaactctcctatttctacctaagtgacaccttaacttctcaatctaaaaattggtggccaaattttttgaatgtatttttatgttatattcttgttaatttgttgttattt

SEQ ID NO: 171112 - DNA, 601 bp, Cannabis sativa
attaaaaactacatgattagtatattttcaacgatattctaacactcattttgatttgtcaaaatatatgagtggttgataacttgatgttgcccaaatagttctaattttcatttatttagtttgagtcatcaaatcaaatttatatatttatctaatatatccatatatttataagacaaaaaatatgagacaaaattctattattctaaaattttatttttttattttatattttaaaaatttttattcatttatcttttaagtgatgttgatatatttatacccaaaaagaaaaactatatacaacttaaatgtatttagaatctaaacgtatttaaattaataataggtaatcaacttatttatagtaattaataataatatttttaataatatttattcaaaaaaaataataatatttaataataattaaatgaaacaataagaaaaaatgtgataaaataagaattaaaagtttattcattttaatttacaaataattaaaaaatagtgaatacatcaagaattataatattatttcacttatttatagtaaaaatattattaactacttaaaatataaatttctgaaataaaa

SEQ ID NO: 171113 - DNA, 760 bp, Cannabis sativa
tttttttttttaattttagtacttgaagtttttatttataaaattcaacaaaaaaatataaaaaaataacataaaatcaatataacgagaaataaaaaattaattataaataaactatatggcaacaaaaataaataaataatattattttgtgtatatataatagcaataatcaatattcttgtatcatcaactcgacacgaaaactaaataaataaataattcttatctttgtagtgatgtatatgtatattgtactatattaccgttatacaccaattaacaatgtggtgctataattaaataaaatatatgtattgacatattaatcaccttgacaaaattattatgactaattaataaaaataaaatgttgatttgaaactttcattgtgcctatatatttaacatttggtttgttgttgatataatatcaatattcagaatattgattgaaattgtggacatgttattttggttgaaggagttaaacggggacaaatatgtcactttctctcctaactatattatgatcttgtaaatatatatatttaaaaaaaaaaaaaaaaaacttataatatgttattgaatccaaatttcatgtaccgatcataaaaaatattaaatggttgaaatattgaaaaatttaaattaatttaatctttatttacttgttatatatatatatatatatattttatatatatttttggtactaggttatctatcttatttttaaaaaaaaactaattttgataat

SEQ ID NO: 171114 - DNA, 733 bp, Cannabis sativa
ttacagtcttcgatcatgcaaatttcttttgaacaaagttaacttgcgatcggcgggcattctcgctgacaacgaatacacttgcaattacaaggttctgaagtattcctcttggcagtaaatgattgttccacccgaggatcaagcctgggatctcttggcccaagcactataccttcaaagcactgcccctcgggaatttggtgaaggagcatcctgaggtaatcaatgtagctggtcacctactgtacttagggctgagcgtaatatatttgttaccttccaaactcttgtcttaattttaatacttggaattccattctcgtggaccgcattgctcataagtttgacagttggtattctagattccacgtccagagtaactatcacgagtcattttatggtatagccaagcaatacggtactatggaagatggggcaggtcacatagatgcgagatgggatttagaaccaattgagccttttgatatattcaaaattacaggttgtagggattttagtgaatattatggtccttcaaccccttcatctaatgatagtttgccttctagtgattttggtaaatcccttaggtggaaaattatactcctccccttttttttggcttttttataatgattgtaacgcctcgtcttgttttgcagatatgggttatgaatacatcctggaccgtaaggggaagaaaaggacatctaaccctggagtccctact

SEQ ID NO: 171115 - DNA, 606 bp, Cannabis sativa
gctgcagctgcttctcttctccggtgtggtcgcttcccagcggtcggctcagtccagcgagcctcatccataacatccaaagttagaaaagccttctccgcccgtgtccgcccgtgtccacccacccccgtgcccccgcttcgatgaaggctccaacccaatcgatgaaagtatattttttttatctctctctccatcttcttgaagggtttcaaatctctttctcttcatctttgatctctatttttaagcaagtggaataatcaggaagtgtcccatgattaatctctctcaatatattttatgttcacatgtatttcttttatgtaaataattaatttacaattgtatttttttaggttttgatatgtaaatattttttatttttatttatggatatgtgaaaatggtacagtggatttttgtttctcaagtaatttatggaaacggtatcttagattcgggctcaagttatgaatactaactgtcatgaaacattcgggatcagccaaataacacccaaacccgaccacgcccaacctaactacgctcgacccgaaacccgacatacccgaacacccaaaaattaggttcggttgtgcattt

SEQ ID NO: 171116 - DNA, 644 bp, Cannabis sativa
ttttttttttatttgaacactaatatgtttgaatgagcctaaataatacccaagatttaatttgcgtcatttgaagttaacatcagctgtagttttcttttcgagaattgcgtcatttgaaaacatggttctcaatacaatttttttttttttttttacagttaatcattttctttcacttgtttgctgtcactctctcttttattttatctcagtatatatctatcttcatctggataatgggcatgagtcttttttttttcctttcaatcttttactaacttgcattcatcttcgtactttgtaagttacttgtctctatattttgttacaacttatcatgagaaaagcttgaggcgagtggactaccacaagtgaagaaaatgaaggttgaaggtttagttgtaactagagtcggctatgtgttatttgattattttagttttgggttgttcgttttggttagggtcgtcggtaggggtttgagtatttgcttaatagtaaacactgtcaagtacatttataaaggtcatgaccgtgctgctttcaacttagtatctgaaccaaaaaattgacaaatatattacatccaatattttcttttaattgtcaaaattataaattacattatttagatatacata

SEQ ID NO: 171117 - DNA, 865 bp, Cannabis sativa
gagagagagagagagaatgaaaaatcaattcctaattttttctacaagatgctcttttctggttatctaagggtgttggtttattctgatatatatcatatactagttggggtctaacgtgctttgcacgtgagcccataattgaaatatatttttaaaaaggaataattgcggtaaaatttcccaaaaatttagagttgatacagaagattaatcctcaacctcgaaaattggcggcattagtccctaaggtcgctattttagtaactccgttggtacccaatttaacagacctgttaaatactaacaaaaatgccacgtgtttaaatattattgggtcagccataattttaattaaaaaaattaaaaataattaaaataataaatcatttattcaaaaaaaattattaaaaaatgataataatatttttatccttttttcttttttttttttctcaattcttctccaattattttttctttttccagatggtttttctttaattttttttcttcaatcttcttcacacactatactaccatgaccatcatagtaccaccacaaccacctattactaattcaatcatcaaaatttgttataaccaatcaagaaagctaggtaaaaaatcaaatctgaaattgcacaataaaattcaaatagcttatccaaggttaagaaccatagctcaaaccactagaacgaaactaaatttgtaccaattttttcaagaaaaaaacaattcttaaatctagtaaaggcacataccatcgaattcaaaagcccaaatctgttctttggggttctgcaacttatatacaacaagatctaataattttttcaaaacaaaacccagaaaaaaaaaa

SEQ ID NO: 171118 - DNA, 589 bp, Cannabis sativa
tcttaatgaagataagtgcctacttggaggtacgacgcaaaggatgacatctggaagcctaccatagtttgggagtcgaatgttcattgcaaggtgaatatcggatgtctaccgcaggatgagagccggatatttaccctaaaacgatgtgtcctctttgacacaagattagatactatcccctgcggtagaccatagtagtatgtgtaccaccaatacccctttttgtctgacgactccaatgacatctctgtctgtcaggcgtgatcttcgtgcaacacgtgccttgcaccaacaatggtctcagtcatatggaaatgttgccccacgagaggaaaccttctaaggggccaaatagtcatgtataaatgtagggaaacttacaaaatgctgaattttgagtaaatgtttacatttatactgtcacacggtaaaaattacatttatacagtctttgctttttttttttcttttatactatagatgccaaaaatcacataccaagcctctatcttctacacccatatacataactaccccagcaatacgagaacacttgaaaataaccattaattccagcaaaatggaa

SEQ ID NO: 171119 - DNA, 500 bp, Cannabis sativa
gaggggtagacgaatttttcctaggggtgcaaatccttggccggagaaaccatatacaggtaggagatagggggttagatctttaagctagagccccatcttttcataggcaattttgaatatgatattggaagaggctccattatctatcatggttctggccaccattttgttagctatctggacctccataaccaacaggtcattgtgcggaaacctaatttttcatcgttgaaggttatggtaggccctcctgcgcgtgggattttaggcttcctttcttctacggttaggatcacttcttcttgctcgtgctgtgctatttgggcatacctctcccaagctttgcccgaatcttcagctatgtgcgggcctccaatgatgacttgcagatgtccgtctactggtgcaggttgcaagtcttggttattttcgttcctgtgattctgatcagtcctgacatacttctgtacatgcgggttatttttccttatcaggaa

SEQ ID NO: 171120 - DNA, 707 bp, Cannabis sativa
caagcaataactgtgagtcaacacactcaataagaatagcatataacatacaatatattactaacttatatttaggcatccatacacctatcccaaggcctaacaaatgattaagaacattcttaacgaaggtacgatctctgtaccacatgcactacgtaccactactgtactagtgttggtaggatttgaactgtaccccgagtaccattaagtttgtcccacatgcactatgtacccaattgtattagtgttggtaacactagattgtactcttaaacatcatgtgttataccacatgcactaagtaccactaccgtactagtgttggtagcatatgaatcaaataacaacatgcatataacatacatacacatatacatatatatatattctatgctagtcttatctcgctttcaaattcaagcgtgccaatcgacctgaatggaaaatctcgcactgaacggaggccctatatcacaatcacgtaaaatgggtaaacaactttctaaacctttttagggatctaaatcgaaactaaaagttttcctatcaatctattagtatggaaaagccttaaatatcaaggaaacacaacaaaatcaactaatctgagaaactacctaaaaaatagcataccatttttcttggtctttcctagtaaaaacggtagaccgtttatgcagaaattgttggaaattatttta

SEQ ID NO: 171121 - DNA, 586 bp, Cannabis sativa
ttaggtaggacgtggttaaggattagttgttagtctataaatactactaaaaaagtcattactggtcacttaaaaatccaaatatactttcaatctttctcttcatttgcatcccctttagaccaaaactattactccaaagtccattcttatcgtataaactttatcactgaagctataatccttcattccaaattctttctctatctcatcaaatacaaagttcttgtggtctccaagaccattgagcctcttagctaaaattaacatcatcctctcgatcatttttttcttttctcttagccaagatataccaagctatcatcacctccactaccaccattataattatcttttcaacattgccctataccaccatacatcatcatcaagatttggatcatcacaaagtgatttggtttgcacgtggctgaaatataagaaaggatttcaagatttggagcactaatatatttttcatagggtttatattcttttttcgggagctaaggtataataattgtgtgttaatagttgaaaaaggtttatatttaacttatatctattatcatagaacactctaaat

SEQ ID NO: 171122 - DNA, 574 bp, Cannabis sativa
ttttcccaccccttacgcttaatctaactcaaattgtgtcatattgttattaagtatcggtttatataatttacaaaaaagttttaaaaaaaataacattaaccaattataagacaaaagtgttgagtgccactaatgtccaataataatattttaataagatcaagaatttactatactaaccaggataatttattgtttaattaaaaggcatattttgctaaacacaaaagtagggggtttagcatttctaaaattaaatatatttatttctttaggatcatcactttctttaaaccgaacaaataaaagcagaatcaaatagaattcttaaatatttttttttggatattcctcaatgcttatattaaagaattttttagaaatcttacaagattcatttgtttctttttctcttatggatgatcaaaacttcatgtagattcgaatcttatttaaagatctactagaaattaaaaattgtgcaagaaaaaataagatatttcttttatcgtttttatgttatatgaattaacaattaacccaagatctatttgtatataacatagaacac

SEQ ID NO: 171123 - DNA, 851 bp, Cannabis sativa
tatactaatcttaccttgcttccgaattcaggtgtgccagactacctgagtggaacagctgctcgacgaattacagacccctaaatcacattattcgcaaaaatgataagtcacacgctaaatcactttttggggacttaaaattgaaactaaaatttttcctatcgacggataacaaggcaatgccctaaatatcgtaaaaacaggtgaaacaacacgccaaaatcctaatctagaaaacccaaaccccccaactaagggttctgctattgggaactaattaataatatcctaattagtaaagaattaaccaaccaaggctctgaaaataacacgaatcaaacaatttgggaaacctgcccctgatccagttaaccggttttacaggacctatcaaactggttaaccgttttgcaccatgtttctccaaaaagttcgaaaccaacccaaaaggtacccaattcaagccaaatcttccagaacacctaattaggttgcaacaaacaataaccaagcaacaaaccaacccaaacatccagaataacaatccaccattaaagattaaagtttgagctctaaagctcaaaccttgtctaaacaccaaaccaagtcataaactaactttcaatcagctcaaataacataattcaaacctcagaatacaaccacaaacaacacgaataactacagaacctaactcacagaaaatcatataaaacttaacttgatacttaaagaaatcaacaagaggtgagctagaacattacctcgagcttgaatacactaataacttgctagaaatctctgaattgaggttgaaaaatctcaaaccctagctggttctaaggagc

SEQ ID NO: 171124 - DNA, 938 bp, Cannabis sativa
aagccaagctaatttgtaaatcccagttcgaacgacaacttcaatagcatatggaccttcccagtttaggttgaacactcctgctgttgggtctcgcgtatttacaaatacacgtctcaacactaaatctcctactttaaatagtcttttttggactcttttgataaagtatctcgttattcagtgttggtaggctgcataggttatttacgaatcattgtgtctttcttcaagtagatccaaggatgtattcaaaagtttttggttttcctcttgattataaaattcatgcttgtgggccgcaatgttaatttctatgagtaacattgcttccgagccgaacgccattgagaacggagtgtgtcgcatcgctgttttctctgtagttctatgggcctagagcacttgtggtagctcatcaacccatttttctttggctgcatctaacttcttcttaatagtatcttttaaggttttattaacaacttctacttgtccatttgcctgaggcctcgatactcatgagaagctttaaataattttattccttttacagaattcagtgaataatttattcaaactgagttccattgtcagatactattttaattggaatgtcaaacctgcatattatgtttttgataataaaatcaagaacttttttgtaggttatggaaactagaggttcggcatttgttcactttgtgaagaagtcgactgccacaactgcatactttgctcatcctcgctttgtgggtaacaccccaattacattaatcccccaatattgcaaatgggcatggcgaggtcatcattctcaactcggctggtggtacgtgaggtatatgtaaaaacttttgacatttatcgcatctcttaacgaactcatgtgtgtctttattgattgttggctagtaattgttggaagttattttacc

SEQ ID NO: 171125 - DNA, 980 bp, Cannabis sativa
tagacacgtgcatacatatccaatctacctattattctattttgcttcagcttttaatcatactgttttgttttttttttttctctctcattatgtatacacgttagcttatttgttttttttatcctaaacaatatatctatttatgtttttgtctttatcttacttttttattttcaagttacaatttttttttttattatttcccaaaaaaaatctttttttattattataataacaatattctttttaaaaaaatttggtgttagtaatttaaaaaaataagttagaattaattttattatttttgttatttattgtctatctatcttctctttgttatttgaaaaaaaaaatccagctatactgataattatttgagtttaaaaattatattattatgacatactaagatgatcattttaacgtgtggcacacataattttttatcatcaccagaaaaaataatcgaaggcaaatatggtttagtttctttttcaatttaattaacaaaaaaataatcaagttttaaatttaaacaaaatctaataaaccaatcaacttcataagttactatcttttttaattaatagttaaaagttatattgtactcttcttaattataaaatgatttcaataggtctttaaaattatttataaaaatactaaatagtaacttaaacaccataaaataagttatatttcaaaataataaatacatattataatggtaactttttatatttaattataatttattaaatatagttaaagttaatataaaaaaattactaaaaaagtaacataaatatatctcaaactaggtaacaataccgcgcctcgcgcggttatttaaatattttttcatttattgtaaaaataaaatttatattaaatatattaaaaaaaatattagttaattaatatgttaatgtactataaaaaaatactaaaacttataatcttaatatgttaaaata

SEQ ID NO: 171126 - DNA, 1356 bp, Cannabis sativa
attgttcctgttaatccacacattctatatcacagcagctaagataaccatatgtggatcctgtgtagcttgttccttctgtcaagaatcaaccaatttttccagccattataatcaaccggccaagtctttttccccaaccagcccccgatctggtctagcaccatttgagagtagctacactcgaaaaaaaaggtgttgatttgtctcggttgtatatccacaaactggacaatcaacattgtccaacacgatgtgaaactattggaacttatctcgagtgagaagctgagtatttaaagcttgctaaagaatgaatctgtgatttggcatgatgaaagagcctcaaacattcctgctataatcccaaactacctgccgtaatttgctattataaagtagattagttctgaacttcccattagcacctgcattcacaatatctgatctcgaaaatttatcccgaacatgacaaattttcttccagtaccaactcgtatccgtcttgagatcataggaccaaatggaattatttttgagataaatatcattgatccatttcacccatagcaagtcacttttggatgaaatggcccaaaggtatttagcaatgatagcttcattccatttagtcccctctttgaatcccaaacctccataatgtttaggcagacaaactttctcccagctaaccacatggattttacttctattcccattccaaccccaaaggaaccctctacacagcttttctatctctttggtgatgctttgaggcaggataaaaatactcatccagtaattccgaagcccaagaagaactgaatgaattagttgcgctcttcctgcaaaagaaaggtgtctagttgcccaacaaagaagtctttatttgatcttcttgattatcacattacaatcttcagctttccattttgtcgacctgaaaggaactcccaggtactttaggggaaaggtactctcaggcagatttaattctctcattatatcctgctttgcgtcttctccaaccaatccaaagtacatctgagacttacctgtatttatagcaagccccgagatatctttgaactcctccagacacttctttataacctggactgattgcatattccccttacaaaataatatgagatcatcaacaaaatataagtttatgatgttgagactcttacacatggggtggaatctatagtctgacttcttggctgccatttgtaacttccttgttaaaaattccattatcagaacaaacagaaggggagaaaggggatccccttgtctcaaacctttcttccctttgaaactgccttgaactcttccattcataagaattga

SEQ ID NO: 171127 - DNA, 1217 bp, Cannabis sativa
attgtgacttggtatccaggggtcttttacaattttattgttacacgaattttttttataaacatactgttttttttttataaaataactgtaaaacgataaaataaaataattaaaaataatagtggaataattaaaaaataactgtggaacgacagtgaaaacttaacacagtacacaagatttttggaaaaaaaattcgccccacaataaaaaagaaaaaaaattaaaattttcaatatatggtgtaaaagctcttttattattttatcaatgtggttattgatagaccttttatttaaagggataagttgaggaatacctcttttttgtatcaattaatcaaaaacaccctcatattatatttcattaaaatctacccacttttatgagtggattgcctaatataccactgccctacacttaagtgtagcacatgatttatattaatttaaggggtataatagggacattatttataaaagtgggtatattttaaagaatataaaaaatgaaggtaaaaatgaaaataaataaagtaaagtggatatacaatgtaatttccacttatttaaactattaaaataaatcaattcatcaatcaatatgatatttatcaaattttatatggtttatcaattatcaaagtggttcgttaatttttaaaataagtgataaacaaaaacgtataccctcaaaaataatttcataatatatatatatttttttttatgaatttttataggattaagttatgaaggcacaaattaatgacagtgtcgtattttggaaaacaaaatagtttttttcttcttttaagcccatttagaagttttaattattttaagcccaccattcatccaagtttgcctcacctagcactattttgagataagtagatagaatactcttttttttttttttagtaatcaaaaacactcacttattatattttagttaagagtaatttgcagcataatctctatcagtgtctagtttattacaactaactcctaattctaaaattttagtggtaaaatccctaaatccatattctgttagcacttagctcttttcatctatttttgacaataaactgccatgtggacatgtccatgtgtacataaaatattacccacacgacataatgtatacatggcattatattatttacccacctaaaaaatatttaaaaataaattacaaaaaaattaaaa

SEQ ID NO: 171128 - DNA, 547 bp, Cannabis sativa
attcttgaaatttaagcagtgatcgtatgccgatcatttgaacctgatttgatgtatatacatatcgaatatggtattccattaccttgtggagtgtttcaaaccataaaaggatccattaagcttgcacactaattcaattgcttttccttccacctgaaacccaggtggttgcttcatgtagatcttttcatccaagaatccattcagaaaggcagtcttgtaatcaaactgttcaacctctaagtccatttgagcagctaaagacaacatcaaccttattgttttatatttaccacagttgaaaagatttcagtatagtctagaccttccacttgagtaaacccttagaaactaacctggctttgaacctcacaggtttattctcattgaatccctctttcaccttgagaatccattcacatttatatgtattttgataaagaaaaaattaaggaattagggattttaaaatcaataaaatagaaattcatatataaaagcatacttacaattgataaggaagactataattgttggacagtgt

SEQ ID NO: 171129 - DNA, 842 bp, Cannabis sativa
ttttatttttctttcaataacaagtgtttgatatatatatatatatgtactgtgatactcaaaattcggctcccatttcagtgtacacgtgtccatataaagagaatatggatcgatgaaatcgctttatatgaaaaaactcattaattacttaagtatcagagtatatttgtaacctgctgactgtaaggtcttatgcaagaaattaatatacaaagtgttaattagtatactagcgagaaaccatatgtcgctaagtgcgaatatcgacgcatcaagtacgctatatctaggaagataaaagcaacacatatcaactgcgaaagcacttagtgtataatgaacaagctaagtacaacagtcggggtagctcagatctagtaagcgaggtgcctatctcgctattagaaggcttcctgtaatttcacccagttaacttcagatattttcttagtgaggcttacagtcctgacgagtcagaagctaacattcaaacgagcctcaaagaactatttgtaaataagaatcccgatcgtcagaacaggtggatcgttaacctcagaagaaaaatggccctagctcgctattgtgataactagaaccaagcttctatcgagacatccccagatacaacaattaaagacgtgtttaaatacacgatcgttttaacccagtaaaagtgggaaaatacaaactatatgattttcagataataactatatttacactacgtgatatgtaatcaaaccccatgattttaggagatgattgttgtaaacagattacagtcaactttgtaattaactgcccactatgtaaataagattgactcctggactatg

SEQ ID NO: 171130 - DNA, 879 bp, Cannabis sativa
gagagataaacacttgagagaatcttttccagagaatcttctcgactgcaatgtttttctgtacttgctcaatcaataaagagatttcggtggtgttctagaactggagtaaagccataaattacatcaatctagaggacttcaacccgtatatatcttggtgttgattttattactttactgtttatttggtttcgatttcttgatactttgtttacctctatttttatttttctccgattgtttgtgtttggaaatttcataaatcttgtctttgctaattgtttctttgtcaaaattttagttatcttgattgtgcactatagttgtaattttcccacatactacaatattggtaacaccactccaccatgtccttggctaaagtactctcacaatgcttcaacttatttatgacataccaaagctgccaagacaaaattagaaaaagatcaaactcatctctcttacaaccactttgcatggtctctttgtccagttctttctatctcagaccagcaagtaatgttctttcagaccttaacaagcatgcatcacatcttcaactactccatttttgcatctaaaataatttccatcagttgcgactttcctgcaaaataaaacttcgttagttaattagcagccacaataattttctacaccaaaaagtgtttaattttgggaggcactctcattttcaaatggacagccagagtgatttggtttcaaagtattcaactcttatttatctcgagtttattcatggaaactcgataaccacatcttattagaatattttatttatggaaattattttctaattaagtaaatgattttctatttaaggaaataaataaataattgattttctgataa

SEQ ID NO: 171131 - DNA, 561 bp, Cannabis sativa
  modified_base (512)..(514): a, c, t, g, unknown or other
ataaaatatttacatcgagctttttctttatttctcctccttacgattgacataatggaagaggtttttttcaactatgatcttttggagaaggtgagcagagaaaaaactctgaacaatgttcatgtaagtccaactagggctaaagttaaatctcattaccagtagactttatgtttagggctgagtagaagtggcttatactaatttgatagaatttgatttgatctgattttgaacttgtaaaatgttatattttcgttggattcataacactctaaaatctctctagatggtattatttattttctccttaattctctcatttttaattttttattagtttcgtaaatattaattaattaattatttaaaatttaatattaaatcattaaataaattatatacaattgattaattaatttttttttagaatttaatattgattcactaactaaatcatatatacagttcatactaaaaaaaaaaggagaattatcccatatactatnnnttttaactttttttttcaaatttacggtttaggtttctaaagtggtt

SEQ ID NO: 171132 - DNA, 661 bp, Cannabis sativa
  modified_base (238)..(242): a, c, t, g, unknown or other
  modified_base (291)..(294): a, c, t, g, unknown or other
tttttttttttttttatactgttttatttcatttaaagtttcatttcataaaaaaaaaaaaacaaaaaaacaaaaaagccaacctaaaaagaaggcaagaaattaggcccttatttaaatgggccttgtacaatagatcaggatacacaggcttataaccggccttgtcagttacttctaaatgttcttttaataaattcaaaacagagtctgtactgacaaaactggaagaaaattnnnnntttacaaacattgggtacttatgacgctaaaaataaacattgggtttannnngcttacaaacataaaactttaggtacttatgccgctatttacccttaatttaacttaattataaataagaataacttataaattataattagttataaattttttaaatcacatattaagaaaatatacttttatataagaataattacatcttaataaaacatatatatattttataaatttatttacgtaaaattaataattttattttaaattataatacatgtatgaacattatatttactctaaaataattttattatgatatagtattgatgattgtttattattattgttaccttgatattttttggtattttaatttttttttctagtgtaactctatttaattataacctctcaatta

SEQ ID NO: 171133 - DNA, 628 bp, Cannabis sativa
gatcaccatagcagtaggggcatgacaaaccctatccaaatgagcaagtttaccacaagtaaagcataagtatggcagcttctcatatttgaattggatccaggtttcctcttttccttcggctttcagaaagaacccaacaataaaaggatgagttatccaaacatctatccaacatgtcaagtatccacagcgaactagttcaactttagattttccatccgttttcacaaactgccctgctttctttgcaatgatggccgcattgtcatccgataagcacctggttgggagaccatgaaactgtacccaaaaacgagccacctcgaactctcccactctaacttcacccttaacaggccagggcttaaggttgagaagcatcccgttaactagccatggacgtttatccatgatatataggcaatcctcctctgattcgaagagaaaacctaagactccttccccacactttttcatacgccaacctccaatgttcctctagacacccaaaatgatttttttaaccactgatgccggcatatccttacatcccatcactttcccaacacaagccttgttgagaacaacatcttccaaagtgatatctgaaaaaccgtgtttttgc

SEQ ID NO: 171134 - DNA, 503 bp, Cannabis sativa
taaaagaaattgacatgttacattgaatgatctttgcttccgttttaaaatagaatagtcattccaattccactaaaattccactaaaatggaaaatggtggaaaatggtggaaagagcattctaatatttaaaatgtaaccaaacaaaggaatagaatgaaaattattttctttccatttcattacctccaaccaaacgccaacctagtttgttaaaacctataccccaccaaattattctaaaatttaatattaaagtttctatattattactgtataattattctaaaaacgttgttagagggcgtctatatagtagtttactcttgttttttaccggtgagatattcttttcatgtgtagcctccttatgaaggcttttttattctaattcatcacaacaatgttcttttttcttttaatatgaaataacaattttattaaatttagcatttggagcacaagatacctaaatagaggtgtgcataaattatccaattca

SEQ ID NO: 171135 - DNA, 906 bp, Cannabis sativa
acccaatttcaacttgcagatcttttatacatgttatatatgttaacgttaattaattaatgtctttcttattttcgtcttctatatatgaattttatatgtataatacttatgaaataaataacaatgttagaaaggatattctaaaatatagagataaatagtttgatcaaaaggttagagtaggtgtactggttcgtgtttcttcaaagtataaataagatagtgatattaaacaaaaattatttttgaattttttcttatttttaagtaaatttaataataataataataataatgatgataagattacatattaaaatggggtagtttgggaatattaaaattttatttatattgagggtactaaagtagtagtttttgtaaatcaagggtactaattgattattatctaaaatagagggtaccaagtgtgtatttaaataaaacacagggtaccaaatgagtatttaccccataaaaaaaccatataaatgtaaaaaaacaaaaaaaacaataaccacttagctttatttatttatgccataaaaaagtaaactcttaaagttttcccatattttgggtaatttttacaaaaaataaagaaaagaaaagacaatttggatgggctgaacatggttcttgtttttcttttgtaattggccgtggttctttgtttttcttttgtaattgggccaaggtgaaaatagttgtgacgacaattatcatatatgatataaatgcttatcatatgtgataaaatcaagaggaaggaggcgtggaaagaaaaggggaggtggctggtctactccaacagcaagagaaaaatgaagaagaaaaagaaaaagaaaaatagagagagagttttacttagggttttaatttagcatttttattttgagattg

SEQ ID NO: 171136 - DNA, 716 bp, Cannabis sativa
  modified_base (680)..(690): a, c, t, g, unknown or other
ttcgaataaattttaatttgttttttggactgccaggtctttgttggtgcagttacgaagcggatggtgcctgactggaaacttgcagggataatggggtggcctatcgtcttgctgctcgtgtatttgatgttcgggaggttgcacccctgttgcaaccgtgaaccttgttctgttttggtgtttttattcttgaatgaagtttattttccagccaaaaaaaaaagattttaatttgtttttgttaaaatggaatgtaataataattaaattttattttttaaaaaaatatttaatatagtggcattttttgtgtgtcactatatctctaaaaataataataaaaaattatatataaaaaaaagatatagtgatacttttagcgtgtggctgttatcttttcagtttgacaaaacctaactctatacgcatatagtgacgcgcaaaaagttaatgtaaaagggtttagtgacatgtgtggagtgtcactaaaaactgtctttccagtcaccctcattagtgacgcgcgttgaagtatcactaaacagtcttagagttactcaatgtgtgtcactaaaacctatttttttagtagtgcaagttgtatacaatactacttttcctccaccaattcatttccctaatcacaaaaactcttggtattgtgaaattcctctctnnnnnnnnnnncctctagggatactggattctttact

SEQ ID NO: 171137 - DNA, 604 bp, Cannabis sativa
  modified_base (454)..(459): a, c, t, g, unknown or other
gttatgcaccttccattaatattagaaatatatcgaagtccttatttaaaatagaaattatgatttaaaatagttaaaaaaatattaaaaatatcatatttaaataactcgcacaagtgtttgttttgatatttatagactatttgaatgtaatttcaatagttgttttgtctacgaaaaatgattatgattacgatggacttttgtgcctcaatttattggtctattggccttattgtcgtttgctcgcccttattggtattgatttacttttgtttattgttgagttttgtaatgaactttgtctttcattctttgttaaatgaaaaacttaaaatttttcctaaaaaaataataatctcaatatcttaaattattttgaatatgctaatgattttttggaaaatctcttttaaattataattatattatatatcatcatatatatatatannnnnnaaaaaaaagaaaaaagaaaaatcaaagttacataagggtaaatattaaaaccaaaagattaatattagaaccaaaagattaaaaacaatcactaccatagttgtgctaaataagttgataaaatgaaattttaatgatttatttt

SEQ ID NO: 171138 - DNA, 621 bp, Cannabis sativa
taaacgtaagcttagaatatgaatctgggtgagatcaatggtgaccgatactaatctaagccttttgactactaaagttaagaagaacactattgattagtgtaattgttgatcttagaacatctcgagtggtgatcgaaccgttgaataggttcaaaataccatgtagttagtctatgtaaacataaatataaaatttgggtgagatcaatgatgacccatgctaatctaagccttttaaatactaaagtcaacaagaacactattgattagtgtaattgttgttcttagaatattttgaattgcgattagaccattgattagggtcgaaataccctgtagatagtcattatgagcataaactgtgaaatttgggtgatatgaacagtggtcgttacaaatctaagtcttttgactaggaaagacaacaaaaacattatcgattattgtaataattgttaatcttagaatattctgggtacaaatttctcttatgctatttgtcataagcatatttgcacattagtcattttatcacccgataaatagaagcttaagtagttagaattctaggagaaaagagagacgaaaaaattaagagaaaaattcacagttaactgc

SEQ ID NO: 171139 - DNA, 644 bp, Cannabis sativa
  modified_base (301)..(306): a, c, t, g, unknown or other
aatttattaatatcaataaataatgtatattaattaatttcaattattaaagttaaataaatattcatttttttaaaatttttatgtaagtttttaaaaggttattttaactcttttttttttttttttgtattatctatttactattatatagaattattctaaaatttgataatgcaggtgcagaaaattgcatgaaaaatttgtaattttcccttacttatatttgcgcttcattttataagtgacgcaataggtaaaaaaaaaagtattttcgtaatagatatgtcatttttaaacnnnnnnaataagtcttttgtgacagttttaaaatgtcataaataatttagcgtcatttctaaaccattgcaaaagataaaatagaaaagtaaatattttgcgtcggtttataaatgtagaaaaaactattttcgactacggtatatacgtcggttttttaaaccgacgtaaattctttaaatgacacttgaaaaccgacatgaattatatactttttgtagtagtgttttttaatagaaaagtttgggtattcttactaatatttaaagatcatgcttttaatacttttgttacatggagaaaactagttgagaatcaagctagtaaaactatgaataaactca

SEQ ID NO: 171140 - DNA, 752 bp, Cannabis sativa
tataaaataaaaaatataactgatttctgttattgagttatatgatatttatgtttgaatttgaactaaaataaatattatccttttattttataggattaaataaacggtttatttattattattattattattattatatatgagatactaggttgatgttacgtgcaatgcacgtataattagttatttttttaattaggtttaattaagtgatattaagtgcaatacatgtatgttcaatttttttttaattaggttatgtatttttattttttaatttttaaaataggatttgaaattttaatttttgagaatttcttaagttattgcggctacattgatgtgctctttagatatgattatatatatacgtattttatatgtacaataaaagaatgaatttaattgttattcgtattttatattgatctttctacatataaggattatattataaaatattttgacaaaatttgagtttgatcaaataattaattactttcaaaatacattttatatattatgtcgaaacatatattttaaaaaaacaatgatagaaatagatactttcttaatttgtagttagaagagtgtagttataataaagtatgcaaattattagaagcatatatatcattaattatttttttgaacaatatcattaatcatttttaaaacaaaatgtttatcgtgaaattaaggtttaaatatatgtttatattttatatatatatgtaatttttattttt

SEQ ID NO: 171141 - DNA, 1126 bp, Cannabis sativa
taaaatctctgaattccaaatttactacacgtgtacacgtatggggttttgttaaatatcatccttattcatcaatatgtttttttgccaaaaaaaaattaataatattgtggttctgttctaacgtacaagaatggttgaattcattaaaagatgttagtataggcccattaatatcagtcctatagatttaaatgggactaactacccatactactcaaaaatctaagtactttaaactcattaagtaattatccttatttttcaaacttttttttttcaaaaaaaaaataaataaatgtacaatgattctttctgacgtacaaaaatagttcaattcattctaaaaggttggtgaaggcccatttaacataagcccaatggatttaaatgtgaccactaacccttcgaactcgataatattaggtctttacactcataaaataaccttattttagaattaattttggaataaaaaaaaattattctgtactattgtactgttctgacgtacgagaagagttgaattcagattctaatattgtaaaggcccattaatatcaacccaaaagctttaaatgtgatcaccaacccatacaactctataatctcaggcctttaaactcataaaatctaatttcactcccctcagcactctctttcccttattcttcatctaaaattcttagatatcaataacaagccaacatgaatgaggaacaaacttatgaatgggaaagcataacaacagagctaaacatcacaaaaccagtgaatgcgattgaaatatatgacgtgctaggcaagagtctcgacaaactggaaaaattggaagtattctacgaaatgtacgcgaaacggatgggtttcaacacaagaaaagacgatgtacggcattcgcatggggtcattgtaatcaggaggttagtttgttgttccgagggtttgaaaaaatcacatcaccggatagagaaagaaaaaaagacctcatgatatcactagaacaggatgtcaggcagcattgcgtatttactcatacgatagtgtaaaacttggaaatgaaaagagtttagcacaatacacaatcacgatctggcttcaccaagtgaggtacaatttttgagat

SEQ ID NO: 171142 - DNA, 531 bp, Cannabis sativa
atcatatcgaaaaactaaaataaattaaagaactttatatctatactctacaaatttatttatacgccccaatagaataaatcaattaaaattattttaaaatttacacttaatactttttttaaaaaaaaaaaaatattggttctcttttaatttttagtaattttctaatcttgttgtcatatattttttttaaataatagctttattatatttttactctaatatttttctatattatttttttattttttatattaatattcaaaatatattctgttttacatgtgtgcatatatacgtgagaaaaaaatgaattaaatatatattatgtaaaatatatttatattttggagtgtaaatattatttcacttaaaaatatttattcttctataaataaatgaacaaattatttaagtagtagattactttaattaaaatgacacaaatataataaagttataatactatgatgttgggaatataccaggatctagatttactagcaagtatgttgaattaacatccta

SEQ ID NO: 171143 - DNA, 979 bp, Cannabis sativa
  modified_base (225)..(227): a, c, t, g, unknown or other
ggggtcgcacaacagctcgttagctcgcatgggagctgtcaacatgcataccaagctgtcacaattcaacagtctttagtgtttcaaccataactctctcgatatacatcagaattggacgattcaagatgtgttagaaagataaagaagagatctttgaatcttatgtttattgcaagatccaattctgagcatattactatgaaaatcctccaacaattgtannntagtaagttgatcttactaactctactcatgagttgttacggggttgacctccgagttgcacggatataccccgagacttgtaagcatggattttcaagattaatgatccttaatccatatgcattgactcagtcattcttcgactgactcttacagttgatgtctctcggctgctgaggcttattgttgactgatctcgaaagtcaactctgtcaatttttggggttaacatagaccaaagcgtaggctaaagggacttcccgaataggatagacacaactagagtcgactatttgggactcccttctagaagggaacaattggccattcagaactcctttccggaggaagggtagctctcctgaagacttcatccgagtggtcatgatagacattcgggaacttccttctggattacatccatcattccataagatttcttccaaatggtaaggttaaacttctgggaacgtttttctggaagacatctaactttacataaccacaataatttttggagatctttacatttagaaaaattatactgcacaaacaaatgaaaatagaggagagaagtaaaaggaaacaataaagaataagaaaataataaaaaaaaaacaataagatcttaatcaatattaaataaaaaataagaagtttctaatcaggaagaaattaagaaatagaaacaataaaataaaataaaacagagaaaggagaaaaaaaaagaaacaagctgacttgaagaaaa

SEQ ID NO: 171144 - DNA, 824 bp, Cannabis sativa
  modified_base (327)..(337): a, c, t, g, unknown or other
accgacacaattgttgtgccgctacgatagggccaattaatactctctgggatgaatatcactattaaccagtacgatgcttgtactgctgaaccgacacaattgttgtgccgctatgatatcacccaaaacatatacaatcatacatacaacatgcatatatctcatataacacgctatatacagttcttacctgatttctgaattcaagtgtgctggccgacttgaacggaaattctctcgctagatggatgccctaatcacattaattgtaacatagatgagtgactcgctaaattactttccggggacttaaacttgaaactnnnnnnnnnnntatcgataaacaacatggcaatatcctaaatatctcaaaattgggaaaaactagggtcccaaaaatttcccccaaccggcagaccggtcctaaccggatgttcagttctgggacaccaaccggtcgacgggttggtacaggtcccccagaaccgaaattccagttctgcgctgggaaaaccaaaaattctccccttgctctcaaacccaacccaaacactaccaaactttctagggtacctaatatggttataaacaataaattccaggcagtaattcacccccaaggcccaagttgccattaaagctccaagtttcacaaaactcagaccaatcaacaataccagttgctaggaactaaatcaactcaaataaccttaaaaatttgaaccctaagcataagcaaacctaacagcccctgaaactcaatttcacattctcaacctaaacttaaattcaagaactagggcaaggagttgctagagctt

SEQ ID NO: 171145 - DNA, 579 bp, Cannabis sativa
tttttagctattttgctctttgtggattgaagcacaattataaaaaaaattagactaaatattaagggtgttcgcggtatgggtggtgcgatttttgactattttttaaaataacccgcacatgcggttttttcaattattcaaaccacacccgcactgcaaaactaaaaaaccgtaaaaactgcaccgcaaaaaatagtgcggtgcggtgcagtttctgcgatttggactatcaccaaataattaaactatcactaacacaaaaaaaagtgagcaacacttgtcaaaaataccataaggcttgaaaataaatatggaaaaggcttgaaaataaatatggaaacaaattttaagtttcaataatacaataattagtgggctttaggctagatattcacatattagacctaaattaatataaaaattggtattttataatgtgcggtgcggtgcgatttgaaccgcatattaacaattcaaaaccgcaaaccctgcaccgcacaatgcagtttaggaaaaattcaaacacgaccgcaccgcaaagaatttcaaacaatattttttttgcggtgtggtgcg

SEQ ID NO: 171146 - DNA, 1305 bp, Cannabis sativa
gtatggtgtgatagcagccagttgtgggatctatttgaaaaaggaaaaaaataaaaatcttgccaaggacaatgatcttattttcattgcacacacttatgtctaacaagtgaattcaagtgtgtaagtctcctcttctcaaataaaaattatcctgattcacattatttgtaacatgtctactttctctcaacatctgttaagtgtggttggtttttgagatactaattacttatcctcttttgaaagtataacatgtatatttgtctcttgttatgaaatttgattagctgcttgctctagaattccttatatttattgtaaaaaaaaatttgtctttcttgtcttttcatttttttaaaaaaaaatgtatacacaaaaataaaaaaattcaaggagggaggcatttgtgacttgacttgtgggctaagaaaatttgtgctttgtttggtaagtatcaacatttgatctaaatttattttgatatgtttccattaaagtttgatatcatattcattgtatttttttatttgttgatcttgaaggattttcttaattgacctattttttgaaagtatcttggttattcttgttttattttatttattttttttaaaaaaaaatatctttggaaaaagagtggggcagtttacttgtgatcgtgggctggtagtttttcaaattttgagttggtttccctttttgctcctctttcacatttttatttaaaccaaaaatatttgtcatttattttcaccatcttcctgaaggtgtgtccaatgatgtcgtgtttatggattgtcatctaatgctcactgaactcactggtgcacgagttgaatggaaatctcggcaaagtctttgcatcactcatctcacttatgcccatgcctccctcatgaggtttgctcttagcaatcggcttcccaattccaacaaaacagtggtgtctcaagatttggcaacttttctctttcgtatcatctcgagggcatctattgatctggcttcttctatcttggaccagattgtttctttacagagaggtaaaaagcgtactcataagcttgtttttcctaacttaatctataaaattctttcttctcagaaggatgtggcctattctcatgagacacttgagcctcccctgactggcaccatctttcaaccctcagagtactttgatggagcttttcccaagcatcctaaagcttttgctggtgctggtgctgttggtgcaagttccagttctgctcttgtagatgtccaggaggtcaagcaagaagttattgttgggttttgtgc

SEQ ID NO: 171147 - DNA, 1816 bp, Cannabis sativa
  modified_base (294)..(295): a, c, t, g, unknown or other
ataagttcaatcatttgtaaagacgtactttttattatttttaatttaaatttttaaattaattgaataatttgattttttttcaaataataatttaaatttcttcaatatttttttcattattagtatgaaacaattcttatactataataatttaaagtttgtaattattgtggtgggaaatcttcaattttttttgttaatatatatatatatatatatatatgtgggtaaataccattttaggcaccgtgttttataaaagttactaattagaccctctgttttattaanngacaaaatggaccctgtattttttaaaattgtacaaataggaccctgaattaattttttttatcaaaataaaacttaatgataattcgatcagagatattatgataaatctggttacattttctgtatatgttcttgctagagatattatgttaaatctggttacatcttatgatctagagatattaaggtttagggtttggaacaattttaatattataaaatttttaaaatttataattattgtggtggaaagttttaaatttttatttgttaatatatattgatagttgtattacataaagtataatagtgaacaataaaataacacatgcaataataataattaaatgaaaaattttgtcaaataaaaaattgaataataaattttgtcaaataaaaatgcataataaatagatgaaaagttttgcactaaaaaatatctgaacgatctcaattaccgtcgatctcatctaaatttgatagtttatggcaactttggataattgtaaaacatgtggtaagacattaatatcatccaaatataatagtttattgttgtaaaatttatttgctatgcaagtacacacagtggtaatttatttgctatgcaagtacacacagtaaaataaaactaaacatttccttatacatataattttttccattctgtttcttattttttgttttatttattttaatttgttgttgacgacataaaataacaataatttattttttattttgttgttagttatgtaaaaaaaataaaaaacattaagtaattcaatattaaaaaccaatcaatctaatctgtacttttgcagattggatttgagttattatgtggattggattgaatcccaaaatatgaaattctcacttagtacaaatcgaatgcacccaaaatagtgcggaatagattgtatgattaccgttattgaggatgataaagaagagataaaaaaaactcttaaaaaacgaaataaatgaaatatgcaaaaaataaattgtataaaattattaaataaaagtgtcaaggcttgaattcatgtcacttaacaagagatatgataatgtgcattaactctttccaactatatatgtatactactagctaactagtacatgtataatttatatagatatagtgttattaaaaaaaataattaatttaatatttaaaaattttaaatacattgaactaagttaaagaaaaaatatattatgaatatgtattatttactattttatgcatgattttataaataatgtaattaaagtaaaaaattaattttatatctaaaatttttaaatacaatgaatattataattttgaaaagtaaattaattaatataatatgataaaattttgaaattattaaattaattgaaatcttaaagaaaaaaaaaatattacttttgaaggattgaacttatgatgttttgattgttttaagagtgcttatattgattattataagttgaacatgttatagttttctataagtataattattgt

SEQ ID NO: 171148 - DNA, 598 bp, Cannabis sativa
accgaggttctgggtctgtgtgtttgactgtaggggttctggcactacaacaaaaggtacttttgctagcacttaagctcaccagcaaaagtacgtgtaactcgccagcaaagctttgctggtgccatttgtcgccatcaaagctttgccggcgccatttatcaccgacaatggctcgtcggcgtatgaccttttcccagtgacatggtgacttacgctggcaaaagtgcttacgccggcggatttgtttgtcggtataagggattcgccagcaatacgtccgccggctgatgtgtccctaacgacattttgccggcgagttaagttgccgacaaaagtttttgcaggaatttggaatttggcatcttatttttgccggcgagtgtagtcggccgcaaaactaaaattaaaaaaattaaaaatttacctatgccggcggcatatgcgcgagcaaaagtttattttaaatttaatttatttattaaataatactttttccgacgcatgttacccgctggccaaagtttttttttaaaaaaaattaaatttataaattaatttttaaattaaatttaaattaaaaatcgaaataatacta

SEQ ID NO: 171149 - DNA, 555 bp, Cannabis sativa
cgagggcttcctttcactcagcctcctgttggatcgcccgcctctcaacagacgggtcccgcaggatcctcacggcctcgtctatgccctcgaattcggacaggatgaatccatgattgacgatggtcctggagaggcggctcgtctttgcagaaatctaaaaaaggagaaaagagtgagatcaaatgccttagacaaaatattgagaaaagaaatgaatcaagtgattaccgcggccatggcattgctgatgtcttgaacttggtagacagagttcaaggatgcacaagcagtgtaccgtttcggcggaaattgggtcatgtggaagacatactcgctggtcatctccccggcaaaagaagccaaggtgggccccaagaagggattgaaccagtccgtaagcagatccatatttagatcccacagattccggaaggcctccacgttgaggacgtttttctgctcctcccgtaggaccctcttcaaggcctccacttcggcatgcccccgggtgtattcatcaagggcatagttgtgcttggctatccgaagatt

SEQ ID NO: 171150 - DNA, 775 bp, Cannabis sativa
tccttttgaaccctattttggttataaaatcatcaaacctcctatatcattgtctaggtgattgctttatgccatagaggaatctctttaaaaggaaaacatgatcttcctttcctttctcctcatacccttttggttgcctcatacagatcttctcttctaaatctccatgcaaaaaggttattttaacatctagttgctcaagttctagatcatggtaggctaccaaactgagaagcagtctaatagaaatgtgcttcacaacagaggagaatatctcatggtagtcaataccttctctctgtgtgaagccctttgccactagtctggctttgaatcttgctggttcaattctcggaatcttgcttgttcatattattcattttacgtgatttaatatatcatgaacgaaacgaaaaaattaagtgcatcattaatattagttttgtggtatattcatattgttgtaagatatatcatttttatgtgatatagtatatattgggtgaaataaaaaaaggtaaaatattagtttaagtttgaaacatagatatattagattggggtatgttgtttccatgtttaaaattgtacatatatatacatatatttctttttttcacaatggtatattatgttggaattggggtatatttttatacaattcaaattttattattttattttctaaatgttatactgtagtatacaaaatgtatataccataatgcaaaatgtatataccacaaattaaaaattaatattctatcaattt

SEQ ID NO: 171151 - DNA, 605 bp, Cannabis sativa
cagcaacatcattttgctcaaaggcaagtccaagagttgaattctgccttctcattgtgtacaatggaccccgatgctcccgaccatttctcgcagcccccaccgtggcagccataccagccaccaccacctccacaaccatactgacgtggcgctcaggtaagttcccttttctctttctttaatgtcacattggggacaatgtgtcactttagtttggggggtgaactttcaattttctttttgttttgtttttggttttaagttttaattttaattttttttttttgttgtttttttttttgagtcaatttgctaaatgtgagtcaatgtgaatgtaggtgaatagcatggtttgaaaagttcatttatttttttttttgaaaaattcgtgtgcttggtgacattacattcttgaataatttcaattttatacttgaaggaacatggaatcatattaagtaattttctagtagaatcgatttatgtatgctgattgtaaaatgtggaaagttgtttggaaaattctagaacttgcttgcttgctatttgaggcgaaataataatagtgatttaggcaattttttgatcgattgtgtctttca

SEQ ID NO: 171152 - DNA, 590 bp, Cannabis sativa
aaaatatcacaacggtattagttaaaaatattaatgagattattgaggtaagttgattttaaaaataccgggataatttggggtactaagagttgaccaaataccttagaagtaaaagtttcttagtggctaaaaaaataataggataactattactaaagtttttattaatattatattattgataatattatattattattttaaaacacatcaattttgataagtttatatatttatattttataagtttaaaatcataacagtacgaaatgaaatgaaattctgttctctcaattaaatgaaattctcattctcctctatttattttcttaaatttttaacccgaaacctagcgatctaagctatggtagtagcgggatagcaaatctttgaagagcgaaagcttaaggtatactttaatttcgttttaagtaaaaaataattggttttatatagtggctttgtgatttagagtgattatgaagattccgactttgtagaattgttccttggtagctatgggactaatttcgatgtttactaattgaatgaggtgattttgggttagaaatcaagtttggaacttt

SEQ ID NO: 171153 - DNA, 1358 bp, Cannabis sativa
  modified_base (412)..(423): a, c, t, g, unknown or other
agagagagagagagaaggagggagaagagcaaattgctcccctaatggtatgattcatcaagaaaagatataccaatatctacacccttaaatgttcagcaaatgaaccaccatacactgagtgacaaataaaaaaccaatgatctatcaattctgctgtgagatcatatgtatgtgatacattgaaacaaaaggctgcatttgcttcggggttttgagttacagtgagatcatatgtatgtgataatacaatacaatctctaagaatacacttgagaccaaacaaatatattctatttgagagattataactaaataaaagtaaacgaaaaaaaaatcaaaacactaaaaggtatcaaacgtaacaacaataacaataaacaattcataatactatatcataataaaattnnnnnnnnnnnnatataatatttatatatgtattacaatttaaaataaaattattatttctacgtaaataaatttataaactatatatattttattaagataaaattattcttaggtatactttcttaatgcgggacctaaaaaatgtataactaactacaatttagatgttatttttattaacaatttgcttaaattgggacttatttttagacaaaagttctaatgtatttaacttttctaacaaatgcaagtgaataagaacgcacgtagcaccacctttaatggacgagatatgagaatgaagaaaacaaaagcaatatctacaaagttttttaggaaaacaatgttatgggttttgtgtattttgtaaatttgatagaccagaagttgcatagagaaggagttagctgtagtgaaagagatgaagcagggcgaaagtgaatagaaattctcctataaacaatagaaattttagaaatacatttaataatctacagatattctaatacctttatgggattgtctggtgctttggatgagcaacggtttttctgcctgacaaaaatctgtaaaacgaaaaattgcttattagcctcacatagcctaaaagtttacgtttgacaacaaacaaagctgggaaagaaggataaccatgtcatacaaactcttcaaataaaaaggggagagagaagggagaaataaaagttgcattatcacagagagggggtggggaggtgttgcagcattcagttagtgtgaaatccatttaggaatcatacaaaagcacaaaatagtaaatggtaaaatcaacttagttcaaaattgggcatgcaaatttcagcgaagctttcacaaaaatcacacattaaataccatctcatttcacgccaatatgtgaagtcaaattctgatcagtcagtgacaatttggtatagtacgctgtt

SEQ ID NO: 171154 - DNA, 813 bp, Cannabis sativa
tattaagtctttcttgagcatcttcatcaattgttttgtttttcggttgtctcaattctaagtcaatttaagcactcatgttaagtatgtgatcattacttgtttcgtgattcttcaaattatcacctagatgtctccaatctttagttcttttgttactcaattgactcacactcaccatattagactatttaccaaacaatttataacaaaaacaatatactttatcaaacttttttgaataaccaccttctatcatatttttctccatttaacaatattcttgaataataagaagttgaaaagtgtctaccattttcatctttaattaaactaaaatcaagtattactctaatttgaccattttttactaacaagtttattagtttattatcaagactttcccatctttccggatcataaatataatctaaatcttctttgaaatttctagtttccatgacctcttcaatattttcttgacatttttcctcaaccatcacatcatcacacatttcatcatctcctaaattatctaaatttatttgttcttgttcattagtttctttactggagttactttcattttttttcttagtgataataaatttttctaaagctcgtctttgagatttaatcaaactttctattctccttttctttttaagtttttcattacccgacatatattttgtactagacattcttgttcaaattttaggcacaacaaaacaaaacaaaaccaattcaatgaaaattaataaaactaaactattgcatataattaccaataataaaaaaaaaagtaaatga

SEQ ID NO: 171155 - DNA, 640 bp, Cannabis sativa
cttaagtgtttaacctttgcaactacaagatgattccaccattgattattagccagtacacggtcgagcctctcaaaaatcatattattctgccttccgttacaccaagtatagttgctgccttcaaattctaattcccttaaagcacacatgtctatagcattattgaagtttttcattaagtaaccaggtttctcaccccctccttgtttctcattaatgcttctgatttcattgaagtccccaccacataaccaaggccccttaaatcttcttgctatacgttgcatcaaagtccatgagtgttttcgctgagatgggtcgggatccccgtaaaagcccgtaaaccgccagttaaagtcatcttccatattgatccaagcatcaatatgaaaatcgttgaaagactttatctgaaccgaataaggagccttctaaaggagggctaaccccccacttttgccttttgcatcaacacaaaaacaaccctcaaaacccaagcgagcacgaaccgtttccatgtaagcacttcttgaatgagtttctgacagaaacaccagtcccgtatcgaaatctttgacatttgtggcaagagccgagacagtccaagggtttccaagcccttggacattccaaatta

SEQ ID NO: 171156 - DNA, 1174 bp, Cannabis sativa
cctaaccctaaaaccccaaacccttaaaccttaaaccccaacctagaatcttgaaccccaaaccctaaccgcaacaccctaaaccccaacatccaacaccagccacccaacaccctaaaccctaaactcacacccttgggcttttggttagaggtaatgaaacataattttcattccattcttttgtatggttgtattttaaagtattaaaatatcattcccatggaatgccctttcaaccattttggtggaatgactattgtacttttaactggaagcaaacaccattccaatgtaacgtgagaaaaagattaattatttttttttatcaattttttaatacatttcaaattttattttattccatttccattcctattcctttgaactttgaccccgaaacctggaccccaaaccccaaaccccaaacctcggacctcagacccccgacccctgaccccgacctctgaccccacacaccctgaaccctgaactctgaaacccattaaccctgaaccataaaccttgaaccctgaacagtaaaccccaaccccaacaccccaacacccaacacccaacacccaacaccctgaactcagacccttatgttgcatttggtaagaggtaatgaaatggaatggaaaggaaacaattttcattttattcttttatttggttgcattttaaagtagtgaaatgtcattccaatggaatgccctttccaccagattggtggaatgactattctattttaaaattgaagaaaagaccattctaatgtaacaagagaaaaaatttaatgattttttgtcaatgttttaagcattttaaattttattttattcccattcccatgaaccctgaaccaaaaacccctaagccataataccctaaaacccctaaatcttaaaaccataaaccttaaatccaaaaccctaaaacccaaatcccaaaccccaaaccctaacttaagcaccctataccccaacacctaacacccaacaccctgaaccctgaaccctacccctaacacagacccttaggtggcgcttggttagagctaatgaaatggtatggaaaagaaataattttcattccattcttttgtttagttaaattttcaagtattagaatgtcattctaatggaaggcccttttcaccattttggtggaa

SEQ ID NO: 171157 - DNA, 654 bp, Cannabis sativa
aactcttttacttaaatacaccaattacaatataagagcactctcatcaccccccattatttacatttaaatattatatattcaaatattttttttaaaataaaaatacgagagaaaaaaaaaaagaaagaataaaataagtttgaaaaataaatacaagtgtgtaactatgagcgtgtttggtaatatttatggttttaattttttaatcacaaaaataaaaacaaaatttgtgtttttaaaaaataaaaatattctctataattttttttttaaatttcaaaaatagaaaataaaaatgtgttatataacttttatttttatttttgattttatttaagtcgggtccacgtccgggtctggggccagggctattttctgagtccaagactgggattggggccagaatgcgagtcccaagaccaggaccgtcttaaacatttcggagaccctgttctaatttaaaatttaagtccctacaaaaaaaatataattataaatagtatttttaaatattatcatttagctatatattttactaaacactaaaaaactccaactatttataaaaattgttattgtgtttaatataacaaaaaaaaaaaaaaaattagaaaaaaaaatgggaaaaaaacaaaaaaatacaaaaaagga

SEQ ID NO: 171158 - DNA, 1496 bp, Cannabis sativa
  modified_base (1282)..(1284): a, c, t, g, unknown or other
  modified_base (1361)..(1367): a, c, t, g, unknown or other
  modified_base (1426)..(1464): a, c, t, g, unknown or other
aatatttaacagacatagggcatcattttgccccatgagttgtctaacgtgctaaccagtgcagatgatctctaccaattctccaataatgagaatattggaggcaagtgcaacaacgatggctctggcaaaaaagggaaattcaacgattcccttatgccatgaagtttaagggagaagcaagagaagtgtgcatacctctctctctctctctcttacctgccaaaactcacaaaccaatgcatgcctaccaaaaacctgaagcacttgggccatcgagctcgatcaatataaggccacctgtcaaccttgcatggccaagctcttgccagcttcatggctaaatataaaagcatatctccccaaatctctcaagatttgggagaaaagtaagaacgagagaagaagtgtggggaagagcaagacaacccaaccaagaaggtgcattgaccacctgcccggtgcaggcatggcccttagggcacctagaggccaatggctgcttgaggcaaaaaaggtcagtttcaaagcttctaaaaatgaggttgaagatgaagctccgattgttggccttaggctagcacaagaagtgcaggctaaataccttgacatacaccacgactctcaactaattgtaggtcatgtcctatgtgaatacacaactcaatgtaaaaggataatggcctatttcacctaattttaagacttgttaagtatgctcaaaggctatactaaaaggaaagtccccaaaaatgatgcaacagccaatgcactcgctcgactagccatcatcgccttgatagccaaggcaaacttggtactcactcaattcttaaaaagaactaagcatccctattgcaaaagaaatagacatgttgggtagccatccaacattggtacacctatagcagcatacctccaaaaatataccttaccagaaagcacagataagggggatagctgttgggattttatgcccttaataaaacccattacaataatctattatccataaaagatttgaagtgacttgtgttaacatgtagttttcatgtttatggtttaataaatgtacaaaatctgttaagtccataacatatattcattcataattacagtgatgtcagcccagtggaatgtgattgtgattatattattcaaaagactgagtccatgtttcattagtgttttggatttacactgatgttataatcagcgatgaagtgtacttacacttggcgtaagtgttatgttctttctagaacattggtaaagtatactnnnttcgaatgtatggagtatacatatgactggaccgatattgaacttagttaagatattataatacttaccgttgtatnnnnnnnagtcaatatcactagttgatctcagatcaaaatttctaaatcttgatatgcttaggctnnnnnnnnnnnnnnnnnnnnnnnnnnnnnnnnnnnnnnnttaagcctacttatgggtcagggtgatacgta

SEQ ID NO: 171159 - DNA, 1001 bp, Cannabis sativa
aaattcatcatatgtggtactataatcccactactactattattatgatttattatataacaatgtcatccaatcttatacttctaactattataataccataacttaaattaaatgattactatcattcataacacttttatttctaaaactgtccaagcttgtactgttttttttttagaaatatcacttttaataaattgaagaaaattaacttattctatgaaattactatctctacctcgagataactatactaacataataaaaaataatactaaaatattttggttattacaatctaccctccttaaaggaattttgtcctcgaaattaacttctacccacatatacgcggggtatcgattcctcatatctttacccaattcacaacttttctataagagtttccactctacaagaccttatctaggggtatactcatatattttagttacccgttctaccacacctcctaacatgtcatattacgcatgtcctaatgtagttagaaattgtcacacataagcatgtgtgtgggattggatacctaccttctccacatgaaaatgttgaattctgttatatctatctgctatagtagatggacctaaatatctcaagctttacttagcctacataatatttctctattgaagtgaactttaagaacatacagtcaccaacactacttaactttttatcacttttaaatcctcatcattcttcatccgctagagcggcaggcgtactctatcatattttgtctattatttttgataattctcttacttcttgtcgacttataggtggtacctcactccaagtaaatttagcacacataaaacatctcatagggtgccttacatattgtggctaaccaattgtcatcacaagacaatgttatcaactataaacacttactctaacttaccaggaagtataccatttgtaacatccttgcttcaagcctccactaggtccttacacccatggaatga

SEQ ID NO: 171160 - DNA, 637 bp, Cannabis sativa
ccaaacatgccattaaagctcaaggttgagctttcaaacatccatcttgctcaaaacttaaccaatcaatccaattaacttaaaaacaacacaactagcttcaatctagctccagaatacaaaatccagcaactccaattaccacagcaattaaaattacaaacacatcaccctaactcactctaaaatcaaagaaaccacaagaagagttctaaaaaattataccttgggctagagactcaaaatccttgctgaaatcactgtaattgcagcaagtaaaactccttttcttgctgggtcttgaagaatcgagagaaagaaagaaaggggtatggagagtgataagcttctaggttttgctcttatcctcatattaacataaaaataaattacttttcttttaaataaaactaataaaaaccagactatattaccataaaaaacaaaagaaggaatccccaacataatgacccttatacccctcaacatatctcaaatattcaaaatcacccaagggtagtttagtcattttacaaatccagaccaattcacaacacctctaatacccaacgataacaccccgataataatattctaaattataaaatgcaactctctaggcccaacgtcgctttcc

SEQ ID NO: 171161 - DNA, 561 bp, Cannabis sativa
cgttgtcgtttaagcaagaacaaacggagtctcgataagaggcttcgagttgtttaattttgtgagacatttcgatcaagtggtctggttctgtgggatcgtgatgaagcgtcatttcggcccttaagagagtgttgaagaaagccaatctctgttcgaaatcgacgatgtcggagggattatgatgatggtggtggtggtggtgatcttccgatgaattagaagcaagtacttggctgagttgggattctaattctcggaaaatcttctgtaaaagtttgtgatcatgtgccatttttgttttgtatttttgaagaaatgatttgaaaaattagaaaaggagtgagtggcggttatatagtactggagaataacggttgcacctcttcccaagtttcttcttttttttacttactaaattgaagttttcaatttaatttatttttgttgggggtgtgttttatatgttgtttatcagttattaaaaaataaaaaataaataaaaaactgatttgaggatgatgctggataacgagggaattggagaaaaattttgttttt

SEQ ID NO: 171162 - DNA, 1550 bp, Cannabis sativa
atcacagaaatcaagcgcaaccaagcgagaatgtcaccattcttattttgccctaacatacagaaaaagcaaaaaaaaaaaatatgaacaaaacttatgcaaaggtggtaaggaagaggcggacagtgtctggtggtaaaactttgtctaacaacgatagaggagcagcagaagatggttggaggtgtctggaattttttcgaatatgttggctgggttgaaaattgcaaggtggtgaaagtaacctaacaaagaaaagtgctggcttttataggccagaaggggtgcaaggaaattgtgatcagacaccatcgtatggtgagaatttgtagcaattccaattccgtgatccaacggatgggatgaacaggtgtcaagaggagaaaggacggtcgaaatgtttgagtacttctctaacattgacattaatgcaaaggtctatcaatggacaggaagcgaatcattgccagtaaaaggaaataaaaatcaatgatgacgatcataaatgtgacccatgcgccaggggcacgtgccactatatttattaaggaccggaggccgcatacaagtctcatttaactattactaaataagacttgggggaaaaatgttgcttagggtttttcccaaaatacgtggccacgactacgtatgacacgtggaccgaaaggacacctcacctgagaattagttgagacatatacagacgaacaagtgtagtttgagaagtgagcccccagagaagtacaaaaagcatgcctttcctctccgggagctagacatatgataaagcatctccgggaggaggaggacatactcaaacaatcacctcgcatttaatgcatcatggggaaaacttcttggaatgcccataagaggacatgtcaaacaacgtaagcctcgtttacggcaactacacggtaatcaaaggggctagtgacggctccattacgaagaatcacatcaatcaaggaaggataaagattaatctcacctaatccctaagatacctacagtataggttatgcatgccttattttgtacttttgggaacttgtgctcatatattgctggcactcaaagacaagtgatcccttcttgaatcttccctaccactctctataaatacccctaaacaaaatgggaaaggggatcgaaaaagggagagagaaaaactcaccaagaacattctctgtataagaactctcactaataacaaagacttgtggactacgagtcattaatgcccgaaccacgtaaagatcatctgcattaattatccctaaagctctcatcattatctcatttaattggttgtcgaaaatctcagtcaacactatgttatttattatgttatagtttcggttctattttaattatgaccaatttgaagtactctgtgttatttatttttatttattatgttatagaaccggttctattttaattattagcggtttgaattattgagtgttacttgtttttattcattatattatagaaccggttctattttattttataaccaatttgagttattttgtgttatt

SEQ ID NO: 171163 - DNA, 560 bp, Cannabis sativa
atattctaaaataaaaagaaactcatgagccattcttaaaattttcaaaataattttatttttttcattttattttatataaaaaaaaagcaaaaaaaatcatcaaaaaaatgtaaaattttttattagcagtacgacattggagcactcccgtcccatcagagtatgtaaaataactctaatgggacgtttagtatgaaatttagacttgatgagaatgtaaaatttaaattaattctgaatgacaagagtttatgtttccaagtaattaaagtctattctaattttactttctccaactcaaatttatataacaaatgatccattaagtattgtttggttaaaatgagtgaaaacatagctagaataagaatgatatttcaatactttaaaataaaattaaataaaagaataaaataaaaattctttcttttctaatattttattctaattctttcactttaatagtgttgtcgagcaaatttcgcaacaccaaaaagtataatttaattgataaaaaagagaattatttgagagatgacaagtgcgagtattcaacc

SEQ ID NO: 171164 - DNA, 1043 bp, Cannabis sativa
  modified_base (991)..(1002): a, c, t, g, unknown or other
tcaaccatagaaacacaaatcaccaattgtgagcaaagtttgagctctaaaactcaaaccttgctcaaccacaacaccaagcactaaatccaacacaaatcagctctataaacatcaatttaaccttagaaatcaaaaccataaccaatttgcacctacaatagctgaacctcaaaagtacatgaatttttaaacttaaaacccataaaattccaaagagaagagatagagcaagcataccttgacttagttcactaagtatttgtcaaaaccagctagaatcaacaagtaaagaggttgagaagccctagtttctgctggcttcctaagggatcgagagagagagcgagagagagaattcttggagagagaaagcttgatatttgattttctaatttcattgaatggaaaagataaatcttaataacaatctaatatatatcttaattacatcagattaactagcctattaataagtcactaaaggacaaaagaaacttgtggctaaaagaccattttgcccatgcttaagccaaaagcatccttgccacctaggggtattttggtcagttctaaaatcttgaatattcccaacatttccaatgtttaattaaatcaccacgctattactaaaatactaatatgtgattctattggccaaatgccgtgttccaatgttgccgggcataaaatatgaaaacataaagtttcatatataacgtaaatagcacacctaaaatacaaatatatctccataaattcaaaattcataactaaaagtctaatttcataattaagccctaattatttgctaatttatcatattaaaattaagcagtctttacacttatcactataggctcgagtatgaagaacaatgaaggaggcttgaaaactatatagaaggtgtctctcatctactagttgtttgacagagaaaactagatttaggttggttgaatgatcagctggatgagatgagagcatcatnnnnnnnnnnnngtgtttcaactagggcttagggttgaattatatggattaaa

SEQ ID NO: 171165 - DNA, 584 bp, Cannabis sativa
ttgcctttactaatccaaatttcttaagcaatcattacagtactaatttaccgagtctgccttaattatgccttagatgaataactctttattccaacatatttatcatggcataacattcaatttcttttcactactagggtaataaccctagatcaaataaatgttcattttagggtaataaccctaattccaattcttaattaatcacaatcacaacatacaatatgagcgccactgcgcttaactctacgttcatactattgtcttacctaatgtcccgtaatcgcagagattccaaatccctgggtactcctgaccaagtgccggtaatcctagtcgcacaaattccaagattttcatacatagggttaactcctgatttcacattcatgaaatatattcatggcatttaaaattcagataatcacattgatctcagaacgagctttccaacggtatttagaactcccaaatcgtagttcagatcacaaagttatggattttcaaagcttgtacttgaatctgcccaaaaactcgagggcgggctgcggcatgcaaaagccatgcagcgacacctggga

SEQ ID NO: 171166 - DNA, 721 bp, Cannabis sativa
aaggttgctatttttaaaacttgtataatactaaaatttctaaaagccaaatttttcaagtttttttttacttataataattattttaaattttggtatatatgctgacgtggcaagtcggtatttgtgtaaataattttgttgaaggtattttgtaaataaaattaattttacgtataatatttaaaaaagctccatatattaatatgcaatactacaaaatttatataacttaatttaattattatataattttttttgaaaaaaattaatatgtagtaatgtatttttataatttttagtagctaatttattatatttgaccattttgctaattttttattttataaaaatagaaatttagtcatttagtttctaattttatggtcaatttgcatctcagccttgtctttatagagaaatgcaagtaaatggctctatttttaactttatagatagttaatgtctcttttttaaaataataaagtaaatgtctttttttactttttaatacctaaaataccctttattatataataaaaaaggtattatatgttttatttctttaatagaaattatgaaaaccaatagatcaaaatctctctacacaatttttgccaactattttttcattatataaaaggtgttatatgttttattcttttagattttgttgttgttgtagctgtctaatatgttattaatatattgtatgatatac

SEQ ID NO: 171167 - DNA, 550 bp, Cannabis sativa
cccttggacggtccgtaccttgaagtccctagtgcagcattggtgtccggagttggttttcatatcggaatctagactcaataagatgcgagcagaaaatttgcgtgttgctttgggttttgttggttgctttgtggtggaggctaaaggtaaaagtggcgggcttgtgctaatgtggtccgataagataacttgcaatattctttcattctcctctttccatattgattctttcattcggaaagaggaggaccaagggtggcggttcacatgcttctatggagacccagatccaagtaaacgaggcgattcttggacagttctcaatagagtcggcagaatgtatacgggaccgtggctgattgggggagattttaatgagattttaaggcaaaaagagaaaaagggaggacaacaaaaaccgagatatctcataaacaatttcagaaaagctctagatgattgttatcttcgggaagtggagtttgaagggaatttgtttacttggtgtaatgggagacaagataaccttatctttgagagattagat

SEQ ID NO: 171168 - DNA, 1153 bp, Cannabis sativa
  modified_base (460)..(468): a, c, t, g, unknown or other
  modified_base (516)..(528): a, c, t, g, unknown or other
  modified_base (640)..(648): a, c, t, g, unknown or other
  modified_base (1057)..(1062): a, c, t, g, unknown or other
gacgaccacccaccgccaccagcatcgttatcagaccactccgattgagacccgcacgataccgcacaaaaactaatttttttggatttttaaggtcgggtctgatgggcccatcagaccccatcggacggggcattggggccgaccttaaaacctaaaaaaaaattggtatcgagcccatcggacccgacttcaaaaccctaaaaaaatgccccatcgaatggcatcgggccccatcggacccgaccccttaaaagcccagaaaaattgaaaaaaaaaaaatcaatgtagaaagggtttgagtttttgagaggggtattttttggattttggaaaagtagtcatatattttcaatgtagaaaagtattagtttagggaaaaaaaaatattaggtatatgtaagtatagaaaatcaaatttccctttaagatatcctacaaaattttgagaaattcagannnnnnnnnaatatagaaaataatgttcaaataatctattttacacgcgtataaaannnnnnnnnnnnncgtgcaacacactgcttgaacgtactttttggcatgttaaaatttttcgaacttcttaaaattttgttggatttcttaaataagtataatttacatgaccatgagaaaaaannnnnnnnnaaaattatttcggatactaaaacaaatagaggtgtatcagtgtattccttttaaataggtggattattattattattattgaaaaattaataataattattaaaaaacttaataaaaatattaaattaattaaaaaaaatataaattttacttaaaaaaattcaaattattcttaaaaaaaaaaatatttttgtttgaactgtaaatttcattcaactagaccaacacaacctcaagcaatattaaaaatattaaaagggagattataccccaaaaaaatacaatcagcattgtaatatctcgtaataattagaatttatatatcaatatagggaaattctataacgtacccccttaatagggatacatcgatacatctcaatcttttttagtatccgaaataattttnnnnnnaaattttttctcatggtcatataaattatacttatttaagacattctgcaaaattttaagaaattccgaaaagtttaacataccgaaaatt

SEQ ID NO: 171169 - DNA, 565 bp, Cannabis sativa
tctctccttctttagagatagattccattatggaacttgcaatgccctgatgcacgagtagtgcctccatcttgatttgccaaagaccaaagtcattgacccctgtaaacttgttcacgtcgaatcttgctgctgccatctttgttttccaactttgattttcacggttattgattccaaaatagtaacctgtgctctgataccatttgtggtgaatcaataaacaccctccaagaacataacaaacatcaaataaatcaaagaaaacaatgaaaaacaataacaaaaaatgacaacaagaatataaaaacagagtatatgaacatagtgagtttacaaggttcgatcacaagctagctatgacacttattggatcgggttggagctccgacccgacggataacctctgatccgtaacattcggatacttattggatcttggatcagatccgctctgcctcgcctaattttcttctggatcggatttgatccgacccgatttcaatttatatttttaaaaaaaaacttaattgaagactcagatcccttgggacttggactcgga

SEQ ID NO: 171170 - DNA, 958 bp, Cannabis sativa
aatatttagcttctttaactttacaagtgattgattttttcacttcacatgccaacacatgtattatttcattttgaattttgtgactcaaataatgataatgagtttcatgtgccataatatgatgcacatgttcttgcatagttgaatcaaattcagcaaacaattctatcatttgtaaaaaaatctcattgctatcatcatatagcttttcactacttcctcgacatgccaaattattttccaagtcttctcacaatagcaattattctctctaatacacgtttccaatgctccctttcttggttgatttgttcatgtaaacctttatcaattgtttgattcaggtttaaccgtttctctaactctacccaagtagcgatagacatattgtaatgcttatttttttttcatgacttctaagcctttcagaaatattatgccaatcatttatacattcattagcaaaatgacccacgtgatgttttgttgaaaacaacttacaacaaaagcaaaatactttgttttgagaaactgaatatactaaccactttctatcttgtttctccttatatggaaaatctctagtgtaatgtgttgaagaaaaacttctaccaaaatcatccttggtatatgtgacatcatagactctttctcaacctctttcaactaaaaaatcaatcagattatgatcaattttattccaatttcctggatcatctatgtcaagaggaaaactattctaattatcatctaaacttttctcattcacattctcatttaccacttgatcttcaacttcattcacattatttttacaatcaagttcatcctcaattgcattcgtaatagatgtctatactttattgttaccaaaatactgttgagaatattttatcaggatctaaatttactaacaagtacgttgattaacatcctaaatatgaatatttctaaa

SEQ ID NO: 171171 - DNA, 542 bp, Cannabis sativa
aaccaaagtttaattaatggacttccttttgtgaataaaagaaaggtttagactttaaactttttatgggcactgtattatccactatagttctttttttttttttttaaaaaaaaaaaaactttataataaacaagtaataagttcgaagaaactatatattaaagtgtttataaaatatgaataggttgtaattttttaacccaatgtataatataaaaggcgatttcgctgattttttttgaaaattttaataatttaagattcaaacagtttattacatacatgttagttttaaaaattacatgcaagcacaataggctataaaatcatcattttcatattttaaaaatcattcgaaattttataaaatttgcgggatgttccttatatttatattatatattatcatataaaataattactaactaatttatgcatggaaaaaattaaaaattacttgtacatagtgataaaaaaaataatactatattttaaaaaattaaaaaagaaaaaataaatgctttatagtgaatggtata

SEQ ID NO: 171172 - DNA, 721 bp, Cannabis sativa
tatatagaaataccaatatttattagtataaatagaatattctgattttttttttgaatgtaaatagaatattctaattttaaaaaaacttcacactaaaataaaatctcaactttaaaaccaccgcatataattaatttttagtatattatacatttacacatatcattaaaaatgaatcacatataattaatttttagtatattttagttgattaatctcctaaattttatgcttcatgcatgtttaagtgatttgaatatttctattttaaaagacttagctctaatagttgaacataataatttagtttcgatacaatggtgacatatgctgaggaaaaaaacttcaaagataagttttcttgttaaaataataattgaatttgatctttaatttaaaattaacaatattatcgttgtatagagtgctaatccacttctatttataggtagttttcgtccaattgttttttttttatgccgcttgaaggtggtctcgagtttttttgtctaaattttcgagataactttatcttatataagtcatttttttttatagtgactcatatcctgactttgtatatctttgcctagacaattagcttgttgactgaatttttttttcaaaaattatcatagtgtgattcttatcactctttcaaaaataaataaataaataaatgaatcacataaataaagaaatacatattttactttca

SEQ ID NO: 171173 - DNA, 915 bp, Cannabis sativa
caagtttttcctctttcttatgcagagatgttgagcaaactaaagtctgttagggttatgccctagaaagcatgtaaagacatttttgattataaaataacgagtaaatatttgatgtatgtgtggatgttaaattattagtatttattattgaataatttatattaaatatcagaaaaaaatttattcgtatatgaggttgtggtttgtagttgtacagagaattaagaccacttagttataaataaaacaatcagcaacatattaaagttataaaatctttaatgaatggttgctagtacggttcactgatgcttattcttcgatgcaagtaatcttagttcagaatacttttgtagtgagacatcaaagtgaaggtgctgtatataatagaaattatatatgacaatgaccgatatgaataaagatgtctttattaacatgttgtttatcataaagacttaattcatatcataacaatgatcaataatagattgacctaaatcttgagttatcatgaactcctattcatgttattagttactttgattcactcgtaaaagtttctcagagaatatgattcttccaacttctattttgggaatctaataatgtggatggctgggaacatgatgtacaattaaggaatcttgactttcctaacgaatcaaatgttggttctttttaagttagtaaatatgattctataattactaagagtgcaattctatatttatggtagagtaatcatgaaattaataaacaagggatttatttagttgataagactcaataaataatctagtttattgaagcttaaggtccatgctccccgaatcaccaccttgaaacactgtcaagggtagggataacgtgttgtataaagatattaaaaaaaatctattttgaattggc

SEQ ID NO: 171174 - DNA, 1587 bp, Cannabis sativa
  modified_base (1058)..(1060): a, c, t, g, unknown or other
  modified_base (1529)..(1541): a, c, t, g, unknown or other
tatgtgtattatattattattaaaaatatacattatatatgtgtgcggttttttttacttttgggattatttttattatggctaattagaatttttattttctgaattttgacatgtattaaatcatgtttcttaaacttttcaagccttgaaaattacccccgagctattgaaattgttagatttaaggacttatgtctaatttaatttaattttattaatatgacaattatccatatactgaatcctccccccgaactttgatatctactaaatcatgcctctgaacttttaaaagtacaaaattgtgccctctaaatttttattcacgtcaaactttgtttagtaaaattaggcaaaaattcttaaatctaataatctcaatagttcgaggagagtttttaacgacatgaaaagttcagggatatgatttggtacatgtgaaagtttaagtggcaaaagtctaaattaacctttttttattattattattataaatttttttcaacgacatttgggagcttatgaattgaataccgattgaaatgaagtaatttatagagtaatttgtggtataaatacctaagcttaattcccgaatacaaataaatatttaagtttaatttttaacagtaataatatttaagttatacttttgaaactttgtaggtacctgactattaaatgtttagttactatccacgtgtcattttttattggtatatttaaactagttttttttttttaaaaaaataaaaatttaatgacttggaccaatcagaaattgccacatggcaatttacttaacacttaacagtgagtacttacttacaaaagctatagaattataacttagtattattaccgctaaaaattaaacttaaatatttatttacaattcagagttaaacttaactatttatgttgtactctaatctatatatattatgctaattagaatttttttctcctaaactttgatatgtaccaaatcatgccccctaaagttttctggtcgttaaaaattcccccagaactattgagattgttgaatttannnacttttgtccaattttagtaaggaaaatctaacatggatgaaagtttatgagacatgatttggcatatgtgaaagtatgaaaggcatgatttggtatatgttcaagtctgaggagtatgatttagtacataaataatcactaaattagtaaaattgaatgaaattagacaaaagtcacgatcagaaaaatttagaggcatgatttaatacatgtcaaaatttaagggtaaaaatcctaattagcctatatattaatatgaccctaattgataataatattgaaccaatataatgctcttatgtattttatatttgaaacaagactttttagggttgggtcgtttttttgaagaatggttgtcagttcgccatgatcgcatgcaaaactgatgatttcccgtacatacgtatcctttgtcttataaaaaagactttttaaaagtcaaaattaatttaggtggcgtttggnnnnnnnnnnnnnatcagttttctgtttttaaaagtggaaaagtgaaaatatttttcaa

SEQ ID NO: 171175 - DNA, 647 bp, Cannabis sativa
aaattttccataattttttttttccaataaagatttattcattaaaattaaaaatcatactataaaatctattctacacattctaccttactttatatatataatttaatcaattatggttattgattatgaacgtgtttattaattttttaaatatatatttaaaattttatttaagtgactataataaattttaatgatggttattttatgattttaaaatatatataaaaaacataagataaaaatacacaatttattaataacagtttattttttgccaacaaaaaattagtcgagagttaaaaaaaaaagtacaatacaattgcacacatatatttaatatgtaataaattaaatgagtttgacttaagtaaaaaaggacaggcctttcaaagaactatacttcttgaatctttttgattccgtctatataaattatatattttcttttgggaaatttacataaattactttaatatttaatatatatgataataaattaattattttttttttctgatcacactttcatttttttaagttcgcattgagttaaattattctattttagtaaatacgatacttattattattatgaaaattattttatttaatttaatatattttaagtatttgtgtcacaa

SEQ ID NO: 171176 - DNA, 547 bp, Cannabis sativa
cttacatctaaaaagacccacatatcatgacatagttgccttctgcgatgctgattgggccacagaccccaacgatcgtcgatccacatcaggcttcaccatcttttttggtgataatcttgttgcttggcaatgtaaaaataagcaaacaatctcccgttcaagcaatgaagctggatatagaagtttggcaagcactatggctgaacttacatggattcactctttattcacagaacttcacattcagcttccaagaccccccactgtgtggtgtgacaacctaagcaccatccttctcacagccaatcctgttcttcacgcacgaacgaaacacatagaacttgatttgtactttgtgcgtgaaaaggttctgcaaaagatggttcatgtcaaacatgttccagctgttgatcagcttgttgatggcctgtctaaagcaatctccagtcaacgatttccacactttcgatccaagcttacaattcaagatcttacttctgtcacaaacgattcgaattgtaaccttgaggggccgtgttaaggg

SEQ ID NO: 171177 - DNA, 1092 bp, Cannabis sativa
  modified_base (353)..(354): a, c, t, g, unknown or other
  modified_base (687)..(691): a, c, t, g, unknown or other
  modified_base (1032)..(1036): a, c, t, g, unknown or other
tttttttttctcattattaaagtcgttggcattctttattttttttagggctgagatataaaaccattttaaatttagaaatgtctcttttgtgaaaaaattaaaaaaaatatcaaatataataaattagctaataaaaattataaaaatacatctattatatattattttttttaaaaaaaattataataattaaatcatataattttttaatatagcatattattatattataacaaaaataaataaatatattaaatcattaaatatatacattaatatattgtattattgaaaattaatatatcatggcaataaaattatatacataccacaaaaaaattataacaatnntaaattaatactcaaaaaaatatatatatcatcttaacaaaattatatataccactattaaaatatatatacatactaaaaaatttatatataatcaaatggaaactaaatatcatcttacataaataatatactatagacaaaaaccatataccatacaataaatatatatacatacaataaaaataaaataaataatataatataataaaaaaaattgtatataacatattaacaaaattatatatcatatttatgtataataaaataaaaactaagcatgcatgatctaaaataaaataatatattatacaataaaacttatataccatnnnnnaaaaaatatataccttataatagaaatatatgataacaacagataaaaataaaaatatatcagatgctaataaaattatatatcatgtcaataaaaatacaatagaaaatagaacttaaatattattttaaaaaaatgatacaccatattacaaaaaatacatataccattcaccaaacatatacactactcctactaataataaaaatatatattttactaacatatatatatatatatatgtgtaaactatacttgccaaattatataccataattaaaatatgtatactatgacaataaaactatagggatatgattttgtcctgttattgtactttnnnnnattgtaatccgtgatgtacggcagacgtcagatgagggagttatttgatctgacgg

SEQ ID NO: 171178 - DNA, 537 bp, Cannabis sativa
gctaatttgactatagattgtgtacaaaaggaaattgctaaaacataattactcatataatgagttaaattaggtttttgtatttatgctcatcacatccattgtactgtgtgttcttacattcaaggtaataaggtccatccgtatttatatctgtaaaataattgatacaataattattttgattttgattttataccaattataatttatgtgaaagatattgttaaaaagtgcacaattcatataaatttaagcaaattaaatgtataacaatctcaaaccatattattctactttttttttttcctttttgagaaaaaaaatcatattaatgagataatgtctgaagggaattttcaaacaattagcaattaatatgatggaccataaattagtctttctaaaaaaatttaccttcttgttctacaacatttatgagatttgacagggaatcatattacgaataaataaaaaatattaacgttaggtgatattaattgccttattaaatatgccaacactaaagataggacc

SEQ ID NO: 171179 - DNA, 1571 bp, Cannabis sativa
tgagtactaggaacggttgactgctgctagtagagccctagcgcgactgagttcagtgagttcgtgaggaggatagtgcctccggtacaccaatggtaacttgagtacttactatgtgtcacgggacccataaaacaccgccagtgagggtgtgagtactaggaacggttgagtcccgctcagtagagccctagcgcgactggatttagtgagttcgttaggaggatagtgactccggtactccaatggtaaccttagtacttactgtgtgtcacgagacccaaaaacaccgccagtgagagtgttagtactaggaacggttgactgccgctcagttgagccctagcgcgacagggttcagtgagttcgtgaggaggatagtgactctggtacaccaatggtaacctgagtacttactatgtgtcacgggacccataaacaccgccagtgagagtgtgagtactaggaacggtttactgccgctcagtagagcctagcgcgattgggttcactgagttcgttacgaggatagtgactctggtacaccaatggtaacctgagtacttactatgtgtcacgggacccataaaacatcgccagtgagggtgtgagtactaggaacggttgactgccgctcagtagagccctagcgcgactgagttcagtgagttcgttaggaggatagtgactctggtacaccaatggtaacctgagtacttactatgtctcacgggaccccataaacaccgccagtgagagtgtgagtactaggaacggttaagtcctgctcggtagagctctagcgcgacggggttcagtgagttcgttaggaggatagtgactccggtacaccaatggtaacctgatgtcacgggaccccataaacaccgccagtgagagtgtgagtactaggaacggttgactgccgctcagtagagccctagcgcaactgggttcagtgagttcgtgaggaggatagtgactccggtacaccaaaggttacctgagtacttactatgtgtcagagatacagatagtaacaggatgttcattgtagtgagaagcagtgattgcaaccgtagtaataaatagcgaataataatccggtgggatcaatggtgaatccaatgattgtgggatttatgctgaatacactgattgcgggatcgtgtgctgatgactcatgttgcgataaccttaatttgctaagtgttggtcgccatgcgcggatcgctaaaaataaacgtattgtgggcattgttaactgttcgaatatttttgaaacaatgatgacattgtaaccataacgagccccccatgaaaaattgtaatttttaaaaaaatattctgacatgtaattttccgcttgaagattgagatagagatagaaacaggatgttcactgtatgagtcccacagaaatgatgatatggaccaagtgtatcccagtgtaatatgggacgtacattgctcactcgatgtactttgtcaattcacacagcactaaaatattattttaaaataaaggactgcttgtgacatgacatgatacacttcccaacgaaacaatc

SEQ ID NO: 171180 - DNA, 710 bp, Cannabis sativa
gttcttgtaaattataatatgaagacttaagattctctaaagcttattaccgttaagatgattgagtgacaatactaccatcatccaatcaaatttgacatgtactgtgtatattggcatgttgttattcatctctggcagctaaattttgttaagtcataagaagttctcatgggatataatatctgtcaacaatattctcataataaacgtttcttgggaaaatggagcaagtgagcagtataacttggtgatatctttgatcctttgatagctaatcatttattttctccttgatttcaattttattgttttgcttattgatggtttttgtgttccattatttctttgggactacttgagtattctagtttttgtgagtgcaaccattaaacaagttttattagatggttcaatgtcttgtcaaacaatggtgaacgctcattgttgaaaaaaataaacaatagtaaaagcgtttgtttgattaatcttttgttatctaatatactaatgccaaataaataatctccctttttattttttttaaatttattttttaaactttctcatttatgcaaaagttcttcttaatatctataaatgaaaagtgaaaaagtacactactttcttggaagatctccaaatgtcttctgtcacgatccgagccctaggttgtggcagatgtgtaatatccataacttgggtggtca

SEQ ID NO: 171181 - DNA, 744 bp, Cannabis sativa
ccttctgctcgttgaatggcttctctgagcttgatgaagccttcggatcggtcaaggaaatcactcattgagtctaccggcctgttcttccttatatctttcaatatttcaccaaggactttaatgccccccagtatcgcggataactttccatcctcggttacccgcgaaactttggtcgcttgcgtcatgaatctattgatgtatgcccggagtggctcgcctagtcgttgctttacttcgaccaaatctcccagatgcaatgggagctgacgtgaggaagagaattacgcatggaattccgaagaaaaggttttccatgaactaaactttccaagaccgaacttgaaataccattgctatgcgacttccgatagagtggcggggaagattctacaacatacatccgctggtactacttgtaaatccatttgcatctcaaagtacttgagatgggaaagaggatcttctctcctagtatacatcttccacgttggcattttgaacttgtgagcagtggctagagattgatctctggtgagaagggagttccgcgagcacggtctaactgaagatcattgttacgctgtccggccatgccatgaaacatatttttcaactcgtcaagctaggtctgtacggctgggcttacttgctcagcattctggtcgagttggactatgtcagcgtctttctgagtggggatttgagtatgggctctgggctgcacgatcgttgtagtat

SEQ ID NO: 171182 - DNA, 600 bp, Cannabis sativa
tagagctactgagttgttttgattacaatttggagaataagatgcatggggttccatctcaaaaccaattggcaatgggaagagtacattagcaatgtgggactaactcttaatagaatgcaatgcatttatttggtttagtggattttttcttagcaaaaaaaatttgaacgttcttagagctactgagttgttttgattgttttgatattggtcatattagcgagttatctttagaagtgtgtaaatgaaataggacaccaagaagtgaatttggactccatgcatgtatatgatgtaaaggaaatttcattaagttttcaaggaagctaagtaatagatgttagaacagtcccacatggaaaacatatattctaaacacaatacccttattaaagaaagggtaactccacttaacactaattggttttaagcggattgcttgcaatgctaatatatagctctatacaaatttgtggattggattaagagtattcaagagtacgctcttgatggtcttaaatgtcctaatttctgtgagttttatactttttgattttatctgatgaaatcggatttactggtgtgttcgataaattc

SEQ ID NO: 171183 - DNA, 639 bp, Cannabis sativa
ttttttttttttttttgaactattcttgtttgctcctcttattttaagttatacatgacaaacaaattgtttatgtggcattttgaatgtcatatgtataatttaattaaataattttgttaattaattaattatttttttctaaaaaaaaaattagggtgtactcataggcgcatatttagagtggaaatgtaactcctatttttctatatttttaacgtttttttaaaagaagatatttctgtaaaataatttttttaaaaaaaaaaagaaaacctataccttttaaaactataaaaaaagaaagtttggcattaaaaatagaaatgttgtaattataagatttggatatctataaaaaagggaaagtttggggtgtgaaagagtaaacttgatcatagacacagaaacaacaaagagttgttctttgcgctttcaccttaattatttccatacatatttcccctttattatttagtatttttaaagcatggaaaactcttcaattatggccttttctgatagccaaattgctcagattgagacacagtttcctcttactgctcaccatattttcaatattattattgaacaaactcctcccaacaccaagttggtaagtgttgcccctgattttgc

SEQ ID NO: 171184 - DNA, 508 bp, Cannabis sativa
agagagagagagagaggagtgatgatggttcttgcggtggagctcgtggccgtggccgaccagggtggtgctttaacgagctttcgtatatggtggagctatcgtgaaagagaaaacgagaaagagagagcgagagatgagtgatagagtctgtagatcaccgtctatcagaaagagagaaggagaactctagagagagagaacaaaattttgaaaatgtattgatttgaaaaatgttagatctaaaacacattatattagagcgaggaaaaacacattatttgaaaattttcagatttgaactaattaccgacgattaaaaactgtggcctataatactataggcgatgattttaaatcgtggcctatagtttaggccacagttcttaaccgtcgataattttcctttaaaaaaagggttttttttcataaatgtacaacaaaaacaaaataattacaaaaaatgtgcaaaaaaaaatattttaaaatttatacattttaaaaactt

SEQ ID NO: 171185 - DNA, 579 bp, Cannabis sativa
agggattagtggttagggtttaagatttacggtttaggggattagtgtttagggttcaggattcatggttgagggtttatggtgtatggttttgagtttagggtttagggtttattctttaggttttagcgtttagtgtttagtaatcaggtttcaattttagggtttaagggtttagggtgttttagggtttatggtttttttgtgtttagggctttagggttacaattaaggtatattgttttgggtttagggctttgggtatatggtattaggtttaagagttagggattatgagttttgggtttggggtatagagtttagggtttaaggtttagggattaggggttagggtttacggtttaatgtttagggtttagtgtttacggtatagggtttaggggttcagtgcttagggtttggggttcaatgatttgggtatagggattactggtttagggttcattgttcgggattcacagtttaggttttacagttttgggtatagggtttagggtatagagttcatggtttaggtttagagtttattagcgttaagggtttagagaggatgattta

SEQ ID NO: 171186 - DNA, 1480 bp, Cannabis sativa
tctccacctaacctccaactgtctcccttattattttataagagattattctaaaagcaaaaacatattcactatagattgtgctatgtttgacaaataaataaataaataaacaacatcaattttacatatatttataattcaatggtgtaaatagatatatttacatcaagtttttttaatattatcgtctaatacaatattacaaaacttaatacgaatttaatgtttaattaatattttcattaaaaatataaaaaataataattttattattctattatgtaaaataataataaaaaaatttcatccaaataaatattgtatcaaatttgacacaatatatgctatgtgcgttcattaaaaacaaattattatgtaataaagctaaatcacattttgacacactattagagcttattttttattgagctatagtttggttttctattgtttatttgcatatccatttaaagataatctaaaataggagtagtatcttatacatggcgtgcattaagactatctccaatgaaaaatttaaaatatgtgctaaatttaacacaaaaaataaatttatgctatatttggtccactatctagagcatctccaatagaaatgcaaatgtagaatatagctcattttgtattattattattattattttatattgtcttaataaattattaagtcaacaataaatgacatattaaattttgtattaagatttataattatgcattaaagcataatagtaaaagttgatataaaaatatcacaaaactactatttgtgtcaaatataactcaatttatacatcttccattaaaaacggtattataattgtgtttcaattcacaagatgtaaaataagaaaaaaaaaattgagttgattatattgatgagaattcaatattttattgagaataataaaaattattatttaaataatagtaatatggtaaataaaaattgtaaagtatagtaaaagtcagtaaatcataataattagtggcatatagtaaataaaaaattaatatttattgtggaaaatttgataatattatatcttgtactaaatttgatacaatttttagcatatgctaaagttaatacactttttataacatcattaaaataataaattttttttagtgtgctaaaatattataggagaatttttaattatataagtaattttaaaattattaacaaatatgaccttagatatttaaacgatgaaatggactgtaattataccgcatatgaacaattatatacacttccctctcactgtactcagcgtcatcttatctttggctttatttttttttttattttaggacaacaaatagataatgaaatggatactagggtagcgtttggttggaggtaataaaatagaatggaaaggaaagaaaacaatcttcattctattctttctttagttgcttattaaagtattagaatgatattcta

SEQ ID NO: 171187 - DNA, 1108 bp, Cannabis sativa
taatcccgaaaagtacgacttgggaaaaacaagagctacgcgtcaaacaatgagggactttgttcacagatcgttcaacaaactgaatagcaacatgactcaaagaggataaaataattctgcaatcattaacaagtaaaccaaacttagacggcatatgcaactcactctggataggctgaacacagaccagactatcagtttccagcagaacattttgccaattatgatgctggatccagcttaaagcctccttgatcccgatgatttcggcaatctctggccgaacaatttcctccatgctagtagtgaaggcctcgagaacttgaccagcatggttacgggctaagcaaccccctaaaacgattaacatcattaaatagagcaccatcaacattaaccttgatctgatcagaaactggtatagtccaatgcacacgcgaagacaatcctatcgaacatgttagacaacaaacttgtcgtccgtgactgtgcaaaacgaaattgattaaggaatgatcttgccgacaaaaccattgatgcagcagtaggagatttttgttgccaaacaacatcattacggtccttccagatactccatgcaaccatcgccgcctccaatgcttgagaatttatccttgccgaaagagcttgaaaccgacagccaaataaactatcagctgaccaaatacaaatactaaccaaagatctattccaactggctcgagcaaaagagcaacccactagagcatgaaaagtagattcctcagcctcctgacatacctgacaaatgggactaataaccacatgacgcttgagaagttgcaaacaggttgggaggatacccgaaactgctctctaaataaagttactaacctttgggggaatctttaatgtccacattttcccccaaaaattactgttgtcatcgcccacccaatcatatttgagatttttcaagaaccgatgcgcactttttacggtaaataaaccactattcttgaacctccaagactagcaatcactatgattgtttgagctcagctgtatagatgtaataagagccctgtctcgggcagagaacaagtcatttatgatttccatgtcc

SEQ ID NO: 171188 - DNA, 715 bp, Cannabis sativa
agggtacatttgatttttttaagatccagacttctgaatctgaatgcatatctgaataataagattctaactctaaatctgaatattgaaatatttagactgtttgttttttacacatctgaatgtattaatttttggggctttttatatatagacacttcaaaacatttttttatatatatatttttacaaaattctacataaaaactcttatacaaactaatgaagcaacttaaatcgcaatcaaaatctacatagaaactactggagaaactatcaaaccaacccaaactgtaaatttaaaaaataaataaataaattgatgtatggagtaattttcttaattttttagtatttttaattttatgatattaactaatttattaaattgcattttatttttaaaacagaaaatatttaatattcaattaattattaattttaaaattttaaaatattaactatttgacattattaatatcatatctcttataataaacattattaattttttttagtttcagagacactacattattattattattattattattattataagaaaaataaggtaaaaactaattacttttgaaaaaacaaataatattattatattattatacatcatattatcagtcatgtcaaaatttactataaatacctctaaaatatatattatgataggaggcaaattacaattttattcatttta

SEQ ID NO: 171189 - DNA, 994 bp, Cannabis sativa
aattgggctcttcaacaacaattataaatcacgcaaattgagacagatgcacttatggtagtgaatgctttgcaagctcccttcaatccaaactcctctttttcagatttaatattagatgttgttagtctattatcctttttccctaatgttactgtttcacatgtaaaacgttctgcaaatgaagcggctcatggcctagctaaattttctttaggggtggatgagacttgtacttggctggagattatccctctacctatttactctgttattgtaaacgaatcactatttgtttaataatagcaagtattttctctaaaaaaaaagtacagtacatgtatgtttattttttttaattaggtaatgtatttttattttttaatttttgaaatagagtttgacactttttatctttgagaatttttttagctgttgcggctgcattggtgtgtgctctttagatgtgataattaattttctttttaattaggtttaattaacgagtgttaagtgcaatatatgtatgtttatttttttcaattaaataatttatttttattttttaatttttaaaatagggtttgagatttttgatctttgagaatttttttagatattgcagctacattggtgtgtgctctttaaatgtgattatatatacgtattttatatatacaataagagaataaattttattgttatacgtattttatacatattttatattaatccttctatatatataaggattatagtaaaaaatattttgacaaaatttgagtttgattagagaattaattactcaaaatacattttatatattatgtccaaacatattttaagaaaataatggcagggataaatacaatattattaatctgtcgttaggagagtgtggttataataaagtgtacaaattattagaagcatatatatatatatcattaatcatttttaaaataaaagattgtcgtgaaattaaaatttaaat

SEQ ID NO: 171190 - DNA, 515 bp, Cannabis sativa
aagttgtattagtttcttgttcttattatgatacaaaagttatcacagcaaaaagaaaaatatatattttgagagatatcaaacgagaagaagaaaccataatcatgtccactgctcactcgattaataaagaaatatctaagcgccatatagaagagattatgcctcaaaagttcttggttggtaagaaagagtcaaacccattgaaccaagatctccatcatgcaattacaagtttatcagctaagatttacattaaagatgttcactttctcattgagtttatcaagctgagcttatccaaaaaggtaatcaaaggacaatactcaaattttgttatattggatttctgtttttctactaaaagcttaagcttttctcatcatttcattacatataacttattgtttttctcatcatctcatcattctcgggaaagatgtataacatgtgacgttatgtgaattttttggaagtcaaggatatgctttttcatttgaggtatgctttttttg

SEQ ID NO: 171191 - DNA, 1324 bp, Cannabis sativa
aattattttcatggattattatttatttaatataaatacatatatgtggttatatttgataatttttaataaagttttttttttaagatttatatatatctataacactatctctatgagaataagtgaaatttctcaaaaatttttcttaagtcttatctatgtacttgttttttttgttggatgtcttattaattctgttagagtttatgtcctaaataaaattcaatttcaatgtaatcttatttattatcaataaagattataaatcatattttgaccttgtcatatgctttgtttacatgcttatttcatgattatatgtttaatatataaattctgctaaattctgaatatatggttattcacgattatagtgttgtcaccatagtgaaaaataattgtgattatatacttgaaactatttagtcctgagtttcatcagtgataatcaacggtatagtttacttacacttagacaagtagaatatcttttctaggacattagtaaagtaaacatatattggatgtacatggttaacattggaccaacaataatagtgaaaaaaatatcataaacttactgttatataactatgttgatcatagattaatttgatctcaatcctaagattgttaaagtttaagttgattgtattgtttgagttctttgacttgttcattaccagcttatccatcggtatatcccatacttacatcttaggaacttgatagttccattaagtgggtgtgttaatcatagatatggtcatctatagcttttatgtttatctagaagtgaaatgatagtttcctttaagcttggccaaatacgataaatgatagagcactcattttggtaactatattagttttttttagaaatatcatttacaagaaactaaggggacgtttggtaatacttttatttttaaattttttaatcataaaaatgaaagtaaatttgtatttttgatttttttttagaaaattaaaatgtgttctataaccacttttattttaattttaaaaacagaaaataaaagttaaaatgtgttctataaccactttcatttctaaaattttatttttagaaaattaaaatgtgttttatagccacttttaattttaaaaacagaaaataaaagtgtgttctataactttattttcatttttattttttgattttatttaagtcgggtctaggtctaggtttgggtcgggaccatagtttgagtccgagattggggccggggccggagtccaggtcctaataagatttaggttggggccagagtctaaaatattgactaagaaaaaaaaa

SEQ ID NO: 171192 - DNA, 564 bp, Cannabis sativa
ccacttttatttaggttatagatttccaattagattaatttttcaaaataaacattccatatgtgtttaacaaaactttaagatacttatcagtagcttctcaaaataataaatttaaatagtttttttaaaaaaaatcttaaaataatttacttttacataattataaaaatctataaaaaaaaaagaaagaaatttgagtatatttgtcccacattattcatgtgaataatttgtaagatttatctcacatcaagtagttacttgataaagttttgataataggataaatactattgggtaagttaataaaaaatatgttttgacatgtagaagagttttttagtttaattttttttttttttgtataattgtatacgttataattatttatgaccatttataaatatttagaaaattttaagtagtttacaatgtcgaaaataaaatttatatattttgttgcacacatgactagtttttcttagggttgtacatcggtcggtttgggtggtttatcctatatattttctaacctaatttaaagttcgggttgctaaaatt

SEQ ID NO: 171193 - DNA, 1004 bp, Cannabis sativa
cagaatgtggattctatggccaactattttgctgaggacatgttcggccatccttctaaaggcccggccaatgctgtagtttgatcctttctacattcgatcggtttttccccttagcgtaatttccgtaaagcctttgtgcacttctatcaatagctatacaacttctttcttggaaatgctccttggtggtgttgggataccacttccatgtgttatgctatgcagtattggacaccttgtagctgttctcctagtccatgctttctggcaaggtctttgcttagaggtatgttgtaggtgtatccatgttgattgtctagcatgtcctttccttttgaaacaaaaggacatagttctttgaagaactgagcaggtgtcaagtttgccttggttgtcaaggtgcagctggctagttgaatgagtttgtcggcttttgtgccatctttggggcttgccttctggtatagcctttgagctgtcttaatagctctagtcggccatcattttcttgtattgagttttatattcacctaggacataacctacgactagctaagagtcgtggttcatgtctaggtggttagcccatgcttcgggtgctagcctggggccagcatttggagcttcatgttcagcctcatcgttagaagcttgaaaactgaccttgttgactcatgcatcagttgcccccaggtgccctgggggccaggcctacatccggcaagtggtcaatgcacctcttggattcttgctctcgcttcttctctggctcttaattttctccggaactctgagagattaggggagatatgctatgattagccatgaagctggtgagagcttggattttagtggccatgcctggttgtgaggtgcttttatgttggcctactctcaatggttcacttgagtagttggcctgatgctccagatttttgtagaaccagccgcaactgctaatcggtgtacacctttatagggtgtatctagaagtatggcct

SEQ ID NO: 171194 - DNA, 752 bp, Cannabis sativa
  modified_base (385)..(390): a, c, t, g, unknown or other
ttcttggcaagtcactggtatcctgaaaatccaagaaacaacaagtggtatctcattcctcagccaaagctgaatatcgcgcaatggctaatgcaacctctgaattgacatggctccttgctctccccaatgactttggcgtctcccacaacaaacctgctaacctctactgtgataacactgctgcagtccacatcagtgaaaaccccgtctatcacgaacgaacaaagcatgtggaaatcgattgccacttcattccagagaaaattcagcaatattccatccaacttctacatgtctcttctcagcaaaacttggcaaatatatttaccaaaccattactgtcatctcctttttctaatattgtttccaagatgggtgtaannnnnntttacactccatcttgaggggggctgtttggattggtttgtccaaatgaataaaattagttagttattactccaactatattggagtctgttatttctattatattttactgcaagttgtcaagtggttagtcattgtaatattgcctatataaggacctttgttttagcctcacattcaataagaagaaataaacactttccctctgttttagctctgaacttctcatattttctgtattcgttcgtgttagcaattgtcttaaggttggttatgtgaaaaaaaaaattgttgaaaattgaactcatggtcttattttttaccatttttgaaaatataaggcccattttgtcatttaacaa

SEQ ID NO: 171195 - DNA, 870 bp, Cannabis sativa
  modified_base (350)..(351): a, c, t, g, unknown or other
tattataggcaacaattttttgtatggttgaagtttgtttctttttttaagtgttcactccttattttagttaaagaatgtgtttagaaaacatgattgaatatgctctaacacgtaatggacttggtactcattaactaatgaaataattacatgagatattatttttttgtaaaatatttatatttttaaattcaaaaaatatatttttttatatatatatttttacagttttttgaaaaataacacgaaaataacataaaatttaaaaaaaaaatacataaaagtaatatcaaaataacaaaaaatcaacaacaaattaactagattacaacataaaaagactgtannttctgtaaataaaatcaaaaaattcgtaaaattgcttaaaatttcgtgaaaccgtatttttgtaaattatttttgttatttttatgtttttataaaataatccgttaactaattccataagccttaatgagtcaagaagtcctccaacttattctcatgaataatagagtactattttatattgatttttaaattaaaatatatatagaatattattttatgctaattttcaaattacatatagtcttaaatcaaatacacaaggtaacaaaattatcaatttgaaataagacatcatccttcaaaaaaaaaaaaaaagatatcgagtgttgggaaatatttcaaccaagagagaattaattactaagcaaacaagggctttatttatagttctaaaatgagagttaaaatacacaaaacatatgtaaattgatcattgtagagttttctctcacatttttttttttgacgcggtgaacagagtcacacatgattaacaatgcagcaaaccacaatcgg

SEQ ID NO: 171196 - DNA, 804 bp, Cannabis sativa
caaccaaattttttagcaatatttgcaatcaaagtactaagtcatggctaatcggctcaaaaggttgctatcgaaggtcatctcagagtttcagagtgcgtttattcctggtaggctcattactgataatgttcttgttccatttgagattttacattatcttagaccagggccgacccaagcattttgggggcctcgtgcaaaattttaaaaattgagctttttttttttttttttttaagatttattcataaattttaaataataaattttttatttatgtgtatataataagaaaaaaaaaaggaaaaaaataggctttttcttaaaaataaaataaaattgggccttaaaaaaataggggccttgtgcaaaggcccaagctgcccaatgcttgggccggccctgtcttagacgtaaacagcaggagaagaatggttgtatggctctaaaacttgatatgagtaaggcctacgataggatggaatggtctttcttacaagccattttattacggatgggctttgcgaaagcttgggttgacatgatcatggaatgtcttcgaacgagaaagtttggggcctattatcccatctcggggaatccgccagggagatccgttgtcgccgtatctgtttattatctgtgcggaaggtttgtctgctcttattcggttgtatgaagagaggaggtggcttcatggttgtcgggtggtgatgtcgcccaattagttacactgcggtcgcggtagtaaacgggctatatgtcgtatccacaggaaggaaaaatacactcaaaaggaca

SEQ ID NO: 171197 - DNA, 1307 bp, Cannabis sativa
tcgtgttaatacattcctataaaaatgcgagccgttaaacagcttcacatgtagcttatcgttgtttttatgagttaaatctcatttacaactgctacttttgacttcgcatcgtccatatatgactccaatcaaccacttaaaaaactttgatttttttttttaaaaaaatgggggttttttttttgcaacatattatgtatttccacataatttccagttgataatacacatatatatgcccctcaagtaattttgaagaataaaactttgtaactacttggggaataattcaactttattaataattgaagttctaaatattacaccagataagagagattacaacattagtttactggtagtagggccgcaaatgctcaacattccagtggttctttattagcgagacgtgaagccgaactaatttataaatctcggtttccactattgctttgatcacataaaacccttcccagtttgggttacatactcctccaaatgcatctctcgtgtttgcaaatactcgctttagtaccaagtcaccaacgttaaaaagcctcttcttgactctctcgttaaaatatcttgtcactcagtgttggtatgctacattagtaatttgcgactcagtacatttttccttaagtagatccaaggtaaatttcaagagttcttagttttcttcttgattatagaaatctcgtttgtgggtcgcaatattgacttctacttgaagcattgcctccaagccgaatgccaacaagaatggagtatgccctattgttgttttcttagtcgttctgtgagcccaaagtaattgtggtagttcatcgacccatctaccttttgcagcgtgcaacttttttttgatagtatccttaaaggtcttattaacagcttctacttgcccatttgcttgaggccttgatactgatgagaagctcttaaaaatcttgttcctctcgcagaactcattgaataactcaccatcaaactgagtttcgttatcgatatactatcttaattggtattccaaacctacaaattatgttcttaactacaaagtcgagaactttcttgcaggttatggaaacaagaggttatacatgttattgagttttattatctcttcaccaatgtaataaaaagactaaaacatatatagagaaagagagtgaggtttgaggttcaagagggttttaaaatgacatttttcttaatttttctttttcttttttggattttgggactattatgagggagctctttttaggggagtaagtgagtaaagatttattttttcc

SEQ ID NO: 171198 - DNA, 883 bp, Cannabis sativa
  modified_base (502)..(509): a, c, t, g, unknown or other
tctctctctctctctctcattcctattatgttcttgcacaaacaagtgaataccatagctgctttgacctccaacacatttgggacgttgctccagtcaaactctctcccaattaccttgacctcccaccgacttcggttccagttctagcaccgacacctctcccgacgatgctaccaagttctaagacacaagaaaatggactttctataatacccacctataacagtaaccaaaaaaatattatagaaatagtcttttcaaaataaagaatatgaggcctatcagtttttttttttatccacacacattttggcaccctcgactgaacaacctctctctcgttccactcctcacagtggactgagaagtcgcacatcactctggatcttcgatgtgttggggattattttactaggatctagatttactatcatgtatgttgtttaacatcctaaatatgaatttctaaaataacggaatttaaacacatataaagttnnnnnnnncttacattgattgcagcgaaattaaatgtctccttccactcagatatctaatccttattcctttctgtcgcagagtattatcaagatctgagcataatttcctatcttatccttataataaagataagtcattactatccacatggatggctagatttactttcttagttttattctaaagtttttttttttttgaacatatcatagtaggctatcactagtgtcatccaaataataatgggctgaaattttaaaatcctcctactaagatgaggtactgtgattctatgtccaaggacttttactggtatcaagttactattacgatagtaacatgttaattagaacacttacaggatcaagaataagttcta

SEQ ID NO: 171199 - DNA, 519 bp, Cannabis sativa
tttaccaaattacccctaggccttattttattaaagtgttttattggttgggcaatttagtcttttactaagttgaaatttttacttttaaggatttgaattggcttttttttttttttaaaaaaagaaggttatatattgttaggaaataaaaaaaaagtcaaacattttagaggataaatttcttctcctctttcctttctctctcgatagccctagaaaaccagcctataccagaattttcaacttcatttcaggcaaaatttgatggaggtagtgaggtgtagaagtagcccaagcttggaggtaagtctcttattccttccctttgattttctaggtttagggctaagtttttgttggattttcatttgatttcgggcctgtgtaattattgaggttcagagtatgattctaaggtcaaattaggtttgtttaattatgagttggataattttcatggatgttatggttggaaatgaaagaattgatgtttaagaactcaaagttcactcaagt

SEQ ID NO: 171200 - DNA, 862 bp, Cannabis sativa
  modified_base (570)..(572): a, c, t, g, unknown or other
gtgtaaaaatacttcaaagcttttgactaaggatcattaatgatccaatgcaaaaatccttatttctccttctttaatttatttcttctttaagcttaatttattttataatcggtttctaaaaatctcagtaaaattttgaccatagcatgaacccaaaggcaccgaaagtggagggtctggtgactatggagaacctcaagtgagtcggcttggttgctccataccaaagtataaactccctcaattcttatggaatacattccaaactagatgatgttaaggaggtcgttgttgaaatcatggcaaacaaggtgaagcaggctattaaaaagataagaacttaatggaagagtgggtaaaaaggaatccaaaacccctgaacaaagatgtagagctggaggtatattttcctacagtctttccaacacatccaaaagaggtaattatcctttctgtctgacccatgttcctcatccagaagtgtaacgccctaaataattaggcacgttacccgagttatttaggaaaccctaatcctctaagcgggattactaatcaaaatagcgnnnaatttaaacttttataataaacgggatggaaataaaacttgtaataatttaaactttataacatttgggatcccaaaaatatttacaaactttattaccagtctttttctttcagccggcataagcggcaaaatagagtttcaaaaaatatcgctggtagacccttaacccgcttggtctgatatgactcggacatgtacattcttcgcccggcttctaaactcatggctgatcagctaatgccttaccctttcctgcacagtagagcacccgtgagccaagcccagcaa

SEQ ID NO: 171201 - DNA, 726 bp, Cannabis sativa
gtgtttggaattgggatttgggtggggtttcggatctgtgaaaggagaagggattggggtcttcggatgtggggaagaagaaggtccgatggtcattttggttgggtccgatggtcatttggttgggtccgatggtagggggtgtttgggtccgatggtatgggtgtggggaatagtgggtcggactgtgtttgagtccgatggtccgatatgtgtagttgggtcggactgctttgggtccgatggtccgattgtctggggagttcatggggtccgatggtccgattattggtgggtccgatggtgccacaaattggtggtgtgtaaacaatatgatgatcaattaatatagaccataatacgtattatgatgatcaattaatatagaccataaatttagaatgaagtaatttaatttgatttatattaatttagattacagagttatatggcgtgtactatatatattatatcacatgtatctattctatatatataaagtgtgtttatataacagaattcttagtttttgagaaattcaagggtgactttttatttatattaaaaataagatagtttattattaaaaataaaataggttatgaaaattccattaaatccaagaaaaaaaaatagttggacttccactctacccgcatgacatccgacactaccaaaacgacaactctcaaaggcattcctcttcatcatcttcgtcgttttcat

SEQ ID NO: 171202 - DNA, 1100 bp, Cannabis sativa
tatatttatcacatattaactgtaatatattgttcccaacaataacctacctaattataaattaacatcatctaaattaaataaaaattaagatttcttgttcttaaagttataggagaggttgacttttttctccacttagctcgccggccttccctaagcataggtgcgggttggctggagttgtgttttgttattgtgattcgatttttgctattgcaattagttttatctttgtgacataattttgagtattttagtcttatttctatgacatgagtttgagtgttttagtattatttgtgtgacatatggtgttattttattttgttttgttattaattcttctttgttcttggatgacttatcattagatcgatattagtggttgggaataacaagttctttgcaactgaagtggttattagtggtgcagttacgtatcttgcacaatagttcaatgtagaggtattcatccaatccaatccgcactattttgctcatagtgcatctgatccgcactaagtacgaatttcatattttggatctaatctaatcagtacaataactcaaattcaatccaacttaattcaaaaaaatacgaattgaattggttactttttaatattaaattatttaatattgtcaaaaatatttttttttcacataactaacaacaaaataaaaataattattattgttttatgttttcaacaaaaaattaaaataaataaaatcaaaaagaaaaggaaacataattgtatgtacaaaaatatttaattttgtttaaattatatgtaaatataaatatacatttgatctattaagttttggaatatatttatattatatttgttagatttttaaattactatttttttaaaaataaaatattaactatacataatttttttaaattttatataaatatgtgtgaattggattggataagttacttttacatgtcaatcaacatccaattcgtaaaaatacgaattttaaattttccaatccaatccaatatgtacaattgtggatattcacactttgcgaaatgaattggattagattgaccattttatgaacacccctagttgaat

SEQ ID NO: 171203 - DNA, 533 bp, Cannabis sativa
ttcaactcaaattatttccactatgaaatactctagctggttggttgtgtatcatccaagtttgtatgtagcccaatctgagaacacttctaagcttaagacaaaatttgatagatttgaaatgcaaaaagctactcaattatggtaatagcttgtgtttacatgtctcacaaaatatgtttgttcatttcttaggtttgattgctgatgctcccttcgctatctccactctttcaatttattccaattcctgttagtgatggccaacatgtaggattacatattgtagctcaaatatggttaccaagatcattaagacccttgatattccatttcaaacctttttaacagaccaggctagcaaataacttacatattcgcaagtaaaaaatacgaaggagttaatcagaagggaaaggtaaacctcgtgttagtttgaagtaattgaagaaaaattagaaaaaggtgtttaagtgaaacaaataaagaaattgtaaaatctaccaagtttaaaaagagtaagaagaggcaat

SEQ ID NO: 171204 - DNA, 938 bp, Cannabis sativa
agagagagagagagagaaaggtggatgagttttttcgatttcttgattttgctttgtttttttttctctaatagaataaagattaatgaattaatcttttgatgaaaatagtaacggctaagtgttcacaccctaggctgccacctaattcctcacttgcctaattactaaaataccccttttgcataactttggcaatttaaagttaaagggcaaaatggttaaaaccataaccccctcaaaccttgtattctacttgtttccaatatcccactaagtaaaaggttctagactcaatcatgtgattaaaatagttatccatcgtattttccgttgtcgccgagcaaaaattacaaaaatataataatttaaatatagctcaaataatacacctagaatttaataaaatctctggaatagagaaattataactctaatgcccacttttaataatgggacccacaatcaaataaattcacaaataactataaaaatacccataatcaatgctaattgcctttactaatccatattctaaaatgcggtcattacaattatccccccgttaaaaaggatttcattctcaaagtctaacctcaatagctctggatattgagtcctcatgtcagactctaattcccatttggcttcctccaccttgttgttcctccaaagcactttgactaaggctatggtcttgtttcgaagaactttttcctttctatcaagaatctgaactggctgttcttcgtaggacaaggcttactgtagttcaagggcttcgtacttcaagacatgagtcgagtctgaaacatatttcctcaacattgaaatatgaaatacgttatggacagccgataacgcttgtggtaaggctaaccgatacgctacctgcctgaccttctcgagaattgaaatggcccaatgaacctagggct

SEQ ID NO: 171205 - DNA, 599 bp, Cannabis sativa
  modified_base (187)..(192): a, c, t, g, unknown or other
  modified_base (316)..(318): a, c, t, g, unknown or other
attcaatcctatgagagaaaattaaggttgcacgtcatcttccacttaaatctagtacataatttatattaacctatggagtataagaggacattagctataaaagtgggtcttaaagaatatgaaaataaaattaaaacagataaaataaaggggaatggtaccatatactatttttttaactttnnnnnntcaaatttacggtttgggtttttaaagtggttgcagggctagttgcaataagaatttctatacaattttctgttgcaatttgggttgcagcactagttgcaataggggtttttatgtagaattnnntaaaaatgcaaaaaaaaaaactattttgaagtgtaaaaatgataaagcacataaaataaagtgggtatataatgtaattttctcaaatccatgagagagagttatggtggattcaatcctatgagagaaaattagggtttcagtgttcttattttctgacaatgagatgagtaaactgaagctctctcaaatgtaggggtgttcataaaaaccggaaaattgaaaccgaccatcaaaccgaccagaccgtaactgaattttggttccacgtcatcaccaaa

SEQ ID NO: 171206 - DNA, 785 bp, Cannabis sativa
gacccgatctcggtcccagaacggaaatctgacaaggaccaagaaccaaacccagactgggacgcggactcaaatcaaaactcggatcgggactcgggacacgaacctgaacccagaggccgacttggatccagacctagatggaggacccagatcgggattggagacttagacctggacccaagtcccaaacctagattggcgacccaaacccaaaattagaacgagaattcggacccaggactgggaatgggacccaagacccgaccctggtctcaatcccaaacccagacccgaacatagacacggaccgagaccgaggatccgaatcgaaacgacaccaggaaccacaaatgggatccaaatctttacacatgatccagggcttgtacccaacccgtagtttgtgtctagatcttggaatcgtaaaaagacccaaacctggaaccatttccagactagggcccaaacccacactcgaacgcgggacacaaaatcgaaataagaaccagaatcaggaccttggaacacgacttagacctcgacccagaactagatctagatggggaaccaaacacggacccatacctcgactgggatcgatacctagacccagacccaaacctagacccagacttgcgacaggacctacgacctagaacctggaacccagcacccgtgactggagacctggaccaaaaacaaaacccgtacaagaacccagacctagaccaagtcctggacccagacctgaaccgaaacctacaccaagacctagacccaga

SEQ ID NO: 171207 - DNA, 512 bp, Cannabis sativa
gataatagtttgtgaatcatatataactaaggcttgtcatatatgcaacccaaagatttattttttaaaggtaatagcctttgaaaagcaaaacctttaagtgaaaaaagaaaatagaaagaaaataatttttattttatttattattgtttggttgcattttaaagtatattgaaatgttattctaatttctatcattttgatggaatgagtattctatttttgaagttcaataaaaagaaagaccattctaatgtaacaagagaaaaaatttaatgatttttttaatcaatttttgtatacattttaaattttattccattatattgctattcatattctcattcttattcctattcttatatttttattcttcccaacttaacttcacttaggtggcgtttggttggaggtaataaaatagaatagaatagaaatgaaacaatttttattccattcctttgtttggttacattttaaagtatttgatggctattccattttaaaaaaga

SEQ ID NO: 171208 - DNA, 1164 bp, Cannabis sativa
tggatagcgctgctcataatctttaatagccgtgaagcataagctataactttatctactggcatcaacacgcagcctaaaccctatctagaagcatcacagtacactacatataaaccgctgattctttctagtcaattaagataatggcattgcaatttttgaaaatccttctacaaaccgtcgatagtaacctgccaaaccgagaaaactttgcacttcagtaactgttttcggtctaggccaattcttcactgcttcaacctttcctaggtgcaccataattccacctttcccaaaaatatgtcccagaaaagatacttgggacagccaaaactcacacttcttgaatttcgcatagagtttgtgatctctgagttgttgcagaaccatacgaagatgttgttcatgttctgcttccgaccgagagtacacaagaatatcatcgataaatacaattacaaaggtatcgaggacatccttgaataccctattcatgagatccataaaggttaccggagcatttgtcaacccgaatgaactaactaggaactcataatgaccatacctagttcgaaaagctgtcttcggaatatcttcttcccagattctcaattgatgataaccagacttgaagtcaatcttagaaaataccatttttccttgaatttgatcaaacagatcgtcaattctaggcaaagggtatttatttttaatagttaacttgttcaactcccggtagtcaatacacattcgaagggtcccatccttcctctttacaaacagaactggagctccccaaggtgacacactaggtcaagtgaaccctagatccaacattccttagagttgtatctttagttctttcaattctgtaggtaccattaggtaaggcacctttgagacatgttctgctctaggtatgagatcaataacaaagtttatctctcgctgaggtggtaaccctagtaattccttaggaaataaatccagaaattccttaactactttgacttcctcggctccaagtgacacaggtttactggagtcaactacaatatctaggaatctgacacatccactgcatagtaaatccctagccttcaaatgcagagattccaggaacacgagaaccttgaactgaaccaacaaaaacaaatggtt

SEQ ID NO: 171209 - DNA, 572 bp, Cannabis sativa
ttgtttatttcttttggtaaaaattatggattatttttttatttttacactttaaaataatttttttttttttacatttttacgaaattctacataaaaaatgttattgcaactagtacggcaacctaaattacaacaaaaaaatcgtagcactgcaactactttagaaacccaaatcgtaaattttaaaaaaaaaatagtatatagagtaattcccctacaaaaaattacgtgtatataaatcttatttttagtattgtaaattaatttgaattctttaaaaatttaggtgtagtattaaataactataacataccctaaggttaaaaaaaattagattaaaaattattttgaatgtcaaaatagataagggtatgtacttaaaaaacccctttagaaggtacatataaaataagatcattatatatttccacaaatggaatatataaataataattatagacttcctcttggcatcatgttatcttggaaatgaataacttagtagtagttcaagccatacgcagtgagtatgattttttttattaagtttggttattaaagattgtaag

SEQ ID NO: 171210 - DNA, 518 bp, Cannabis sativa
cccgaaccaggccctggcttgaacttgggaatctaaagtcagacctagacctagacccagacccagacccgaaacctgcctcaaacccaaagcaaggcaggagcttggacacggacaaggatcaaacccaaacccatacccgaacccaaaattagacccgaactgagacccaaacctagaatcagagcaaaacctagtccttgactcggactcgaactcgaacccagaccacgatcggacccccaggacttatactcaaaattgaacccaaactcaaattaggatcggaaaatgggactcagaccaagacctaggacccgaacccacacccagagcctgattcaaacctagaacaaaatttggacccgaacccaaactcgaactagggctcgaacccctacccgaactcgaacatggaatcgcaactggaactggaattggactaggactaggaccacgactaggacctaaacccgaacctagataaaaacccaaacctaaacccaaagtgaggctag

SEQ ID NO: 171211 - DNA, 588 bp, Cannabis sativa
ctgagcagtagagagcggaggtgaggaggcttggagagaaggtacatgccttagacacagcaagtctcgaggttttttattacttctggaaggctaatcccaacgtaaattttgattactagggtgattccaaagacatgtttctcgagtattgtgcttcttaggtggcttatggtcaacccgaggcgaccacttctgcctttggccaggaagttggcgtgccccccgcttagacaatagatcctccagctccgaccggcctagaagacccgtacaaagagcctgggactctagctatctaactacttctcttttccttttcttatatttgtctggccataaggccttttttaacacaacatgaccggcaaagcagtctttaaacttggaactatttttcattttacagacaacaggctgaccgagcagcttttaatcccgattttacatacttttgttatttttaatgactttcatccgctgtttatgatcatcgtgcaattgtgcttgttttatctttactaaatgctttgtataggtataggtgccccctaagtgaccgattagacttatgactctgggtcactt

SEQ ID NO: 171212 - DNA, 516 bp, Cannabis sativa
aactcaatgaaaaataggagattgtataaatagataaaaatctgtttaaaaaaattcaaattttgctttcataaacaaagtttactgttgtatccaaaagatgttttaatatttatagttgcaagtgcacgaatcgtttcggaatataatgttcatgtaaatacgaggtcgaattcatgggagttgactaacatcaaaagaaactaaagtaagaatattttaatctagttctaattatttgatgagattttggtgtagaaaagtaaaagacaagtgataatttttttttttttttgagatgagtaataaaaaaaattaaaattaaaattaaagatgagtgaaaataaactggtttttaaattaaatgtgtaaaataagattattaagatattagaatctacaaaatgcaaacttaatagtatttatgagtatattgattctcaagtttagatatagttgaaataaatcacactatattttttaaaatatattttctatttaagcacaagttatttt

SEQ ID NO: 171213 - DNA, 731 bp, Cannabis sativa
ttttactttgatactagtgaagtaccacgtgcacaaagtaatatataaattatatattgtgtaaaattatatttatatttaggtggggtttaattatatgtaataaaatataatagaaagaaaataattttcattctattattttattttgttgcattttaaagaactaaaatattcggtggcgtttggttggagataatgaaatggaatagaataattaaaaaataattttcattctatttcttggtttggttgcatttaaaatcattggaataccattttatggaatagcctttctattattttggtggaatgactattttatttttaaatggaaagaaagaccatttcaatacaagatttgaaaaaatttaatatttttttgatcaatttttttatgcattttaaattttattttattccattcctattccaattctcattctcattcctatttctatgttttcattcctcccaaccaaacgccaccttagttcttttcttattcttattcttactaaatattatcataatatttagtgtttttatgagaaatttcttttacaaagcttaagacccataaataattttttatatatatttctaaggaaattaccccatatactctattttaatttttttaaggtacgatttcagttgctctggtagtttttatgtgggtgctatgtggattttaattgcgatttaagttgctctattagttgctatgt

SEQ ID NO: 171214 - DNA, 514 bp, Cannabis sativa
tgctcaagcatgtgacttgcagaatctagttagatggatcgagaagagcagattctcaaaatttcgaaagcagatgttgtctgctgcaattgtagccttggtttaccacttgtggaaggctaaaacttctttgttatggcaaaaggaattgacagaatgtagcagaatcattgaaaaagtaaaatggacagctaaaacccgagtgactatgctcatgcctagaaaagttaaaagcattgatagagattggttcctaactttgtaattaaaatatagttgtctgtatagatttagccgaatacacacttcttgtatatagattttggccctcatggggggtgcatataggttgtataaagattgttggtgcaaaacaattcatctgatttatcaaaaaaaataataaataatattatgaatatataaattttaaaattcaagatattatattatattatcttattagatatttaattaatttgaattatttaaataaacttgaaaatttaaaaat

SEQ ID NO: 171215 - DNA, 1190 bp, Cannabis sativa
ttgccaagactccaaataacactaaaagataacctaaatcaatctttaaacaaccaagaataagttccagaatttaaacaaacaccaattattactaaagcatcaaaattcttacaattatgaaccaaaactcctttttaccaaagaataagcataaaggaagagacttaggctccataccttgaaatcactcactagtttagctaataccaactggtttgagctgaaaaaattccagcttggtgctggttcttgtcaattcgagaggaagagggagagagaggtagctttctaggtttttctcttaatttctttctaacttaagataaaaggttcttttttttataattataaaacttataatcagctttaatataactcaaataagacaaaagaagtctttgccaaaagaccttttagcccctctaactaattaaaatagctacaaactcccaagggtaaattggtcatttttcaaaccccaaaaattccaacacctccaatacccaacaatgataccccgataataatattctaaacatataaatgcgactctctaagggcccaacgtcgcttcccactgcttccaaacacaacagagcaatgaggaatatatacagaatagcataactaattatatcaaactcaaacaaattttcacaatatgcataatataaataaaatttaaatcttataattaaatcctaattatttaataatccatactgttaatcttaggcggtctttactaatgcgatttttatttagaatccacacagctgtgagtatcctacttttattgggtcgagatgaacgcataattaaggatatacgataagccttatttcatggggatgcctcactaggaatggagtcgagttaactttaatggcgagaagttgctcgtcatctgacttcccgagattaatattgttttaattctgataactatattttttggtgtcaagatagagcctcactgtctgttatcttgattcaccaaactgtttacacttagtttgtatagcatgcaatatacgctaagtgtttttatcgttattgtttctctttcacgcagcgaggttaaagccttgtcatgcacgcttgcgcactcacatggtttctcgttgatacatgagttagcagttcgtacgtttctctcgcgaaagactgttcagccagccgagtta

SEQ ID NO: 171216 - DNA, 717 bp, Cannabis sativa
  modified_base (569)..(570): a, c, t, g, unknown or other
atgtgtatgaaaattataattaatatttaatggtaaaagtataaataaaaattattatttattgtgaagttaatttaataagcattatattttccgaacttgccataatttttagcaaatttaacacacacatatatatatatatatttttttaaatagtagtgttattagagaccagtagtgcttatcaccttataaatggtcgtcttgcgattggttaacaatattccttaaaaattattattttaaattatatgaacccgattattaattgcactaataatgatattaatacgttggagggtgctaagcaccaataatatgctttaacatttcttatttttaaatgaatttaacacataaaatataaataatgcatcacttatttgttaatctattaaaaatgttctaaataatatattattacaattcttaattaaattttaaacgtatactatcatttttttatatttgtttttgaaaacggagtaatttcattgctgagagataacaagaatgagaatgagaatatgaataagaataaaacaaaataaaatttaaaatgcatnnaaaaaattgataaaaaattattaattttttcttcttcatgcattaaaatggttttacttccatttcaaaataaaatagtcaaaaagtttattctattagatccctattataatacaatattaattaatacattctaaaactttaatt

SEQ ID NO: 171217 - DNA, 683 bp, Cannabis sativa
ccattttgcttgaactttttaatattgctgttctgcaacgggtcactcgtctttgaaaatgcatggctacgggatccattttgttaccaattgatcaaagattgttgggatggcagtggtgatgttgaagtgcagtagaagattcaaaggtgtgggcagcagttggtggtttgggggaaggagtttacgggtaattttaaagagagaattcaacaattcaaaaatgaagtacaaaagtggaagttggggagagatgatacctcagtggaaaattataaattggcaaggaacaatttgaatgaagcttatacccaacgtgaggttttttggtgtcaacgatcgaagcaattgtggttgcaagaaggtgatagcaacagtaaattttttcatgcttttgcaactaataggacacgtaataacttcatttcaaagctcaaagatttgaatggcaattgggtggattggtctttgggcttgccacaaataatggtagattatttttctgctctttttgcttcatctaatgtgaactggagagaagttacaagtagtgtgcaagctcgtgttactgtagagcagaatatggagctgctttagctggtctccgatgatgaaatccgaaaagcattgttccaaatgcatcccgacaaggctccggggcctgacgaaatgacaccagcttt

SEQ ID NO: 171218 - DNA, 1226 bp, Cannabis sativa
  modified_base (940)..(941): a, c, t, g, unknown or other
  modified_base (1115)..(1125): a, c, t, g, unknown or other
atttagggcataaacccaacagatggcacctatgatcccacgagatacgtatcgattgtcaagttggaaaattatcacctcaggagatgtttggaagaggcaaatcgaagaaacgctgagttggaacgggaggcagccgcagcacagggaaacaacaaactaaaccagcctaatcctggagtgaggagaccacgagagaggccttgtagctcatgaactaggaggcaggagacggcccatgagaacccttagaacgctcaggaagaacaacctggggaaactgaggtaccccttgaaaatgaacaactaaatgatcaatcagatccttctcacagaaattagagcatgaggcaacctgggactaaggaacaggaaatccctcatgaaaacgagggaaatcttgggagttaacctaggataggtgggtcaccaccaaggcatcgtcaacgtctttctcaaaccaacaaggaaggggcacgtacaaaccctagcagggggcatacaacgaacaacagctcggtcaaaagcaagcggatcctatccaattgcgaattgatgagttggaggacaaattcaagaggtatcaagtcagggaacatggaaagcagtctggatacgattcggacaaggaactcgatgttggggattttatgccttaaataaaacccatttcaatataatattatttgttatcaatagaagattagaaatcatttatgtttatatgtagctttcatgtttatggtttaatgttaaattttttgttaagtccagaacatatagttattcacaattacaacaattacagtgatgtcaacacagtggaaggtaattgtgattatattcttcaaaagataatgtcccatgattcatcagtgcgctggatttatactgatgtgatagtcagcgataaaacttacttacaccttggataagtgtnntgttctttctagaacattggaaaagtatgctatatcggatgtatggagtataaattggacttggatcgatattgatcttgttaaagagactataatcttaccgttgtatctttcttagtcaatatcactagtttatcttaaagcaaaacatcttaatcctgacatggttaggtnnnnnnnnnnnagtgttatttgtgttctttgagctgttagttaaagcctaccattgggtttgggtcaaatgtacagtttgggaacatgatagtaaaattgagtgggagcgct

SEQ ID NO: 171219 - DNA, 554 bp, Cannabis sativa
acttactgtgttatgtaattttagagtaagatatatatatatataattagtcagtttgactttatattatttaaacaaagattaatcattttttaaccttatataccttttaaaaaaacccaaccgcaccacatgccttgcatgtgcttcttctactagtatttaataaaacccttatgttatctcacttttactaaaaatcaaaatagaagaaaaatcaagtttatctctccatcctctctcttgttcgaaccccatagaagcagctagggtttggttttctttctgaaattcaagctaaattcacaaggagttggtgggtataagctttaggtaagcttctagtaactccttcttggttttcttgagttatagttaggaattttgcatgattttaaggaattgggttaagtagctgctgtttgtgtttggatttgttttcagaagcttttatatgtttggctatgttggtttaagcttgttttaatggttgttggttagtttaatcaagttttgagtttttgaactcaaacttggagctctaatggtggatt

SEQ ID NO: 171220 - DNA, 545 bp, Cannabis sativa
  modified_base (512)..(520): a, c, t, g, unknown or other
tttattaaattattgttacatcatcggcttatttattattgtagaaatcacaaataccaccaaaatgtggatacatatatgggtaatacccgttaagaagtgttcctttgatactaattatgtaatagtgtatatatgtacatgttagttgagactagtgatgaaaatatatatccacattaatgggtatatctacattaatgggtatatctacattaatagtgtggatatatatccacatgggtgcactcttaataggtattactcatgaatgggtaaaattagaaaattttgagtttttatgcttaatttttctatctaaataaaaaaatctctcatttttatatcatatggattgagattgttccatcggtaaaaaaaaataaaaaaaaaaattagcaagaaaaataagaaaagaaaaagttaagtttaagttaaatatttttgtatgaacatatttctaatatagtctaaaagatatattttttgatttttttttaattaagtagttnnnnnnnnnatagaaattcaaatttgtgatttca

SEQ ID NO: 171221 - DNA, 680 bp, Cannabis sativa
ggcggcggaggtgattggtggagggagttttgagcggaatgagattggggtttgctgtagtgccgccattgatgagtttgagtttgagtttggtgtttggattttgagtttggaaatgggattattgtgaatggagaagaaatgagtgagttgagttgaatgggctatccagtgtttggagaatcgtagccacttattttcttcatttggattttcattggatcaggtttgtttttattttttttatatacgtatttaatgaaaaaaatgctacttgtttttcaaaaaaaaaaaaaaaatagttctcagtaacaatttttacatgatattggtattttaattcgataatcatgttccatatactgtattaattcacttagctatagtaatttagtattgcatctctcttattttttttgaaacaagtagcatttagtttttgatattaagaatatcaaattttaaaataaaataaataaatgtaatgcatctggatcctccacgtgtctatagttatgagttaacggaagtggtagtaacgatgtaagaaaattataacattgagtatatttacctccaaaaataaagatattgagtatttaatagggatgtacattttccccatggggatggtgacccgcggggacccgcccctaatggggcggggattccccgtctaa

SEQ ID NO: 171222 - DNA, 1019 bp, Cannabis sativa
ttttttttaaataatttatttattgtaaataaataggataatttttcaaaatatatcgtttgaaaaaaaaataaattagaattcaaatatatataatataataagtaataaatctataaaaaaaaacgcattatatgatttcaaaatcattatcatcaccaaatttcttgtagtcgcaactacattcaaagtcactatcgtcaccgtatctcacttgtaattatcagtattatattctcaataaatttgctctaatcaaacaaataaagtactatttgatcaaagttgtgatatcattattatatctcacttgtcttcgtcactatcattttttataaatttactctatacataaaacaaattaataatcaaatgatggattaactaatcacttttatacaaatattatagtgaagagaatattaaaaattgataaatatcttcacaaataataaagatctaaaaaagataattgatatataaatttataaaaaattcttacttcaaaatcgctatcatcaccgtatcttatctgtagtcgtcattatattcaaagtcaatgtcatatagtaaatatacaaaataattagtatcaaattttgaattataatataatagatattaaaatgttgataaaaattttgttgagtgcagtgtacgtacaactattaagtataaaattaattttaatagaaaattagcaaatttttaatctttttaggaagtaaattttaaaaggggagttttcaatattatacttaaaattgattttatttacaaaaatacctttaagaaaattatttgcacaaatactgttgtgccacatcagcatctataccgaaatttaaaataattaccgaaaatagaaaaaactaaaaaaatctcgtttctagatttttttcgcttttaggagttttgtgaaaagcaaccatttagttacttttgatgtgaataagatatcaattagttacttttctattaaaaatttattttagaattttacacatataaataataaa

SEQ ID NO: 171223 - DNA, 814 bp, Cannabis sativa
cttgaaaatatggttgcaactttcaagaggcaaccactactacaaattccagtcgttccatttgtggatagtgagtttcagcatccagtaagcatttacttacatagtacaatgggtgttgtctaccttggtcttcacagattaacaccgagctaatcacatattcggacactactaggtagattgacagtacttctccaagcatcgacttggatagtatcgagggttgccccaagtacattttcaatgcttgaaaagcgtcttcgcatttatcaatccattgaatctttttgttaccttttagaatttgaaaaaattaattacatttgtcaaaagaatgagatacaaaatgatttagtgtagcgactttacctgttaggctctgaacctctttaggtttgatgggagatcccatctccaccagtgcttttatttttgctgggtttgcctcgattcctcgttggtttaccataaaaccaaggaattttcctgacccgactccaaaaacgcactttaaaggattaagtggaattttgtagtgtcgaaggattctaaacatggaatctagatgagtgacacggtcctttgcatgttgagattttacgagcatatcgtcaacatacacttccatggtcttccatagtaaatctgcaaacatcatgttaactaatcattggtacgtttccccttcatttattaacccaaaagacattactttataacaatataaacgtcgataagtaatgaagaaggtatgctcctggtctagctcatacatcgggatttaattatatcccgagtatgcatccataaa

SEQ ID NO: 171224 - DNA, 751 bp, Cannabis sativa
atttgtgaactctttctcttttttcctacctagttggtgtagttaaaaacccgacctatcacgtgttaaagataagagagtaagggtttcatggattgttttggtccgaattttcatagttttttaaccaaaccagtataacagttttttgaatattagaaaccaaaccagaccaataaatttttcaaaccaaaccaaaccattaagaacggtttggtttgattcgaaaccacggtttaagtggaatatataattattcttatttttttaagtaattgtactatttttttctaaattttaaattttatttttcaaaaaatatatatatatatatttaacatgataagtaatagatctataacatataaataacgataaaaaatattctcaaaagtcaaacataacataaaaattcaaaattcatgcaataaaaaacttgacacacaaaaaagttcaaaattatacatatagtcatatataacaaatatataaattaattatttattataaatggtgcggtccggtccggttcaaccattaactatttattactaaccgcaaccgaaccattatgtcgtaaatggtccggattgaccaaaccaccaaaaatatttttcccggttacggtttacagtgatttggattgtcgtggtccgaatttaaactgcgatttttcagtttatatgaacagcccaccgcaaaaagattctaaatatgagaagttccccttggatgcgagaagaaggaactg

SEQ ID NO: 171225 - DNA, 1167 bp, Cannabis sativa
agaggattggcagaagctccagcgcatctctcttggccaagaactctaaaggcggtgagggaacttcttccaaggaaaatacgcctgccggggaaatcatcgatctttctgaggagctaacgagtgcaaacccctccactcaaaaagttgcccagccgacggagtctcgaggagggagttcagataggtcacaccaaccgagaggtgggtctgaactggtgcagacctctactccacctttgccggtgcttccaaaggcaaaaaagggcaaggagatgctcgctcactacatgaacccgttggttcctaaggttagtgatcagctggccagtgccgacaatgactcttctctagagctgctggtcggaggagtcttgaaagagttcacaagggtaagtcttccttgacactcttctttaagtctctttacttggcacaaatactcaagttttttctgtgtgcaagtcggtctgaagttggcctacacctactgccgagctaagtttgctttttccaagaacacggctttgtccaacaccatgagggcggaggtagacttggtcaggaaggatgctgaagatgccagggtagaactcagagctgttcggacggagttgggtgaagacaacaagaagcttttctccacacagaagaaaatagctaagctgttaaaggatcttgaggcgtctgacccacttgaggagaccatcgagactttgtctactgaagtgaacagtctttaggatgagaggacatcacttcgagcggtcctttgtcgggtgaaggaggagaaggaagctaaggaggaggagcttacggccaaggtgacgaagctgaaagagaaggttcattccttggagacagccggtcttgagctcttctacgacttttcgaaagctaatcttgaggcaaacttcgactacatgggagaagctaaggacatgtaccttgagttctgcgtttcccaagtggcttatggtgaaactgaggtggctgcttctacctctggccaaaatgctgatgtacctcccgttcaatcaacagatcctccagctcctcccagcccagaagacccgaaccaagagcctgggactccagctgcttaaacacttcttcttttctctttttatttttatatatctcattcggccacagggccttttctaa

SEQ ID NO: 171226 - DNA, 903 bp, Cannabis sativa
gaatcgctctccacaataacaaaatttgccttcacttctagcgctgcaaatatagccaaacagcaagctgccgcttccccacaaagcacgtcagtgaagcccattctagttattaataaataactaaggttgtatacccttacatcatcaattatttacataataaatgctgcccattctagtatttttagtgttgtcgctttctctttcacgcagcaaggttgaggcctcatcatgaaggtatgcacccacatggtttctcgttaatacataaattactcagttcgtacttatcgtttgtgtgtttgagtttttcccacctcgacgcctgtcctcctctgatgtgcttaccgaactttgggtataacaattgtcccttaaaaaggtattttcaattaaaaagagctttttaatgattacaaacggtattttcgtgatactcctatgcttttgaagagacgcattccctctaattttggcaattgtgtggttttgaggtacatcagaattaaatgaccatcttttccactcccacttcgaaccacgtccattggatcaagtcttttctgaaatcactatcatgggtataaaataaggaaaaagaacaaccttggcaccatttcagaaagtgtgagaaaaacccttaaacttcttcgttaaggatcaccattaaacccatttgaagacttgcatgacatccttgtctttgacctttttcctgccagtttcctccgacttccttttttcaagtcgatccttgcttcgttcgtaggtttgcagaaagatttcccatgcattgccccaagccctaacttcaaacggtaagttattttcttctttctcatgtttattacatagtgtggatcagttacttgattcgtttgtatcgttatcatctcatct

SEQ ID NO: 171227 - DNA, 539 bp, Cannabis sativa
ctcaataggaaagtgttccattggacccttgataactatgtctctttttgtattaagtcatctccctctttttttttagttgtaacttttctaatgttagcaaaaattgtaattttgtagcccacaatgtggctaagtgggcgttcacccaccaattgtacgattccattttgatctcctctgtaccagaggaactactttgtaatgaccgagaggtctaatgatttccttatttaatgcatgaatactttaataataaaataatactaattaagaaagttatttaatgcaaattagcatgctatctaaattttaataataaaatattaaaaatggcataatagtaaatataaaaacataatatttattgtgatgtaaattttgcatcatgctatattgtgatccagatttagatcacttttgattatgtgagatatttgaatcactatttggcacactattggagttaaattttaacaaagtgagttatattttacattgggataattacgtatgacacaattttttgtaaaaaaatt

SEQ ID NO: 171228 - DNA, 612 bp, Cannabis sativa
tccttttttacaaaagcatgtcatagtgatgtatttttgtttttatgtggaaacttaagttgaggaatacattttatttatttatttattttttttatttattaatcaaaaaatactttcatattaaattttattaaaatgtctaatatacttttattcttccacttaagtgtagcacatgatttatattaatctaaaggatataattgtaacatcatatataaaagtgggtatatctcaataaatatagaaatgaaagtaaaaaattaaattaaataaagtaaaataggtgtacaatgcaattaaattaaaatacgcttttattatatttttattttttttatttactaaaaaaccactttcaacatatttctctttagtattgatgtcattaattcacactcaacaaattttcctatctatcttatctatacagtttccgtatatgatttaatttttttttttcattttcagttatacattgaaacttccctttaagatctaaagaagaagtatctctaaaagtttttttttttttgataaatcaatgaattgtattgcactaacaaaattacaacctaagagcaccccattccaagggcctcaaaatat

SEQ ID NO: 171229 - DNA, 1018 bp, Cannabis sativa
gatctctgcttcaagaagtgggctctgatgatgaggaaaatagggtctgtgcagagatcaaggctctctacatgcagacaatctttctcgtctatgtgtatccggtctttctctctcatcctctgcttaggagaacaacctaatggtttgcccttagtggcatttctgtaaagacaagtttgtaaccagtcttaggtttttcttatcttaaatgccttgtactgttttattcgaacttaatacaattctatttgcttgcgttattattcacaatgtaaacaactatattttgatcgaatatgcagcacttttgggctattccattgctcgtaatcttcttgtttaagtagtttgtaatctacaaaactttatgattttcgagcacttgtcaattctgcctcgcaattgcagttataatctatcttaagcaaacttaaatatactttaaggattttatcactttgtatatttttaatttgctcgcatgaatatttatattatctatccgttttctaggtttaagtactttatcaaggcgtcgtgatacctcgtttagtactttcctagcacgcgagaaccgttagtatttagttttgtacgcgagttataatttttgattttccactcccgtcagatagatataaataaaaaattatagttgtttggtcccttcttcatcaaaaagatttgatcaaggtgttataacaattcgacccctttcccgtcaaaagggtttgggcagattgttataacggttcgactccacttttgtcaaagaggttcagtcgagaaccttttgaatttcatttttttttgagacggcgggtttgcattatacaatgtatatcaaaatgaattcctgttagtcatacataaatgctcctcaagtaattttaaagaatgcgactttgtaattacttaatataaatgattctctttattcataattgaagtttaaggcttacatcagtaatgcgagttacatcatttatttattgatagtagggttgcaaatgtt

SEQ ID NO: 171230 - DNA, 761 bp, Cannabis sativa
aaaataataatatgtacatttttttacttgatgtctaccttatttctaatcaagtatatatatatatatatttaatacattgagttaaataagtaatttatatagttgtgttgtcgaactatattataatgaacatgcacatcgaaaaacaactaaaaaaataagatattaactctaatgcaatatgcaaatcaactaatcaactcagaataaactataaaacaacattaaaaagcttatcacaacatttaaaaatatttataaaatatactagaatgtgtacaacgaactatatttttaattatttttcaatgttgttttgttgttgttttataatttatttataattgatctcaggttgatttgaatgttgtagtacatttgatgtcatgttatttattcgttgtttttccacaatattatttttaaatgagaagtctttgtaattttaaaactttaaaaataaatttagaaaaattaaatttgcaaataaaaaaatatagattgttaaaatgtaaataaaatattttatatttatgaaaaaatgcttatataacttttacacaagcattttgttgtttcttttaaacttaatttagttgtgtgttgtttttgagtttatcttgagttgatgtaatattgttgtgatacttgatattttatattagagttgtcaactaattatttgctcattattatttaaattattaattgttattaaattgctcaattaagataaaaatgttagaaaattaataata

SEQ ID NO: 171231 - DNA, 760 bp, Cannabis sativa
ttttagaagtaagaatgtgaaaaatattgtgaaaaaaaaaagataaaataaaatattaaatttttaaataacgtgtaaatttttagtttcgtgagatacaattattggagatgctattatcgagtcatcatgatgtatgacctctgaagaaatcatacatgttacgttcctacttaggaagggaattaggttcctaggaagggaattaggatgttgatatgactaggtgctcatgatatatagtgtctgaaacatatcacaccacaaaaacacaaattgtcatataatttctataatataaatataaatatttttagacctacacaaaacactataataaataataaagttggcatattattattttttattgatttttttttatgggacaggggacagattatttaaagatcttaattttgaaggaatgttactaatataaggaatcatttatgatatgttcatatattaattacatgcgatttttttcacgtataatttatatgctaaatgacttttgactagtgagatccatttaaaataaaacaatttgtgagaaaaataaattattacataaatgtatatcaaatgtacatattatttatatatacacatatcattaattttacacttatacattgattttttttttataacaaacaaatatagaaaatatactgttacaaaatttttatattggattattattaaattttattttgaaaaaaaaatcaactaataatttatattattttaaaaa

SEQ ID NO: 171232 - DNA, 2276 bp, Cannabis sativa
  modified_base (1719)..(1722): a, c, t, g, unknown or other
tggtaaaataatttctaacaccttctgcttcaacaagtcttttagtgatatagtagactggatgttggacgttgttctcttttcttatcagcatgacgcttacagcatattctgtgacagccaagtatattcataattcttctctgtccaggggttttgagagtacgggaggttttgcaagttgtctttttaattcttggaaagcattctcacattcctccatcaattcaaacattttttacattgaaggatgatgaagaaaggaacacatttgtctgttgactttgaaacaaatctactaagtgcggctatccgaccagttaagctttaaactttctttgtcttagttggcaatttcatatctaggagggcttgtattttctttggattagcttctataccccgagcattgacaataaaaccaagaaacttacccgcgttgaccccgacggaacactttaagggattgagtttcatgttgtattttttgaggattttgaaacattcatccagatcctttatgtgcccccaaccttcttggattttatgagcatatcatctgcatatacctccatatttcgtccaatatgatttttaaacattttatttaccaatctctggtaggtagatctagcattcttcagaccgaacaacataaccttataatagtacaaacccatatctgttcgaaaacttgtatgttcttggtcttgtggatgcattttgatttgattataccccgattaggcatccatgaagctcaggatttcatgtccggttgttgcattcacgagctgatcaattcttggaagtggaaaacattccttggtgcatgccttgttgtggacaatgacatcgatacatactttccattttttgttaggcttgggtactagtacggggttagctacccaagttgggtagaaagcttcaatgatgacctcgtttttacgcagtctcgctagctcttcttttagtgcttgcacccattctttgtccagtagtcttctcttttgttagacgggatgaaagtttgggtcaatttttagggcgtgagacattatagtaggcgggcagaccttgtctagtaatccatcaggagaggtcatacctgatagttccaaccaggttaacggtgctattccacctatcaaccaagcaaatcaatcgctaaggcagccatgcacttctgtatttgaaaggttggtgacgactcatgacctaaggaatgatatgaacagaaggagaggagtagatgatcagattgtcacaacgatcgtggaccccggagcccgtggtcaaattcctgctcagaaagatactgatgtgattcaaattgactagaatgccgagcaggttagcccagtcgtacaggcacagctagaagaactgaaaaatatgttccaaggcatgcctggacagagaaacaatgatcttgagctggaccgagcacgcggaactcctttctctcccaagatcaatcttctagcgttgccccacaagtttaaaatgccaacatggaaaatgaatagtgggtaagaagatcctctttcccacctcaagtatttcaaaatgcaaatggatttgtaaggggtacgaggagatgtgtgttgcagaatttttcctgctaccttgtcgaaagccgcccagcaatggtatttcaagttggcccctggaaagttcaattcatggaaagccttctcttcggaattccatgcnnnnttctcctcctctcgccaacttccattgcaactgggagacctggtcgaagttatgcaaagatcaggcggacctctccgagcatacatcagcagattcatgacagaggcgaccaaagtttcatgagtaactgaagatggaaagttatccgtgataccgggggcattgaagtcgtcagtgaactttggaaggatataaggaagaacgggccggtagactcaatgagtgattttcttgaccgtgttgaaggcttcatcaagctcaaagaagccattcaacgagcagaaggtgagcaaaagcctggcaagtcgaaggctccttctactggagcatccgcccaactcgcccattacccaaataattcaagttcaagtggcaaacgttccaacaacaaccacaggaaagggaatgtgaagaagggaaagtttgccggaaaatctgaacaagctccccaggagaatcaagcaaagtacactgcatacactatcttgatggaagacatagaaagtgtttacatggcaactcagtcgctcgccccatataagaagcccgggccc

SEQ ID NO: 171233 - DNA, 538 bp, Cannabis sativa
atacacatttatgcactcatttttctagaaaaatgaacttccaatttaatagaatttttaatatttatatatatcaaagctaagctatatcattagatttcattgtgccctattgagatttttaaaactttttttgtattatttatttactattatataaaatcattttaaaatttgataatgtaagtggattaaattgcatgaaaaattacaattttcccaaccctctttttctgcttcattttataaccgacgtaataggtgaaaaaaaaaaagtatttcagcaatttatgtgtcattttataattgacggtataactttttagtgacggttttgaaatgccacagatgatttcgcgtcatttccgaaccgacgcagaagatataaaagaagaatgtatattttgtgacggtttttaaatgaagataattgttttttgcgtcttttaaaaaatgacgctaataaaagactatttgcgactacggaatatacgtcggttttttaaaccgacgcaaattctttaaatgacacttaaaa

SEQ ID NO: 171234 - DNA, 593 bp, Cannabis sativa
ggccggagtgcccagctggagctttggcagagataattgggttttacggtgaatttgttaatgaaaccgtagtgtcgccggagaagcactgcccgatgatggatttggcgagaatgaaagagaaaaataaatgggaactgaattttaaaacattaacagtttagggtaaaacttaatcctctccaacaaaaatatagcataaataatcttcttattttaatttaaaataaataaatgtatgaaaatatatggtaaaatatgatttaagatactctaatttattttctcaaaaaaaaaatactctaattcattaaaaattaatacgtataatgaaatttatcaacaattaactaaaattaatttaaaatttgttaattaattattaacttaattaagttattttagagaaaaatgaaggaaaaaaataggaaaatacaaaaaaggaaaaaaattacaaatatactatgggctggcccattaaacatttagtccacacccaaatatttacaaaaataccacatactctaaacctttagccgcacggaacgaacgatgaagatgaacatacctccatcattcaaatcagcaacaca

SEQ ID NO: 171235 - DNA, 583 bp, Cannabis sativa
  modified_base (530)..(546): a, c, t, g, unknown or other
atctagattgtattgaacaattaaggcaaattaaagtagagaatttttacgtgattggaaaattaatgaaccttagtccacgagtcatttctatttcttagcattttcttatagatttccccctcttcataaattatttgaggtatttataggctcataatggaggttaaaataccaccattattgtgcttgtatgaaccatgctttgcacaatttcccaaacttgattatagggcatgatggcctattcatcatgatgtgactgggcttgtataggtgtctggtgagactagacttgtctcttaccgatgacgtgatagctcataatgtagccgccaaatgatgtacaaatgatagataaagtatcgtgaaatcaggaaaatatgagtttaaacccttaagaacttctttttcagattaaggagtaggatgttcttccccatgccacattgaatccgtgcatagtaatttagcctcgagcggtgcgccatactccgtacatccctttgttggaattattttactaggannnnnnnnnnnnnnnnnagtatgttgatttaacaacataaatatgaacttctaa

SEQ ID NO: 171236 - DNA, 540 bp, Cannabis sativa
cacatattgttggtccattatgaccaacacacgcacactttcactacaaaaaatagtatctttagtgacaaatttttagtcctaacataaagattttgtgattaaatgtgatttttactcacatcaaaaaattatttgtaactaaaatataatttttagatataaattatcactagctaatttatttttagtcacaaaaagtattattgtgactaaaagtatatttagttacaataaattgtaattttacgacataaaaataataatttataattagtgacaatttttttactttaaatcacaggttttttttttttaaataaaagtaaaaaaatttgtagcatttccctgttcatcacatatttatgctataatcatccataaaatattttatctcatactaattttttcatgcctttatatgtatattaaaagtgcagtgcccattcaaaaaaagaaaaaagaaaaaaaaattatagcactatagttcaacacacatgcatgctatacctaatcaataatcttttaatatttaaccaa

SEQ ID NO: 171237 - DNA, 689 bp, Cannabis sativa
ctctgttcttactaaatcaactattataatcattttatttttttaattatttatcttactattatttaaacaattgtggctaatgacgtatacacaatatgttttgtcttcatatttataatatcattttccatatatcattttacccttacatcatattattaattagtctactatttaatttataaataaatttttgtgtatcgtccatttaattttttataatttcctaaaaaattataggctatcctaaataattattgttgatcgaggatttcagcaatcagtaattagagcggtatgaagtaattaatgaatattagaagagctaattttttacatggttatgttagcctaagatatgtttccaagagagggatgaattggaaatttaaactaatttcggtaaattaaaactcttaacacaaaattaagcaattaaacacttaattaaataaatgcaagtaatatggcaagcaatatattataacaaataatcgaacttgtaaagtaaagagtttaagggtaagaaattgcaaactctcaatttttacaaggttcgtaagaacttagccacctacatccttggtcttcaaagctatggacctagctttgagttccaatatcgagccaagttaacgggcttgactaacccttacaaccaaagaatttttcaccaaggtttttcc

SEQ ID NO: 171238 - DNA, 533 bp, Cannabis sativa
ataaaaaattttgaaacacataaattaaaatatatataaaaattatacaaaaataatgattttaagaaatattaaagtgattaataaaaaatatgctcaattagaaatcaagtaggcaacaaatatcagatatttatatatatatatataatttaaacataattaattcaaagtatatccgtgaaaaataatcaattaatatataaataaaaattaacatcatatttatttactataatacacatcaaaaacaataaaacacttaaaaataacccacaaacagtattaaaatatatacttataaaaactaaacatatctattctatataaagtgtgcctatataacgaaattcttggtttttgagaaattcatgggtgactttttatttatattaaaaataaaatagtttattattaaaaaataaaatgattaatgagaaattcacgagtcactttttatttatatataataaaataaaaataaaataaattccattaaatccaacaaaaaaatagggttctagattttcttt

SEQ ID NO: 171239 - DNA, 913 bp, Cannabis sativa
gtgaattgggaaaagatatgaggaagtgataccccgtgtatatgtgggtagaagttaatttcgaggacgaaattcttttaaggagggtagattgtaataaccaaaagtattttgttattattctctactatgttattaatatatatttttttttgttaactcgatgtggagatagtgaaatgcttagaatatgttatttgcttatagtattttcttaagtacaataaaaatatgtcatttttcttgattgggctccaagaaactaatatgggctaaagaaactattcatttcaaatttttcctacgagattacaaaatagtgttattattgctattattattatgatcattgtggcaaatacatataagtgaaatgaatacaatgtatgtttatatatatgttatggtcatgagtgcatgagaacatcaacaagtatattcaaattaatttaaaatgaatcctagaacaatagcatacacgtggatgacttggagcatctggctcttagaaaataataataataataacaacttctaaggagtaagtggaggaagagataggcattggtggttaatgtgtgaaccaataaccttattgatgacatttatggatagtgtaatttattaaattattagtcaggttcatattgagtacatgatatatacacgtgtatatatataattaattagtttcgaaatttaagaacagttgtagtcaaagttgtgctcacgccatagatattggaactagttattaagactcttcaatgaaagttatatggcacgatatttagggaatttattagggaaaaatgaaccttttgacgtctagcatctaagtaataggagtggagagtttgactatattttgaaaaattgagatagagtaagatcaggtggtttctacataggt

SEQ ID NO: 171240 - DNA, 702 bp, Cannabis sativa
taaaatgatctggttttgattggttacaattttaacttgtgaaatgttttttttttcattatataattaccatatttcacattacacatagtttcaagtacaaagaataatgatttaattaacaagtctcaagaaccattgtaatttaaaagagaccatctttaatggttacaccattttgttgtacaatcaattctgtgaaaaatttacttttgttacaccaactttaataattcacattaagttttagatacaatttcacaccaaattaaattattttacttaaaatgaacacattttgtaccatttctattaataatcaataataactaatttatgatataattatgtattttatcgcaaataacttttgatttttttttttattatttttttttttttataaactaattgaaaacaaaaggttagattgtaaagaaagttatgtaccaatttagtataaattcaaagtctaacattgagggtggtttggtaggttgtataataattgtaatttaataaattagaagaaacactatgtttagattagcctttttattatattaattattacgactataaattttaatacaatacatattttttaatttttaacaaatagttcttactagtttgtatattacaatatttataaatggttagaggcagaagtggacctacataaaaatgaggctggtagtt

SEQ ID NO: 171241 - DNA, 1090 bp, Cannabis sativa
catcgacaccactaaatgaaacgctatttcgttataggttattgatttcgtcacgaaactagtgactccggtatactacccctaacttaattacataatatgtgtcaagggacccctaaacactgacagtgatagtgtcagtactaccattgtacatcggcacctttaagtggtaccctatttcggtatcggtaagtgatttcgtcacgaaactagtgactccagacacaacccttaagttgattacatactatgtgtcacggaacaccgaatcaacgatagtgatagtgtcactactgccattgtacatcggcactacttagtggaaccatatttcggtatctgttagtgattccgtcacgaaagtagtgactctagtacactacccctaactttattacatactatgtgtcacgggaccccgaaacaccgacagtgatagtgtttctactgccattgtacatcggcaccactaagtggaaccctatttcggtgtcggttagtgatttcgtcacgaaactagtgactccggtacactacccctaacttgattacatattatgtgtcacaggacccctacaaaccgacagtgatagtgtcactactgccattgtacatcggcaccactaagtggaaccctatttcggtatcggttagtgatttcatcacgaaactagtgactccggtacactacccctaacttgattacatactatgtgtcacgggacccctaaacaccgacagtgatagtgtcactactgcgagtgtacatcggcaccactaactagaaccctatttcgacttcggttagtgatttcgttacgaaagtagtgactcctatacacttcccccaacttgattacatactatgtgtcaggggaccccaaatcaccgacagtaataccctagaattaagaattggattagcaaaaccctaattagataattatgaataaatgagtaattatattatatagttcaatttatgtaaaataatatgatttcaacatgttaagatcttgttggtgaacaaggggcattttagtaattgtgacccgagaagggtaaaatgatgaaattaatttaatta

SEQ ID NO: 171242 - DNA, 718 bp, Cannabis sativa
gttaccttttgtttatttaaactatttttaagctgagttaatattgatgagttaatacaaaaacatattgatgagttaatattgtttagcatattgcaaataagtcattattttgttattttttgttactttgtaattatctttttgttgttttatagttatttttatgttgtctgttaagttattttagagttgtttttttttattatttcactgaaatacaatattttataattttgaaactttaacaaggtatttttaaaaatttagtacaataaaaatgtaaaaaaaagtatatcagtaaaaatataaatatgataaaaaaattaaatatttttgtaagatttccttttcttaaccttgacaaaaatctaccaaccttcatactaacataatttaggagtatgaggaacaatattttcaaaaatatataatgatatatagaatatggcatctaaaaatcatttaattttgatatgataatatactataaatgactaaataatagtttttttagttgtaactctttttttaggatataattactttatatattatttttaattttttttttcaaatttacggtttgggttgcttcggtagtttctctagtggtatgtatagaaatttttatgttgaattatgtaaaaatatgaaaaaaaaaaaaaaaacttttttgaagtgtaaaaatgaaaaaacccttattattattattatt

SEQ ID NO: 171243 - DNA, 590 bp, Cannabis sativa
tttatttcaaattaagaaaaaatccaggaaaaagctttttctcccctctctttcttctctctttcgatacccctaaaccagctagggttggttgtgttttcctctcaattcaagtaattctcagcaagtttagtgatttccaagcaagggtaagctcctagcttttccttcactagttttcttgagttttaagagattgattttgcatgaaatggaggtgatagttgttgttcttgctatggttgtttgttgtgttttctgaagttcaactatggttagaattgatgtttagagctggtttggttgtggtttatgaggtttgctcaaggtttgagcttaagagctcaaactttgctctcacatggtggatttttattatgtgcatgttgaggtgttttattgctttagatatgttctacgtggtctataaaataggtatggaaggtttcaattgatttggggttgttttggctgagttatggaattttagaagtttcctgcattgaaccggaattccagttcagggggacctgtaggaaccggaattctggttagtccccaggaaaccccacagaactggaattccggtt

SEQ ID NO: 171244 - DNA, 598 bp, Cannabis sativa
aacgctcctaccagcgtgcagagtaatttaacttgcacttatttttcttgattttaatggcttcatatattttgtgttttcttctgactgtattgcttttcttgtgcagaaatgtctcagaagatgattgaggctctgaagaagagagtagggggagctcgggcttgtcccttccggccaagaaatctaaaggtgctgaaactccatccaaggggaaggcaccagttgaagaggtcattgatctctctaaggaacaacctattgtggaccctcctaccttgaaggtcaccaaatccaaaggttcttggggagggagctcggatggacctgagcaagctaagactggatccaagttggtcaggagcggatccgaacaagttaggcttctgccccacccttggtattttgcacggaaaccaagagaggcaaagacatgtttatccactatgtgaatcggtcgatcccagaggtgaacgagcaattggttggggcggacaatgatctgtccttggaattggtcctgggatgagttttgaaggagctttcacgagtaagtccttcttaacacctgaagaaaaaaaagagaagaagtgtgggg

SEQ ID NO: 171245 - DNA, 505 bp, Cannabis sativa
gccaatgtgtggaaagataatagactatatcagaggaatgggctactcctcccattgccaattggttttgggatggaacctcattcatcttattcctcaaattctaacaaagatatataactaaagttaaaagtgtctctctttcaagtttcaataatatttttaaatggcaagtcattctctttcttattttttataaaataacattttgtttagttagtagattgagttattctattaaggctaaaggtgatgctgatcatgtaccctatatatttatataatagagagtctcatattgccaatgtgtggaaagataatagaatatataagaggaatgggctactcctcccattgccaattggtttttttttttgccaattggtattgggatggaacctcattaatcttattcctcaaattctaacatggtatcagagcaaaacaaacaaacaaacaaaaatctctaacgactatccaacccccaaaaaaaataaaccgatcg

SEQ ID NO: 171246 - DNA, 699 bp, Cannabis sativa
  modified_base (638)..(641): a, c, t, g, unknown or other
tatttatttttgaaagaaaagcattgcattaaatcaaaaattaaaagcacttaaaaatctcgggcaagattattgcatttattggttagtgtggtttttatttgttattatagaaaaaattggaaaaaaaaattaatgattttaatatacaattgttttatcaggaaaaaatatataaataaaacatttgatgaactttagaagaaataatttttacgttcattaatcagcatttatttcatttattgattagcgtgaatagtattactgtgatttttatttgttatttttttcagtagtaaattaattttattaaccattaaaatctgctactaacaatagtaataaatcagttgatacagacaccaaattaaaattataatcagaataaagtaaagaagttctagcaaaactatgaactatcttattcgctcatcactttacaaaatagacacaaacatctctaagctcagaaaataaaactttacaatcattgattacattactaaataatgaaatcatagcaataacactctgtaaagcttgaataacacaaaggtatgtagtccgtttcaacactaatcctccgccagttttggtcttgttatattatttataataatataatatatagattnnnnatgtgtaataaactaataatatgtaacatatgacaatgtatattagttgtcatctttt

SEQ ID NO: 171247 - DNA, 585 bp, Cannabis sativa
ccgttagaacccacaacccaccactaccgtacgaacccatgaactcatctaatactcagaccatgcactcgcaacccaccaccatcgtacgaactgataaactgctctctccctctctccccgacgacctactagtcattgtcgtggaaggcaaaaatgggatctcgtcaaacgagaagacaaaatcgcagctcctctgaaggtgtcgcatcttccttgttcgttgttgcagatcctcacgatgtcgattgtctctcgttcacagggtcttggtgttgcttgaagagggtgaaaggtctgaacggtgttggcttcgatgggtcaaattcatcgttgacagtttggttttatatctggtttcagatagagagagagcatgagagaaaactggttttttcagggtttaggataaacttccaacaaaaaaattgttttcgtgatgatttattagatttagtttattttttgtgttttattatttttgtgtttcttatttagatctcaatgtattttttttagtgttgatttggattagagagacgatcggtgatggtggctatggtggtgtgatggtggctatggggg

SEQ ID NO: 171248 - DNA, 537 bp, Cannabis sativa
  modified_base (495)..(507): a, c, t, g, unknown or other
ttttttttttttttgaggaaaaacctgtatccattaaaaagaagagcagaatagtacaggatacaaattacaattgtaaagagcaactcttccacaaagcttcctgatctaggcctaaaactttcctagctaaacaatgggcagcttcatttgcctctctttggatatagctaaataaaagctttagggaaataagatagcaagctgttaatttcagtaacaaagttattgagatgcagattgtgagtatcattattacaaatataatccactagaaccttataatccgagacaatactatccggataaaaggaatgagcatgacaccaagaaagagcaaagtataaggcttgtgcttccattaacaaaggtgggtgaattccatgccaaggcattgccaaatttaaaagtacctcccttttgtttatttgaatggacatatcgaaacccattttgttttgttgagcatcttgagcagcatccactgaaagctgnnnnnnnnnnnnnggagcagatggtgcacttccattggacatc

SEQ ID NO: 171249 - DNA, 553 bp, Cannabis sativa
aaagagatttgctgtttgatgtatctgcgattaatgttttcaatatatatatatatatttctgcgataatccaccgattcaagtttttggtttggttttttattttttctttgattgttctctgccgatgcatgttgcgtcgtatatatgtatgttataggtgatttcttttgaatttggacttaacttttttttttaggaatatacatatatatttctttgttttatgaagtcaatggcgtgaacatattggattatatatgttcatatatatgttttatacagatatatatattctggttttattttattttaaatacaaatagcatatcgatttgcttatggaattttttattgtttagttttggtttttattattattattaatataacttaaataataataataataataataataataattcagtaacaatttaattcgaattttggtttaagtttattaaggatatctaatatttaattgaattaattgaaacaaaatatcaccaaagtgatctcttttgtgtagattaatttaataaaaatatta

SEQ ID NO: 171250 - DNA, 504 bp, Cannabis sativa
aaatactcgccaccatgatctgatggaaatgtctttaatgatttacccaattgcttttcagccataactttaaagtctttgaactttctgaaagtttttaacttcttggcctttagataagtatgaccatatctagaataattgtcaataaatgtgacaaagtattcataaccacctcaagcttgaatattaataagtctgcacacatcagagtgaataatctcaagtttttctttggctctatttccttttgcagaaaaaggtcttatagccatctttccttctagacaagatttgcataccgaaaaacaagatgcactttattttttggtaacccatcacgaaagaacttcacagttaagcgtgcttgacctggaccaattttaggatgggtgacctcaaagaagtgttcccaggaagtgtgtgagtgaggacaatgcacgctgaaaatactcgtgttggtctgtagggtcagtcatcaatctgggaagcagccagagtgac

SEQ ID NO: 171251 - DNA, 880 bp, Cannabis sativa
tctaatcccacttatgtggtagcaatttatcaatactatctgatagcgtagcatatatctgatggcatctcggcgcaactctatgtacacctcactgttgtcgtgatatgctaatctgatggctatataaaatttgcctagcttatatctaatatgttattgtgacggcaaataacatgtacgctaaacatgtgtaagcatatgtatgacattatactaatcttaccttaaataaacataccttaactactgaaaacataattaaactccagcagcaagaacagtaaccaaaaacccaaaaacatggattaaacctttttcttcaaaaatatgaaactaaagagggaactacaagagacttacctagagttcaagatcccttaaaatctgttggagccaacaagaaaatggagaaaaacacagcaaccccagctggttttgagggtttttgaaagagagagagaacttgagagtgaaatgtaatcttttggaaatttcttattttcttgtaaaatgaatagattaatctttattatcatattaatatcagattataactcataaaagaaaactaattaattaataaaactaagtccactaaaggacagactactaatggcaaaaagactattttgcccttcccctagcaaaaccatttaaaaggcactaagggtattttggaaaattctaaattcccgacaaaactggacattcccaatgtctaaatatattgccccgctaaactaaaatactaagatgtgattctactaagtcacacaccgcattccaatgttgtcaggcaccgaatatgcaaaaatatgaaatttctctatatgacatataaaatgcattctttattcaaataaatcactataaatta

SEQ ID NO: 171252 - DNA, 616 bp, Cannabis sativa
gcgtccgggagacttctcaaatggaatatggagttaagccaatttgatctacactacattcctcgcacctgcataaaaggataagcgttagcggacttcattactgagtgtcacgaggcagaggctaacgcaagcatgcgtacaacgcaacaaaaatagatccagagtaggggtagcaatgatatccccgaacgaacttcgactccagacagccctgcggtttgaattcatagcttctaacaatgaggctgaatacgaagccctgatagcaggactgagattagcaaaagttgtgggggccaaaagagtggaagtctacagcgattcacaattggtagtaaactaggtgtcgggagagtatcagacgcgcggagaaaagatggctgcataccacgagttcacaaactacaatgtagaaaggatccccagagaaaagaacgctcacgcagactatttggctaagttagcttcagacagtgaaattgagaaactgggggtagtacctgtggaacgcctggtggagccaaccattagagtcaagagcaccatagcaacagttgagcaagagctcagctggatggtccccatcatcaaatacataacaaaaggtgagttg

SEQ ID NO: 171253 - DNA, 566 bp, Cannabis sativa
gctcttttcagctgcgagatgtgggaaaccgggtggatagatgaggaagctggtaactctagtcgataggctactgcgcctaccttctctgtcaccttaaaagggccataaaactttgcagcgagcttctcgaagcgacgcctggctaaggatagctgttggtaggggcgaagcttgagataaaccaagttaccaacttgaaattcctcatggtgcctgtgcttatcagcttgatgcttcattcgctgctgggctcgaaggagatgcatccataggtcatcaatggtggcatctcaatcagccaacaaggtatcaactgcggacacatgcgaagatttttttttttgaaaaagagaaagaggcctttgtctaagactgactcccccgttatatatagataacctcacttatggcggaggaataccatgattacaagtgctacatcagaaaatatttaaaataaagtcagtccaacaattcataagacacatcaggacctattaaacaacattgcacaacagtctccaatctctattcaaatctaagaacgaaaactgctcaaaact

SEQ ID NO: 171254 - DNA, 1128 bp, Cannabis sativa
aataataataaaagaaaagaaaaataaagatattgtcaatgatgtctagtgattgaaaaatacagaaaatctcaatcatggttagttgtgaacacttcgggaaaattttaaaattgtgagaaacttatgggttctaaaatgtgcctatgatatcgttagttaaaaatttcttttattttccaaatatctaagccatcaattcttacctaaaaaagttctattaattttgaaaagaatgttgtcaacattagtggagagaggtaagcatgcaagcatattggctattggtttgtggaatgatttgatagagtgaaaccattataacattttttcgattgtgaagtaaggattgtatctgtgcatggtgtgataaaatgagcatcccaattaattgttagagtttttggagttgaaaatctagtttaattaatggaaggaaatggaacatgagccagcaacactataattatctgacagcatagttaaattgagtcttagtgttagtcttagtcttactcgagggcgagcaaggatctagtttggggaaattttgttagactgtttttagcctaagttctgggtcgatttcataagtgttttctcacataatgttgcccttttggaatggttttacgcttgattttccttgtttcaggttcccaatgcattatagctcaaattgtatcaattggtgaaaagacggggcattctagagaaaaatctgctgaagctgttaaattagcattagtattcgtgaccaggcttgcccatggtcgtgacctgggtcgtgactaggaggcttggcagaaagggtgtattttccaattggcctatggtaagccctagtcgcgatcaggggcgaaacaccggatttttggccagttttgaaatttttccattcaaaggtagcaaacctaattcctatataagggagtcgagtttaatgacgaaaatcatcagagattagccctgaaaagtgaatgaaggaggagaggaagctattgtgacgatccggagcgcaatcaccaactagttctttcttaactcttgaatttttttatgttaatttctgtactaaatttgattatggatgttaatatggtttttatgaactagattcccaattgg

SEQ ID NO: 171255 - DNA, 1017 bp, Cannabis sativa
  modified_base (852)..(861): a, c, t, g, unknown or other
gtgtgatctactagtcgaggtagttgttttgatatatgtcactcatattttcgatgatatttttagtatgccaatttctaccaccaccaatagttaatgtgcacaatttatgcggggtttcaaaattccaaactttaaatatgatcatgttatatgttgttggactcggttttgaatgtagaatgtaatgatgataattattaccatttaacggtataggtgggagtgatatctaagattggactaaacaattggagctcaagacttgagaacttaggatcgtcttcttggacaaaatttaacgacttgagagaggtaggggctcaaattggttattggacttgattttatatgtgttgaataacactagagtacatattccaatttttatgatttataaattgtttgaaaaattgaaaatttaatctgcatatttttttggagtgctctgaggtactaagtgccaactatatttttgtacaaatatttatgtaggttataagttttggatttattcaaaatacaaccgttatgctgtcagattttaaaaaataaaagtaaatatgttcttttgttatttttatttacctgatttttggttatattgattagagccatatttactatgtcttgtgcatattgttgtttcacgacctagactctatgttatcataggtagataaggtgtacactcacctgtaggtgtaaggtgtacactcacctgtaggtgaaagacctagaatttgtacaggaagtgagttaaatttgagccccaacattttggtggttcacgactacctagtttagaatgtcattttttatgattggtattgagagctaagggtctagtgnnnnnnnnnntatgcatttgaagcttgattttgtgattatttgtggtctctctattttatttatatatttttataatggtggtgagatgttttatttttaaaagctaatcatgcatgaatttttattaaaccaattgtccggaactcagtttaatgctagtggatg

SEQ ID NO: 171256 - DNA, 581 bp, Cannabis sativa
taacagcatgtgcctcccacatttctcggttattaacttttaaggaatttcattaatataagatttgttacatttttttaaaaaaaatattttaatgattggcaactcttaaagtttctcactatgatcccacaccacattaaattaataatttttttaggtaaaaattattttttttataaaaaatatattactcattgtcagctctatgtaaaatactcgtttgacgagcacttccaaatatatcgtaagctaaactcgtgctgacgaataactaacccgcaatgaatagggaaggtatagtaatgctataaatgacccagtataatatcagcaaaagaacattctctcgtgcttccagacatcttaagttccgcatattcttgttcagtcagagggggtcgactccgtaaaagatgaaattcgtaaattgaaattcactgaaatcagatctttgtgagatcgtcaatagtgtaccaaaggtttctttagagtatactaaattattatagctatccttcttctgaaacagcaacgaaatttcccaatcagtatcgaaacgaagtgttagagaatttctt

SEQ ID NO: 171257 - DNA, 658 bp, Cannabis sativa
gagtccaggtctaggtccgggtcggatctcgggtcagggtcagggtcaggtcgggtccccggtccagttatggtctgtgtccgggttcggtttgggtctaatccgtgtccagtctaggtctaggtccctagatctgggacagagattggagttgaccctgaatgctttgtaaatattttaatacaagctaatacatatcttttgttatgtattaattaatacaacttatattatattaaaaaatttagctgtaataattaatacaataattattttattcaaacataatattatttattatttattatttaatataatacaacttttatacagcgtaaccaaacgagccatatgtatgtaatattctttagcaaaccttagctttaagcccacaaccataatgtaatccaaactcttaaatataaataaaaagaaaatggaaccgaaaaatggagagacagctcttagtgcgaaacattcaaaagctccattatttagagagctcttatgtatgatagtgtaatcaaaacttaaaagcttatatgttaatacaagtggttatataacgtatgagttttatttatttatttattattttatttaaaaaaatttacatgaaaaatccattttacacaatttattacaaaattactcacac

SEQ ID NO: 171258 - DNA, 763 bp, Cannabis sativa
aaaaaaaagaaaaaaagaaacaaaagggagaaaaattggacactttaccctctagaagcggagcccccaacagccaggtctttgccattagccttaatcagccaccaatcttccaaaaatacctacacaatcggaaacttcaatgttgagaaatttggagtgatgattgattagagaaaaagtaattcccattgaaatgttgagaaatcttaaaactggtgaagtaggcaacgaaatccttacggaggaaatcttggaatagggcgacgaccaggtggaggcgttcatcaatccaaattttgtctccgcttctttcattttcgactgtgggattttcacagtggtgtcctcaaccttcctcagccgcccacggccttttttaggtacaaccgcctctttcaacgcactaacttcatgtttctgactattcatgttttgacgcactaacttcatgtcgccggagtttgccctaactcaccatggtttgtgagatggaagctaaatagaaaaactctaattaaatcaataaatttacgtactaaggcacaactcaacaacaaatgataataaacattaaacttgaaaagtttcttgttacttaaaaaaacaattagaaagcagctaatgtttacacaactcaatagcaattatctaatttaattggttgtagaaaatctcggttaacatttatgattagcgctcttactcaattacactaccatgttcccaagatataagcattgggccgatccaattagttagc

SEQ ID NO: 171259 - DNA, 873 bp, Cannabis sativa
gtgagagtggttaaagagtttttagatgtgtttcctaaggaattacttggtttaccaccccaacgtgaaatagattttgttattgatctgataccaggagcagagcccgtttctaaagcaccatataggatggctccatctgaacttaaggaattgaaagttcaacttcagggaatgttagacattgggtttacccgacctagtgtatccccctggggagctccggtattgtttgtcaagaagaaggatggatcccttcggatgtatatcgattactgggagttgaacaagcttacagttaagaacaagtatccattgccaagaatcgatggcttgtttgatcaacttcaagggaagacaatcttctctaagatcgatcttcgctctgggtattatcagttgagaattcgagaggaagatattcctaagactgcatttcgtacgaggtatggacattatgagtttctagtgatgttgtttggattgactaatgctccagcagcctttatcgatcttatgaatagattatttaaggatttccttgataactttgtcatagtgtttatcgatgacatcctcatatactctcagtcgaaactagaacatgagcaacatcttcgaatggtcttacaacgacttagagaaaacaaactttatgctaaatttaataagtgtgagttctggttatcccaagtatcctttctaggtcatattgtcggtgaaaatggtattatggttgatccaggaaagattgaatcaattagagatttgccgagactgaagatagtttctgaggttagaagctttattggtttagctggaaactaccgtcgtttcgtagagggattttctaagatctccatgccattgaca

SEQ ID NO: 171260 - DNA, 585 bp, Cannabis sativa
tctcttatgattagtcatttgttttctttgtttctacgtggatgtcggattactttatgatgatcataaaatctcttatgattagtcattatccttctcttcctttattttccttccaacgacatcgttttgtatatgtgattttgtttaaggttttttttttgttatgactaaacccttttaactatcattccacatgagcttaactttttaacttcaaattttaatagtaaaatcttccaaactactaaattgttcgtaaattttaaggtgtcatttatttttttacagttaaatgctaacataaacatgaattgcttatgtgtacatacacttttatattaatacacctaatattattatttaaaaaattataaaaaacttattttaaaatttataatattttttatttttaaatattttatctaattttaaaataataatattaggtgtaccattatacacctgtcacaacaagagtgtacacataagcacttcatgtggcagttaattagatgacattgtagtttggaaagctttaccaccaaaatttgaacttagagggttaaatgcaagtgaaacaat

SEQ ID NO: 171261 - DNA, 878 bp, Cannabis sativa
ataaacgactcggtaaagtttccgttttccattataggttatgataggttgttttcagttgctttttaaatgtttttaagtttagatactgtattaaagtttttaaacagttgttcaaccttttgatttgtgttttcgtgatgtttttgtttcagcatatgtgtaaagaccgcttatggttaatggttaatatcttgaattatttaaggtttatgtatgagattagttaataattatgaaatgtaaattttgggaatatatttaatatcatttaggttattatggtattttatgttatttatctaatttctgtgtggtgttcggaagctgtggaacgcggcgttggggcctttagacagtcatatgttatattttgttgtatgttatttgttcggggtattttgctaagtattgaattttcgggtttaatgttgaccgaattacccttgtgggttattagttatttggtaaatagttggaggggtatagtggtcttttggacttaattagtattttgtcttttatgcaattttatgctgattatttagtttagtattgtttaaaaaaaaaagagaaaagttgaacccttttgtcattaatggaaaatttgagagaaacctagatttttcctaggtctacctttccttctctattaaccttcaagcatagcaaaggaagagagaattcattgctgtgattctctaagttctagcaaggttagacaattctttttttttcttttgctgaaattacctaggaaaaagctagaacttcatctttttctcaatttttctctccttcttcctttctttcgaaccaccaagagtccagctgaagtgtggatttcttttcagcttaattctgtgaattcagaggaa

SEQ ID NO: 171262 - DNA, 839 bp, Cannabis sativa
ggtacttatattttgggtaactgctatatttcaggtaatcaaatattaacttgggtaaccatctacttatatttttggtaactaggtactcttgggtaacaatctatttatattattatcttgggtaaccatctacttataatatcggtaaccagatactatcattggtaaccaatcacttatatttttttgcaactaagtacttacattttgggtaactaggaacttatattttgggtaaccatctccttatattttgggtaacttggtactcttggacaacgatctacttaaattttgagtaactagatattattttaggtaaccatctacttatattgtgggtaaccaagtacttatattttggataaccaataactatactttgggcaaccatgtacttatattttgggtaatcacctacttatattttgtataactaaatactatctttgataaccaattacttatattttgtaactaggtacttatagttttggtaaccaaatacttaaattttaggtaactagaatcttatattttagataataagatacttatattttgggtaactatactattttaagtaattaattacttatattttgggtaaccagttactaatataggaggatgaagctcttcttatgatgagtggatcttgagaatagctataaatgcacctccaattacaatttagtaagtgtaaaaaaaatacaataataaaaataaactttgatataactatgtaatgttaaatatgtgaaaataaataaatgaaaaataaataagaaaagctagagagggtgaaagattaaaaaaatgaaaacataaaaaaa

SEQ ID NO: 171263 - DNA, 685 bp, Cannabis sativa
ctaatgaggacaatcttgggcaaaagactgaatgccaagcaaatgaacaagtttttatgggcaatggcagtggcctacaaatccaaaacataggtaaaacacaaatcttggcatcagataagtccactcttctcactttgaataatctattacatgttcctcaaattactaagaacttgatgagtgtttcccaattttctgctgacaatggtgttttctttgagtttcaccctaacttttgtcttgttaaggatcagaagactcagaaggtgttgctgcggggttcacttgatgctggcctatatgtttttcactctctaaatctgccctccattcctgacagacaccagccttgcaacattcatattccattagatgcatcctgtaatacagctcatagtacttgtaacaatgttcaaaatgtaaccatttcaaacaatgaatcattgtttcatttatggcattcgaggctaggtcaccctgctaccaagactgtcaagagtgttttgaacaattgtaacatccataatatcaataaagaaatctctggtttttgctctgcctgctgtctaggtaaaatacataaatttcccttcccaaattctgacactatctatacacaacctctccaattaatccacactgacctatggggaccttctcctatggtttcatctaatggtta

SEQ ID NO: 171264 - DNA, 836 bp, Cannabis sativa
  modified_base (765)..(808): a, c, t, g, unknown or other
aattatattaaattaaaatttatgggaattgatattgagatgcaccaataacgatatgttatcttttgtggtgtttaagaccttaatgtgtccctcaacatttttgttattattatgtacatgtctttattaatttatattagaattttattttttttgttattattatatataagtttgtaaaaatatctctaatgagatatgtaaaaattgtactatatttgaaaaaaaaaaaaaataacttgtgatatatttgcatcaattttttagcattatactccaatgcatatttgcaaaacttgatgtaaaatttatttatttattcttttttcttttgttatgaatgattgttaattttgttttacaatttttttacaacaacttctctcggtattttatgtataattttttgtacaatattttttttctagtcaattatttttattattatttgccacattaagatgtctaacactacacaaatatatgacaataattattagttagtagcttcccatattattcactaaattaaaatttttgagactcgatattaaaatacacaccaataacgatatgccataatttatggtgtttaccacctcccttagaattttccttatcatctccaatggatgatgtataatttaagttaaaaaaatgagccagtattatatttgacccaaattttataataatgctccaatacatttagggtaaaattattccttttttgatagaaatatgtaacaccctaactaacannnnnnnnnnnnnnnnnnnnnnnnnnnnnnnnnnnnnnnnnnnntaatcaacgaggtttatagaaaacgtga

SEQ ID NO: 171265 - DNA, 572 bp, Cannabis sativa
aattgggttttaatgacattttttagtgatttgtacaaaaatgcatgtcatggtttagggttaagttttagtgacacacacaaaagaactctaaaaattcaatattagtatcctacaatgcgtgtcacttaaaatatggtaggtcactaaagaattactcccagaatttctattattttttttttttttaaaaaataataatattgacctatagtaacgtgttaggtgtgattgggtaaatatgtagcgacacatcttgcgagtcaatatatcataacccaattttttttaaaaaaaaaacagtatagttatatgaaataatatattttttttattcatataaaatgtattttttcaaagaaagaatataagagtacatttattattttcattaaaaaaatacattttaatcttaaataataaacaaaccctagtagtagcagccactcccctcttaaatttgaaaagggatcccttagggcatctctccaatggagaaacctaaatttggtgttaaattaacaccaaaaatctactatttcaacaccaaattttttttcaattccaaccac

SEQ ID NO: 171266 - DNA, 699 bp, Cannabis sativa
catgaattttgcaaaattgccctgttgatatttatttgtacatgaaaaaaaaaaaaaaataggcaaaacaacagcagagatttaggacagaaatatagtgaaaaatctgaggtgaaaaaagaagagctacaaaaggaggtttataatgggtcaaagaaaagtagtagtggatcaaggaagtttggttggaccaagctgagcccatggagagcctcagaccaagaagagtgcaccatttgcttggagaggttcagacctggtgagggcctggttcacttgccttgtgcccaccggttccaccatggctgcctggtgccatggctccacaacaacactcactgtccttgttgtagaatggttataatcaccacccaaattagttagtgtatacttcaattttaggccaatttgtaatctaaacaacttttttcaatgcaatagagttgttgtgaacttttgtaaattttgtaacatggatgttctgtttttttggacttcaaaaaataaatcaaaaaatatttgttgcagatgggcatgtgcatggctcgttagtaacgtcgtattagctcgagttatattgaattgaattattatatttttatataatattgtgttaaactttaatttatactaaaatataatatatttagatccccataaaagttaatactacatatagttttacataaaaatattgca

SEQ ID NO: 171267 - DNA, 603 bp, Cannabis sativa
gacatctacttcttgtaactttttcagtgactgtttaggcgacgatgacttttccagcaccgatgaattttcggtgacttttttagcgtcagtgacttttctggcgaaacttactattacaagttttattaaatttatttattatttcttcccattatttaaactttaattatttgttagtcctatattttttttttttttgcattatttatttatgccataaaaaagtaaactttaccccattttttcatatttatgaaaaaacccttttttattgttttcgtattgtttttataaaacaccgttaaatgcaaaaaaatatttatatatttgaacgtaaaattataaatataacactttgtaaattttcaaaattttatcgatgtaagttaagataataaatatatataattttaaattataaaatatcaaataaatattattgaaaatacacgatactgtatttaaataaaacataattatggtagacactctataaaaaataatatattaaaaagtaaggatcatatttttatcattattattttttattttgtctcacattttacattacactataaatcaaatttttaacattttttt

SEQ ID NO: 171268 - DNA, 555 bp, Cannabis sativa
tatgcattaattctccctaagctaccattactacattaaatatctggtggccgaaaatcttggtcaacactaacatattaatgttatatataaggaaagtttagtatatatggtgtaatctataatttttttttatatgtttatttattttatgtatgtaatgtgtttgaaaagttctgttcttattatttattttaaattgttaatgttaatttttttaggagttaaccgattttctcggtggtccaataaagtctttctcttttatcagtggttctccgagtgatatcattctcggtatattattgtttaattagataaatttatgtaatatgatataaaattaatgtaaattgattagtctcaattaaacatgtcaattcacaattgatgcatattttaaatttattttttagatatgagttcttggtgttgattgaagagtgcaaaagtagctagttttatttgagaaaggtataattacaaaaactttaaaattctttattttggtggagtttgaatatcttagatattcattcgtagtgaagcaggttc

SEQ ID NO: 171269 - DNA, 874 bp, Cannabis sativa
tatcacttaggcataaaaaaaaatccccgataggttttcccactcacccagcatctaggttgacatcacatgtgaacctaggcactggatgtcaacctgggcattgggatgtcaacttgggtgctaggcctggaacaaccttcaattaaatggtcataactcactcaatattgatcagattgatgcgattgaacttgcatttcaaagctattttaatgctctatcatgtcatgtctcacatttcaatcgcaattctgaagttatcgactccaaatttcaccccaagagagtacgaatttaaggtgcgacttactcgggctgggtcccccagggcgactcaagctccaaaaattgacaatcaaccttcgaagttaattttcaccgttagatcatcatctacgatcaaaaatagcctaaatgcattttctatatttttttggattattttattcacatttaataggacctccttcacttataaaaaagagagctccactagctcattttttaagttgagtttagtagccataagatcagagcatctctctctagaaattagagcatccagacttagttaacttttttgtaattcatctcgtgagaaataaaactcgaagcaaacgttcatctgatccaatccgcactatttcgatcgtagtgcatccgattcgcactaaatgcggatttcatattttggatccaatccaatccgcatagtaacttaaatccaatctaatccaatccgcaaaagtgcggattggatcaattattttggattggttactttgtaatattaaattatttaataaatattaaaaaaatatatttgtgttcgcataactaacaacaaataaaacaaattattattgtttta

SEQ ID NO: 171270 - DNA, 688 bp, Cannabis sativa
tattaagaatgaaatatttatgttctatcaattattatgacaaaatttatctaaaaaagaaattatgactgattaataatgagtaattacacattttgatttagatatataaaaatgtataaaaatataaataatgtatatttgtatatgaatatgagtataatatggcaatggcatcttaaattcttctacaactatttatttatttttaatttttatagtattgtcttccgttttttattatcttcaagttttaatttttaattattactttttatttattatcttcaatttttcataataataaattaaaaatagtaacagttaactaattcaataaaaaaatgataacataagaataataatttataataatgaactaatgttttataccaagttaacaatggtaatagttaactaataaataaaaaattaatgacaaataatattaattcatactttgctatatattgaagcattgttactatagaattcattgtctttcaaatttctgtaattttaatttacatcatttatcactctccctctctctccttgattcttatgttatatttgtaagtcttaaaattttattgccaattaattatctagcttttctctttgttttatttgttattgtgaaaccattttgatgtttatttgtgttatttgtctttttttttttttt

SEQ ID NO: 171271 - DNA, 565 bp, Cannabis sativa
gggtgccaaactcagggtgaagtcgaagaacaaatacgaggttgtgctctacgccaagtcttttgcttatgcttcaaagactccttacggtgaatgccacaagaccaagcctgtgcaccctcctccatatgtgtacaagtctccaccaccaccaactccagtatatgtctacaactctccaccaccaccatcacctaagtacgtgtacaagtctccacctccacctgctaccccaacatatgtgtacaagtcaccaccaccaccatctcctaagtacgtatacagctccccaccaccaccggtgccaacttacgtctacaagtctccaccaccaccatctccaaagtatgtatacaagtctccacctccacctgctaccccaacatacgtgtataagtccccaccaccaccatctcctaagtatgtatatagctctccacccccaccatcacccaagtacgtctacaagtctccacctccacctgctaccccagcatatgtgtacaagtcaccaccaccaccttctcctaaatacatatataaatccccaccaccaccagtccca

SEQ ID NO: 171272 - DNA, 726 bp, Cannabis sativa
  modified_base (680)..(681): a, c, t, g, unknown or other
aacttggcagggcattaaatggggccgtgatcttttgagaaaaggattgagatggaaaatttgtgagggtcgttctgtaaaatgtgcttatgatgcttggatccctggtcatcatactttcctcccaacaagatacattggttcttcaaacaatgttgtagctattttcattacggaggacaaacagtgaaatgttcccatgttacaagaggttttttgtctgattgatgttgagaatatcctcactataccattgagctactttagccccaatgataaacttatctggcatcatcacaactctggtatttatacggtacaaagtggctatcattttgcgatctctcttgaagatgaagaccttggctctagctcctcgacatcccagtcatggtggaaattcttttggtccctacaaatcccataaaaagtcaaaatctttgcttggcgagtcattcatgacgctttacctgtggctacttcacttgtttgaaggaagatcattaccgattcgacttgctccatctgtagacaagcttgggagtcaacgggacatgctctttctagttgtaaatatgccaaggctatttggagagctcaaaactttacgtttaattggatgttacgaaaattctgtttatcacgcaagtgtacgtatcaagtagtatctcacgcaagtnnggtcgaaccacagggaattgaattaagtactactaaactatactt

SEQ ID NO: 171273 - DNA, 745 bp, Cannabis sativa
acttgagaaattgtgataatatctttctatcaatgcattaaatctcccccaagaagcataaattgactcactgtattgttcagaaaaacttacaaggtaatcttgatgtagcattttttatgtacctcacaagacaaactcatataatacaaatattagaaaaattaaattcaaagaaactaaattagaataaaatttaattattttgatattagctaaaatagtccccgacaacagtgccaaaaacttgttgtgaaattttctaatatgcaagtgcacgtatcattacaagtaatatactcacgaaaataaagttgaaccaacaaggactgttgttaagtactacacaattaaatgcttagttttatctggtgacaataagttttaaagaatatttaaaattaaaaactaaattgaaagaagtaaaagaataagcaaataaaaatgatcaaagtttaacacaattaatttcaattgtatcaatttcttattgcctaatacaattttaatttatattctaatttcatgtgatagcggattaactacttcaatctatattattattagaatatatagaatttaaactatatgtaaaagtcctaaacttctgtagtaaattacacatataatttgcattaaagatagaaattataattgctacatagaccatacaagtactttcatccaatattaaaatctatgttttttcactatagcataatcaatactcacttttcaaatttta

SEQ ID NO: 171274 - DNA, 739 bp, Cannabis sativa
gaaaattagggttttaaccctgctggaaggctatataatggacccttttgacactttttcaaagcaacaatcattagggatataaattgaagcaaaagcggctggagacttttatcaatatttttcaacgagttctttttttctactcttatcttatgttcttaattagttgttgtcagttgttttcaatgattatgagtaactagactttttattagggtgttaatggagagtgtttgacactttattttggttttaatgtaatttagttcatcctcaattttttatgtgcatctatttcattcgtacttaattacttttaaatgtttgatcaccaattaattatttatgatttcaatgcaaattctgagaattgagtgttgattatattatagtaaaatatacatcgattttgatataggacgagagtacctatatggtttgtgtagcatttatgatttttatgcttaatacctcctatatgtttaaatttatcacgagagtaaaaaaatttcatataaattgagatttatatgtcctagcccgattataagttttttagtgaattcattatcacatgaaaatttgaatttgggaattaaattatgttaaaccatataaagtagattcaattgaaattaatcacgaaaagctttaattattgttaaatttgttgtggtattttcaacacgcaagtatacgtatcgttaacaagttatagactcacaaagagtgaggt

SEQ ID NO: 171275 - DNA, 1115 bp, Cannabis sativa
cgggagagaaacctaccattccaattgttggtacaattgataattttatccttgagaaacccaagcatagcagtgtttttcctaccaattatgtttggcaaacccaaataaagagagtcatcagtagcttcaggcataccaagagatgaatagatttgatgtcgctgggttgcttcggtattgggactaaaaaagaagcaagactttgtagcattcaccttttggctagaggcaatttcaaaagaatggagcatttgttttacactgacagtcgtacttgtagtagcttggcaaaagagatagctgtcatcggtaaagagcatgtgtgtaacagaaggagccccattagacacacgacagcctcgaataatatggtcatcttcaaactttctgatcagggaggagaagccttcagcacaaatgatgaacagataagttgataatggatctcctcgaatacctcggaagggagtaatcggtctcatgatatgaccattgtgtataatggaatatcgtacagaagtgacacatttcataaataaattgatccacttaccaacgaaccccatacgatgcataaccgctaaataattttcctagcaagttaattcctctttcccacaacaaacaagtaacatttaattaaaaaaacacaattaacacaataatttttacaagactcaaaagttagcttactaaatggaaattaacctaaaactacttaaaattaagcaaccaaacacatttttactactctcctcacaatattttcaactttaaggcataaaaaataactctataccatagagttatcaaggagcctggcaaggagcatttggtttacaagcttaataagtctatttatggacttaaacaagcatcaagacagtggtatctcaagtttgatgtagttgtcactataaatgatttcatggagaataaagttgatcaatgtatatatatgaaggtcagtgggagcagcttcatcttcctggtactatacgttgatgatattttgcttgcttctaatgataaaaatttgttgtctgagaaaaagcaatttttatctgaccattttgatatgaaagactttggtgaggcttcatatgtacttg
